United States Patent Application Publication US 2021/0254056 A1 - sequence listing, part 34

SEQ ID NO: 66314 - DNA, 525 bp, Homo sapiens
ataactattattaacttgtttaccattatgatatgttaaaggaattatttttagaaactgatcaaagaagcaataggagtgaacaccttcctttactctactaacctgcaggacattgcccataatcacactgtcaactgtttcaggtgagactttgccagcagacaaggcagccttggcagcaaattcagacaagtcagtagcagtgaagtctttcagaaggcctccgtaagctccaaagggcgttcgcttagcagcaactacaaacacacctattgcaacaagaagagatttgtaagccatcacaggttagtaaatacctctaaatgcttcgaataatctcactgtgaaaccttacacaatttaaaattagataatggaaatttctgttaggcaataatacctagaacaagtcatacccatggaagcagagtcttaaggactaccagtttgacagtttgatctttacctacatgcaggtaccaagaactgcactgcatgctgttaaggaagaagaccaccact

SEQ ID NO: 66315 - DNA, 3266 bp, Homo sapiens
tcaatgtgcatttttttcctttttgggtttatagtatttgtgaaattttcaaacaggtctgtattataagaaagggtaagaaccactgataaaatattaaaatgatatcagtaaaaatattatttccttttttagaagatagctcatgacaatgcaccttttaaatgaagtgtaaatgcctcgtctaaaaaaaattcaccacgctgctttatgaagtaaatgtagtaaattcagtcaggaagggcactggcaaatgaaatccacgttgcaggaaactgtaaacactgcatttggtcccagaatacggatttttcccttgatttgttcccatgccactttggttcttctcactttcagatccccctaaccaatgcttagctggcatctccacttggctgcttcacaggcaccaaaaagttttctgcctaaaactgaattctcaatccttctttccacatctattcctttcccaattttcctcactctgtaaagtggcatcatcatgaacacggttcatcaaaccagacacttttcatcattctcgacatttccttcttatatttactccaccacatccaatccactttctatcaaatccacctccaaatctatctcaactcatccctccccttttctccccaattacactgccccacacgagtcaaagccatcatttgctgctccctggacctctacaatagatccttaaatggtctcttcgccattacacagaccgccccaaattcggacagagtggaaatcagatcctgtcattaccccgctttaaatccctgtattgccttccactgaatttggaacaaaaccccaccttcttacagagcccacagggccctggagcaccaaaatgcttggttcttagatcctgccaagctttttcctgtctcagggcctcgatatgtattccacctcaatgttcttcgactcgtacatccttaaagtaagattccattgactgtgcccacttgttttgaaaagggagtttattacacagttgttttaaacaagttcataaccctagaacttaggtatagagtgaccgctctaatctaaagcaacagaagggaaatgggagcagggcaggtcttccagcagaacaccagctaccatttctgcaggcctctccatcgattcacccggggagccctgaccaccgaggccgagcggcgggctcctgtgcgcagctgccccgcagcaggcgcccgcggcctatggcgccgccccattttttctaatacttggactcgaactagtggggtcactgttaggcgaagaaaggaatgacctccaaggtcacatgcaagcaaactttggtctcaactaaacaggaaattgcaccgaaatcgctgtcgctagcgccttacaagtaagggttttctccttaacccaaacaagcctttcgggctgggtttttatcacgtccgctccaaaaccgaggaggttgagtgaacttcaccccacgaccccgactctccgcggcggccggaagcggaggcctggcctggggagggcaggaccccgaggggcgaggagaggaggagggggctgcgctcacctcggagcagagccatggcggctgctgggtcgtcggcggcgcgggtctgtggtgtgggggacgctgagcggccgctcgcaatcacccagatttcaagagcgtgggtggcgccccgagagccacgcccctgccctttcacctacttcctggggctccttggcggggtcccagcgtaagatggtcctaccccacgcgtagcgctgcccgcctcaccccagcccgagggagcccaggggacggggctcggatagaccacaacgcgccttgagagcggactctttcctcacatcctcatttttagattttctccgtttccaaaccgagagaatttggtttgacacctctcacccatcatatcctagccccgacaggcgatgactcttcccctttgtctccgccaacaccctaaacactgggcaggagccaagggctgaggaacttggcgcgcgggcggccgcggccgccagctgggggcgggaccgaacgtcctgtgggcggggcgcggcggcggcggcgggattggctggggcgggcgggtgcgcagtccgctgggcagaggcttgggccgccgagctggacccggaccggttttgggtactgtactgggggcagggcagagaggtgggcggcagttggggtgcggtgattgtagtaggctagggcgctttcgggtccccattgcagcccccggatgagcccgcagtattttccttatatgatcaggtcccattgcgggcggcgccgcttgcccggagcctgagaggattatgaaaacgtggcgagcgaaatggggccaggggacctggagcaggggcgtgaggagagtaggcagcgggtgaggctggacgggagggaggtctagggaggcctctgccgcgggcactgtgagtcctggccgatgatgacgagaccactgcgcaatctgagttctgggaaccaggtgatggagtatgttctgagaacagactgaggccgggcaagcaggaggcggccgcggcaggggagaggcggagagcccctcgataccagggctcggagggccgggctgcctagcgagggcttcttttgagtgcgtaggggtggtgggtggcatggacggtttctctgagtcgtcagcgaatgccccccctagaatcctgcttttcaaacactttggtgacactcttgcaatgttggggtgtttttaaatccaaatttgtattatgaaaacttacaaacttacagaaaagtgggaagacttgtacagtggacacatatcgacccaattgttaacattttgctatattgctatccacctgttcttccatcaaaccatcttatctttttaatgcagaccttagtactctacacccatgaacacatcagcacacattattcatttacagttctttttaaggcaaaatatccacgcaatcaaatgtacaaatcttagacaagcttcacaaatgctcatgtataggccgggcgccgtggctcacgcctgtaatcccagcactttgggaggccgaggtgggcggatcacgaggtcaggagatcgagaccatcctggctaacacggtgaaacctcatctctactaaaaatacaaaaaaattagctgggcgtggtggcgggcgcctgtagtcccagctgctggggaggctgaggcaggagaatggtgtgaacctgggaggcggagcttgcagtgagccgaga

SEQ ID NO: 66316 - DNA, 7928 bp, Homo sapiens
aatatcgtatgagccaacttatatgtgatatctagaatttacatatagaagcctacccagggttgaagggaagggagaatattatttgcccaaatgggtagtgtttctgtttaggatgatgaaagaattttggaaatagtggtgatggttatgtaatattgtgaatatacttaatgccacggaactatacacttaaaaatggttaaaatggaacacacataccccaaaaccatgggatggagaagagtacccttctgataaggttgtgaggatttgaagagttaacaggtgtaaagaacacagagtaccatcactggcacatagtaagtgctgtatttgctgttatcagttttataatatgctcctttgttcctcctgcccatgcattaaccattgacctctgaaccatgaactgctggtagaagctgtacttttacaaaagtcaatagggttaactgtgggagtattgccaaaaaggaaaatcaatatatcctgattttgtgaaaacacaatttatttttcttaaacctcgaaacaggccatagtcagtaaatacatagcagcatttgaaaatcgctgggaaataggtttacagaatgaagtcagctggagcatggcactgtaagatggctctatagtggcaggggaacctagaattgcccacgttttcatccattacctgaattatgaatagaaagcatgacttaaatttccagtacccgtgtgtttggcatcttgaaagatgggccaaaattttaaagtaattttaatcatttgaaaaagtggtttgaaataatgggagagaagtttaaaggagagaaaggtatttagggaggaataagcaactagcctcactaattcaaggtactcaatgatggctctggtgtggcctggcagaatgattctctgggattgttgacagctcacacacagcccactctgaggtttgctgcgtttattatcatgaacctatcacaaggcatatgtatgtaaaatgtgaaatggcaggaggctctgggaaaaaaagtcatctttgtagcacttaagggcccttgtatttctccacattagttagatgtgacagtagacttcactacctaaagggtttgaagaaattttagagagtataaaaatgggaaaagaaagtgaaatattacctatattatcacaattcaacagcaaaaggcatgtatacttttaatcaattaaagtatataaggtggtcatttcacagaaatcctcctgtgaatgctttggtgagtttaacaacttcaaatttacatttttaaaggtcagtacaaagctataaaaagcccagagcgcccaagcaatggtttgctttaacaagtaacttgtctttatcacacatgtgagttcaaatgtaggagggcaggactgattgttcaccatttcttctgagcattgtataggtagaaacaacataaagctatagctcatgaaaaaaatattttgctagaactgcgagacactgaaattgattactgaggaagattcagaatctgactgtacatattttgagagaatagttgggcttaacctccattatattttccctttgtccttgatccattaaacctgcagtatgatgtggcatatattttttaacctgaattctcataaacagtggggttgccaatttatgagcagttatagttctccctctaatgtgtgtctcagatattcgaaactaaacaagactttctaaacttgcacttttgtataaattatcagccctccataaaaatccatataatgggtccaggttcagatatctcagtggcttctgtcatcaaactcttcccattcagcagctgactatgagcatcctaactggatcctttctgtcagcgccacccacaaccccattgttgtatacatgttggtgagtagagagactcactctgcctgccccattctgcggcctgtgtctttaacaatcgactgtgtttctgtcattgcccttaggagaacaacctttagtctgactaggcaccacttcccagacgttccctctgttggcctctgttccctacttagatgctgggctaaagttcatttaggctttttttttgccatggctcttttcaaacccctttttagctcttttcagggctctctaaatctctggatctacattgaaacactgtaaggagctccaaataaaatcccaggagtattccaaagggaacaggttcttgtacaaagctccatgtttcctcacgtttcttcagtgtctttgataaacctccatttggttccctttttcctgactctccctctgatgacttccccctgaacccctttttaatccttgttttgtgtcaatatcccttcactggccaacaaggtcatttaaaagtttgagggagtgctatgtctcccctgaggtgctccccacaggtaatcatgggagaagtgtggcctgttttctgaatcactgcgacatgactatcattccaacactgtcacagttactatcacatgcaaaggtcaggcgctcagccatcaccttgggctcagcttaaggaagctcatgtttaagtaaaacattcccatcatcttaggaaaagacagatttaaataaccgttttccctaatacattttctttcaagcattttcctaaaagcaaatattgtcttttttttttgagacaagagtctcactctgtcgcccaggctggagttcagtggcgcaatctcggctcactgcaagctccgcctcccaggttcacgccattctcctgcctcagcctcccgagtagctgggactacaggcgcccaccaccacgcccggctaattttttgtatttttagtagagaccgggtttcaccgtgttagccaggatggtcttgatctcctgacctcgtgatccacccacctcggcctcccaaagtgctgggattacaggagtgagccaccgcacctggcctatattataagtcttagacaaagatttaagagctcaaattgctttctttaaagaacatttcttagttccatttatggttagggctgatattctgctgacattgttaattccatttggtgctaatagttcagtaacatgctagtggcaaatgacataatgcttaaactatgtctataatctgagaggcagagatgataaaagttgagttttctgtgtgtaaacagtaagttactcatgggtgatacggttcatgtttacctaagtagaaagtctaggaatgtaaggtctcccagcatatatgtaaccagtattttagtaataaagagaagcaagattaaagcccaaatttttaatttcctttatagtcgtagactggactttataaaattactatcttaaaactcacctggattgttcgtataaaggccactgttacccgttcttcaaattcattcaggggagtataaaggtttaaaattttgacaatctgttggggataaaaacggaatttagcacagagctaaatgaacatgagacaacttttgaactttaaagaatatgtgacattggtacaagagtatgatcctctttagacaaggcccacaacacagatggagctggactgacatttacacttggagcctgcatccaggaaactagagcccacagctttgtcaggtggatctgagccctctcaccgaactcatgtctcctgtaaacccacctgcccctccccactatgctcattggtatacacaatgaggagtttagaatgcagttgcctgaaatcctcagcctcatatctactagtaatttaaaggtttcttctgaagagtactggagatcttaccttagatgagaaaggtcttgtttaatacctaactaccccctgtcccccaacattgtttacaaatgagtatttgaacaggagatactcttttgtctgcctaccactggtttggtggaagtagactgcccaaatgcaatgccagctgcatctagaaggaaacttactttaagtgaaatgtatttaaagagaagaaaaatgtttgaagactttctggaaatgtttacagaaggaagcagttttttaaagagttagatatttaatattttaatagtaagcagaggaggtaaggaaaggtgttcactttgctatattaagatgtgtttttctgtactgagtttggattttgttatttatctttcagggactggcaatgtgtcggcaactgaatcatggttatacattttttagggaaaaggaaagtaacacttaaatgcccctaagttcttaatgacttcatttaaaacaatataaatgagtgtgagtgaaaatatgaccatattgcaattagttttaaagaaaaggtttttcttacagttatatttgtaaagaaagcaaatacctgatgctgccaatttctgaaaatttgtggatttctatgtaagaaacattccagaattcattatatttaaagaagtttttacctaaacttaacgttttgtgagtttgctaccttatctttttaagtgagtaagagggatagagagttactagaaaacagtatctgtggcatcttgtttcacagaccaaatggtttttggttcatctaggaatatcccatcagctgcacttcaaaattgtctcattaggggtatataaagggtgggagtgcaacactaacaaataaccaccaacgagaacagacttggaatggactcagggcttccttggaataccatgttgacagaggtgcaaagtgactgtacctgctgggtgctgagggaggtacacagggagcagatagcctctgcgtcctcctgggttttcttctttaattgcaggagctgggctgcttggatcagaggttccatggtctgaactgctccactctggtgaaggtttcttccccgaagccactcctcaagctgacttatattgtaccttagccataggtagaaagcaagctatgttaagccggtcctcctaattcactgagaaggggacacctgttgtgttttgcaggcccgctgcagctagtgccattatttatctcacacggttaaaaagcatggcaagtgccttgcactcaggaactatttgttgaataaagaatgaataaatgaatgagtgggtacttaaaatcaagcaaagatgaaatacctgaagtgtctacataagttaacagggaaaaacaggcattaaatatactgaattgtaagtatttatatttaacattcacaaatgtatttatacttctatgtgagccttcatgcctcttaactcattgagttttctctctgacctatctgctttgtattcagtctttaacttagagtatgtcaacatctttaagctttgaactaatttgtttaccaagtcaaccatctcagtgttcgacggatttcaccaacaggtaaaaaggtgatggatttgagtcacagactgatggagacaaggactgtcaattagatttggatttcatttttagaaacagcagtcttgtgttctgattctagctgcagtcagtgagggcccactctatctgtgttgttggggggtgctcctcccttacctgagttgcatgcctgtgctccaagagcagacgtccttccgcaagagcaggttgttaagagtcactgcgttgatcatgtagaagagctgtttgaatacctgcaggatgatctcagggtccaagccctggtcacacatgactgtatgaaaggcattcatctggcggatgatagcttccaggcagtatgagttatccccatctgccatgctggaggagcgcttccggtagccggtgggcttcacaccagatagaccctgaatgctctcattttccaacatggcagaaactgaaataaaagcacagttagagaagcttgcattccccactaacaatgcaaagattggaccactcaaatcatttagtgctccgggctttagcaatgataccatccagaggtgtgcaatgttgacatgcttaggaacttataacatttggcaaaaaatttctaatgtgttgatttctgtatggaataaaacagctgtggacagcattttcatttaatttactggcaattagacaaagatgatgggcatgtaccagctcgatttggtatcgcctgtgctgaagtccacagtttgagaattgagcaacctgggtgtcatcctcgtccagccactgactatgtaaataagagcttcattggtccgtcatacttactaagcagccattacctatgcaccaggggctttatgttcagtatctctttcaatcttccaacaactctataaagtactacccatttttatgaggaagttgaggtataaagcggttaaataacttgtctgaggtcacactgatagggagtggcagggccaggatttaaacccaagtctgtctgactccagaactgctgctattaaccttcacattattctgagtatctccagcttgatatgtcagttctccctctgtctggtgccttataaaaagatttccagacaggaaggagggtttggaatgaacctcatttcaagtaatgtatttctagattggtccttcttgggattcactcataacctacttgtgttgtaagaacctggggaaagcattatgaataggtccaggtacactttccttcccagcctttgcagagcacagtgagtaatgcatctacacataatttttcttccgattgaaaatgtaactgctctcatttctcaattctgatttcatgttcagtgcccaagtacactgcttggttcaaagcaagtgtctaataaatactgatgcatcgtgccgactgctgtgtcctttcgcatgaacactcctgcttttttccatgaatcaagttcataataggttaagagggttatgctttttcactgtatatgcatttgtaccttttgagtttacatttattatgtattaaaatttgggaaaaaatacaacatattacagaaaaagagataaagggaaagtcatctatgcctcttgcactgtgtcaaatactttcacagctttttaagcatgatgtgcacacctcagttctgccttcactggaaggttctggctttctggaggtcatggctaagatatctggttcccgaaaggcagagggtgctgaccacgccttcccctcatttcagacaccatgatgagtgatgtagctctcctgctgccagcttacctatcatcggctgtaacacgccctcggcaattttaatgagctgctggtagatctgaatggaaaggtcactcagcacctgacggtattcggtgaggtcaaaattcttaagacagtgttcattctgctttgcagtgttctgagtcatgaagccctgcagagggagaggcgtgcactactgagttctctggtctgctgggcccagcacaacttccagggctctggtaactttagtcatctatttggtgggcagggggcctactcaggccctccctatgtagatgatgttttacaaaagcctgtcagttctttgaggcctcattgatgacccttgaacttgaaggatgtagaaaaactcaacatgagagagaaagcctgaatcgctcagtccaaatccctgaggcgaagtgatttccctacggtagcaaaacctaggttggtaccaggtccagagaaagggatccctgctttttcccttcatccagcgctttcctcaatatatcaggtccccctaaaatgttagatgatgtgcagcctctaaaggagtgtggccatgggccagattatacgcttgtatgaggagaaattttatacagattctatcactggttatcagaattaatagatgaactaaagtgatttcatagctaccgcactgtgtcctcttagctttctgtattaatcagatgaaatcacatgtaagttaagggaactgctgatatcagaagggctcatgtgaccaatgtccttttcattcaggcctagggaaaccag

SEQ ID NO: 66317 - DNA, 1555 bp, Homo sapiens
gagatagcacctgtgcagagggaacaccacagatagaggcatcagatacccaaaggggccgggccggtgcccagaatacatcaggcttctcccaccctggtgctcacctcccccatcaggaggagtaggaaatcatttagagattaaatgagtcaactgcttggagacaaaccacattaaagcacagcctttggccatgcccacgtgtgagaaataattctaggttgaaaaaacaagatcaaagatgtaaagtgtatgctgggatgaaggaggccacccctgtgcactccagaccaagcaggagaagcactgtgtctgccagtcactgccttgaattggggcccttccagcccagatgatagtcttaaagactgagctatgtcccttagaaccttactgccttccccgatcctccaccctgagagaagctgctgatggcagccaagccccagaggaaattgaattaataaaacctaggtgggagataaaagagccaccccagcaattggccagataatagcaattgggtgtgctggcagagctgtgctaagctccacagaggatttaaatatctcagacttgtcattttctaaaggtttacactggtagcactccacaaagaacattctcattaatttgagatggactgaaattagcttgtaattttcctatttctaagatattatctggtaacaattcctgtgccatctagcataattacttaaatgccggaggcccagaaatgaatgaggggctcgggcagcttggggaaacatctaaaatgacagacctcagaaagccacagttggggagattgggtaacttttcctttacaatggaattatatttatagtaattcctcccatcaacagagaagactttttaaaataaacacaatgaatcaatttatagttcacaacattaaagtgtcacaaagaaatttatatgctaaagagaactgaatttctcttgtaaaatcagtgttgaaaatatttaaaccagaatccttgggccggaggaaggtcaaaacatagagtaagaatcgatgctgaaatgtggcatctggtctctcgatggcacaatgatcacactgtttccatttctattttcatagtcgaaaagtatacaatttccttctcattctaccttaacttcagagtgtagtaagggacacagatgcctctacaaataaggtagtgtccgttggaaagtgaaactgcaataaaaagtcaattagtcactaagttaatgatcaacctccttgaatctctcactccatgacctggagagagaacagagaggcagtgagatgctttgaagattgggaaactctacgttcccctggcacaggtcaaaggaactaaaatctcctagctcagcctggtctttccaatttataaagctcactctccagcattctgcctttggtagactgaaaagatggactacagattagatacagacgatagcttccagggaatgattattagaagtcacacagaaaatataacatggagaaattctccctggagaagcctttaaaagcagggccatc

SEQ ID NO: 66318 - DNA, 2119 bp, Homo sapiens
gaaaagccaaaatcccaacctacccctcaagtcctgcccagcccaatacaagcagaagaactattagtgtcgcctgacatcccaaaaccacgatgcccggcagccatctattattgacaaggctggcagaatagtgagaagcaaaaggtcacaaagttgacctaaaactaatgctcctgaaaacatgccattgagttgttactgaacaactgttcctgttactgagatgagtacagggaggcgctgagttatacaaccacccactcacagaaatctaggtccagctctgcaccagggaagctgctgagcccaggactggcctccattcaccaccctccgagtatagaggatgccaagttccaaacgggtcaaactgtccctatttctatcctactgccatagccttagcctgcaacattgtcacctctttcctgaacaacttcaatgggctctcaatggtctccctggtcccactcccatcttccacctgctgtcaattctccactcaattgccagggtgattcctctagaatgtaaacctattatactccctgtataaaacgcttcagtggcttacactgccctctgagatacaactttcaaatccttagcatggcttatgtgcttggcaggaaccgacccttccctgcctctaatcttgcccttggtcccggcttctaacaatcctaactccctttttctttctccaaagccctatgctctctctgccctcacccaagcttcccataggcagttccctcttttcccacggctctctgcacctagtcgactcatcttccttcaggtctcagcatcgatgtcgcttcttcaggcaagcaagccttccctgatcccgagactaggggagcacctcctgccatatgctcttccaggccctacatttccctcttcttccccttagcccatatgcggttaaccctctgtgttcatgagggcaaagattatacatctgcttcagcacagactctgtagcacccagtacatggtaagcactcaaaaatatttaagtgaaagagtaaatgaacctgggtttcagtttttctcttgtgaaatgtaagtattggactccttgtcctcatacgtaacttgccactgcaaagtcttgcaaaaaccagttggagtcacaatatacacttttactttagggtttaaagtgtataaagcaatctatatgttacagacacagtatataactctggaaggaagtgtagggggagaaagtacaaccttggtatgttggattgctctgaagggcatcttggtgcttggaacatgcccaaggtcaggacaaggctagagcccggccagcctgatgtaactctcagtcacctaactggaagagtttacgtaatcagcttcctccaaccaaaggcgatggggactcacgctcctggcacccaccaaccttgtcatcttagcagaggcctcagtgtaaccactttccttccacaaagagtctcagcctttaaggccccacaggatgatggcagactgccagacttcagtgagccaatttctacttgaaaaatggaaaaggaggctatatttcctaaaatgttggtagaaagcatttcccggaccttcaacataagccaggtcctgggctgggccccttataatctcatttaatgctgccaagaaccctacaagataggcattactaactttcaccatacttacgggaaaacttaggcttagaaaggtcaagtcacgtgcttgaggtcacatgctaggaagtggcaaccccaagatagaaattcagatatacctgaatccaaagtctgcgttcattctacctacacggcgtcacagcactcctccatactctgtctcctccaaaccactcactaccagacagaaagccaccacacatgtgggcaacttctcatggctcaaatggccaaatcaagtcaaaggataaagatagatattaatcctcacttatatcctttttttttttttttgagatggagtctcgctcagtctcccaggctagagtgcaatggtgtgatctcggctcactgcaagctctgtctcccaggttcacgccattctcctgcctcagcctcccaagtagctggaactacaggcgcccacc

SEQ ID NO: 66319 - DNA, 835 bp, Homo sapiens
actgaagatcaataccatacatttaaactaaatgtggctagagagactctaaatagttcaaacacttatattaacattctcaggaacacaaggtcaggggtgcagtcattcttagctaggaagggtgactaagcagagaagtcctgggtgctgggattccacctctctccttctctctgctaccaggtgcaagacattttctcaaaagacatcccataattctaagtattcttggtacttgctcttgtagagaaggtttaatgccctttttaaccaaaaaggacatctttttaaaagcaagtcatcaatcatgaatcattttattctctagttctgggaatacagaggaccaaattaatttccgtcatcttttggctgtaagtacactcctccctctggcttccaacattatcgatctgtaataggggcaggagccaggaaggttcaaaggcatttgcttttaagcctgtccactgtggttctaaaggacatagacatggggctttctcctggccatgctgcactgcctgcagacctttctgcagtattcctcaaccagagaggttccctgacttcccgagtatctgctgtggacaaagaccaggtagactagccatacactgggacttaaaatcatggagatagttaaaattaagagctttggggagttcctttaagtcaaaacactgttcattatcatactaaaactgtccttacgaactgtataaaattaatcagggaagaagggagtgggaaaatgaaaataaaccaagcttgcagcacattcagtgttcatgaggtcggcttgctttctgactctcttcctcatagttat

SEQ ID NO: 66320 - DNA, 465 bp, Homo sapiens
agtttggatccaggagagacgagttttcattctaacaggagcatggagccagaaccccaggacaacagcttccagctcttggcattccttcctgccaccaccagtccatttcaaaagaagtatcagtggcaatgtacagctctaccagtaaatgcacatcagaggccaggccatgccacgctgcagaatgatcagaagggctggactttgattcagaaagtctgactgcaaactgcaatttgaatccacgaaggcctcaaggaaaacccctgttaaccctccactgacatctcctggatgatctcattatttgaaaaatagtctcaaaagaagtcacagctgggaggtcaacaagaaagaagggttggcaagatatttcctttttcttctttttaattgcaaaaggcgtgccagagagcaacctacagccagaggcagagctcactcactgctaaactaagggaa

SEQ ID NO: 66321 - DNA, 875 bp, Homo sapiens
ttaaaagacagagtgctccaaaataaaactcctcaaattctccccccttgaggcagagcccttccctcaaaccctgggatacagaaatcacattccctttcaaatacctgttggtctcactggcattggagaatatgaatggatgactatgaatggctgactcctcttctgcacagccacctgccactctccagctcctggaagaagcccaggtctcaagggagctggcagcaaaaggtggcatgggatgggcgggagcctctgtagcagcggaatcagactgtccaagtccagggcaaagcatctgctatgtaacccctgggcaacagcccagctgggccgtctccagttgaatgcctgcctgcctgccctccttaattctgccagcgtagtctatcctagggcagaggggttttgttgccacaggagcacaatggtgctgttcagtcacaactcagatgcctgagatgacaagtatggggaggggctgctcctgctaccagtgtcattttcacaattttagttcaattgtggtaaatataaagtttacaatttagccacttttaaatgtgcaacttagtggccctgaatacaatcacattattgtgcaaccaacaccactgtccatgtccagaattttcatcatcccaaacaagctctggactcaggaaacaacccatcaaccagtaccgctttaaaaagacacgagagaaggaactatgagtaaatatctcagcaagcccttgggagcagactgacactacagcaacttggtattagtgacaaggtcgagttaacgacacagtttcttaaaggatctgcatctaggctcaaggaggacatctgtggggtgcggggaggtgctgccctcactt

SEQ ID NO: 66322 - DNA, 2270 bp, Homo sapiens
ctgatacaataaaacccaaaacacctgaaacaaaaaaggcatgtcaagcaataatgagaagtaggtttggacaggtagagtgggacaggatcatggaggcttctcaacacaggcagctgtttgatgttccagagtggataagtgacacaggaagactgtgcttcaaggatacttagcaacagtgggacacacagtagagacttagggaacaggaggaacagaagtctaacaagatgccatggttccttccactcccaaaagcctggcttagatgcaaagccagccagtcagccagccttgtaagtaaaacgtagttgattcttggggttctactaccaacaggccaccacagaacacaaggatcttactctaagtgagacattctcaattaggggtgatttgggcccccaggaaacatatggcaaggactggagctttgagctgcttttaagtggtggggatgaagttccacataatttcagcaaccatctttacatgaatttgcagaatagttagctgagaaatacacggtatcttgtacttatgttccccctgtaaagccaactggcttcgttgatgccaatgggcacctgacattagatatataaactttatcctccaccaaaagggctaaatatagactactatttactagggcccgtgtgtgcctgccatgggttcactgggccagttcaggacactggacataggaccagggctccacagtctacacacagattctcagtgtcctaaagcaaccttcagagatttacctcccacatcactataggtgccttccaagctcagatccaagatacacagccaagatatttcagcaacaacctggctagaaaccggaagaacactataaagtcacatgcacattggtccaatgacagaaggaaggagcttattttcttttctacatgagcacatctgtttggatattcactagagtaaatacttaaatgactaattcacagtttcactttgtcatggttaaagtattttatgagacatctgcttctgctaaatcaggatcttgtttcctcctgagctgtcacactgaaggcaggaacatatgatgctggttgtgttgcaccagcaaaagcttgagagaataaccttttcagacacaagactcccagcttcctttggtatctgtgaagcatctattactgcaagtcaacagacccactgaccacaggaagacctcaactagtgcacagaattatgcttcaactatattcaagtgagaaacggcctgcatggtatggagggaagggaagttttacccctctgcctaccaccctccccactttctacttctctcctctttccccaaagcacatcgtactgactggtcagggtccaagacattacctggtactagctgttgctcaggcacagtcactgggggccaaaagccacatactatgcatgcatctcccctctcttttccaggtctagggatcagcaaaccaaaccagagctgaagattcctcctaaagcactgggctctttctctgctctcttcttcttgtctttgctttgcaaggaacaatcaatcagagcatggcaagacccctagatgcggaagtggctgagggagagctggagccagcagcatcacccgaaactgcagtttcccacccagaactctgctttgggagggacagggcttgggccaatgaaaacctagaacttcagttactatttggcaattgttccttaagaagaccacaggtccggggaagggaaatggggaggtattgaacaatcagttacaagatgaataagctccgtggatctaacctacagcatggggacaatagttcacaatagcatactgtatagttgaagtttgctaagagggtagaccttaagtgttctcaccacaaaacaaatcccccaaaatggtaactatgtgaggtgatagatgacgagtatgtgaattagcttgatgataatcattccgcaatgtatatgtacatcaaagcatcaagttgtacaccttaagtgccaattttgtcaactgtaccttgataaagctacatggaagggaaaaagaaggtcacagggaagaggggtacttagtgaggcaccagccaggtatccctgagtcctggaccatcatattcctgtatggggccatcttctctgtaagtcctaggcatattgattgacacatattaaaaagaaaaaataactataaaaatgcctcacctacagaatgggagaaaatttttgcaatctacccatctgacaaa

SEQ ID NO: 66323 - DNA, 461 bp, Homo sapiens
gtgttaggatactctccaacagcatcccatgagcatgtcttagctcttcaaacacaccacaaggtcctctcccctactcttcacaatactcagacagcagtgagcccttggctaatcttcagaaagtgtctatggaattcaatcttacggctagacttcactagccttacataacagaagtcaacagttatgcaaccctctcccttcctgcagaacttgcattcctcacttaccaaattatgtacggagcacctaccagggccaggtcttgtgctaggctctagaaagttggtggccagacaaaaataaataaaacacacacacacacacacagagagacacacacacacacacacacacacacacacacacacaaactgtccctatcctcagagctgacagtttactagtaaagctgatcaaatccccttatggtgggagtctaatgattagtatgactt

SEQ ID NO: 66324 - DNA, 1746 bp, Homo sapiens
aaaaggtagaggaatccagctaagccagtcaagtgtaagttgatgtaatcagggaaaacctcacggaagaggtgggatttaggtggggctttaaagattgcttactgggatgatcaattttatgtgtcaacttatgtggccactgggtgcccacacatttggccaagcactattctgggtgtgtccatgaagctgtttctagatgaggttaacatctgagtcagtcgactgagtaaagcaggttgccctccccactgcgggtgggcctcatgcaatcagttgaaaacccaattagaacaaaaagtctgggtaaaagggaaccctgcctgtttgagctgggacactgctatttttcccaccttcagactcaaactgagacatgagctctttccaggtctcaagcctgctggcttttggaacttacaccactgactctgctggttctcaggcctttggactcagcctggaactacaccatcagctctcctgggtttccagcttgctgaatgcagatcttaggacctgttggcctctgtaattgtgtgagtaattccataatatataaatatgtgtatttcctatagttatctttctctagagaatcctaatacactactattggtttggcagagagtaaaaggggaggaaagcttccagaagtctaagaaattgaatgaaaagcgaagatgtgaaaaaatgagagaataggaaggccatgagaaaatggctttgaagggggagagagaacaaacaggaatgaggactgtgaggtgcaacagctgatctgagaacagctgatggattctgaacatgaccctccacacaggtagatggggtgcctgtgatcttgagaatcacacaaaagcagagtttaggagaagtgatcccacatggataagcgtagaaaagcctggagcccaggaggccagcagcatatacctgtccaggtaggagaagacatgtggggtgcgatagcagcgcctagctcagtgacaggaagtctctcgtgccttgagaacagaggactctcacactcccttggatttatcaacagctcggagagcagttctgcaccctgcccaggtacaaaggccaaagagcccagggagaaggccacgtgccagcacctaagaatccgagatcctttacacatccccagtctgtcactcaagccctccgggtctcagtttccctccctgtgacatgcgtaccagaaggaatgtgaggataaaatgtgaaagaacattggaggaggaagtggcccagtgagaagggggaaaccaccttccaccagaaactgctttggtgtgaagcctcagaatacccaatcagcggctgccggctggaaaagcaggctttttattgacaaacccgcagaggatcaccttcacaaaacacacccagggcctaattaaaatcacagaagaaccacctgccaaatctcacggtaagtcactgcttaatgcagggctgtcagagccggctcaggagaatgaggtggcagggaatgctcagtgatgtgaaaggagcccaggccaggccccacggtggtgggagcatggcctgatggacggagagggatggagggctgggcccaagcaggactgtggagagggcagggacttcccagtacagcaattcctggagctggagctagagcttatctcacatttacaatcccatagactccagcaaatgctgtccacacagcacacttaccacaaacccagggcatccctttctcct

SEQ ID NO: 66325 - DNA, 904 bp, Homo sapiens
catacatcttcacacttgtgtatgtgtgtaggtctgtatgtaggtggtatgtgcccagagaatagcagtggctacctctgagaaagaaagaaggattggagaaaggtaaggcaaggagggactttcactcattatcttagagatttctatattgtttgatttttgcaagatcatattgtgtgatttttttaaagcttatcccccacccaaaaaagtcaatgacaagaaaagacaatccatgacctcacaacattgaagtcaagagtttcttctttgcacactaaatctggctcctctaattttaagaacagttaatgctccaccatgccttctttgattggtacgggatttgtctaagcctacctgcatattggggaagggaagatacaggttgagtagtaatgtcaagatggaattcaaagagcatgggcaaagtcctcaattgtgtaatatcctgcttctattccacagaagcacattcgagttcacatttgttacctattatctggaagcaccatgagggcatttagtgcaatatgcttgacaagcaaaaatgcagattaatagtccattagcttgttcaacaagcacttctaattgggacaggatgacactgaggtgggagggactggaattagtcataaggaagactttcctagcacaagggctttagggccctggaatgaatggtcagaagaggggttcaagcttccttctctgaaaaatcctttaaaatcaggtagatactctcctgtgcaaggcagttttgctggagtcctacctgacattggctgttatgttacagacttaggtttacaaagcagcactcaaaaaagtctgtttgccttcaaggtatttttcatgttacacaaggtagcaccacagactaaaaaggcctgcttta

SEQ ID NO: 66326 - DNA, 1997 bp, Homo sapiens
caggtaaggacgcggaagtgactgttcctacccagcccagacctgttggcccgggcgggtgtcccgggaatcgcatacccacgcaacgcgcgtggacaccacacgcacacacaactctgcatggaggcgtgtgcataggcactgttaaacgtgttttggccacccaagaagacgaacaggaaaaccaggcattggactatccaaaacttgttttcttaaaggtgcatagggcacatgtgaagaaaaggcctttgcccctctcactactgactccaggttgaaactcgaggggtcccgggcggctgcagcgctgccgcgagctcccctggaagcggtggcttgtccctaactttaaccacagcaactgctgcggaacgcgggcgtctccgcccgggctgcacctgttcccgattcggagcacccagcctcacacatcccttctgaccttgaaggcatcctgaaactcacaccctgctcccggttcgactttactccaaccccctccccgcagtcactgaagccctctttgtaccaaagaggccgcgtcaaaacatccatccccagcaaattcacaatgctcttccctggggtctccggagataacggcgcacccctctacccattgcttaccctcactccatccagccgccgcgccctcacgccaggttgtctcctccctctccaccaagtccagaacccccacctctcccaagtccagggttccctgttgtgggtatgcgggaggaaaggacgcctcggaggcgcgccctcgagagccggcgccgcagagcccctggggtggggtccacggcggggacaggggacagcagcgggagcaccgcgggggcccgtcccgcgcacggcgctcagagctggcagggtcgccctgccgttcggggaactcggttggagccgagcccaggcaacgaaagtgaggggcgcggcggggagggggcgacagccctggcttggtgctgagccgtggcgctgcggaacctctaggagccgggtggccggtcagtgcgggcgttcccggaaccgccaaactttctccgccaaccgaagttagggactccgaggacagtgacgaggaggacaccgcggaggggggtctcccgtcacctcccgcctccagtagccgagggagaaggcgaccctgagtactaggtggccccgagcgcgccaccccggccccggggcgcctccctcgcggccgcgctcacctggctgtagagctcgcccaccgacatggcccgggccgggcggggctcgggccccggctcctggctgccccgcggctctcagtccgcggctggcccgcctggcgccatgttcccgggctggcctggagtttctcgatcttctcgctcttctccgacctgccccgccggcttcccgcaggcgccgcggccggctcgctcccggcggcgcgacctttactcccgccgcggcggcgcagctacggccggacaggagttgcgagcgccgggggaggaggccgcgccgcaccactcccctcccaggtgtggggaggaggcgagggccggcgaggagggaggacccgctcgcgtcagagcggacggcccgtgcgccgccgcgcctctgagccctgccggtgcccggcccgacgcgccctcccgcgcccccgctgccacctgggcctccgggccgggggcggggcgctcagagaggagctccgggaccggcgcgggccgccccctgctggacgccgcgcgcgcgcaggcacaggtgcgccccggcgcccgcacctgccctgccgcgctccgcttccacccgcaccgggccccgcggagtccggcatgaacgcggtgcagacaagaaaagggaagaggaactaaccagagaggggggaaaaaagagaagcgtctatggctggaaggccccagacattgccctcgattttacctggctgtattcagcgctttcatgattaaaattcagttactcgtagatcgttattaaggcgacctggatat

SEQ ID NO: 66327 - DNA, 1020 bp, Homo sapiens
ggacgcaatttactgtaaattagcattccttaatcatttgtaaaccacccacttcggattttgtatgtggtatgtttctaaatacgaattccatttcctgaattgctggttcagcttttcagccacgaaataatgtttttcttctcttttaataattctgtcattttgtgttcttttctataacggttctttcaattgcagttcagtaaaatacgcatttgcatttactaagagtttacgtggcctgaaacagaaaacaaacaaattaggtggtcgtctcggtttcctggagtgtccagaggggcggttctttgatcttcgagtccaacgggctccgggcccgcccgtcggtccgggcggaaccacccccaccacacatcctccgggaaggcggcaatgaaaacgccttgggcccgaagtacggcttgggaaaatcggcgcagattcggggccgcccgttggggattcccaaggttgtgcagcccaaagggcctcgtcggaatttctgaggcgatggggtaaaccgacccttggcgacacccggccgcactcgaacgtcctaggtcgtcgagccccgccctcaccctgggcgagctccgaaatttaaccccggttcggttttgcctgttttaccactatttgaagagggggactcagcttccctctggccctagcccaagtactggggtttgcgccggacggagaccacgccccagggcggccaggccaggggtgatgggtgacgagcggtgcctccagggccccggtgggtgactgtggctgggaactacgggctttctcgccccggcgccccctggcggacccaccagcaggttgaaggtgtccggccagtgctgagcaccaagagcctcagccttcagccaaccccccgcccccgcggcctaggtaagtgaatcgctcagggtccttggaaagaagtgaccttgatttgatcttcccacccactatcccagtttctcagaggcagtcaacactgttcccaccaaaccactcccaaaa

SEQ ID NO: 66328 - DNA, 2116 bp, Homo sapiens
gacctaagggcctctatccctctattttatcaccccaagacccccatagtccccatcctcagccccaaagggccccatttctcttgccctcactacttgacttcagtagtctctcattccccccttccttgacccaggagttcctaatttccctccttcagtgttttaaccactccattccttctctgcctgatgtcctcttatcctgctacctcagtgttacaacctcgacttcctctgcgagacacaactgctccaacccatagcctgaacagcccctcatcttttccattcctcacactggaagcctcccatgcctccccttcctcagcccaagacctccccccttatttttcttctccttcaatgttctcacccacaatttctccctagtctgagctcccaaaccttcctctacagccaaaaagttccccacttctcctccttactgttctcatcctccattcctcccttatcatccagagagaccctaatttctcccctcagcattccgaaccctcctccattctctctgttcttgtcccgggatcatgccatccctaactgtcaccattctgatcccctactgctcctcgtcctctatatggggcctcctattcctccctttcagcattccaaagcctctatttctcctgtcatcagcctgagggcccctcatttctccctctcagagttctgaacccccatttctctctcaacttcagatgccccgatgtctccctttagcgttctgatctccaccattcctctccgtcctcgtcccaggatcccgacactcctacctgtcagagttcagagctgcattccttcccgtcctcagcctaaatccccccatttctcctcgtcagtattccgacgccgccattcctcccccttatcggcctgagggcccttcattcctccccgtcagcgttctgagccacaattccttcccatcctccgcctgagcgctctccacgtccagccccaaggctgtctcaccagtttggcaccaggccggtatcttccgccactctaggcccgtggacccatggcgagggtccctcctgcacctcccgcctcgccctcctccccttcctcctcctccgcggccgcctcctctgaagcggtagctgtcgcctccgcggctgttcgttgctcccggaaccggaagtccgctgcctgcctctcgggctccgcctctggctaagcacctgcgcactattgcctcgatgtcgcgtgcccttaatagggaggctcccgcgcctacgggccggcgctccgcagcggtgcgcgcgcccccctgccgagagccagttgcatctgcgtgctgacgttcaacgacagctaaccccttcgagggactggcagttgcggctctcctcgctgcccatctagctggcgcatgcgctttccagcctcaacctgaagggaagcggtcggggagggcttgcgcctgcgccctcccttccctcccgcggtctccacagccgataccgaacgcggcaaggaagctgcttcgcgcctgcgcactccctggccctgccggcgctctcctctcccacctctcgctggggtctatcctgtgttcgtgggtccctccgaacatcaaccccagggggggtcgtgtcccgctccctcctccccgccgaacagctgtgggagcgcgcggggcggggaaaggggcggtgccacaccgcaggtaaactgaggcacgcgggagggcgcgcccctgcaggaggcggatccccaacgtggggcttgtggggaaaaggcggggcctggcgtccacagcggacgacagctctgggtgggagacaggagcatgcatgggcggtgtcaccacactgaaggcgcgctgcgtagaccctctgcccgtgggaggctgggaatgtgggtccctgggctctcgcggggtgcaggcgccccccatcttatccagaagtctggaacagttgcaaccgcagcaatgtggagacagcttccttggtttcttcaaaattttattaacaaaacccagggagaggaggcaaggatgagtggactccgcagccccaccaggcactgaacatgtcgacggggacagtccctctgataaaggcagatgggcggtcaa

SEQ ID NO: 66329 - DNA, 1806 bp, Homo sapiens
gcagcccccaccgtggcggctcatccccccattacaactccaccgtggtcagcagggatccccactctgcctgcagatttcacatcggggcccccaaaaaacctctccatcacagtccccactgacccccatcccttcctctgacatcctattactctgctccatacttcccatcacgcacccaccgacacccgctccctgcgtccacactcgctaatgggtcatggcgaccctccatcgtggcgcctcacagaccccgcgtaactcactgcggacttcccatcgcggttctccacgcacccctccctgtttatctcatagacccacctggcacccgcacccacccccagtcgcggctgtccacggatacccggacacggactcctcgtcacggctcactacagaccactcaatgtgactccttacaacccgcttatccctctgccctaagaacccccgatcatggtttcccacggaactgccacacggagtccccactaaacttctattaaggagccccccaccgtggctcaccatagaactcccagatggttcatcattctgcccatagactcccgccgttcagtccacagactccggttatggctcaccacagacccctgagtcggccgacagaccccactgttgccaaccgaccgacctccaccgccgaacccctccctggacccgctacttaccatatctccgctcccggcgcactccctcacgacccccgccagcgacccgcgaacctgcacagaccactcggcggcgtcccaggcggttgcaaaggcgcccacaactacttccgcttctagtcacgcctcccaggcagcgtactcctattgcgcaggccccatgcgtcgtctccgctgcaaaccagtaggtggccggcctagagcccccaagacccctcaggcgccgccatcttgcttatcgtatccgtatggtggccgaatccatatgttcgccgggaacatggccgcgctctaatgtggctttcccgagggcgccgccaccttgtcagtagagtccgtacggcggctgcttgtacggcctcgacgtacaggcaacatggctgcacctactgcgtgacttcctcatagatgccgtcatcttggaatccgattccgtacgtgggtcgaattccgtacgttcctaggcgacatatgacggcgacctaattgcggattcttcacgggcgccgccatcttggtggttgattccgtacattgcccgtttgtcaggcagagaggttcacaggtaaagtgaccgcttccgaagcacgacctggatcaagttgtattcattcctccattcagtctctttccccttccacatgtattaatggggcgtcggcaggctgtgtgccttgcggggcggaggaaaccagttcctctgtcgtctccgacttcacctgccaccactctttccggcttttactcctcccacttgtcattcttctgccaggcctggcacggttcggcttctatttattttatttttatttaaaaacaattcttaaactaatatcaaatcttattttagttctataagctgcacaataagcctaaacacagtttacttatccatttctttattgtttagcatttagaacattttcaaatattattctaaataaagttgcaacgaacattcttaaacatagatctgtatgctcatccctgattatttcttgtgaaatgtgatatacaaatttacaaatatacaaatgtgatataccaggtgtaactctggttaacagctgtaagatggagcctggaagccaggctttatttatttatt

SEQ ID NO: 66330 - DNA, 1392 bp, Homo sapiens
accaggatcaccacgtttagagtggagccctttatcttccgcagcaaggggtcaaacggctggccttatgcgtatttttgtctttcctgggtgcgcccggagctaagaagggaaaccgtggcggttagagaccagaagtaggctctgtcactatggaaaccgaggacgctggggctcgtgccctcctattggggctgagttgctgagtctgcgcagttttcatctcatgtcggtcacgcccccagctgcgctgcacgctggctctcgggttcagcccgaaaagtggagactgaggaaataggtggtggtgaatacaacattctttctcatgagacactcaccgtgtggttggagaaattacgtaaaaaaaaacaatttcagtttttaaaaagtgccattaataacagaggagtgcaaatcgagacagcaccttctgaaggataaataatttaccagtgtaatgtgtaggaataacggatgctgtggggcacccggttctacttccagactcaagaatgtgttcctccagttgcagggtgtgttgctagcagaaagcgttgctagcagaaagccttcaattgtaagtcctcttctgagttgcctaagccaaagagagttacacactgaaggtcacgcccgtttcctggacagttcacatccaatgacgcatcagtgacatggagtataaagcctttcctgattgcctcaatcctgggcaattcttgcaggttgtcccagcttcagagctccatgtgctgggcggtggatttcaacatctcatgttgaacggctatggcagttcaacatctcactctgcccaattctgctttcttccactctgtacgtttttctattagtggtgatttcatgaacaaaaatgagaaattttctactgtgaagcagctatttttattttcattaatctcttctttaaacagaaaacagtacctttggtcagttttaagcccttggaaaaaaatttttttttcactctctggttactaaggaaaagtctgcatttcaatcattgcatgtgacagactgccacggttactacttgagaccgtcagtggggcagttactactgtcactacttgagaccatcattacaagagtgaatgaagggacgaacatagaaatgaaaacttaagacaacagaaactgttttaaaggaaggggccagaggaagaagaagagagctccctgcttctagtgagcaaaggcagcccctgagcttctacagcccttcgtatttattgggtagaaaaagcaaggaagaggaggtaacgattggtcagctgcttaactgatcacaggttcatattattactaacaggcttcagatgtacctaatcacaggaaacactgcgcttggggtgtgactgccctcag

SEQ ID NO: 66331 - DNA, 1040 bp, Homo sapiens
agatgaaaaagctaacggagcagccatagcattgactgggcatggtgaagaccagggttctgaaagctgaggatcacagtggacctggatcaggacatagatttaaaaatgcaattaagctccaaggtttagaattccaggcatgggaacaggcaatgcagaacaaggaactaagaatcagctcaagtggggaccacagcggcaggagaggagaacacagatctaccaaagacctctaggacagaaactttcaaggtacttcttgccaggggtaagactgaagctaatatctagaattcaattacaaaatcgcactttggttcctccatgctaacttgaggttgaacacagaactctagagcacagacaaaatcaatatctgcatgtgttgcggcttcctaaggccagctccagttttgatgatttgccagaagggcacacatgacttagcacatagtcataatcatggctaagatttgctgcaatgaaaagatacaaggcaaaatgagcaaaggtaaaaggcacatgaggcaaagtccaaaggaccacaggcacaagtttccaagagttctctcccagtggagttgcacaagacatacttcctctagcaatgagtgtgacaatgtgtgatatgttatcggggtgtcattagagactgtccctaaggcttttactgggagctggacatataggcattccctgcctaccatgtaccatgattccagatacccagatggaaagcagttgttcagcataaaccatactgtccacacagtctaggcacagtgagccacccttatcatttagggaaagtgttttattttattttacttttttagaggcagggtcctgctctgtcacccaggctggagtgtaggggtttgatcagaactcactgcagcgttaaactcccaggctcaagcaatcctcctgtctcagcctcatagtagctaggactacagatgtgtgccaccacacctgaccaatttataaaatatttttgtagagacggagtgttgctatattgcctagaacttctg

SEQ ID NO: 66332 - DNA, 1087 bp, Homo sapiens
caaaagcccaccaagagttttgcccaggcctttcctggtccttgaagcatgagaaaataaagaaggaattcttaacaggacctgttcaagattaaacaagtttttattgggggtctgaagaaactcccccagacctccacaaacaagtttatcgggggtctgaaggaactgcccaaaccttcatgatttagcaggagacaagataagggtaatcacctctggcacctgcagccatctagattaagtaaatttacttaaataaagaccttccttaggactgatcttagttatagattagaaacagttaatcatttacgtctttacacacatgcacacttacatgtagacagatagtttagaaggtatataagctctggaaaactttgtaattttgaatcgatttggcgatattttccaggccttttccctgtacccggttaccgaaataaactcttctttcccagttcatcatgagaataagcagcccaacccctggtttggcccgggaacacttacagaggctgtctaagacccagaagacagggtcactgtttcttccacacaaacttagctgctctttggaattttctggggtgtttttataaatactaaggcttgtgcctcatttccccagtgtctgatttcaccgacttggggtgtactctaggcactgagacttgtaatagctgcccctggtgactctaaggtgcagcaaatgtcaaagaccaggacttggtgacgccaggtccctggctgggctgcggtcaagactgcatgacctgctgaaatctccccagactggttagcgcggaaagagcacctccgggttaccctttcgtccggaagccccgccttcgccgtcgccccgcctttccccggctcggccacccctccttcccgcccagctgtggccccggatgacgcaaaccgggaacagcggctgagcctgcgcttcggaagcatggatgtgcgcctgcgctgcgctagggcgcggcgggcggtttgaattttgcttacagagtcccgtctcaccatcctgggcttccaacggagactgcggtatccgcagctggagacccagcggcga

SEQ ID NO: 66333 - DNA, 926 bp, Homo sapiens
aagaaggattgtatattaggtgtcaaaggggaattgttttgttatgataatggcattgtggttatgcaggagaatatccttattttctgcagctgcatgctgagatatttagtggtaaaataatatatgatgtaaataatatgctttaaaatgggtccagcaatataattggaaagttacatacatatatagaacatataaggcaacgtgttaattgttcaacctagctgaagggcatcttagtgttcattgtattattctttctaactttctgaatgttttaaaaaatatttcctaatacaattaatgcctgtgtgaaacaaatgtactgattggatatttacattttatgaaatgttcattgataagaacttgtgggctggtgaagttgggaaagaagggagaagtgttagtaatcaattatgagctcatatgctatttccagtactctggtgaaattcactgtccagtgcttcccatctgcatgcattcttcccgacactactcactgagcctaggctgaatgtttgaacttttgtattagattaagggggtgaagatatgaatttcttgagttatactgtatataaatattatgtctatacacaaagcaatgtatttggcttctgacttatccatggagaaatgatatgcagtgtataaagcttgatatctgaaaactctgtcatttttaaagtactacattttcttcctttttttttttttttgagatggagtctcactcttgcccaggctggagtgcagtggtgcgatctcagctcactgcagcctccgcctcctgggttcaagtgattctcctgcctcagcttcctgagcagttgggattacatgcacacaccaccacgccaagctagtttttgtatttttagtagagacagggttttgccatgttggccaggctgatc

SEQ ID NO: 66334 - DNA, 666 bp, Homo sapiens
agagaatgcactgaagcaggaaatgtgaaaaagaaaaacaaattttcctctctcctttggtatgagtaaacgtcccccacaaaattcctccccactccatgtggttgtactctgctctgcaagttttatgagtttatggattcctattttctgtaactagtgactgtaaatttctgtttttcatctgagtagcacagtgaaggtcatgagacatgcctgagcaggactggactgcagccatctaggcaccatagtgaaggatatgagataagcttgtgcaaggctcttgagcaagctgagataacagccatctgggccgcatagcaagagtcacatgaaagcctgagttatgaacctgtcacagtttgattaactgcctttgttctgcttccgtacacttgctttcatgccactgcactccacgccactgtaaacttgtttcaaactagccaaccacctttcagaagtgtgtataaaagtcaagccctgtctttgttcagagcccagcctttggatgttaatccacggggcctaagtgcattcaataaaatcttcctgttccacccagaggtctctccagtctcctgattcccgcaacagcaccatctccccaaaggtaatcaccattaagagtgaaaacaaattcttctagtgtttttcctttcc

SEQ ID NO: 66335 - DNA, 911 bp, Homo sapiens
atccagccggtgtttgacaactgcagcatctacaaccctgaagtgcttgacatggcagaggaaactgcatccttgcttcctggagggtgtctgtaatgttcccagtgtctgtctgcagattggttacccaactgttgcatcagttccctatcctatcatcagcaggtacaaatgggtgctggctttgtctgtggagactgattacgccttcctgcttgctggaaaggccaaggccatctttgctgctccatctgcattttgtggctgctgctcctgtggacgctcctgctactactgctgctgcagccccaaacaaagttgaagccaaggaagagtcagaggaggatatggaatttggtctctttgactaatcactgaaaagcaacaaactcagctaactttatttgcaaaacaaggaaatcaaggcttgcttctcttaaaaagaaaaaagacacatgcaaacaaaaagaaagaaatgaccccctgagttgaggtagtgtcagtttttccactgaaacagagaacaaaagttatttaaatagcttgcaactttctgatgatgactcctgcttgaaacgctgggcctgtcctgaattccctgtactttgtaccttccatggcatggatcatgttctgttcttcctctgtaataatttatgcacacttagctgctcctggtgttagatcccaagctctgcagtgcagactctattttagtcaacttaagccaacacgtgcctcacataggcatacagtagacttttcaaaaatgcttgttgcataaacaagtgcagaccaactaactcagaactgagtctttttctttctgctgctgatatgctggggcactcacagacttggggaccatgtcactctcctttcattccttaaggtttcgcatatggtttgga

SEQ ID NO: 66336 - DNA, 922 bp, Homo sapiens
actctctctcttccctagacccatgcaaacagtgccaatgagcccgtcaatctttcccaccagtcatgggtgcaacctcagggtcctcttctacataggaccccagacagtcactcttatgcattagagttggtcatcaagatgaaagccatccatcattcacggctggagggccccaccccttggatgccaataacatccaagatgatgtcactttaccatgatcctctagtttaaattgctggcatgcttgaggcttcatctggcatcaggcccatgtactcctggcttttcccttctctcttcaacttgggtattttgaggccaagaggccaagaccacctgaatcacaacaattccaagatacaaattatggagacagtgcttctgggaattttgaaatctttaacacctcaagcaaggttttggtcagctaatatgaagggacatcgacctggttccccaaaagcttactatctagttggagagataggatatggtgctgcgaaatgaacctaaaatttcagccatcagaggcaaaatgctaaataagcagagggttgacaaatgccagagaaattcaaaccacacaggggtagatatttttggaaatagcaaatagggctctgctcccgattcatgacccagtccctggcactggtcctacaagtgccagatgatggggaggcagagccaggtgttgtgcaatgagcaggcaggaggagggggtgccccgctggcccggctgggcccatggagcttggtgatgcctcctggtgctggctgaggccatgagaggaggcagaagtgggagaggagagcagcaggagcccttatcaccaggaacacacacgtgggtcccttgtcattttctgaacttaaactcatctctgcccacagagcccccacaacccgggagaag

SEQ ID NO: 66337 - DNA, 413 bp, Homo sapiens
ccccctccctcccggacggagcccgaggatcccccacccacggcgggcgtgaggaagggcttctgagtgactggagctctaccgcgtgtgccccgggaaggccaggctacccgggacggggctcggctccccaggtgagctcgtctccgcgggactgggtccgggaaggccccaggaccgcgcggctgagcggcctggaggctgcgggagggcagagcagggcgcgcgggagactgccgcccccgggcgcccagggcccggctccccagcgccaccgccgcagcaggtgggggcccagtgggcgggggcggggcccggctctgggcggagccgaggcggcggcggcgcaggctggggccggggccggggcgggagccggagcccgagctggagcagcgagccgggctgtcggg

SEQ ID NO: 66338 - DNA, 734 bp, Homo sapiens
gcgagttcagattcggatcgcagtcccgattatcctcccctccagcctctccctttctcgttgaagggttaatacagcgtcctctcccctcgccacccgacagaggcgcctacactggcggtaggtagcccctgggagagggggagtggggggaccccgccgctttcgccgctgggcgacccagagccccagcctgccggagagggcagcggctcgggtttgacatcccagctgggtcccgggccggctccctgagcctcctcccgggttgctctctatcaggaaagcaatcggaagtcaggccggcttttgcttttgttctgccagctactctacggaatcgtaggtgaagccggggtgggcggatgccccgggagggggctgtggcgggagttccaggtgcgtccccgaaatgaccattggaggcggcggctgtttcccgcccctgggtggggaatggattccgatcgctaatcgataccctggagccagcagtgggtcagcagcgtcccgacagagcgcagcggccgcgtactgtcacgcgcctctccagcactctcgaaagcactacctcgagacgtgcatttccattcatggatctgtgcctgggggttgattaatgtcacccctgcctgggttgaggagtgtccacaactgctcagtagccatttactgggaggttactgtgtgcaaggcagctatcttaaataaccttaatgtaaaatatacttatt

SEQ ID NO: 66339 - DNA, 531 bp, Homo sapiens
atttaaaggttacgaattgtttaatattgcaaactattccataactttcatatgtaactcttgtggttatcacactacttcagtggtactggtagaatcaagaattggaatatgaatagaatcaagaaaatgaggattcttcccttctgggaagcaatacttcttggttattcaggaatctgttacattgctggtctctgagggaggagttgttgagtcaatacttaagggctggcactgctcagattctccctgtactctgcgtctgtctctgatgttggcgatgtcacaatccccaatctttcacaacatttggacacagtagccttttgttttgaggactagggcaagagatgtggagaaatgtttccctgaaggctgaacattagtcacataagtggatgttcaggtgcccactcgctcgtgctgtgtcggtgcccagcactgggtcctgagccactgggtgctcatgtgttctttcataattgtgttggggggggagatccagggcttcctgatgaagggatccag

SEQ ID NO: 66340 - DNA, 1461 bp, Homo sapiens
aaaaaaaaattaatattaaaaaaatcgtcttcattttagaaaagaagaaactgggcttaaagtaatgttgaacaattaactcaaagtcaaatactggcagagcagattttaggactctgaaagatatcctttcagtcactgtgctataagcctaggttcagctcccaggcaatgtcctgtgagctgaacgagggaagacagaccgcatagacatttcagtttaaagtgtcaatatcttccctgagtccctgccattctattatattgctgacaatagaatgatctataacccaactattgatcgattaacatagtttgtgaaaagcaaacaaaatcagcttcctggtcaacattgcccacttcagttttacaaagagaacattaccaaatcctaccccctagaggtcgagctcccatactggtgaccagagtgacattccagaaaggttttgggaacccaagtgcagccaggacgcctcccgctgcatctggctgccccggccaacagtgtcccttacctgcggctcctgcaggcggctgccacgtgatgaaccggagcccgttcctgactcgggagggctgctttcccgggtagtagccaaatgtgatgactcggctaaattttcccagccctgaattcctaacatacaagaagggaaattaggaggtgacgcagggtctgtccaggataacgggtcggcacagagtgttggaaagtgagaatcaaataagaggggaaagtcaaagtttatagagtatttgggcaggggagggaattgttctggaatgaaaccgacaagaatattgtagggtggcacaagcatgacttgctacctttgcttccccacgccatgctgaggtgtttttccttctccttgctgtgatttcccctccttcttccctcatgccagcctggtcgacactttctgcagaaattctgcagatggcaattctggggacctttcctctgcaccaaacaaaacctccctgccaaggcccgttccccatgcggccgcgagatggcggcatgactcaatggacgggttccaggcgacccctgcacaaagccgccgccgtggctgcctccttccttacataatcctgttagagcgcatttaatctaaggatgggacactgtgttccatgccaagcagcctcatcgtggctgattgttgcaccaacaacaagagctttaaccgttgacgtcccttcctgctcaagaaacaccgtatgtcccgaaaggagcgatttaagctctcaaaatgatttattggtaaaaagcaaagcaaaattaaaaccggggaattacagcacctgcagaatttaggagcctctctctctcatcagccctccttccctgactctccaaacacgtgcataaatctatttaacaataattagttatcgtctcgctctgcattgggtcataaagggagaaaatatgtcctgaaaggaaaaaag

SEQ ID NO: 66341 - DNA, 610 bp, Homo sapiens
ttttcagttttttaacacaacacagaaacccaaacatgagggtcattagcattggtcggctgctcaggggtgacatcaaggatctccattctttccatctttttacttactctgctgtcatcattatgcttgtctgcgatacttaccacgtctgcaggtatcattctacattcaaggttggatgagtgggaaagggcaacactaaccacattttttaatcagaaaagccaagtgtttatgagaagtccttcagcacacttcctcttacatatttttagccacaactagccatatgggcacttccttccaattgcaaagagaggcaaggaaatcagatatttggcaaaaggaagatggattgccataatttgcttaagctaataataaatgagtcatcaactaaaccacctggaacaaaatcaagaattttttctgctcaatgaatctgtcatctgaaaaattcaaagcattcttggtcctgggtctgctaccctcagctttcatcaggtacagatatctcagatacacttccacaattgagattaaacttatataaatctccaattttttggtatgtttgctttatcaaccaaaaaaaaaaaaaaaaact

SEQ ID NO: 66342 - DNA, 2166 bp, Homo sapiens
ctggaattcattttgacctatcagaactatggctatccttcaagactcagataaaatgacaaatgacatctactacacaagccttccttgatattccctacctgaaatgttttccccctattcctggcacttccacgaaactcccccttataagcatttgttaccttttactttgtattacagtaacttgtgcacacagcccagttcttatcccaaattgcaaactccacaaggccaaggacagtgttattgaattttatattcttttcaatccctagtacactccctttcataaagttacttaatgaagtatttattaaatccattaatccagctgggtgcagtggctcatgcctggaatcccagcactttgggaggttgaggtaagcagatcacttgaagccaggagttagagaccagcctggccaacatagtgaaaccctgtctctactaaaaatacaaaaccctgtctctactaaaaatacaaaaattatgcacctatagtcccagctactcaggaggccgaggcacaagaatcacttgaacgcaggaagtggaggttgcaatgagccaagattgcactatggcactcaagcctgggcaacacagtaagactctgtttcaaataaataaataaaaaagaaagaaaaattcattaatacactaggggtgaatgttgtcaacaacttttttttatagttaagtaacttcaactttaaactttttaaatttgcacgttttgtccagaaatgatgttaatcatttatcatacaaccatatcctcagtccagaggttaatctatgcagaaagaagctttcattatacatccaagtgagttacatttcagataactgtgtagtagtgcctacttggcacttttcataagaatcaattcttttgtattccctatgagtcaggggaggagaggaaaccagaaggataaaggaacatattcaagttccccagcaaatgaggtcagagattagagttagggctttgtaaggttgaggcaaaggttatgttgaaattcccagagtgctgagtctcagagcagtcagtgagtcaactgcgaaggcgctgagtaacgaactacgagatctgagcggcatctcacacaggacactgaagaaaggcattttgtagacggatgactgccctgccagtgtggtgggtgaaatgggggagttctggccggcagtgtggcccttgcctgcagtgagtcttaaggggactcatttacttacctgtccaagtctcacttcaccttccaagaaagaaaaatgctgaacttacttaggtaaccaatagtccctttctagctttcaagctgtggtagaggaattcattcacttagtagtgaatgttctgagcaagtggctttttacatccctgggaagtacaaaagagcctaagggcaatggccagggcaaaactaacacctgaaaagaaattaacagttcagtggggaatagaactgggtaggaataaaacaggaccaactcctggagagtctggagagtctggagaggcaggctgtgaaatctgaccttgacttagaagagggagcagagggggaggctggtaggtaataaagaggggaaacaatggacttcagactttgaataaaacatccctcatgtcatctgagcctcaaagtatactaagaattatgcaagatacaggggcagccaacaggttcgatccacatgtgaatcaaattatttcaggccccccaacaataatgcctcaactgaataccttgatgggggattaattccaggtccacatctgggctatccagctccaggaacttaagctggcattacaccagtactggctttgtatggcacttccccacacttaagaaaggggaagaacctgaaatgggagaagtcaaatgtttactcagacttctgatttaaggtgccgtgcctctttgtactgccttgacctgggggcatgatatggtcaaagtgctgtttttgaaagctaaattagctgggtgtggtggctcacgcctgtaatcccagcactttgggaggctgaggcgggcggatcacctgaggtcaggaattcaagaccagcctggccaacatgatgaaacgcccgtctctaccaaaaaaaaaaatacaaaattttggccaggcgtggtggctcacgcctgt

SEQ ID NO: 66343 - DNA, 1921 bp, Homo sapiens
ggagggagcaattcactcttccctacttccactccatcttctcaatcctacatttccatcacttttaattttattctgccttgcctctttttttatattttacatcttatttttgaaattgtcattaccatgccttgttttaagagtacacaagctcattatagtaaagagttttgggtgataacattttctgaaataagggtgaagaaatatcctcccatgtcacaaccgttgggagggcgggggtagggatgttggaaggcacggtccctgcggctttcaaggacaagacaattaagtgttccggtgcttttctgaggcagaacattgagcatctatttatggtgactgtgacagtggaggtgattggtaaattcaccgcaggccaataaccttgccagcagccatgaggagtggcaaagaattctgcagaagagcaagtcctaagcacacaaaacagctcggaaagtgaaagcgtcgctgaagtgcggaagcctcgcatttcctgggtcctcttcttccttcctttgccgtctcctgccctcccgttctcccccttcctctgtggctcaggcaggacagaccccaactcccagcttccctggcctccgcgggttcggagactgggacccccgggccaggagtgctggggggcgcggtcggccagccccggcttccttcatggagcggcggagctccacctcctcctccgcactgcacttctcacatcctcagcatcgcgtccacgaggccgcccgccccgcctcagaaccgtaacctccaggagctgggttgaggaaggcgcggaggacaggaaccccagcgccggcagctaagcctccagacggagcccgcccctccggccggttcctgcctccaattggcccgcgagcccgtccgtctccaccgtgggccacgccttccgggccccgcggctggccggctcctcgcgccctcccctctctcggccgctcttcgggccgcctctgcgtgtggggccgcccgcgccagtgtgagcctgagctgacggcggctccgggaggctcgcagaaggggagggccgggcggcgcgggagctgagcatcgccagggcgggcggcagggcgcggcctctccgccgggtgtaccacctgtcgcggcgcgagacctctggtaaggcccggcgcggtggggcccgggcgggggtccgggagaggagcgggcgccggcctcccctggcccggccccgagagcccagcgctgccgcgcctccggcctccgcgcgtgcggcccccgccgttcccggcctggcggtgggggctgggggaagggaagcggtctgcggagtccgggctgagggcgagggaccggctacatcgcggcgacccaggttccagcggccgcggctctacccggcgcgcgatttccaggttcctccgccggctggtgcctgggcgccccgctctcgcccgggagcgaggccctgggcctccaaacgccagcatctctttctcgctctttctgcacccctccacaaaaggacttctgtggctggaaaccctttggcaagcctatctcctttattcagtcgggccgagttaacggcaggagttaggctgtgtgtgtggctcctccctttaaaaaaagacttgctgcgggctggagagttctgagattggaccgattccgtctattattaaatgccatctgtggaccgggattggcaggtgtttctttcacgctggcgataactatctctgcatgtggtgttacctaggtggtcctaggtttcgactttcttttttggttccagagataattctagaaaatttacgttgcttgtggtgagaagcgtgatcaaattaacacgtgctttcttacaaaacgttttatcatcttctgtctgtggatttaccttcctgatgcttgtggctatcacctc

SEQ ID NO: 66344 - DNA, 2082 bp, Homo sapiens
cctgagctcaggcaatccgctcgtcttggcctcccaaagtgatgggattacaggtgtgagccacggcgcccggccagctgctggatattttgaccacctcaagtacgctgagcacgaaatcagtgcatctggcagtacacaggagcttgaaatactttttttaaaagttgttattcaaactgaaggagtttttccctgtggtctgtaatcgccacgtgcccgttctgtatacagccagcctgggtttttcaatcccacgtccgctacctaagagaacaccaaggcttggagtgagtatggcacaatcagcttcagatgttaagcaaatattccaacctagagtaggaaaatggaatatggacggggctttatgaaggtgcatggtcaggcaaaggatcttagtggatgaaagacagtaaagattcatcccaaccaaagaccaaaaatgacacatatgtatgagcaaaacatcaggaagaacactcttatgtggaaaatattacacggaaaacaaaagaagagtaactttttcccttttggtttatcccgctctggtcctcagggcgatagctaccacctgacacacagcgacctgggaaagagggaaactcaatcactgccctcgcggcccggggggagcccggaagcgcgcccagagccaggtcccgcgcgggcgccaccgagcgcggacctccctcgcatcctagagcggccgcgcgggacccggccggcggcgcacttccgcccgggcgcattgtagccccgcggacagctgggccagggtgcgggcctgcgcctccctcggctcctggcgcgggcctcggggagagggtgagtgcggtagggcataccagaggggggcgggcgcgcttcctcgggactcgccggctcgatcaggcacggcccggcgctggggacctaagcctggggagcgcccgggagcgaggacgcgcctcgttcaccgccccgggccggagtctcggcgggccggagcctcggccgcccggcgccgccgcccacccagcctttttcgaggccaacacggtctcgtgggggagcctgggctctctggaggccggaaatctggcctctggccctgcctgtgccttggcctcttactctctgccgcccggcctcggttctttcagctctaagatggaggacagcgatatctgccctaggcacaccacagggtgattgcagggttgacactgcctgcctgaaaacgaaggagcgccggttctcaacccggcaaccagtagaatcgcttgggaagcctccaaatgctgatgccccatcatcaccggggaattgtgatctgcggccaggaccgagatccacgggcccagagtgaaatgacagtactgtgatcacgactggaatatgcacttcgccgaacgtggatcacagtcttgagaaagcaagcagctgggtttttgttttgttttttttccaagaagacagggacctaatctggtttgctcgcatttaattcctagtgcctagaatggtgcatgtcccaaaacatgcaccattgattaaataatttctgattacttcccgacctatttggagggttttcattatatttgttttaaaattattatggaaaccttcaagtcatatatgaaaattgaatagtaactgaactcccaattcatgatcaattctgtttcatctgttaccctctcccccactgtagtattttgaagcaaatctgaaatgtaccattccatctgttaccttgttcatgtttataaaacacaataacacctttttaaaacataaagccattatcagtgtacttagcacttcattttaccctctactatccagtcagcatttacattttcctagttgtctctttcctcttacccagtttgtccaaatcagtatccaaacaatctacacacgttatatttggttgatgtctcttagatctctcttaatctttttctcttgctctttattttgttccctgtattttacttgaacaagtcatttgtacggttcacgttttctacaaccaggattttgctttttccatctctggtatcctttaataagcaggtatttagacct

SEQ ID NO: 66345 - DNA, 2228 bp, Homo sapiens
tgaagtgtatttttatatacaatgcaaagtgagcatctttctttgcttttttctctgctagaatagccaattatgtcagtgccattcattaaagaaaccacactttttacacctttgttatatactgtattgattccgataggtagctggtttatttctgaactttcccttcccttttacctctatttttgtgccaatattattgtttgtatgtatgtatgtatgtatgtatttgttgagacagagtcttactgtgtcacccaggctggagtgcaattgtgcaatcttggctcactatgactgccgcctcccaggttcaagcaattctgctgcctcagcctcctgaagtagctgggactacaggtgtgcgccagcatgcacgactaatttttgtatttttagtagagacagggtttcaccatcttggccaggctgctctcaaactcctgaccttaggtgatccaccctcctcagcctcccaaagtgctgggataacaggcatgagccaccgtgcccggcctattctgttttaattatgtcagattgctgtagtaaatgttaatacctagaaaagcaggtcaccactcactgctttttggaattttctcatcccttctcagacatttatttttccttccatatgatttttggattgtttctgttccaaaataaatcccactggaagtctgatagaatttccaccaaatacatctacattagcttaggaaggatgaacatctctgtgatatcaagtcatcctatcagggacataatgtgtatcttttattcgtgtgaatcttttgggtgctgttcctttcctgctaactttatttctggtaattttgtttttgctcttagaatgggtttttcccccatttctgtttttatcttgttattgctaagactgagaagagttactgaagtttttgtatattttatatctagctgtcagtcaaattctcttacagtagtttttcttaagcttctttgttttcttccctgccatcaatgtggataatctataatcagttatgtataaatttcagttcattctaatatattctgtttgatacatatattccatctcagaagtatatcagtgatgtcagatgtacctagaaatagtgaaaggaatagtgccaggagttggaataaacctgcacattcaacaggttgttgctgatcacttaaaatagcagagtcccaagtcctcgtgagtcatggaccatgtcatgtagggagtgagacatttgttcagcattattgtgaaatatcagcatgactatagagcataatagagcattactgttatgattgttcagagaaagggaaagggctgatcattatgggcatcagagacaccatatggtgagtatcattaaataccatctcttgccctgtatctcaactagagttgttgttgtttagtgtttattagaaggattttttttaaaaaaattagtaagtagaaagtacagagtgttcccatatactctcttatccctcacccctcagtttccccttattaacatcttgcattaatgcggtatatgttcagaagcttaagggctcatgaaaaaaaaatgaaaaatgtgctacatgtgttacagttgttgagccaatattgatacagatacactgtcaactaaagtttacattagagctcattcactctagtggtgtttattctgtgtacagttgaccaatgtataatgacatatgtctgtcttactgtatcatacagaatcgtttcactgccttaaacatcccctgtgctctgcctgttcattcttccttctctcaccctgtatcactagcaagcacgatttttactgtctccatagttttgcctttttgagaacatcatatagttagaattcagctatagtttttaattgcctgggtttggttatttttgtttgtttgggtgtgtgaacaattatacaagatttgttaacttgtagttttagccaagttattaaaaccttactgtggatatgtgtggaatactatgagagaccaagaatccagactgttctaaataaccaaaaagtaataatagagataaatattacaggaatatgtttttggtacagtgatatgaaataatccccagatgatctttctgttgcagggtggaagatgtctatggatgtgacattcctggggacgggtgcagcatacccatctccaacccggggtgcctctgctgtggtccttcggtgtga

SEQ ID NO: 66346 - DNA, 836 bp, Homo sapiens
caagaatgttacagtgactacaataaggtcctagtgatacttaggagactaaaacttgtctgacatgtatgcatgggaaatgtttcaagtactaaggcattgctaatatcaatcaacactgaaattttaaaaatgtataaatccagttttccacaagtagtaaaacatttataacaattatggatgccttttccattagctatttgcaatgctgttaaaatagactcttgaaaagtcataaattccattcctatgatgtaatgttatctgccttcatcattaggtgttccaccaggtcctgcctatgggaagctgaaaaatggaatttctgttgttctggaaaatggggttacaatttctccccaagatgtcttaaaaaagcctattgttggaagaaaaatctgcatattgggtgactgctctggggttgtgggtgatggaggagtaaaactgtgctttgaagcagacctgttgatccacgaagcaaccctggatgatgcccagatggacaaagcaaaggagcatggccacagcacaccacagatggcagcaacatttgcaaagttgtgccgtgcaaagaggctggttctgactcacttcagtcagaggtacaaaccagttgccttggccagagaaggagaaacagatggcattgcagaactaaaaaagcaagctgaatcagtgttagatctccaagaagtgactctagcagaagattttatggtgataagcattccaatcaagaaatgaaaccagtgttcctgagtgcacactgacatgtctgtgaatatgttactgaacctatagtccagtttttttatttcttgttttagtct

SEQ ID NO: 66347 - DNA, 2394 bp, Homo sapiens
gagtatgagtggcgaaggcgtacggtgggtgtagagattttctgggcgacgtgacctaagaaatgactttagaactggctaatcattggttttggagggactaaaagtagttcctggttggtgaaaataaatcattaatgcgttttaaatgaaaaagaaatgcatgcgtcttgtaaaaaatgtgaaataaaagaggcataaagtcaaaagcagagcctatgccttcccccaccaaacaaacaggtaacctagttaacaggtgtgtcgtaggattcgaagttcgcctccagctccgagagtgcgcctacatctcttccaacaaaatccactcacacttgcaacgcctggcaaggctcttcaatatgtgattccttgactgtcctgtgcgtctctcgagtgtaaacacctctggggctcgtgattcggggctgccagaaagagaaggaaggtgccgccagcgtctgtttcttcccgaagtgaactcctacaacctagccaccttctccccagagctgtcgactggctgttgaaggccaatttttgtgcctacgcaggtcctcaacacagaacaaaacaaaaaaacaacaaaggccgggctaatagctatttataaacacttactggacgcccactctacgccgagctctcccgcgctccttggatacttttttgcaacgagatgccaatttccccggcgaccactccctcaaacaggccttcgcctccgcccgcgctgaggcccaggcccaggtccagattcagagccgcccgccggctggcgctgccctgtaggcgcctgcgcagagcgaccctccccgtcactcggagcgggaggcgggggcagccgggagaaaggaaagctgcgggggaaaagggccaaaccctgaaattacccggatgtggtccccgcgcgcgcatgctcagtggcttctcgacaagttggcagcaacaacacggccctggtcgtcgtcgccgctgcggtaacggagcggtttgggtggcggagcctgcgttcgcgccttcccgctctcctcgggaggcccttcctgctctcccctaggctccgcggccgcccagggggtgggagcgggtgaggggagccaggcgcccagcgagagaggccccccgccgcagggcggcccgggagctcgaggcggtccggcccgcgcgggcagcggcgcggcgctgaggaggggcggcctggccgggacgcctcggggcgggggccgaggagctctccgggccgccggggaaagctacgggcccggtgcgtccgcggaccagcagcgcgggagagcggactcccctcgccaccgcccgagcccaggtaaccgcgccatgtcccctccccttcccccggccgggcccgcgcaccccgcctgtggcttccccgccccggggcgggctcccgacgacggcggcggcggcggcggcggctgggagcgcgcggaatcctctgggagggcgaccgcggcggcctgacgagccgggccgggcgggccggctgaatgccgggcggcggtgcctcgcgtccctcgggcccccagctccgcttgcagctcgtgggagaatcaagttaaactcggacgggactcctgccgcggccgccgctcctctttgttgttctcagtagtttcacggtcgccccggctgagcgcgttgggtcggctggaatgtgttgccttagggtctaagtgaaagttgtaaattgtttgtctaaatttattttctccagccaatttctgttttgtctttgtcccctactttctcttcctagtcttgtcatgccagtttacgcttctggctttgatatgtttactttttgagtactgagagtgacagcggtatgcaggacacattcttagcacctaactgaacccctccttgcccccaataaaacatgcttcctaataaaagacacagctgatcttactgttagcactgcatgtactgacagtgaaattggtgtagggtggagggcggtggctccatcacttgtcccaaactgctgttaggatttctcaaactagattttcaaagacacaagtgtgtttagttaacctgaaaggtttatttgctggtgcagaggctttaaaaagccctgttgaagattgatagctgtttcccttcaaaaacctaagtacgtttgtttttatttaaaaaaacacatttatttcccaattagtttcttaatgcatttagtttttgcaccgtagtttaaggtggaattgccagttatttaggaataataaacacaacaggataatagcggaattaccctgaattgactttctgcaaacatataatcttagctaatttttgttagtaacctttgacttttgccagaattagcatccttctagtcttagtagcagcttggttactcgggtgttt

SEQ ID NO: 66348 - DNA, 2932 bp, Homo sapiens
ggtgggtaaactgctggcactttaaaatgactctaggcagttataccaaacatatgagtcctcattgtgttctttatagtcaaacacacataagcatttgaaaaaatgccggtttcacttaataatccccttgctgcagcagtaaaaaggtttaattttaaaaaaatctctaccttggagtatgtctttttaatagtgtgattaaatgggaagtatgcataaagcatttctgcacattgaagtacagtgttcttttctaggaaaagcacttgtgttattgagctgcaagctgaactagctgctttttagtgggacaccatttttatttttatttaacaggatgacagataagctcagatagctatttagatttgagtatttggcaggtaattccttggaaatgaataaagtgagctggccacttcgaggagaacatttatagccagtgctaaaatctgatgtttcaagtgaaaatcagatttttgggaaactcctgtcactatgacttgccagtttcttaatacttaaagacttttctgatgagatgggtggtgatattaaggaatgtgattaaaaaaaatatgttgggctgggcacgatgatgcacacccatatttctagcactgtgggaggcggaggtgggagaattgcttttggccaagagttcgagaccctgtttctacaataacatataaaaattaggtgtagtggcatgtagttctagctgctcaggagggtgaggtgagaagattgcttcagccagggagttcaaggctggattaagctaggatcgcaccactgcactcgggcctaggctacagagcgagactgtgggggggggggcagtatgaggaagtgtgtcaacactgggaagatctgtgtaactcattgaaccaatattttcccaaatgaccaattcatgttacaaaatcgtgcatgggtaggcgatccgttcaaagtacaacatagacaaatggatttttatatacaccagagccaaaaagttcactgatacagtgaattccacattgcaactaacctttcagaattgccacttgagttttggtgttgaataaaagatgaatatccattgttttctgagaaggctgttaaaatactcctctcttccaattagctgtccatgtgagacacgttttcttcatgtactttaaacaaaacaacatatcatagcagattgaatgcagaagcagatatgggaatccagctgtctcctattaagctaggcattaagagaaatttgtgaagatgtaaaacagtgttactctgattcctgactttgttttagaaaattctgtttttcataagatgtttatattaacgtaatgggtttattattttaaatgaattaataaagcaaataccaaaaattttagtagttttatttatttataatatgataaatatcaatgtatatagcccgcataaaagctatttggtgtctttaataatgaagagtataaataaaggtccaacttggccaacatgacgaaaccctttctctactaaacatacaaaaattagctgggcatggtggtacatgtctgtaatcccagctacttgggaggctgaggcacgagaatcacttgaacctgggaggcggaggttgcagagagctgagaacatgcctctgcagtccagcctgggcaacagactgagactatgtctcagaaaaagaatatgaataaagggatcctgagatcagagagtttgacagctgctgttttaaagtaactatttctatgcattatcgactaaattactgattgattgaattgtttttatggtttgtactatattgctgttatttctaaggacgttagtcattcagtttctgttcagttatcagggaacatgtaagagtcagacttaagtaaaaaggggaattcattggcttggtctggagatagagctgacctcagattgctatatccagggtttcaagcagcatcaccaggactcttgactttgctttctttctgtttctcaggtagtttgcaggctaactatccccagcttcaaggaagcatgaagagggccttcccccccccacccccccacccccccaccccccgtagttccatcggaagtgctagagctatgtcacttgcctgccttgcgttctttttcatcagaaacaacactgtggccagggggtggctctggttagtctgggaattgtcccacctggccagatggggagattctccttggaaaatcagactgctgttttacaaatggagaaatacatgctggtacacaaaaactgatgtccacctatagtactttgttatttcttcttttaacagcctttaatttattaatccaaaaagggtaatttttaaataagatcatttaaactgaaggtggcataccaaaatgacatttaagacacataggtaaacaagaagcatacatctcgatttgtcctttgtcattcatcttaaaagttaaaaaaaaactttttgttgcttttattgctgtataaatgtgctcttggaagttcgccaactgccctcagtttgaagaacctcaacttgctgtctaggatttagtctttagcttgtgctgcagacagttgcactaaccgtgaacacctttttttcctgttggtaaacctaagtttagagtttattcctagtaataacattgatatattaccaggcccagcttttttctcctcccctagttaaatttaagcacttttgcgccgggcatggtggctcatacctgtaatccagcactttgggaggccaaggcgggcagatcatgaggtcaggagatcgagaccatcctggccaacgtggtgaaacttgtctctgctaataatacaaaaattagctgggcatggtgatgcgcccctgtagtcccagctactggggaggctgaggcaggagaatcgcttgaacccagg

SEQ ID NO: 66349 - DNA, 638 bp, Homo sapiens
ctaaggaagactagacacccagttgactgtagctgccaactgcttcaggcctctgtgggggcaggggttgggcagagtggggccgtggggacggagggggcgataccacttccagggggcagcagcaggccatggccaggcaggaaagcaagcctttcgccgccagggcaaacttttcaagacaagtcagaaacctgtatttatttatttatttttacatttctcaatgtttaaatgctggcaaatgattcaagaaagtttcaaacactttgggccaatcaaaacaggtctgagggccagatttcagcctcaggctgccagttcactgacctcagacccagacctctttggagccacgtgccggctggcactcggcctgctgtttccacaggccgtggggaaggtccgcagtccagccctcccgcccctcagctgtcattctgtgagagacactgaaagatttcattttgaaatataaatgtactaagcattttctgcaagtttgtcacccaccttttccaccgtttttcagcaacagcttgacatagcttaagtgcacatggttgactgcaagctgagcaggtcattcgtctctagtcctcagttctatcatctgtaatgtgaaggggtccaactag

SEQ ID NO: 66350 - DNA, 1032 bp, Homo sapiens
ccagcagcctatgaagctttcaaaagccatgctcagtcttatcagctgtctgtacaatcagtaaatgcatctaggccccagaaacctgccttatctgcttgagtttctgctctccagagatcttggctcagtaatttttcactctcatctgggctctttgatgccttcaataattttcatattagtccagcttttctagttgttcttggtgggacaattgttctggtttacctattctgacattagcggaagtagaagctcgatactactaactatacttgatgaagacccattgagcaggcatagagtatagctgccagcaaagcagtctaagtcccatagctcctcggaatctgcagtgtctgagagaggtgactcatggcccagcatgtgatgttgcatctggagtcagaggtgtgttctagccaggcctgggagctctatgtattgcttagctgtcccagtaatggtgtctcttcatccaaaagggcacctgaggcagcccatgctgtgctgagattttggatctgtgcccagggcccagtgccgtggaggtctacctagaaaatagtctctgttccaccttcaccatgatagacacagtgagctctcggtgtgggttcagtgccctgtagttcaaagacaggagtctgggccaaaggtcggtgttacctcatccttgccaggggctgaggaagggtgagagatgggccactcctggagctactgcttcatcttctcatgaaggtgaatgaagctgccactgcaggtaggggctcagtaaggacagagctccagcccaggacctccacaccttgcacaatgcgattttatcgttgttatggactgaattgtctccccgcaaaattcctatattgaaatcctaacccccaatacctcagcatgtaaccgtatttggaaatcagacctttatttatttatttatttattttgagacacagtcttactgtgtcgcccaggctagcatgcagtggtgtgctcttggctcactgcaaccttcgcctcccatgt

SEQ ID NO: 66351 - DNA, 3557 bp, Homo sapiens
cattctactgtttattagactgttatcttcttaagggcagaaagtctgaattaacttcacattctcaataccacaaactcaaaacctggcaaaatacaagcttggtacatagcgattcctcagtgttcttacatgaatggtcaactcattctgatccaaattgagatgttgtaattttatcccatgtaaacaaaagttttctcctggattattactctaagtatcgccaaaaccaaacaatccaggaatctgaaactcattaaccagaagaacgacaagcataagctacctttcaattgaaaggtccagctttgaacagtgtctgtaagtgccaatcatcaggcagtctgaactaagctatctcctttatccagatttcagatgagtttttattaaaatcctacagataggaaagaaataagccaagtctgatatgtgaaaccaccatttcgacagagctcttatttatgtgtactttagaccacctgggaaagatgagatcatttaagcggcagcgccatcatctctctttatttgaccccaacaatgctctcaacctaacagtaaagaggcatgcaacaaccaggctaaaccacattgtcatgcggtggcagcaggtaacatctgcccctttcataaaggggaaatgctaccataaagaacttaggaccttccctaaaaatgtcggatacagaggtaccccaggcatccccttcccccaccttcacaaatctactcctggaatctgagacacaggtcctttgtctgaacaatgtgggaggagtctgtctgcagtactggtgtgctggcaagtgaagaggagaattaactgaaaactgtataaaccgatgaagtttcttaattaccttagtgtccattttttcttcatcctgcacactgaacagttttaaaagacagccagtgtgtcagtgtgtctttccgagagttgaaacgtaccgagagaaatacagttaagataggcggcagtgagttgggctgcttttccaaagctaagtttctcaacagcggaggggcaggggatggcggtgataccgaccatttgaacaccccttccctccccagtgagctctgtctacaggcctccatttctgttcttttctccatctgaacaagttcttgtaagggaggctgaacgcttttagaagacactcggcggcgcaaacttgcaatctcgaagctttccgtacccaacagcgaacccacaactcctcgagcccgaccttttaccacctcactgaggtttctggtgccacgccagcctggtgttccacgaatacagcccaagtaacgtgaacaccaccggactgggtcgcccgagaaacttcacactttttaccaggcaagacgggcggaaaagcgtgggttttcgcaaggtgacccatcttcacatctggtcgaccctcggctcctcccagaccccttcgcggtggacttgggggcctcgccgggttcgccttttccgtcccacgctcctttctctcgtctccccacccacgcccggggccatgcccagctggacctccccacccctgcactcaccctggcggccgacgatctcggcgacgtgctcggagctgggcaccgggacgcactcggtggtgttgacgctctttctccggagcagggccgcctgctccccgttcagggcggccgccgccgccccacaaccgccggggccgtaggcgtgggacagcatcgccgccatcatgccctgggcatcgtcccctccgtacagcacccccgccgccgccgccgcggccgccgcctcccgggcatcgaacctggcggctggcagcagcacagaccccagggacccgcccgggatctgctgggtctgagaggcggtggccgcgggcggcgacagcagcagcagcgacgaccggtcctcctcctctgcttcctccagctcctcctcctccagcaggtctccgtccagctccgcttcctccccctcctcctcgtcctcttccagctccagctcggccgcctccggggccccgggccggccgggcggagcccgctcctctggagacagctccgccgcccgccgggcctggccctgcgccgccgctgccggggcccgaagcgccggggcgccgggctccgccgggctggggtcgtcgaggcctagcgcggccaagcgctccctcagcaggagcccgtccccctcgagctccgggccgcccgagggcggcggcagaggcggcggtggcggcggcggcggcgggggcggctgcggcaggggggccggggccgccgccagggccagggccgcggagctgccgctgggcatcgcggcggcgcgctgtcaatggcggcggcggcggccgggtcaggcgcggcaggcggcgagccccatggcggacagggccagggccctgctcagctcgcaaacacctttcctctggggaggcggcggggctggggacccgggccgaggagcgccagggccgcccggagaccggagagggcggggtggaggggcaggggaaggaggcagaggtaggtaactaggtgggtgggtggggacggcggcggggcgggctggtggaggtggcagcggctcccctctcagtgtttcttttgtttcatggccttaaccagcccccggcgcgcgcggcggcggcggctacgccccacgccgctctccgaatgaagccggcgcgctctgattgggtgcttttaatctctgggagcccgccttctcctcccgcagccttccaactcctttccccagccccaccccccaccctccttcgggccccgcccctcccctccccagagctctctgattgggtgaccgggaccagccagttcccgaagcctactccttccgtcctctccccgcccacctccctctcattcctcccggcacgcgcggagagggactgtgattgttcactttacacgtcactctttgtgacgtccccggcgggggcgggaaaaaggaggcggacgaaggcgctgcagcagaggctgaaactaagggccaagcggggttttggcgcaggcgcgtgcggtcgaagcgcacacctggatttgtttccccccaacccttcatccctgtagcccatgtggctgagttcttttagggaaggcactgtgtgagcggcctggagcagagctgcaggcataggttcgagagcattgtttccttgggttgaggaagagatcgcccccttcagaggaagggccttaagaagagtcacggaaggaggggccacgcagtatcctcctatcccctcgcgggggcggtttcctgagccgcgtggctcccgggccttccctctcggactcgggaatgctcctcccacgccccgctggcccggcttctctgccggcaggatggttacatcagcagcctggaggtgctgaagtttagctcttcggggttttttgttttttttttttaaacggagtccagctctgtcgcccaggctggagtgcagtggtgcgatcttggctcactgcaacctccgcctcccgggctcaagagcttccccttgcagtggctcacgcctgtaatgccagcactt

SEQ ID NO: 66352 - DNA, 604 bp, Homo sapiens
tgacgtgacaggaaaatggggggcaagaaatgatttcatcctctccaattttgccacctgggaagcctgattccatggaattgcccccggagcagcttcccatagggaagtcaccaaggttgagtcctctggccctcttcccaggctgtggggaggaaatgtttacattcttgtctctgatgactatgccactaaatggttggaaaattgcccaagtaggaggcagcagttcagattccaggaggtgaataacagccttgaagtgcacattagtgagggcagtgacacacctgccattgagcttaggagtttggggaaaggagtgagtcctcatggggaggtgatggaaggggtgtgtaagtgtcacagctaggggtgaccccggtagggagcaggtgtgttttcttgatttgctggttgtgagagcaaggtagtatgtggtagtgttccacaagcaggtttggaaatcaggccgaagttggttgacattgtgactttgggctaattgtgaagcctcctaaatcctgggtttcttaatgtatatagtccttaccttgtagagttgtgagaactaaatgagatgatgcagacaaaatgcttagta

SEQ ID NO: 66353 - DNA, 1249 bp, Homo sapiens
tatttgactacacacacaacaccatgctatctactgagaagattttgaaggcttgtaggccagtcattgtaatcaatctagaggcccgtgatctagtgaagggaacatgtttcagacatatgcactgatcagcaacactacggagccacacattactggtgccagaatggttggtgccaagggtccgttttacagaataccaaggcaaggggatgttgggaacttgagtgaccaggtcaggccttgtgaaggaacagatgttggtttttactcaatactattcaccagtgataccaaattaaaccagtaattgaggggattctgcctgagcgacttttgcttctgtacgttttcttctgaggagtatttccagatttccagagaaatgaagcaggttaattaagatgctaagaggctggcacaatttctgagcggattaacgtcatgcaaaatttcagtgcaactaactggtgtttgttcctgcttgcaaaagctgtgtttgtacaactggggcagagtccaaaaggactgaaagaagttaattagttcaacttgccaaagccttgtcatctggtttcaggactagggaacaggacaaacccaatgaatataaatctgtacacatatgcagaaggttgtgattatgattaatataactattcatttccatgttatcaaagctgtggtttaataaattgttagctgaaaatggaacacaggtcaggagttttatggtgaaaaagtgaagaatggaaaatgtttatactgacatcagtagttctctagccatggtccagtgccttgaaagtcacatgggatgtttgaaaacaatacatattccaggctatcactgctagagttttattcagagtatatggaatgtactggaaatctgtatttttaaccagttcacctagtgatttggttgcatggccaggtttggaaaatattggtcaagatatgcacaaaatatgtgcacagaacactctgctatgcactgtactcaaagagtgaaaatggaagtgggaccagttgctgttactatcagtaacctactagcagaattttggcttcctgttttcacaattttatgctatcctggcctagaggactttgttctagaggaaactattcttctaccaggagacacaattcttccattgaactgggttaagactgtcacccagccacttagggttctatatgcctctgagtcaacagacaaataagggagttatggtactggctg

SEQ ID NO: 66354 - DNA, 736 bp, Homo sapiens
aatgaaatttcagctcttcatttatacctcatttaaaggatggcttcattcaatgaaacagtatctgtgagaacagattataaacttgaaagtgcttataattgtcatcactaccacctccaccactatcagccccaaaaagtccatagaccacaagatctgggatagctaataagtgtcatcttccagccagctttatcaattgggagtggtttcttggagctctgggttgagaaggactcaggctgcacacaggatccaagggaaaatatagttatgtctattatgtgaagacatgatgagcagagggtgatcacatgagaatcagaaggtgaacatgccaggcatgggtgggaaggctggccttttggattatgatactggccaaaacttcaataatgactcaaagccctattacattgcccaagaattacatcacctcttgtcaccctatgactcatgttgtaaccacagataaaagaacaaaattttagtgaactagaagagcctggaaagttttaaatgagctgtatctcacaatacaaagccttcttccaacatttttagaacttacattttaaaagttatgattttcaaattgattaaatgaaacagaggtgatcattttagccttgggaacttctcaccatcctcaatcttcaattcccaaaattacattcaaaaatagcttattcaaagcatttattttaaaaagaaacatcctcagactaaagaa

SEQ ID NO: 66355 - DNA, 551 bp, Homo sapiens
tcactctcctccaaggtcacttggataggaaccacagatttctaggaaagttatgttattaaattggctacttacacataaaaggaagatcacatggcagaatttagcccaggatgttctggactgggaataaaacaatcctttggtagggaatcccagtgctaactagatattcccaagatctgagaacatgaaaagcagggtactatacggagttaggggaaattgcagggctaacaaattcatggaatgactcatggcaaagtatttgcgcaaactggttgcaatgaaaccacctagggaatatcagggctatttcactagatagaggccactggttttgactcaccgtgaaaaaatgcaagatctatttgtgacaacttggatgaacctagaggacatcacatttagtgagataagtcaggcacagaaagacaaataccacctgatctcatatgtcaaatcttaaaaggccaaattcaaagcagagagtaaaatgatggttaccagtagggctggggaggtgctggtcaaagtgtacaaaaacttca

SEQ ID NO: 66356 - DNA, 2043 bp, Homo sapiens
taaagattaaggcagctggctgggcatggtggctcatgcctgtaatcccagcactttgggaggccgaggtgggcgggtcacctgaggtcagtagttcaagaccagcctggccaacatagtgaaaccccatctctactaaaaatataaaaattagccaggcatggttgtacgcatgcctgtaatcccagctacccaggaggctgaggcaggagaatcactggaacccgggaggcagaggctgcagtgagccaagatcaagccactgcactccagcctccaacctggatgacagagcgaggctttcaaaaaaaaacaaaaacaaaaacaaaaacaaacaaacaaaaacgatgaaaggagccattagccaaggaatgtgggcagcctctagacattgaggacaaaccccgactaacagtcagcaaaaaatcagggacctcagtcccaccctatcacaaagaaatttccctgagtaatttgaattatctccattctttaattcacacccatatttcctcttgcctttctactgatctttaataaaatggcaatagagcctatggaatgtcattttaaaaaaagaagaggaagaacaacaacaacaaagattgtgaccattccttgaatgaatacaaagttccagtaaagttgagtgtgtttctgactcactgagtaataatgcattcacccttcccccagccctccacccccagtgttaaatgttttcagagttaggtgactaattcatcctcttctcacagcagcttctgtaaaaccaaaatcttgtttgttccaaaaagccacatgagtttcttaaaatgaaagtcatagttggaaggttatagttttctcatttgtaaaattatactaagtgactcggctcttgtaggagacagaagagaggaagagaaaggtttaaaagaaggcattcattcccagtagcacattctaccatgttgctatttgtatcagtcccctcaagtttccaaatgtttctgttttctcacaactagctactgttgggtgtaaggccttcgtatgaatcatgctgtgttcaacaagcatattcttgcttgctatcaacctctcccaacacacacacaattaactccctgctttggttctctctcagtccagggaatatttatccagtcagcgaaaatcaaggtaactccccaagaagcatattccaatacctaacaatttaccagcgttttttgtttgtttgtttttgggggaagcggttgctcccatttatgaaatacattaccatacggaggccactctattaggtattttgttagcattaattcattaaatcaaaatggaaagtcatttggaggctaccaacaaatgcaacaacaacaacaataacaaatcaagctgtagatgatctgaatttgtatgtgacagccattctgcctcaagagtggagtgaaatcactagaccagccctcagtggttcattcttggatatacattccccactgagaattctacagaagctactgatactaccccaggagaaaggcacatcgtcataaaattgtgtatgtaatggcaagagtctggcaggctccttgactccaggggaatatggacccccgatgaggagtcctgcactggagcagtggtctcaaaactcctttgctaataaatcctttctgagacaaaaacgtattcccaaatttatggatatttacttacaaataatatacatgtactgttctactaatatgtatattaaaaaacactcaaaaattagaatcacaataacattagataaaaacaaatattaaaaggtcccactcccagtgaatggttttacacatgccctacatcaggggccccaagccctgggcggcagcaggctcgtactgatcttcagcctgttaggaacagggccacacagcaggaggtgagcaggtgagcaggcattcccgcctgagctccgcctcctctcagatcagctgtgtcattagattctcattggcgcacaaactttactgtgactcgcacatgcgagggatctagattgcacactcc

SEQ ID NO: 66357 - DNA, 2160 bp, Homo sapiens
ttattacaatagctaaatgacaattgtctccaatacccatatacattccctgaaaaatgcttcagtcagtccacaaacacgtacctccaaactactgaatacaagtttatattatcttctatcaatagcatggcttattacaaaatttagtaaatgtgtattaagtccacggatgtcaattgccataggcactttcttgagcttactgggtcacacaaactgaagacatcagcagcatgaccacgggattgcaagattacactaaggtgaaaaaccttgaatcatttaaaacaggatgtctcaacctcagcacaggtgacaatttgggccagatcattctttgttgtggcagctttcctttgtattatcgaatatgtagcagcatctctggcctctacccactagatgccagtatcacaccctccccaggtgtgagaaccgaaaatgtctccagacattgacaaatgttccctggggagcaaattttggtctaggagtctaaaaacttagtacagtgtgtcagtttcaaaagagtatattctgcaataccaagaagttccaaaaaaacttcaggcattccaaatagctgctttatacaaaactttcttggatgaagtaaatgaaaccttgttactgtagatagctcattcttccacatgtgcatgcttaacacttgtgatgatgaatctgggacaggctgggacaggagccaacagtgactgggttttatagtttcgatgaattacacctccttttaacccttcagtggactaaccatccctgccaggctaaccctttcttcgcaaaccatcttccccgacgccttccacataagatgccctcctgcgggccctcaccttttgacactgcctcccaccgcactggggtcaactctcacccaagggttccgccaccttccaccaccaaaccagcctgtccctgccacatgccccccgggccccagcgctcatcctctgcccaggcccgctcttgacccctgaccccggcctgaccccgccaccccctccccgcccccagggaggtacctgaagtagtagacatcgctcttgccagcacttagcccagattttcggatcacttcctccttcttccatccgggggggagggccgggcaatccatcctcttcccgctctccgtggcccggggtcccctgggccccggccccgcgctccccgacgggaaagggaccggctcccgccggggggcgccgccgccaccgctgccgccgccgccgcagccgccgccgtcgccgccaaggccgctgccgccactcgggggacggccgcggccccggccccggccccgtccccgtccccggccacggccccggccccggccacggccacagacgccgccgccccggcccgcctgcttccaccgcccccggccacggccgccgccccgagcgccttccctgcgcacgccgctcaccggggacggggcgagcgcgctgccctggcccccctgctctatggcggagtcgccgccagcgccgctgccgcccgccgcactctccccctcctcctgctccgggcagcagcggcctccccccgggtgcgcgcgcatccagccccctccccagccggcgctgcgcttcttccgtaaccgagcccttggaatcccggagacccgccccgcccgcagcgcggcgcgcgggggacgcgcgcaagcatcatagagcgggcgcgcacagagcggccctcctgcccggggcgtggccccggccaccgcctcttaggtcctccaagcgctatgggcggccatcttgtctccgccttctcggggccacgccccctcccgcgcttttccggcccccactgggcgcgcggagctgggaaggttggtcgggctagccaccagctgggggtgtcatagtgactgtggttagtttgtttcaaacggggtaacctccaccattatgtgattttacctatgtttgcttcccaattaatgaataacaagcaaaatagatcttatattacataccaactcggctattcatttaagggggtgatagccccttttcccgcccctctgcacaaagcttgcaggggagcttataatgaaggaatgaagcaaagtgtcccattcgctgaataccagttccctcctgagcctggcttcagagccattgacag

SEQ ID NO: 66358 - DNA, 1384 bp, Homo sapiens
ggctaaaatatttgtaaatctgagagtgagtctacttatttaaaagcaatattaatttcatgtgccattttcataaaattattccagcaaaaacattagttgcaacagcaagcctttcccattgttccctcagtgaacacccaaaattcaaaatataatcttcattttcatttgtcttacactaacatgtgccatacatcttacaggcaattactgaatatgtctttgatgcagtaagacaggttctgcctaattctctgtctccacagggttcaatgataaactctggaaatgaaaaaaactcaaaaccttttcacgaagtcttcccccgatttttatttaagcagtaacaggtttagttattagctgtaggtctcccctgctaacaacaattcctatggtagtaagagctgcgtaggaaactatcagtaaagcccatataagaagccgtgaaaccaggcttagaaaagactgaaaaatgagtgttgtcagcttcactcctgcagcagcgtgcgagggcaaaggtctgagaaagaaatcctcagttaccttttgcagtagcctgatttccagcccatgcatttgtttatttatgaatgcctttccctcatgcaagagctcaaagtgtacccgatggacttaaaccaacagtaagaagcggcgatgacagacgctgagtcccagctgagttgaaatattggtacaagaaacataatgagaaggaaagaatctagcattttctgaacacttagtgattaggtcagtgcctccctccgactttgatgtgcatgtgaatcatccgaggattgttttaacaagcatattctgatccagcaggtctgggaagagacctgagattctgcatttttttttttacgaggttttagcgactgctacctgctgtttcccagaccacactttatcacaaatccagatccttcatatttaatacttaaaataaatttgagagatagatattatcatcttttaaaacagaccttaaaagagacgttaaaaattcataaatggggaaacatgagggttatctaataacaaagttcatattctttccagtaccctaataacaccccacaggagtaactgatgctttattgtatgttactgttttgaaatttgagaccgatgcctcaaatatgcctgatcaccagtgacatttgtctaaaattcagatcttcaagcccctgcacaatctatttcaccataatttattgatgaggtgcctaaaagaaggtacttttaatgataactgattggtgattcttgggaccaggaatgtttgggaaactgatcatctaggtcacactttagttttgaaaactccagtagggaacattggtgttctgtgtttattagagaactttga

SEQ ID NO: 66359 - DNA, 1792 bp, Homo sapiens
agccgaatggaacaaagacaaaacgctaaaatttgtgatgtgggcctaactccaaagccttcaagaaaaaaaaaaaaaggccaggcgcagtggctcatgcctgtgatctcaacactttgggaggcctaggagggtggatcacctgaggacaggagttcgaaaccagcctgaccaacatggtgaaacctcgtctctactaaatacaaaaaaattagctgggcgtgatggcgcatgcctgttaatcccagctacttgggaggctgaggcaggagaatcgcttgaatccgggaggcagaggttgcagtgagccggtattgcgtcactgttgcccactccagcctgagcaacaagaacgaaactccgtctcaaaaaaaaaaaaaatagccatttgtgctttcaatctctccgcttccggcctccacccggcgggaaaaaactcccgcacgtgggcctccacgattccttggcatgcgtgtcactctgggcaacaggctggtcggccacgactgcgcaggcgagaggcacagagcgactggagactgtagtcccccggtttccctggagaccaggcggaagcggccggaagtagcgctgcggttggcagcggcgggatggagaagctgggggtggagccggaggaggaaggcggcggcgacgacgacgaggaagacgccgaggcctgggccatggaactggcggacgtgggggcggcagccagctcgcagggtgcgccgcagccagaggagccagcggcctccttgggtgtaaatgagaagggtggggcaggcggacgctcggggcggcggccactggggcgcgaccgtccccgccccactcggctcctctaagagagggctgcctccctctgccttgtgttacgcggcgggtacctctagaggaatggcttcacccagcaggagtagggtggggcgcgtccacactacaaatacgtgtcgagggtttatctgcgccgtcctttcctctgtgaggggcgaggtggggcgggaatccctcagccagcccgacgaaaactgcagaggcttctgggccttttaactttggagaagttgaggaccttgtcgctcatttggcagaaggtgggacccggatctcagtcctggcaggaagggatggctcagaacctaggcggagtcaggtccgctgtggtcacgtctccggtgacccacttccagctctggtctttaccttgtaccgcccacctcagggcctggatgtaaaggcaccggttctcatttcctgctggttttgtttcattcattaatttagagacaaggtctccctgcagcctcgaacccctgggctcaagtgatcctccgccccagcctctccgtcccgagtagctgggacagcaggcacgtgccaccacacctggctgattttcagatttttttagatcaggtgtagctgtgttgtccaggctggtctcaaactccagccacaagcgatccttccacctcagcttcgaaaagtattgggattacagtagttagccatcgtgcctggccttttaaattttggaactttaggtttacctgaaagttgcagagctagatccccctagtgttaacataaactcagtacatttgtcaaaactaggaaattaacattggtataatactattaattgaactacacgctttattaatattctaccagtttttctgctaacgttcattttctgttccaggatcccaaccagaatattgtattgtattttgcctgtcttgtttttagccagtgttgagagaaggagtcgcctctgtcattccct

SEQ ID NO: 66360 - DNA, 893 bp, Homo sapiens
ttgctacagcaaaatgcttgagactgggtaatttatagaaaacataaatatatttctgacagttctggaggcagggaagtccaagctgctggcagatgtttggctgtctggtgatggctgctctctgcttctaaaatggcgtcttaatgctgcattctttggagggggggaactttgtgtcattacatgatggaagggacagaaagcaaaagggatccaccagcttccttcaccaagctcttttagaatgacattgattctgctcatgacttaaatacctcccaaaagtctctgtcttccaatactgttgcattgggaattaagtttccaacacatgaatttagggaacacatgcagaccacatgtggttttgcattgtgttgctttttcaagcctggctcaatggtcactatcagtttgggtctaatctagaagcaaaccaaatagtgattttaaacaagggaagtttaataaaaaagttttaaactagttgagggagagtacccaagaaagggcagacttggaagagggagcccaaagtctggattcagaccttgttgaaaaaagggtaactgtggctcgctggattgcagtgaaagttatggtttgctcagaccagtgctggctggtgtttagttaccaggcaagcaggaagccacaatggtgactcagtgtgtgagaatgcagaaagagttgggggaggggcactagtgctggcaggacatctggagtgtgaggtgtctcttttgggagggtcgtagaaggtgatcaccagcccggatgaggtctataaagtcactaagaataatacattaccagagcgtggctagggcagagctgccccagatgtcttcacacccacgcttcttattgatggtgtagctgccagaaag

SEQ ID NO: 66361 - DNA, 1483 bp, Homo sapiens
caagcctattgagataaattcccctgttatttccttgtacctgtgtctcaccctctgccccagggtaagagaacagctgccttcagcttattgtcccctgaaactttgcagagccttctgacctttcaaaaggcctgcttctttccctatagcttcttccaccactctgacagatctgccacacctcttttgagttcccacagaggtaatacatgccacaccacagtggaatcacctgcttgagtatcagtgtcctctccaggctgagctcactggcttttagctctgaatccacagcactcagcatatgactttagctggcacaaatccgatgtccgtaggtatttgttaaatgaatgaataaatgaataactgattatctttaatgaatcaagtcttgccaactaactcacctctggtgaaacgcattatgcaacagtgttaaacaaactaaatgcaaaatgccaaagtttcgcattacaacagatctcttcatttgtccgactagaaatcgaaactagaaggtgaagtcaccaggaaatgtttgcatgattatagagcctttgtcaagttccagtcatggttgagcggagaatgcagattgtgagcaggatttccagttcaaagaaaaacctggattttctggagtaaaaacgtaactataattggaactcacctagtagaacttatttacgcactacacacaattaaaattgccaagtcagcctacttccaattaggaaggggatcttcttaccccatctttctacttcattttagatgaactgtcttctcaactcatgctgataatttttttcaatttgtttacttacctataacttctcaaagaaatgacagcttctgacttagtaaatgtttaaagtgaaactaaacggacaaaaagtcatgaaaggtgaccatggttgtcagtgaacctccattttgccacaattctgcaaatctgttaaatgagaaaatggggctagataatttctgtgttctcatacatattacacttcaattaaacaagaaataattgagtcattccacgaatcgataggctggaggaatgcttttaagtaggaagctgacaagtaagctataagtttgctttcttttttccttttcagtaggaggtaggatacctttactcaaacaatgttttggggctaagaaaaactgtacctgagagatgttgggaggaacaacacagcactgaaagtggttttggtggttgccactagagtttcctaataattttaccaagtggtttgaacttttgccaaaacaaatgattcatcttcttctctttgggaattgtaatatatgtcaacagtaacacactagtatgttaatggaagaaattttatatggattacagagtcattttcttgtgaggaaggctcataagaaagaaattagatattttttcagtcaaatgttggcacggttaatattattgttttatataaatatatactcc

SEQ ID NO: 66362 - DNA, 1177 bp, Homo sapiens
cagattgaggctggcagtgggaggtaagggaaaggtgaactttctagtttcccattgttgctggcaaactgtaacctatctttcctcattaaaatacacatgatttggagctcttgctgtttggttcttccaccacctatccttccttgttatcatcatcattcagctcccaggcacttcatttgacacctgctcagtccttttccctactcaactcttgctgtcatcgcaattcttttaacaactttaataccagtgactatcactttatgtacttcgtgaccatctagtctccaataacccatacccccacactagaccttgtcatctctaggaatagctcccccattaaaagtttaagttttaattttgtactctgatcacaaatacctccttttctggatatcctttctcctgatttccattatgctttttcttagacatccatgagatcacaaatcctctaaattttttccccaaaactcatactatttcaggcatgaatcctgccctcccatgcaccacttcatggtcggcacattgagtgccaagggtcacattcctgaactggacaggcacgagtcagttgactgaatttcagctgaccaaaatccaagtcgctcaaatccagtttgccaagtgaccaattcataaaaggacaattcattccagtttttcaaaattatttttgacagtgttcttgtctctgtttctggaaaaaaattcctttatcttcgtgctatagactgaaaatctgtgtcccccacaaaattcatatgctgaacccctaaacccctaatgtgatggtattaggagttggggccttagggaggttattaggtgataaaggcagagccctcatgagtgagattcatgcccttataaaagagaccccagagacctccttcaccccttccattatgtgaggaaacagcaagaagacagccatttctgaaccaggaagcaggtcctcaccagactctgcatctgccagtggcttgatcttggacttctcagcccctggaattgtgagaaataaatttctgttatttataagccacctagtctatggtatttgttatagcagcctgcatggactaagacactgtccctctcctttgtctctgcccaaactctgcatttgagttaggaaatttgcttctgttgaattggtaat

SEQ ID NO: 66363 - DNA, 2108 bp, Homo sapiens
atggtcaacaatcacacgtccagaattgcctgagaattcctggagttcagtcttagatttgtaattgttacatggaataacacatggctttcttccatcttaccacttcatcatcttcatggtagaccctccagaaataatcaaaagcaggaaataatagaaacaaatataaagcaaagtcaacaggaaacacagtaaatggagtcattatggattaatgaaaggacagtcatggccctgtaaatcgaagctaaagaagttgttttgcagttgagtagaagcaggcaggcatatgcaaagagcaccaggttaggatttgggagacctgggtttcatttctggctttgccttcggttgccttaaaatttgagcagatcattgaatgtctccacatctcctttttgtttttgtttttttttaagtttttttgttttttgttttggtgtgttttcccatttatttaatgaagagattagattaaatacgtgctaaaatacctcctagatctaatgtttatgtttctgcaatgcagattcttaacattttagtcgggcttcacctctgcataccaatctgtgaaatatgcctaaagacataggcgtagtgtatgaaatattagaaatctatggtgaggaactcctgaaaatgactggttgatgttgcatacccctctggtagtttatgtgctggttccccagagataatgaactcaggttgttagttgtgaaatgtcatttctgttattcattctgaagtgaggaaacaatggctgcctagggaatttttaatgtgaggtatggagctaagtcatcactaatgcattgtaatgtgacttttctaatggagccttgtggaagattatgactggttcagttttgcctcttctttaaattgtgccaaatgacaagaatgcaggcatttggccaaagctgaccaggaacttttgaggaccatccaattcactaagtttgtgattgatcacaaatttgagttctaaacacatagggaagaaggtggggaaactttagtcaattacaggttttaccacgctgggaaccaaagattttcctttcttttatcttgcattttaaacagattgcttacaggaatgaaacacccaaatactttctccatttgctctcctaaatgtttgctctaatactcctaaaacaggtttttgcttgggtaaataacatggaaaggcaaataactccacatacaactgtttacccagtggctcatgccagtgtgtggtgggcagtattgatttttctggagttatacagctcttctaactaagatggttaaaggtcatagtatagttatcaggtgaggtaatggtcatgagggtatttaattgccatagttattcaactgtgtatttttgagataccaccagtagatggtgattaattagtggctctttttaaaaacaagatacaactgaaaataatataggaaagaactctttgtatcaaggtgttcataaacacaattagaaaatcactgcccttttgtgttttagatgatgatcgtgaataatagtatgaagtcaatgatgttgattatcttcagtgtttatcttatttaatatacacttatttcattccatgtggtctgtccacaaccagctgaattcagaccttgattattttgcctgtttcccacaattcacacaaaataagcataaatgccacccttggcacatggaatgctgcaataattgtatgactgagttctgcttattgtgtggactcaatgaagtcagcctatctccagcaagtaatcagattgtaaagggatgtttgttccataaagttgcctagaatcatctcagggagtgcttgtgttggaggaggtggtgggaaaattaaataatgatcagggatatagtaataaataagagatagtcccttcttccaagaatctccggctaatagagacttggagaggaaagatggggaaagcaataattacagtactgtctagtaggggccaatgcagaggagagacaaggaagatgtggggggagtggatggatacctggaggaggtaaaacttgggctcgaatttgtgggatgagtggaaatttattaggtaattaaaga

SEQ ID NO: 66364 - DNA, 2090 bp, Homo sapiens
ggccttcaggatgccactaatgtatatgtaccaaatggagtctgaccccagaataaatatctgctgcagtgaattgaatctgacatatgatgtttcctgcaatctaactttgtctatctcttcatcaacttctatatccctctcccatgaaactacttgtaatttcctccacatctatgctgcctcaactcagagctcttgctcatgctgctgcctcttcctgaaatgctcatgaaactcccctctttgtcacctagccaatttctaatattccccaatctcttgccaatgcaccggtcactcatatcagctcatggtcagcctcggcacagtcattcaacatcatccacctactgggcgtctaggtgccttgcagtgcaccaggcaccaggaagtgtggtgatgtcataagataatcatgggaaaattataagacttgctggcatctccaccaaaaatctcttgtggaaaagatgctggagttgtacaaaaatcagaatgtgtagaatctgcaaattcctgtgtataaatcctatttgtttgcaaattaaattgaatttgcttggcggtgttttttgttgttgttgttgttttttaagaaaatgtcatagaaagtagcctgttagtgtttctgatgaggaaagaaatttgcccataatcctggaaatggtctcctgctcaggcaggcaaagcctggctagaggcagagatgccttccatcccttccgcacacttttctattccaccccaactaccaagtaaaccaaaccttttctgaggcctcaataaaatcaagcctctgaccttcaggcagaaagcaggagcagcctgattcatattgagtattactgagccctgcgttgtgtaggcaacagggatcagtaaagcccaactggctgggggtttcctgaaacctccatctcttgtggttgaatgaatcataataaggacaatccagaagagagtagtcatcactcattttaggagattgcaaaaccagcagtgcgtaaaacagacaacttctttatcctcacagaggatagattctagtgggtgctgccatgataccctgtgcagatttctgtgtgggccatgtcaacaatgttctgcagttgttggtttgtgtgtctgcctcttggactgtgaacacctctggagtcttattcaagtttatgaccaaaatgcctagactatctccagcaccatgtcagtcacacagtgaaggtttgatgaatgaataaatctcgggcctggcatggtcaggcatgcccgtaatcccagcactttgggaggccaaggctggtgaatcacttgagaatagcctggacaacacggcgaaacaccgtctctactaaaaatacaaaaattagctgggtgtggtggcacacactggtagtctcagctactcgggaggttgaggcaggagaatcacctgagcctgggaggcagaggttgcagtgagccaagatggcaccactgtattgggcctgggtgacaaaacaagtcttggtctcaaaaaaaaattaaaataataaataaatctgaccacaataacatagatcacacataaaaatatggtgcttagaagcatgctttatttgtatacattctgggaaatgtgagagaaatcctcaaatttacaataactttttaataaaatgcatgaaatgttacaggattgaagaatttgaattttggtctgtttaagcaaagaagggcatcaagaatggtaaataattaacagtgagtgagaaggaagagaaagtacttgggcaggacagagaacttgcagttctcttagatctcttgggtacagggatgggtgcaggtagtgaatgagaaaatgttactagaaatgcattgacttgaaaactgatccttagagggttagaaatgggtgcagtatttctgcagcccagtgtgcatgcaaactccacctgagctctagctgcgcttaaattcagtggagagttttagagtacaaactggaagggtttgagagagatgtgtggagcagcatggaaatgatttaccttttgttttaagtaatcagagaagagaactgcaaatgcagtttgtgtactcaggaa

SEQ ID NO: 66365 - DNA, 1752 bp, Homo sapiens
tgggattgcaggtgtgagccactgcacctggcctattcctgtgttttaatttagtttttcaacattctaaaattcatcttcaacatttataaaaaaaactataaaactgatttacaacaatgtatatgactattaaaaacctagactctttctctctcttaaaaaactggaaaatctgtcatcactgtatcccaggtcaccagcttccccatgatgccctattgcttcatggccaggttcacacttactattgcccatctaggcctgttgaccattgagcagggttcatcaggttcaggcatgttgacattttgagccagacgattctttgttggggcttgggaagttgtccagtacatttcaggatgattagcacatctctggcttttacccactagatactagtaacacacactctaccacccagttgtgacaaccaaaaatataaccagccattgccacaggaggaggacagtggcctcactgtgagaaccactgccttaagatttgggacctttgatctagatttgttaaacctgtggatgatatgggctctgtcagcaactatggaggtcactttttgctatccgctattaaaattgtcagtcctattttttttagtgtgtaggagggctacagagaattgaggacaagctctaatttgggtcctgtgagaaggagatggaacagctgatggacttgcagaatacataggccagaagcaatcaaccatcaggcaccttggtccatcttgttgagtaagatacttgactatgggattatctaagctacaaaaccttcatttttgttagaggtgaaggagtaaagtgagggatcaaagttattcatggtacaatgaaatcaagttcaaataatctttacattgtttgcaaatacaatctttgcaatatttgctagaacagaaaacacacacccctgtgatactgttagtagtagaaatccttggagaaggaggacacagaggttgtactcctgagatgagctgagtttcttcctttgttcctttgctttggacaattgaagttagccagtgcttggggtactgtcactgttgccatagcttttccactggactttgcccactggttcagtgcctgctcttgtatctggtatgtggtgatttaagagtcaacgtttttctaggacttgttgcagtaatctcttaatttatgtccaagattgctcctttctgttttgactgaacggtcagcaactgggagattttctctcaggccaaatcatctctattccctcctgaaatctttcaaggtttcttgatgtgtgattttacacttccctattttcctaaactgctagagatattttcttatttctaaattccttagttatttcaatggaatataaggcaaaagagagtttaaacatgtaagctcaatttgctgtcttgaaactaggagaagtcaggaaaaatttcctggctagaatgggggacattgacattataaagtctaactggaccagggtcattctgtgaaactttaggtaagctcttcaacgtagcaagagaatgggctatgtcaagtctttgtcaatgggacatgtgctgctttggaaaggttttgtcgatggtgagtaatcatgtgaggagtggcagttttaccaactccccattcagtcctttgcttacataagcattttgatttaaagtagtatttatttattcattcatttattcagttaatatttattgagtttgttataactggcact

SEQ ID NO: 66366 - DNA, 653 bp, Homo sapiens
aggctagaagccccacagtgtggagacttcatccccgagaggagtgtgtttctcactgcagcagttgagtcaccagcaagacttgcctgaggtgagctccgcacatccgcgttgggacttgcagacacgccttcttctcacacaaaccttacccagccccgccgccgcggcggactccgagggtggtgccaccagccctgccactcgcagtcctgacgggcaggggctgcggaccgcccggccttggacccatccggagccacaggttggaggagataagtagctgtccccgtgctcatcgccctgtggagcagatcctgtctccttgctgacggtggagcccgggagttccagggcttgggaaggggaaggaaacctctctgaaatctgacacctgctctcccggcaaggaaacttcgcaggctggtgagttgggaaggcgggctgctgctgctggaacgcgttcccacccacccgggtgctgcagcgccggcctgcgccgtgggaagtgaggcctctgtgtgtgtgtgtgtgcatgtgtgagtgcgtgtgcaccttcgatcgcggtttccagcagaaatccttgcaaagaagacagtagtgctgtgtgctgcacggatggcatgggccaactcgacctggctctccttgag

SEQ ID NO: 66367 - DNA, 841 bp, Homo sapiens
aacaatagaatattgaggctatatgattttaggactcaaaaaaatcacataataataaaaagaggagctgagccaaatcctgtgtgtgtgtgtgtgtgtgtgtgtgtgtgtgtgtgtgtgtgtgagtgtgttgacagagacagacatagacagagtgagagagagaggagagtagtgatataaaaaataagaaataaaattcatttttgaaaggagcttagaagtgaactgtctcatacctagcttaatatgtcaaatagcctattggaaaaatgaagatttttccacagtgccaagctttgcattcatttcaggtggaatttgtgttaaatgtcaggaagtgtccagcacccttcacttatagaaaagaggcaatgtgggccacagtggaattgatttgtgttagcctggattgttcactctggattagactttgactgggaggtggcaccagtattgccccaggcaggtttatgtacaaaagacagagaacagtctggctgccaatcaggaaaacatgataggtcgtgtagttagcaagtggtaatagtctcattctacaagtgggaagtaatctcccatgctatggtcctgtatctcctctcctcatgtctaattcccctccacgctataaggttaaatgcaaattttccttcctctgcagtcttcttggatcactgcagtccctgaagacactgttttgtttgaattgaaaacacaaccaggatttgactcatttatcaattaatcattctaccttgcaaaattacgttgtattttctcagatccttatttcacttttaagtaattcagaccttgtcagaagctagactagaacttc

SEQ ID NO: 66368 - DNA, 1348 bp, Homo sapiens
gctatggcttctattaaatatttgtttccgctgaagttgatttggcagcagcaactctgcaagtgtgcttttgcaaactgtgaatggaagtacgtctcttactgggtcctctgaagtatcttccgggattaagatattggtgcaaaacaacatttaaatgcttgaagtaagagaaacacccatagagtcaatatgcagtgtgcttggaagccagagagaggatggtcaggccagggtaggggtcagcaaaccccagcctgggagctcaatccagtttccctcctgtttgtacagccccagagctaagaatggttcttacatttttgaatggtcaaacaaaaaaatcaaaagaagaataacatttcatggcacatgaaaattatatgaatttcaaatttagtattcataaaaatggttggaaaaaatcaaaggagaacatttcaagacacatgaaaattatatgaagttcaaatgtagtgcctataaatgaagttttactctaatacaagatagccattcatgtacatatcttttatgtcgctttggcgccacaaacagcagagttcagtagttgtgacagagaaagtacgtggcaggcaacgcctaaaatatttccttatctagccctttacaggaaacgtttgctgacctttgggttggggcttggcaaggagtgggggcaggaccagtgggaaaatagaggcaagcaaagcaatcgatctggcctgagtttgtttttttcctccagtacagtaccctggatctacagtcccatttgactgatttactttcattttcctttttagtatgttatgcaatgtgtacattaacaaatcataagaggcattttatcataggaatgaatcgctctttagaatgaatcccactgccttctcaggctctttcataatttgaaaattgcatcgggccttatgtcttttatcctaaaatatactctcttatgtaccttttattcttaaaatcaaggaattttgtttcttgatgactgatatttctgaaaacttcccaccttttccactcactggttgggccaccttaaacaagttacataaaatctttgtcttcacttacatagctgtcaggtaggggtgataacacctagagataggaaaatgagttttttttttttaaatgcctgctagcagaaggcactcactggacagtcactgtcaatagtgttgccctgttattttatattatcaatagccacagaagacaagcagggcaggtagttcacatctatctggttgcaaagctttataactgtatccatatgaaattaaattccatttctgtctttggttcagaaaacttttgtacccagagt

SEQ ID NO: 66369 - DNA, 1075 bp, Homo sapiens
accttcagtaagataagagtgttcctttgtctagccgcctagcactctgtaacttccacatctaaaatatcatgatgctactcaacattaaggaaaaggtcaagcaatgggctgctctttttactacacctgcggctgcagaagcccgcacaaatgaatgaagacagccaccttcattcatctctgctctttaaaaaatgcgagcgcagtgacctgtcaaagccaccacgctggagttcctaggtcagggcgtttaccgcaggacttttctccatagcctctgaaattagcaggcagaaatcgcggggacccctgacaaacggattgtataacaacaacctaaataaataatcaggtgtgcgccggactaagtaggggttcctctctgcggaaaagcagctcttcccaatggggaagaaacttctcgcccaggaaattcgagcccagaaccgaggtttccagggaggattacctcttcaacaaggacccttttacaggaaatgtccttgatgccaggaactccactggggaagccgctggaaaggcacctggacacccacacacatggaggggatgcgggggcgcgccgcagggaccgggcccgaaggtggccagactcgcctaccttgtggggcgcccagccgacgcggggtcccggtgctgctcctcccctgggcgatcggaccttggggccagggtcggctgccagggccctgcgagtgcagccgccaccgcccgcaggcttggctccgccccgcggggcgcgcccagggcagagtccggcgccggtgaggccccggggaggagtcgcggcaggacgcgtacgcccagcgctggagagccaggctctgcccctcacgcccctcgctagggtgctgtacaggcgggtggggggaggggatcggccgctgcttttcaagaaggttctatttgcaccctaagtttataaacttttgtttttgttttttaaataatttttgattttattgtttttagtataaatttatggagtacaagtgcaattttgttgtttttttaaaaaactttcttttggaacttaaaaaaagttgcaaag

SEQ ID NO: 66370 - DNA, 619 bp, Homo sapiens
aaacattctcattagccttccttgggtctgtgcctcgatacaccagcccatcatcatcatgatcatcaacaccattatcatcatcattgtgctctgtagcagccacagacctggcagttctcaatggccatttacagaatgcccacatgtgctgggctctgtgagagactatacagacactggacaatcaagtgaagagtgattctgcttgcaaatggacagtgaagagagtgcttcccatcccttcgtatttgcctttgatgactaagaatgaggcacattgttgcctgtggagttaggaaaacaactttccaatgacccactttcccatatctcttagctattgcagctcatacaatctcagggctggaaaagatcctagaaatgatcagactcactttgcaaaaggacatgaaagtccagagaagctgtgactcacctgaagtcagggaactcatcaatgagaacaggaacaggagcctgggttacctactttcaagctcagcagactttccagcataccaccatgcctctcttcttgaataatttcctgaagttctaagaaacatgagtagaatatacctgatactaaaacaatatgagtatttctggtagaagt

SEQ ID NO: 66371 - DNA, 794 bp, Homo sapiens
ggcccagaggatccctcgggaccaggtcataaaatggcagggactaaattaagatgggcctgactctcaaatcttgggtatttgtactatttttggaaacactgaaatggctaaggggatgggaagaggaggtatggtagtgaatgtctgtaggcctttagctttgcaaagacacaatccccttcctcccccattcttttgtaattccaagatagaatactttggaaatctttgttcatccaatgtgcatccgcttttccatatgactctgtatttctgagcagactgtaagtaactcattccaagctcaaaccacacaccccgagaacagcactaagaagaattcaattgattcttggggacaggggtagtcttcctgctaacagcccctctcccctaccttcctgcctgcttgctggctgttagcatgtttgtcttttgcacaaggcatccaagttgacaggttggtgaggtaatcaataggagagagagcagatgattatcacgggcacagaaggcaaaggttatcactacatgttttaacttctgttaaaattttatgggacctgtaggaggaatggtgagtacaaaataatttgctggaaaatccagaactaattaatctattaccatattccattataatacatttaaacaaggcacctacttccgtttctaaaagtcatgcatccaattctaacaagctgttttcccctttgcaatgtgaaaaaattttctttctactatgctgaaaattaaattggccatgtgtacaaaaaaacagacaataaagg

SEQ ID NO: 66372 - DNA, 1180 bp, Homo sapiens
taaagattatacagaactttgaagaatgaccacatcatgtgatcacacaatcagcccatcaaaatatacattttgggcacttgttttgtgtcaaactcctataatgacagtaaatatcatcataatgtgctcacatatctttctgattctgtaatgagaagtagaataaattgtggcttctccattcaagattaactcttcagttgtcttctcaaaaaaggaaaaaatatgtttgaagcacttgatacaggttgagttgtgtccctccaaaacgatatgttgaagtcccaaccccagcacatcaaaatgtaaccttatttagaaataggatcttctagaggtggtcaagttcagaatgaagtcactagggtgggccctcatccaatacaatatgatgtccttatgaaacggagaaggttggccacagaaacggacacgcagagagaaaatgatgggaagacacacaagaagtagatgaccacgtgatggagggatgtatctacaagcccagaaaggcctgagaccaccagaagccaggagaaaggcctggaacagatccttccccagagccttcagagggaacatggccctgccaacaccttaattttgaacttctggcaattccagaaccatgaggcaacaaattttggttgttctaagccacccagtgtgccagccccaggaaactgacacagcactttattaaaatcccttctgatgtcatttaagagatggtgaaagagagtgagccaattatgcatgagtcaacctttagccattttaatgctgtgagtcctccttttttgaaaatattccagtgatcaaagatgctgttttttacaacactgggttaagttccactcttgttacaactacaaggaaagcctccttatttttacctcacatttctgttgggagaaaaaagaaacccagagttcttctgtaagtcattatgctctgaagatatttagtatcaggctgattactgaatcaaaagatctggttaccatcatgtctaatctgccagaactgaatcatatccactgcatggctttctcctccgtttcctccaatttccccccattcaaccacctttaactatattccagtttctagcaaatgctgctgaagcttcagctattttctttagattatataattttccagaaaactcagaagt

SEQ ID NO: 66373 - DNA, 583 bp, Homo sapiens
agacccaaactttcaacatcctcttcttaattatttctgtttggggtttgacatactgatcattctgttctattccttctctcctttctgtatttccccctcagtactagatttagaacctctcttcagtctttctattttgaacacatttaatttttgaaagaagaacttcttacatttgaataggctaacttttcaagacgcttgtatgccccttttcatttggctcttataaagccttgtgacagaaataaggtcaatatttgttttctcatctgtaatgtaggaacaaggcacagagagatttcacaatttgcctaaggtcacaacatgagactctagcagagccaggatgacaacctgctttttcctcacccacagttctgcgtgattttcctaaaatgttgcacctagaatttactgcagtattttgttactttgcccggaaacctttaagatcatagcctgatgctgtatggagcatagtgggcattcatacacttgtttctcaataaatatctcctgactaggtaccaagcactcttttaggcactaaacataaccataaacaaaagagacaatt

SEQ ID NO: 66374 - DNA, 482 bp, Homo sapiens
ttctcagattaaaaggaaacaaattttaaaatgaaaaagtataaaaataactaagttctctttctttcatactttcagtacctaataatctcacattatttactcattcatttacatcttgcttcgttccaaaacaagccaggtgcggtgctcatgcctataatcttagcagtctgggaggccaaggtgggtggatcacttggggtcaggagttcaagaacagcctggccaacagatggtgaaatcctgtactaaacacaaaaatcagccaggcgtggtggcgcctgcctgtagtcccagtcccagctacctgggaggcagaggtgggagaatcacttgaacccaggaggcagagattacagtgagctaagattgcaccaccgcactccagcctgggcaatagcacaagactctgtctcaaaaaaaaaaaaaaagaaaaaacaagtacctctatttaataaaaagttttaattttatgctaa

SEQ ID NO: 66375 - DNA, 2153 bp, Homo sapiens
aatactatcgacatacacaaggagagatctgtgaaacacacacacacgctgaaatcttggttctcaacgccgagttccaacatgtcattcttacaaaggaactttactacacatccactataaaaggtccaccttttctacgacctataattttgttgatatttaccaaagacagttaacatttttcaagatccctgtcctcttaagtgaaaaaacagagccgggtcaaactaagacatccggccaactgtccacctgaaatatattatatatgtactgtcgtgtgtgaccagttgcaatcgcatacataggggagcctaagctacaagttagtggccgaacgaggaagaaaaaagttcaaataatttaaaaagcaccctaacccaacgttaacttagttcgaaatgcattagcagaaattcaggactcagagctacgcatattagttagatcgccccatctgaatcttcaaaggctttagagagatgtaggtggtgaagagaaacaaagtgttcggtaaattaagcttttggagctctggagatgcaaatgacagctggctctgcagaaagaaggggtcaggctcaggcaagggtggctgcggagactcccacaggctggaaggaataggggcgggccacccccaaaaccagtttgtcaaagaattgaaaaggagcaggtgagaaatctcctgagctggagaagccggccagccaggcccccgagcccgtctaggaacccctgtgcataaatgggggttcacacccgagaaacgaggcctaattccggcagctcctggggctgcggcgactgccggacactccggggcagcagacggctaggaaaccagggccaacaaagagtgaaaggaaagcaaggaaggacagacggggacccacagagctcgagcctggcctcaccctctcatggtgaacttgaccacggcgagtctggagcccgcgccgctcagctctggctggaaatccgggtcgctcccgacgggcttcacccccaccatcctcacagagagcccggcagggtggccgcgacgccactggctttgaaactgaaggagaagacgatctgggagaggaaggagagatgctcaggaaggccgaggcctggacagaagaggtggcgaccgccgagtcttctcccgggactctcagtgccgagtcacgccagggagcggagcggccgagggggcggggagggatgggggaggggagaggaggaggatgggaaggcgtgcggcacccagcagccaccgcgcggcagggcccccggcgtgacgtcatttccgcgtcgtccggtttggccttcagcgcccaatcccaaaacgcgaagcgtagtcccaccctcgactgagtagcctcgcgctaacttgagcggcgcaggcgcagaggagacgtgtagaggtcacgtgcgcaggcgcagactgagactcaaaagttggcatatgcatccgcgtttcccagatctgaggcttttacggaggaggtttctgatttgtaacagtagagaggaaactcgttttaccccggggttcttagctgctgtccagggcacccactggaagtactttgaagatgctcctgtactgtattcggggcaggtctacatacaagacaaaataacgtttaggaatatttattaacagacttaattacatatggggcgctttctgtgcagtcattcagaaagtatcgtgcacctgtctttaggttttgaccaaaaagatgaagacactatccctcctttaggaagttcacggtctagtgaccgacgcaaacaataatttgaataggaagcggtggagactaacgagatggaagggtggggcagggtaaacttgctaggaatctgactcctggattgaatctttaaagagaagcaggggttagatggatggtgagaggtaatattccaggcaaggggaccaccaggtgcaaatgcatgagttgagagggtggataagaagaatagctaatatttaccacatgatgtaccaggcaagacataagttctttatatgtgtactagttcatttaatccctgtgaagtaggttctgtgatttcaagtcaaggcaggctaacgccagtgtactcttttaaatattaggctaggtggcaaattatctgtctttggattt

SEQ ID NO: 66376 - DNA, 1435 bp, Homo sapiens
ccaatttttctagacttccatatgacctaatgtgattatccttccttaccccaacctagaaataattcatctcttttcttccttgctccttatttggcatttctcatcctgcactatactatagcttatctatcttgggggacatttgtcattctttttagctttccagcatccaacatactttccagtgtttagggaattccctacctcttgcatctcagtgggaagcagtgtgatggggtcagaagtgtaaacttgcgcaacatcctgctcccaagaaagacgtgcacttgctacttcatccttcgctccatcttggtcctcccaactggagagaggacagcctagacgagacttcccacaaccaagatggcggccgtgcactccttgcccacagctggccttttctccactttcggtctccatcgtaacgcggctggctctctcggcgccggcttaggccttgcaagtagggaaatggtgagtctttcccgccccctcatttttgcgacagttgcagcgaaagtcacggcagttggggctggtgtcagctgatttactgcagtggcggcggcggcggcaccggcaccttgcagtatcactggggagacggcggctgtatagcgcttgccgccccacggattatcccagcaggatctacgcaccccgcatcctccgtagttccgccctatccttgtcctccttggctggggcgcccaccggcggtctgataggctacatcgcggcatgagatgaagctgtgacaggtaagggggctttcaagcttctccatgggaaaccacagggcgggatgttcctgcaccgtggaggtcaggggtcaggggtcaaaggtcacaaacccgctctagccgggggcggtgctagctgtcagatcgctgcggctgcaagcctgcaggtcgggcccaaaagtaggcgccgttaccaagagcgtgggggccagccgggggtctttgtggctcccttgcctggtgagtgatatttgctacttgtgacagttgctttggtcttgaggtgggactgcctggttcccaggtgcaatctaaacgggatcaggtgattggtgatgatcgttggtggttattgacagcaattttgggcgatgtgcttgcttttggggttcatatagtctttcctttcctgttggtactatttttgcccatgcccaaggtactgacaccactgttagaatttcatttttgagatgccatctgccagttcttatccctttgccctagtacttgtctgagcggatgccagtcactcccattcacttagtgatgggtcccagcgttctgaagctatgtttgaagtcagcactaccctaactttgattcaaaaattgctgttttatgttttttacccacttagtatgtcactttttgaggcagaatttgctgggttagatagtctgaaa

SEQ ID NO: 66377 - DNA, 2085 bp, Homo sapiens
aaggtacatgatctacctgccattacatggaaaaagccacatttatgtgcatttgtggtttttgtttttgttgctgttttccctaggaaaaggatgcacagattccatgaagttctcaaaagaaggccattaaataaaaatggataagaaccactgcaggagtttgttgaaataattgcttacctgttattatgactttttaaaacaatatagttacagattagttcagccacaacactgcaccactaaatggaagcctcaattctgcctaagggatattgcaattctatgaacttgtatttcaatttttatattgttctggtgctgtttggtttttattttgttgtagtgtactttgtgaaaatgatcccccaagtactccctgtgctttttaatcatgcatattttatttaatgaataggttaatataggttgagattgattttataatgaatttatttcctagattttaagagaagaaagtgaagccaaatttcaaatgttttattagcaagcttacgacaatgccacagaattgcaattaataacaaaactagtggtagttgcaagttatgttaaaaagtagcaacaatgacaagccatttgcaaagataagcaatagcaaaagaacagatattcttaccattcacaaatagttatcagattgtgttgctgaaatgctgctgtggccatagagattgcatttctgtttgatttcctttgtgtttccaacctggccatcctggcacttggaatgaatctggccttcctatctggctccttactctcttctctgacttgtttgttctcagtgcactaactcagcgtcccatgttccttaccaccacctctcacttgtatttttatctttgaaaatcatcctggttgcagatgccactggacttacatcaccattacatctgtgtttagacagtgactcttcacttaagctatgtactcaaatcacttgcagaatgtttttaaaatgtgagtatctgagcatttaggtagtcttcctattcagaaagccaggggtgggattcaggcatctgtattctttttaaaacttcatatgtaattttgatgtgtagccagagtagagagacccagtagaatctagaatcttttacagttattttaaattgagtattttatggtagctgtagtcattaaactaccttaatgcacaaattataccttttctttacattttcaaatggaagagataacgggaactaatcagagtgaatacatgacatttatactactttcagaactaattctttaggtagttcagcctttttattgtgattttgttatttgggaaccagagcttggtttcgaatcttggtatcaccacatcacagctgtgtggccttgaatactttgtggctcgatttccttaactaagacacaggaatagtatataacagtagctcctacctcacagttattgtaaggattaagtaaatcaatgcatgaaaaaaatgcctgacatataagtacttataaatgttagtttctgttgttgttgttgttaaatgtgtttgtagaagaataaggaaaggaaatagctctttaaaatctgtatatagtttttaatcttcgtaagaaccctgtgaggtagatagtattatcaccattttgtatataagtgaactgatattcttaaaaaatcaagtaaattccttaaagttatctgtcctataaacactctgaatccagatgcatttttcccccaaagctcatgctgttcttttctgtaacatatactgattttcactgtttgtggtaaaatacattagttctcagaggatttgtgtaaaaatatacttttctttggccacattatcatacacattttatatgtttaaatataacactaaatatttttgtaattatttatgtttggatgaatttctgtatgtttattaccttatttctcatttcaaccacatcagcatactaagttcagattggatggaagttttggctactcattttgctcttacttgtaaataatatatgttgtataacagctttatcatttttaactgcgatctgacacttacattatagaccctg

SEQ ID NO: 66378 - DNA, 976 bp, Homo sapiens
ttactttcagtttatgtccacttgatgtaaacagaacccaatgacgggggaaaataaaaaaaaaataaaaataaaaggcattccacttctcatccctccaaattagtgttgttctattgaattaaaaaattgaatctcctcatcatttttcatgccaaattcatgacattttaggacacaggatgagagtagatgccattaaaccctgtaagtctcaagcagaggccttttttaaaatcaaggtccataggcttaggcaacagttcagtaacctttgggaaaaccacagggtgtgttttacctattgttatgcaaacattgttcttccagagctgacctttactcacagggatttaacagccatagtaagtcagggtttgaattccctgtgtctgagttgcggatcaagtttacaataaccatgttcacaattgttttgagcgcttccacctgatggtttttgatagcatgaggtttgtgttccacttaagcctaagtatttcagtgtgtctttggacattcagaaccacttgaaagtgtacacaaggattcctctaactgagacataatcatcaggtattgcaaaggttaagccttatcatctgtaccaaaaaaaaaaaaaaaaaaaaaaaaaaggtgaggtttcatcaaaaacttccatcctcacaacctttcgaccacaatttgatgatgattattgattatctcacagcctttcactcacgctctgccaccgcggccagccctgatatacagatagggctgcagtccagctaaaataagactccatcttgataatggactgagatgaggatactgttatttgataaagataattgatgtttcacagtgaattggaaagcagcttcaagtgcaccatatctgaagctatattttgtccacaaatatggcagttgtttataaaaatagaacaaaagaactaaagttacgtatttgggcataaccttttaaagca

SEQ ID NO: 66379 - DNA, 970 bp, Homo sapiens
ccccacctcctctcagttccccaagcacacccctaccttccccagtctcccatctcccagaagactccttccttcagctgctccaaactgtggccaggtgtgagccagcatagttccagggcagaagcgtgcctcctcctgcaggcaggcctcctgggtagccaggttggagcctggagacagagaggccaaggcaggttccaccttgtccactgggggttcccattgtccctgctctcccctgtcactcctgtctttcagttgcaacgctggccctgggacttcaggcacatgaccccactcagaagaaacaagactgtgtgcccagctcccacagcagtcaaatccctgcagtgggctgctcattctacatcactcctagtggttctgcttccttaaaccccagccaaacaatgtgtcataaaggtgagacgtggaaacagggaagttattgccatgattgcattttacatttcagacgtggcctcgctgacctcactggcatctgggctggggtacaaaggtcccagcttggccaggctgatgtctgcaaaccccagccctgactggcagatgggccatgcctctgaccatctctcctgcccactggaccactttaacgtactctttccatctcaagcacaggaacaattcccttctggaatgttcctccttctgaggctttgagaaggctcactctggggagcggatggggtgagtcctgggagtgagtggcacctctttcctcacttagagcctaggtgggggtgaggagggtgagaaaaggaaggggccagaagagggtgaggagaggagccccaggccttggggagaagcccagcaagtgtgcaacgccctgcaaagcatttcctctctctccctccctcctctctatcccctgactttatggctgctacactgggagaagctgggttggcctcctctgcatctgcattcccgtgggaaccag

SEQ ID NO: 66380 - DNA, 736 bp, Homo sapiens
catttctgccacttgctgagtgattttagggcaaggaacctcatatctttgagcttcactctacttatccctcaaatagtaaaaccaatacctggtcctcctatgccatttgtgcccaatgtgcctggcatgctcctggcactgtgtctgccctcttctcctcttcccatctgtctctcattttcttggcacctaccaggcaccagccacattgcctcattcagtaaatatttaagcaacactgatagtgtgccagggactgttctaggtacttcactttcattgaagtatgcctataaacttaaaacaacaacaataaatgaattctgattttttttttcaacaaaaggaaggcagcattctgaaatagagagtgttgtgttgcatttcagacagacccagattccagccctgaaatttagtactcaagcagtgctaggtggatatgcagcagtgagcaaagcaaagaggaagtatccttggttcccatgccagcattttaatctctctccccttcagctgtctcatctgcacaatgggcatatgaatacttactctggggggtaattgtgaggactgttgctaatcccgtgaagtctttactgacactccatgcctggtcaacagtcccttctgccccattagccccaagagatgtgacagtgccttcctttgtgccatgtggccctatggacacctgtgcctgcacttgttatatgagtattgcatttgcccc

SEQ ID NO: 66381 - DNA, 1943 bp, Homo sapiens
gtcagtgaagaaggaggaagggacatctgggcagagggcctggccaatggccctgcagttggggaggccctttgggaattgcaagtctgtgggactggggacaacactgagtcagaaacccaaaggagggtgatatggtttggatgattgtctcctccaaatctcctgtcgaattgtgatccccaatgttagagtgcagcttggtggggggcaaatgcgccatgggggtggatccctcatgaatggcttggtgccctctctgtggtatgagttctcactgtatgattttagtttaaaagagcctggcacctcctgctgtctctcctgctccctctctcaccaagagccatgcccgctccccctgccttcccccttccggaaaagcttcctgagagcccagcagatgacggtgccatgcttctggaatagcctgcagaaccatgagtcaaataaacctcttttccttataaattacccagtctcaggtattcctttatagcaacacaaaatggaccagtgcagagagcatcaaatgtcaagggaaggaaataggcctgagggtgggaatgtccagtgcaaagcaggttgctcagcatgggtctctggaaattcttggaaatgcccctgtcttctactggcagcttcctccccagattctcacttcagacagcaaggttgtaaacccaggccactgaccttgtctacacatttgtcactgtagatcaagaacaattttttttttcctgtagtgattgatttatgcaggtctcttggattgggttaattgtcaacaatgtgagctcctcctgcaagacagggagtggggttatcagcacactgtgttacccacagttcttcagactgagagctgcagatgatgcaatcctatgttgacttgctcctggccctgcggggcggttgggctcacctgcccacagacaaggcacgatgactgattgcctttcgtcagtaatcggcttgacacggagccagcaaactcccaaagttagattaggaggtgaagtaattggctgaggactttggattttagtttactaatgtccaaacaatagggaagctttctgaatggaaacaagccaaaatatttggccttcaaaatcccttccgggggcatggaagtgtgctggttaagggtggggcatgggttgaacaaagccagtgggtgagatgtatctccatgagagtgcacaaaaatcagtgctgctgccttgttggtgaaaaaacaagaaaggaaatgcacaaaaagtgaaacattgtaggatgctgagaaggcaacacagcacttgcttggcaaataagtggaagtagaaggctgttaaaactcagagttttggcctgcagtttttgtttctcaggaaagtcacatgagaatgagcgatgaactttctcaggaccaatttctggacagtggtttctgttttatcattcagagaaaggcagggactattctccaatgttttgtaggctgtcaagagggaggataaatctgagactgcctttaaatactgggtttcaattgcttccttccttcccagggcagatatacagtcttctggtatgatttaatgtccaagctcaagtggctggtgtgcttctgcaggatgcagacagcactttgcaattatttttgtgttctctgcagaggacaaggttcagcccccagtagggggacattcagggctgatggttctgttagggagggaaagtgggagagcatggtcactgctggcctgactccctactgcttctgggagagaccttcctgtaatcatcaccaccaccttcatcatcatcaccatcattgttgtctgctgctgatgttgtgctagaaggggtggaggtgctaattacttatgctttctcccctcttggttttagccaattaaggagctcaatgggatcaaagagtcaattatagtacc

SEQ ID NO: 66382 - DNA, 1184 bp, Homo sapiens
atctgcaactcactgaggccacactccctgctgacagtcccttggtgacaaacccctgactttgcaggaccaaaaccaagaaaacagaggtaggcaataatttggaataggaaagagcgggcattaacaagctagaccttaagacatcccttaggtgattaaggggctaagctggcaggatgtgtgcaggtcccccttctgaaagctgtgcgggagctgggactgctcagtcagctccgcctccagctcagggaaaaatgcacaatgactcatcttcctcctagccaggaccagcaggcgccgagggagtgtctgcaagcctttcctccgcactgggcaaagtgtagcttctcatgatgaagaaaatcaaccttctttgtgccaagagcgagtcctgtgacattcttttgccccagggtctgtactatgaggggagtcctgaaccctgagttcagaattttatcctgcctacaatcctatgcgaaaatcttcagccttggtatttagcattccataaaataccaaacctgagagggaatttgggggttttcccatgattacctgagggcagggcagacactgcacaaagtgtcactgagttcaatagacttctgtgagtgatcaggactagatatcacagagtgaaagagaggactttgacctttgacttttccttgggtactccaccccaatctcagtgccttcccctcctcactcttccctggcctgtgcaaaggctccaggctttttctgtggtttccaccacaccctcctggagcctgatcttggatttctcacttgcaacccaccaggcaaccgtgtaagggaaaatcagcagtttcactgcagtctgagctggcacaaaatacaggtcacaaagaccctgctaataaaacaggatgtggtaaagatgctggccaaagcccaccaaaaccaagatggtgatgaaagtgacctctggtcaccctcactgccaacctcctatcttatcctgtgacttagaatgcctaatctcctgggaatgcagtccagtaggtctcagccttatttcacccagcccctatacaagatggagtcacactggttcaaaatgcttctgacacaattagtatcttttttctttagtgcaatcatatcttcaatataatcaaattcagttacttcaacagatgttcactgggcat

SEQ ID NO: 66383 - DNA, 705 bp, Homo sapiens
actcataagagtagagagcacaatattattctttttaatgtccaattcagcaaatcctgggattcaaccaaagagatcatctatttcaacctgctgcctaattcagctgattcctactaatagcatcctagccaggtagtcactaagcctttgctaaacagtcatatgagtgaagaattcactccttcatggggcaagctgctgtcctctagacaactttaatcactggaatcaaaatcagcccctctgtcacttttaccctttggtcctaactctgacttagaacaggaaaaactaacctctctgccgcgtgacagctatgcaaatatttgaagtggcagccatgcaccacattattggcctcttctctaggctaaacatttgctctaactcttccacataaagcatgatttcctcttccctcacatcctaatgacccatgtaagctctaatttattgatatctatattaaaattaggtacctagagttagattcatctccagcccagaagacagggaatttgctacctttcttgtaagttgtatgccatatttcttgtaatgcagcctaaaaatgcattatctttttttcatgccgcataatactgttgagccatttgcatttatagtaaataaatgcttccttctttctcacatgcattcttgtcacaatccaggaacctcccttgatttctatttttcagc

SEQ ID NO: 66384 - DNA, 4726 bp, Homo sapiens
gtttcctcagtctgatagttggaaaacagttacaaaatccattagtccatctcagtaagggagagaggaacagccattttgtgtgcagtgacctatcctcagccccatggactatgtagcaggagatgtagtggcgaggttccttttttactctctatatctgatctccaaggagtcagtgctcaactctttccaggataaagtctgaagaacacatttcaccaataaaaaaagatagtaaatacttgagtcgtttcagagagagaaaaatatgaaacactgaagatgaagcgcttaaatctttaatgtttttggacaacacagtctatatgttttctgcataatgtatcatttctttaaactatagtattaaaaataatttcaaattgtaatgaaaagtcatttggctttaaaaccacccaggaagaggatataaaatgcgtataccaaaagactatgatgcggcttccagtgtttttctgatatagatcataataatttaaaaaggcttttgtcaggctgtctgaatacatcaaatactttctcatttctgtgtcggctgtgaagctctaactatagtggcttctctagcaggtattctccgcacaactgtgccaaatcgttctgaggacacccagattctcctccttctcaaaacagacattcctgactgggtcctagggcagggagaggggcgttggacccctactgccctctgggttctccgagcaccaggacttgttgctccggcgggaactcgcgcggatccaccggctcggcacatcctgcctacaagtagggcggcgtgtgctaggagccgggccccgggccgagtcgtccgtgccgcagcggagagctccgaccggcgcggccccaccatccgctgaccttcgcccggtccggcctggagcccggccgcggcctccctaggcctctctaggccgggcgccggttcagcgaggaccggaagcgcccgccgtccgcccttccgcctccaggccgcgggcgccaggccgggggcgggctggggacgccctgggagtgccccgggggccgccttcttccccgcaagcccggagcgggcgtcgctcccgcccccgcctcgtcttcagttcccccgtcgcttccgccgccgtgggtagaacagacccgagctgggagccaggcctgcggcccctcgaacactagccacatctggcccgccgggcctagcacggagagaggccctggggcttggcggccggggccgggagaggtcgcgcggccaaggacacccgagggcctgggctgcctccccgcccttccccgcccctcccctcggccctggaatcaatagtggccgctgacttttcacgacaattgcagctgtctaattcatcagcgaataattaaatcagaggccgccgggcctgcctggagtcggagacgaggggtcgctcctctcaaatcctgtcaaattggggagccagtgggcagcgcggagagcggacaggcctcgccctgcgccgaggctgcgagagccgcctggacccggcgccattccgagtgtagggggaagcaagcccccaggtgtggggagcaaaaggaaggaggagggcacaggcgggggccccgccgaggctggactccctcgtcagcagggccctcctggccggtgcgtggtccgggtgcccggcgtggggcagcggccgtggggcccacagacaccatcctcacgcagacttcgcgaatgtcgtggaactccatcctcgggaggcgctttgcctttgaggaagatggagaggagtcgggagaagcgcctagaaaccgcattgatttagacatcaatcctggccggctccctccgcctgccgagctgcggggccgcgccgccccgtccccgagaagcggacctagggtacgccgggctccgccgagcgggcaaagggagcggcctgcgccgccaccccgcgcccgcggcctcgacgccgcagccgccacgccaacaccgattcctcgtggccaacaggtttctcgcagccctccgagtcggcagcgccgcccgcgtccctcttccagccgggccggcgggacgccctcagagcttgtgctctctcgaggccgccgagcccactgagcccggccggggcgctggttcgcgtgggccgcggggaacaggtcccgcttctccaacgaccacggccccggcggctgcgaaacggccacctccgacccttgagtccgccagagtcgctctccctttcacatttgcaagcaaaacaacatacgtaatagtgacatcgaggcacttttccaaactaaaatgatcctaaaataatctgaatgtactgttacttttgatcgtgttaccccaaaagattagctcagattcacttggttcttttatttctttgggagatgatactcgaggaatctgaaaaaatatacgatttttaaaaacgatatgattcgcatacctatttcaacccctcggttggttttgttagtttccaaatagaaatattgccttttgaaatcggagatcatatttctcaagtttaaaatctagccaagtctttttttttttaatactccgtctgaaatttttttccatggtagctagacaattgaaattatacacaaagattttttaactctcggattttcattggaaggggacgtaaatagtttttgtactaatgcctaaacaatattggatcttcaatcaaaaagtattttcagggcaaataaatgatagttttaagagggtaataaataaaagcaacacccgtgcttagtgtctcagggcaacttgaaaacagctccactttcagggagttaaatttgtcctttttacaatcaactgcaacttttgccttcctttggaaaggacgacaaaaagatttcacgcacaacttgaccggaacaaagggacatcatgccagtttttcttttgtggggtgacaactagaagagaggaaaagtttattttaaccatacttgagttgtacttttggaaccctcctttaaagagaaaatgtgacggcagatctttcaacttaaaaatcgaagctatggggctttggggcagaagggacagatagcgcgagcaaaactgaaagtcggtgaggggaaattttgtcttcgttctcagactaagttgcctatttaaaatgaaactttcttctagagcaaaatctccgttcccctaagagctgtgcttcccccaccccttccgcaaaaagaagcccttgggtatttgcaggttcgaatcctcaaccttccctcctttgaatttcattttcccaaaagagtagaattatttctcccaccagcttctgcagcgttagcatccgaaaaatcgggtgggtggggcgttgcagaaagggtctgcagttggccccgaattcggaggaaggaaagtccctggaagggaccgcagtcccagcccccagtcctggggaccggtccggatcagaggcccggccacccacttccacccaaactcctcacgggagggggctgtggaaaccctgagagggcagggagctggagaagcaaagaaatgtacgtgtgtgtgtgtgtgtgtgtgtgtgtgtcagggaagtaagcggttcccgaagacacaaaacttcaacagtcccctatctatatgggtagaggagggcgatcaaggtcggccgccctggtgttcttttaaactagacaggtggacgcgctagcagcttagctaggcagagctgggattccggtttcccctgcagactgacactccctggagcaggtgccaaagccctttggggtggggtctcctcccctttcccctctctcaagcctgcccactctcggcgtctggacttcggaggaaactatagtttgcttcccgcagccctactcccccaccttctaatccaggtgctgggcttggggctcggagagaaccttcccccagcacgcagggctcctgtcgcttctttttcctttccctaagaggccggacaagggtgagaacaagactaacaaccccatatctctccctgccctcacgcaaagtatcttttgtcaaccaaaaagttaagggcagtcccctgccagctctgctaacctggcgttttgaattttaacaagattaacgaagaagaaggagacaaaaaaggacgcgtttggcctcaccacccagaaaaacaaacaaacaaaaactttccaagatccaactggcaaatctgaaaagtgacggtgaattgtgacagtgaatttctgagctgagaggccaaagagaattagtggggcccggcttcggttttagttttattctccctgggctcagccagcccgagctttcaaacagaagaaacctgaagctaatgaagatctcaaacagagccacaattccgagggccccttttccgccacaagcacccactgtccatctgcacgtgtaatcacagagacttgccctgtcttcattaccaggggatccgaggaaaggggagaaaattctctgtcgtgaaaaggaaccttgtgttatcactactattatttgtgtatagcgacctaagagtttccttgtcctcttcaaattcccctacaatattgaaacagcatttgttgccccattcttacaaacgtttgaggcctttctggaaaaccattaccattcaaaggctagaaaattgctctccttccttttttttttttttttttttaaaaaaaaggcaggcgcagcagcagctataacagataacaa

SEQ ID NO: 66385 - DNA, 6890 bp, Homo sapiens
gcttcttttgacccatttaagtttctgatcttcaagaaaattggacctgtgaatgtggcatgctaagtgaatatccaggtcctgatataatgcttggtacaactgtttgtccagattctaatagccgtgaattagcacttatcataccacatttctatacagtgtgtttgtaaatcaaatgctggtggggaggggggagaagaggagtgtaacttcaaattaaaagaaaaaattccaagttgcagaacttcttaaggttaaagtatggatgctaaacaaggggcagttagaaagccactttcccttatattttcttaaagaactatagagaaagaaacatcaaaaatatttcaaaaaatacttgaaaatcgtattagtattgatactccaaaaattgtcttgaagtaaaaaacaaatattgttcctttttagaaagaaagagaaaagggcatccaaacctaattcagtaaaaattagggtgctcactaaacaagcacatccattttccttttaaatggattttgggttgaaacataaaacctcaaaccaccattataaaaacaacgtgaaaaatctgctttaattctagtccaatgaaattatacacaaagaagccaatacgatttcatgatttccctgagatcgccaatattgatcgagggaaggcggagggatggtgggagtgagggaggagggagggaggaaggaaggaagcgaggcagcgagaaaatgcaactcacctttctgctcccaggcacaccgaaatataattcccaaaagcaggtttatctcagtgtcctggcaaatgagtttaacattttgaaaatttatttaaatggcaatttatatacctaggtttctgtatggaggaagcatcagcctagggtaactggccactccttgagactgaagccagcagagcagcagaggctaccttagcactggggcatatcagacccactacttcccagttctgcttctctcctgctgtatttcagtccctgtgcactcatggaccaagaacaggttgcactctcgtgaacttttgctcaactcagtattatatttcaaacattaactgactcaaatcatcccaagtgtccagatgccatatataaggtagggagtgcgaagagagacagtaggagggggtgaggaggagaggaaaaacagagaaaccaaaatctgagttattttacctggctcctgttgtgacactagagatgtgagcaaccagaaaagtatgtctggcaaaccagaggatctgccgctttcttactcaggctttgataacacagagaagacgctatttgaaagaataattggcagcgtattggccagagctcaatgaagttgatctatgaataacgtcactgtacattcatgtgacagggtgggggtgggggtgttgctctgaagcaagaagagagaggagggcggcagaaaaggtcactgagactaagaactgttttccaaatgaatcaaacctttctctggcaccaagaagggacatacagtattccgagctctgcccttgttttcttatcaagttttctctaacagctggaagtggttgaagggggctgtcttaaggagaccccctgctcttcttttgacagctgatcaaaagaaaataggtcacgcttctcaaacttatgtccaccctgtccttaattactgtctctttaaacaaaggcaacatctgcgcaacctcagctagcttgaatcttcggaggcaaacagagcgcaacctgctttggaagaatcttgttacgtttaaggctttatgccgggtgttggcctctctgtcttcaactacccctccaccccgactcggactgcagaaatctccaactctctgtcccccagttccactcccacctccagacctggggttgccaaacaacggaaattctaggaagacgtaggtgcggtttttaaagccttggcttgtgagcgttctcaggctggccggggcgctggtcttttcagaaacaaggtttgaatatgcaggtgtcagccaggattccttgtcgtctgcccaccgccgtttctctcccgggatttgagagaagcgggagtgtgtgtgtgtgtgtgtgtgtgtgtgtgtgcgcgtgtgtgtgtctcgtgttaggagaaaggtccgtggttgccgtctcagctggtttgcttactctctgcccccaggagaagtttgctcacttgggacaccagcgaccctcctcacctccacctcaccggttctacactctccccacttctttccaagtcgctgatgcagaaagcacttggtcaccttgaaacggcagctcccggaattctagttttgttttgcaatctagcagggctcttcggaagcctcataactgagatttatgggctcaccgggtaattaaatgatgttattgtgttaactttgcatgcattactgctgcccgcgccgcccgtgggccgccggccggccgcagctcgctggcgacgagggcactacagttgctctgaccgcgtagattatgcatgtcccggcctcgggaatttaccatgcattagaatacattagcgcctgcattttaaaaggctaaactattggctcccagctagggactctcggtaagtggcttgttagtgacgagtgtttgtctatactggcacatagcggagtcttttgctcccggcttactcgcctccaggaaagctttggggtgaggcgaaggcgattgaagcaatgccccttcccccagatcgcagctgctcaggggggacacagcacggcatctttcaccgaatctctctcgctcgctcgcactccagcctccctctccccagcgacccccccaccttctcctccctccctctccttgacgtttgattccagtagcaaaggaggtaaaaaaggcaccgagccgtcagccaaacctgaaaagtgcggccccgccccctccacagccactggtagcttcccgtggaaggcccgcctcccggggcagctgcggcctcggagtggttgcgcttggcgcccgtcgggcgtggccccgccccaggtccgggagggtaggttggctgccccggcgagcggcagagcccttctggacagctcccgctcacccaaacagaagacgtcggcgccggagcgggctcggacatggcgaggctgcgagccggcccgagcggcggggcccggtgatccctccctccctccccgtcccctcccctctcccgcacgcacgccccgtccgcccccaccccgcccccaccccgggcgagcccgcccgcagcccggggcgcacacccgcacgcgcactcctctccactcactcccgcgcccgcccccactcccgcagccgagccccgccacgcgcgccttgcccgcccgccggccgcccccgccgcccccgccgcccccgggccctgatggactgaatgaaggctgcctacaccgcctatcgatgcctcaccaaagacctagaaggctgcgccatgaacccggagctgacaatggaaagtctgggcactttgcacgggccggccggcggcggcagtggcgggggcggcggcgggggcggcgggggcggcggcgggggcccgggccatgagcaggagctgctggccagccccagcccccaccacgcgggccgcggcgccgctggctcgctgcggggccctccgccgcctccaaccgcgcaccaggagctgggcacggcggcagcggcggcagcggcggcgtcgcgctcggccatggtcaccagcatggcctcgatcctggacggcggcgactaccggcccgagctctccatcccgctgcaccacgccatgagcatgtcctgcgactcgtctccgcctggcatgggcatgagcaacacctacaccacgctgacaccgctccagccgctgccacccatctccaccgtgtctgacaagttccaccaccctcacccgcaccaccatccgcaccaccaccaccaccaccaccaccagcgcctgtccggcaacgtcagcggcagcttcaccctcatgcgcgacgagcgcgggctcccggccatgaacaacctctacagtccctacaaggagatgcccggcatgagccagagcctgtccccgctggccgccacgccgctgggcaacgggctaggcggcctccacaacgcgcagcagagtctgcccaactacggtccgccgggccacgacaaaatgctcagccccaacttcgacgcgcaccacactgccatgctgacccgcggtgagcaacacctgtcccgcggcctgggcaccccacctgcggccatgatgtcgcacctgaacggcctgcaccacccgggccacactcagtctcacgggccggtgctggcacccagtcgcgagcggccaccctcgtcctcatcgggctcgcaggtggccacgtcgggccagctggaagaaatcaacaccaaagaggtggcccagcgcatcacagcggagctgaagcgctacagtatcccccaggcgatctttgcgcagagggtgctgtgccggtctcaggggactctctccgacctgctccggaatccaaaaccgtggagtaaactcaaatctggcagggagaccttccgcaggatgtggaagtggcttcaggagcccgagttccagcgcatgtccgccttacgcctggcaggtaaggccggggctagccaggggccaggctgctgggaagagggctccgggtccggtgcttgtggcccaagtctgcgcgccgagtcacttctcttgattctttccttctctttcctatacacgtcctctttcttctcgtttttatttcttcttccattttctctttctcttccgctcttcccctactttcccttctcccttttctttttctttcttactctctccttgtccctgagctttcattgaccgacccccccccatttcattcgccctcccctcaatgtgccaacctttgccctatttccgatcttcccaggtactgggaggcgggatgggggtgtgcgttttcctctaggagccctgtctttccaagacccacagaaaccaggacctgcccttattcaaaaccccatgcacttcaagtctcttttagacaacacatttcaattttccgggctgactagtctccctgtgcagaggcagttgagaggctttgctctgcagagggaaaagagctctctactctcccacccaccatataggcaaacttatttggtcattggctgaaggcacagccttgcccccgcggggaaccggcggccaggatacaacagcgctcctggagcccatctctggccttggcgttggcgcagggactttctgaccgggcttgaggggctcgggccagctccaatgtcactacctacagcgagggcagggtgtaaggttgagaaggtcacattcaccgctttgggaggacgtgggagaagagactgaggtggaaagcgctttgccttgctcaccggccgtccttgccccggtcccagcgtttgctgggatttgccaggatttgccggggctccgggagaccctgagcactcgcaggaagaggtgctgagaaattaaaaattcaggttagttaatgcatccctgccgccggctgcaggctccgcctttgcattaagcgggcgctgattgtgcgcgcctggcgaccgcggggaggactggcggcccgcgggaggggacgggtagaggcgcgggttacattgttctggagccggctcggctctttgtgcctcctctagcggccaagctgcgaggtacagccctctattgttctaggagcacagaaacctcctgtgtgggcggcgggtgcgcgagctagagggaaagatgcagtagttactgcgactggcacgcagttgcgcgcttttgtgcgcacggaccccgcgcggtgtgcgtggcgactgcgctgcccctaggagcaagccacgggcccagaggggcaaaatgtccaggtcccccgctgggaaggacacactataccctatggcaagccagggtgggcgacttcccatggatcgggtggaggggggtatctttcaggatcggcgggcggtctaggggaacaattcgtggtggcgatgatttgcatagcgcgggtcttgggatgcgcgcggttccgagccagcctcgcacagctcgcttccggagctgcgagctcaggtttccacccccgatcccccgggctttcctcgcaccgctgagcccagcttgtggggtgcactcgaccaacgcccgacagggctggggaatgtgacaggcagcaggttcacccgggcttggggagggggagtttccgctttgacagcattttcctttgccgtctgctggtggattcctattcccagtcggtaatcgccccgcagtgttgatctaagaaggtaaagaaaactaggtttccctgcaaagagcctcccccaaatcggcggactccggatactttgagtggatttagaaatttatgtaatctttctcctttagtttatttttcatcctctcctacagttttctctgatttgctgttggttcggggcaagataaagcagccagtagagagcgataataatagcggcgggaaatgaactggagactggctgacagttcttaacattttgtcatagatccccccgaatgtcccaggctgtctctggtgggttttagtacccgccggcttcttgggcaccggggaccagaaggaacttggcagctggtcttaggggtacagttaaaggcaggatgacagctattctcctgctcatctcagagcgctgccgccccctcatgccggtcgcgcaaagaacacagcttttaaaaaacacgtgccttctgcccatataggtctgaaagtgatgaggaaagtaatgcttcgcctattagcgagtttcagcttttaaaatgat

SEQ ID NO: 66386 - DNA, 2241 bp, Homo sapiens
cacttgaaaagagagaggatttggagtttttgtgttctgctggatgtgggaagcaacgggtagaacttttgttgtggagcagagtagacgcaataggaattgccagatattgctcagtatccctcttgcttgtagatatgaaaatgtaagtctcatttgcctccagaaccatcggcacaatccatttcatttcttccctgatccttttttcctgtctaaataacatccatttgtgatttttttcaacacggtacatgacctgtttctaattggctatctcttgggttgtttttgtacattcatgtttgttttatgtgattgaaaaatattaatgatttcgtaggtgagctaatgtatttatctgctgagcgagttcaaagggcagagttcagctatggttcaggttaattgaacaggaagcagtgagctctccaggctgtgttgaacaagggatcagtcccttaaaatatcacactcagcaaacacaatttcactgtcttcatcctagagtctgatgtaaaaggctcagatcaacttggatcacttgtttaaaaaaccaaagcaaagcacagtaactgcagcaataccctggagtccccctcggggaagaagagttttctcattggctaattgctttattggtagcactgacctgcagagcagctgcaggagcctggatgaaggcttaggcctcagaataatgtgctccattagaacagggcaaggcattttttgtttactcaattggagctccctgcaaagtgccattaaccccggcccaactgcttgtgtgctgcaaaagccaaaggtcacgccagtcagtctgtaggcatagcagctctgccctggtaggaaggttggggtcgcatcctgctggcactgccctcccaggggctcgggccagccctctgggccctttccagagttttgactaaagcaagcaattgcacaacttgtttacatttcccaactgctgaatcatgttttgatgattaaacagttttgatctgagcaccatcaatcacacacatacagaaaatccccccactgcccctctattttctatttatgttctcttcattactgtgcattacagtaaacagaattgtgcaaacggtgcttttagcaggaatatagttctgataagtgcttggatcaaggggaagacagacctccaaacatggctggggggctgtttggtggaagaaaggtttcaagtggagtcggggagcacagtcagggcttccaccgccagcaggtgaactagagtgccacctgccgggagtcttctaactgcactaagccctgcaccttccacaaggtccaagccccttccttcactttgttcctaatatccttgtccccattccccaccctgcagatcactacccatgcaagcattatcttcctagaagtagcttaaagggctttttcctggtcctttgaaactgtaacctctgcctcttctaattcattgccaaggagaaatcaacagttctgctgtcataggtgaggtgatttgcccatcctgcacattgaggtaatagtctcctgcttagttggactgtgcttgggggaagagaagcaaagaaagcaaaaaatagccgtgggagggaaaacgaatgattatgtgtggaagaaaaatggctccgttgattgtgccagtgagggctgtgccaactgtaaggtgttctgcaaagataaaatattgtacaaaggagagaggatgggagagaattagcatctacagggaggacatcgagaaagagatatgccaaatcagcaaactcgagtttaggctttgtgaaatcccctggaaagagaaaaagtgaaccagccgttttgcaattgcaaagaagtgagccagtgagctagacttcgagccagactgtggagctggctgtagctctgtgggtggcagctatttccacacttgcttcacatggacccctgcctggagcccctggtagcagagcgcctgtgggtgggttgctgcctccacgccccggcgcaggcttcagcaccacgaacagcgccatggaggaacgctgtttgagcgaattggagatggaccctctactgcggttaaatccaggcaagagcctgaccagtatctccagctctgtaggtctcagcgccccagtgcagggcctcatattttcctctggagccctgtggcttttcagctctctgtgtgagatcagcgataataaagggaagaggaggcggcatctgggtgag

SEQ ID NO: 66387 - DNA, 958 bp, Homo sapiens
agtaagacttgaaatcatgaactcttaacctctccttacacaccttctttctgctttctctaaggaaggaagaatgttcacatttcctgagtgtctactctgtgccaagtgttacagcaagccttttgatgtcctggagtgctggacattagcatccccactctataggatcaggaaactaaggctcacagtcctgcagctgataagtggctgacaaggagtaggaaacagggtcttggcttccatctgagcttcttacagtacatttgactcacccctgggcaggaaggcaaaggtcattcttggcttctgtatcagttacctgtcaccacaataatgctgcaaaacacagaaccacagcatgggtgatataaaacaataaacatctatttttgcccagaagcttgtttgttggctgggtgtgtctgctgatacaggccgtgcttggctgatctcagctggactcaagtgtgcatctttagtcagctgctggatcagctggggctgtcccgtccaagatggccttggccaggacagcccatccaagttgagtggggagttccagttctggggcagcgaggactggaagattctgacccggtgttgagttgctcttacttcacaggcttcccagaaactgtggaggctgggaaggggttttccaagatcaaatccaggatccagtgctaattgagtcaccctaaacaaacgtgtttccttctccaagagtaaaatgggaatccatacctctgccccatcttcctttcagagatgttgtgaaaagaaattcccaatgggggatccagactttggcttccactgggactcacctcactgtgccttcagttccttatgtgaaactgacaaccctggactggacaaaacactgaggttctatggctctgtgaggaggaccaagctaagggagataaaagatgttcaggtgccttgaagagct

SEQ ID NO: 66388 - DNA, 2258 bp, Homo sapiens
cctcgggtctgagtttcaggccaggagtgtccctttctcctgccctttgggggagctcggatttctacccatccacttttaaaacatcccttccctctactcagtttgagaataacatctggggacagatgtgtctgaatcatcccgacttggggcttggtttccccctctgtgcaatagagagtggactgtgccctctctctaaggatgaccgtccgcacacaccccatcctgagtatgagctttttccaggacggcagtttattttcagctgtaggctttcagcgacactggctttgcttctttctgctgccgtgaaagattttccatgccactagggagtataaatgctcctcacatgcatttttgaaagacctcggaaacctctgcataaatcagtagaagttcatttatggtttcagaatattctggctaatttatctggtgtcaaagatcctgagcctgagccttcagtttccaaactgggccctgtagggctctgctgcatttcccttgcatgtttgttttggctggccctgaaattcgacccggccacaaggagacctttatcattatccaaagagatcttccccttcccaatgacacactgttcggaggtttaactccgagccagtgcttcttccccttttaaaaaaccaacagcaaagatagagctcttccttccaagccaccaggtcgcaggtctcagatttcagccttgccctgatgtccttcctgtgagtttgaactccgctgtgccagcatgtaggccctcccaacaccctcctgctggccttacgcgggccagggcaggcagtgtacagaaacagggacccactgatggtgatgcaatgaaaaaaaataacctggcagtcagcatgtttgagctttctggggctgtcttaccagaaatcgctgtagaaacatgtggctgacattgttagcaattagcccagtgtccagccccagaggcgattttacatccttcctggctatggtttgagatttcattgtttgatgctccctgcattttgctctctcagtatttcctctaccctgaatcatgtggccaagccttaaactcctgtcctttgaggacaatcagaatgacacctttagtgtttgtgccttattttatggcctcatgatcttgtgccctttggagttcaaaggtcacatcaggcagcaggccgggaggtttttgatgtgacctttgaaccccagaaaacaaaagaatggaggcccacagagaccatccatctaaaaaatgatcctataaagaatgcaactcaatcagcccagagcatgcaaatcacataacatttttatggagcaccctgctaaatccaaacttacagccagaagaagggacacaaaccccatgatcccaatacataaatcaaagcttgagaaaagcaaagacatgagtttacagctggctaagaatggaaggatttgcaaaatgtgatttatacatttgtttcctcccctcctcccacccagtctacacacaaacacacactcacacacacgctggtcaataccacagcaccacagggaaatccagcattttcctttccaaaggtttgccctgtgctaagtctaccatggacagacatgggagagcaactgaaggccaagagcttcctccctggccaccagaaccatcctcagagacaggcagaaagtccatagggcaggcagccagataaggaagatgaggacttgccatacaggtaaaaggctggccccacaaagaaggccacattctgtagaacagatgtcacctcccctatgacacagattgtccctcaacagtccttaatacctggcacacatgtccccagggcaaaggtcagactaatttctgaattgatgagaaatactgttcaaatagttagagactgagcaggaggtgctcctgtttctcatgactattgaagttttggttttttaaaaaagaaatatttaagtgtgtttctagatgtctagataacatgctgatgctgggtaatagatcttgagaagtctgccaagtatgtctgtagtagcaaatgttcagagaccagaaccgtggagtatgaaaaagagatccccttttaaatgaagattggatttgcaattaaaatgcgtgtcttctttcttttcttttccatttttttttttgtttgttttttgtttgtttgtttgttttttaagacgagatctcactgtgtcacttaggctggagtatagtggcacaatcacggctcactgca

SEQ ID NO: 66389 - DNA, 1683 bp, Homo sapiens
tcaccgttcggatgcattgaataagcatcttattcgtggcagccttctgcatgaatggctagacatcttgaggatgcctgtgtactactgtgtgccaggcaaggtgctcatgttcaaggcaagccttaaaaaaaaaattaggatttcaatgtacatttaccaaagctctggcgaggttaggtgccttgttcaaggtgtcacagttggaaatgctgtcccagccaggtgtgtgagatccacagtcccatcagctcatcctgtggtcacaacctattcacggtttgcatcagaaacgtgggaggctgttcctgggtcttacaagttccccagatatctctagaaaacgctagcccaggctgccccacggggggtcccgctgctaaggagaagtgggcacagagggaccaaggaccatgggctttcctcagcagggagggaactgcagggcagatgtccatggtggtgatgatgaagatgccttccttactatcctctatggcaggcccataacataccttccctcgcgtaatcttctcaacagcctggttattgcaggtgacaataaccaaggctctgggaaattccagccactgctccaagccacccagccgaccgatgggacttgaacctgcgcctcctggatccgggcgccctccccgcggcctcccgagccctgagtgctgccctcagccctcccttctccgcgacgcccctcgcccggttgctcgcagcacccccaaggccgctccccgaatcccccgggcgcgagggcccgggcgccagctgcccgctctgcccacgccttctcagggatcctggccctggcggccgccgcgacagacccacttacgcggatcgcggagcaggacgcccgcggcgcgcagggccgcagccatgtttgcgccgagtgaacgcattgcctgggcagcctcggcccgagtccgggctcctcccgcggcggcgcgcccaggtgtccgcccagcagtggccgagccgggtagcgatccccacgcgcgtccccagccccctgacctcgcgccctcccggcgcgcccgctcattcgctgccgggccggggcgggcgaggccaggcagagacacgcccctcgcggagagcccgccccagctgggcgccgctccctgcgtgaaaatgggcccgggggctgagctagaagcccgctccccaccaccatcgcaggtcactgcaaaacctgctggactcctagttgcgtgccctgtttgcatctgccaaactagcgaagtcaggatcctcagccatgactcagcaaataacttttttcgacgtttccattactattatttagatataaggatgcttttgcctcagttctccagtttgcctgcctagtcacaacacaagtgtgcagatcctgttttgttttgctttattttcagaatagaaaaagggattattcagtttctctgcaccctctctgtgtagcagaatttgacaggtgaaactcactgaagagcattaggaaaagtgaaggccagcctggcaagtgcatttcttggagggacggtatgatgaggtttgtctgtatcatatccgcgcaccttcccagtttagccgcccgtcccgcccccaaggtcgcacactgagatcactgggaggaacaggcgcccatttcattcctacacctccgtcagcccaccctgccta

SEQ ID NO: 66390 - DNA, 1380 bp, Homo sapiens
gcacccaaaaataaaatatgggctttgaagttgatcagacatacgctggaatgttggattttgtaccttaaaaggcagggtgactctggagaatttacttaacctttctgagcttatttctttacctataaaataggaaaaacaatccccatcttgaaaggctgtgctgaggatgaaataaaataacacatacaaatcagatatcccagtgccagtttttgtagagatggcaaataaacaccagctccctctggactttaaaggaaacagaagctctgaggttagaaaatttcagaaggcctcacaactagtaggtctgaacagttaacatccatccaggtctctctctttttttttttttttttcctactgcacagtatggtctccccggaaacctcaataaaaaaatgagggtgggagaaaaacaactagaatcctaaagccccttcctgacgatcactttgaagaactgcaggagtaggggctaccctgtgtctgaacccgtcccagcgcctgagtctcagcgcaatcgggaggtttcgcagcggggcaggggaagggcccggagccaccgccatcgcagcccgggggaacgacggactcggggaagcccggcctggcccttcaagtcccgggcccagcaaaggccagcaccctccctccctccctccctgcaatcggtccccaaacattcgcggggcgcccactctggtaggcactaaggaaagcgccgaaacccgactggagcagagttcctgccccaggcagggaacaccgcgccatacactgagtctcacccacctagcaccatgcctgcagtggccctggtcacctccaaggacacagactgcaacaccgacgccgtcttatgactccaacgtgcaccggcggtttccgcgattccggcgttgcatcagagagcgtagatctgagggcgcctgcgagaatcggccgagcgccgcggttccattggttacgagaggtgggcgagcggcgccggggccgccatctttggtgagggcagaggcaacttccggatccagagacgccccgccccacgcgtttgtgcagctcggaaggcgctgcctgtcccggagctccgcggccctggagaccctggcacagtgtcacttttgcacccttccttccccgcctccccaactttcctttctgaatcttccaattccgccccagctggaggcgtgcgggtcctcttgcaaaccagaccaaggatgtcgccccgatccccagatggtggaggctggttgagttcatgtcaccagcaaacaccgcgccagctgcgagacggggtgcgcggcggtggaggggacgcagcgggttgcgtaaacttccttttttttttttttttttttgagacgg

SEQ ID NO: 66391 - DNA, 1532 bp, Homo sapiens
ccagctgaactcagcccacatcagtgacctgcagatgcataagtgagaataaacgattgttgggttacgcctctgagtttgggaggcattttgttacacctctttagtgtggcaatagtagactaataatacatgctctattatgcagaagtgtgtggcttaaaataatagttgaatgaccaggtgcggtggctcaggcctgtaatctcaacattttgggaggccatggtgggaggatcacatgaggccaggagttcaagaccagcccgggcaacatagtgggacccccgtctccataaaatttttaaaaaattagcctggcgtggtgggcgcacgcctgtagtcccagctactcgggacggccagaatgaacggcattatcgtctgtctcttcattctgattctggccagcaaggggtggcctccccctgcggtccttgctgttaggtccctgcgccccctcagctttgcgctgaaggtcgctttaccggaccccacttcgccctaccaggcgcaggatgagcgtctctgttcttttaatgtggcgtcccccacaggccaccgtaccaggccgccggtccggggttagggcacttgacgccggcgccgccatgttgtctccgggccacttccgcgtttctggcgcgtggtcttgcatttcctacttggtcctgttcgtggcgccgcgcctccgggtgttggggagtccgggatgatggggaatccggggctcgccctagtcgcggggacaccgccttccaggagctgtccccaggcaaactcacagacatcttcaaagagccttcttggacattctgctttttgctcctcataacaggcttcggtaagagaacaggcaaacatcactgcgggcgcctctagggctcgtttccctgtcccagtaccgggaatcggggaggggtccaagcagagttcacttagttaacaaatcagtgaagcagttggaaaatctcagttatattttaaatgagatcgagggcggtgactcacgcctgtaatctcagcactttgggaggccgaagcggaggtggagggtcgcttgaggccaggagttcgagaccagcctgggcaacgtggtgagccacccccgcccccgcccctctataaaaaatacaagaattagccgggcttattggcatgggattgtggtcccagctacttaggaggctgaggtgggaggtcgcttgagccatggaggtcgaggctgcactgagctgtgatcacgccactgcactccagcctgaggctacggagagagaccctgtctctaattaataaataaattatagatagatgatagatagatgcaataaaaaataaaattggcttgtaaacggcaaactaaaagtggaaattatcattacaatgaaaatattaatttgaggaaccgaaaacttaactttccttttcctgtagttaagtttaagcacttagatttgcttcagtgattcccaggcttcatgattgcaagctgcttgcttgtaagcaccttgtctctcactaaaaaaaat

SEQ ID NO: 66392 - DNA, 1446 bp, Homo sapiens
aagaatagctcatgggccgggtgcagtggctcatgcttgtaatccaagcactttgggaggccgaggcaggcagatcacttgaggtcaggggttcgagaccagcctggccaacatggtgaaaccccgtctctactaaaaatacaaaaattagccaggtgtggtggcaggtgcctgtaatcccagctacttgggaggctgaggcaggagaatcacttgaacctgggagacggagattgcagtgagccaagatcatgccattgtactccagcctgggcaacaagagtgaaactcaatctcaaaaaaaaacaaataataataataataaaaaaactcatgatgcctaactgtgcaaacagcatggtttatgctgaccatctgcattcttttggggagtctagagtttttttgttaaaaacctttgacactgagtctctcatgagcttccctggtatagacaacatttcacatgtggtgtcattaattgctgctgggagaattaagtgcctattgtgtgtgtggtttggtggggagtgggggcaggacggccgacttttggaagcttgtgcctggtttcctttgcactttgctccatgagtctttggtgatcttgctctgtgtccttttgttgtaatgactcacagctgtgaatacgactatgtgctgaggcctatgagtccttccagtgaatcatcaaacctgggagtggtcttgagtgtcctcgacatactttatttttagccttgccttgtatttggagctatacagtatatgttgggggtgctgggggaggcttgcttctaagagaactgcctctatgggaaagtaacagcaatgaaatcaaccctacattgacttcaggagtccagcttcactaatttatctagggcttcctggttttccagttcccgtcatcaaagcactcagggcaccctacaaccgaaatttcccttcccaagggaattctcctgttaaaagtgtggcatttctgagaaaaagtaaggcatttctggaaaaaaaaatcccttcttcctgcatttgaagcttggagtgcccaataatttttctattccacctaaagaggtaagattttgtattagaaaaacatacgataatattagtgcaaaagacagcaatctagatgagagatctactgagatgaaaaataaataccgtgtaaaccatgtagttcatcaagtaatcaattttagttcttttaaatctggttttcccactattcttcattattttagtgtcagcacctgaaaatggaaaattcaatgtagtcatcagttgggaaaaatcaattcactagctcaccaataaaattactcttcttggccaggcatggtggcttacgcctgtaatcccagcagttttggaggctgagttgggcggatcacctgaggtcaggggttcgaggccagcctggccaacatggcaaaaccc

SEQ ID NO: 66393 - DNA, 1143 bp, Homo sapiens
atgtttgtgattcctctccttccctctattggcatatatatatatatatatatggcgaatatggagaggagcaaggtggccaaatagaagctcgcacgaattgtaattcccataggaacatcaaatttaacaactatctacaaacaaaaaagcacctttataaaaaccaaaaaatcaggcactcacagtacctggttttaactttatattgctgaaaaaggactgaagagggtaggaaaaatagtcttgaattgccaatgccacccctcccccagccccagcaccagatgtgtggcatggagagaaaatctgtacgcttgggagagggacagtgcagcgattgtgaggctttgcactgaactcagtgctgccctgttacagacagtagaaagcaaaagcaggctgaactcagctgatgccagaccatagagggagcatttagaccagccctagccagaggggaatctcctgtaccttggtcagaacttgaattctggcaaacctcgtcaccgagggccaaagtgccctggggctctaaataaaattgaaaggcagtgtaggccccatgaactacaactcttaggcaagtcctagtgctgagctggacttggagccagttgacttagcaggcacatgacctactgagacaccagccagagcagctagtggaatgcttgctcggcccctccccgccaacctcactgctccaaaagagacctcttccttctgcttgaggagatgagagggaggagtaaagagaactttgtcttgcatcttggataccagctcagccacagtaggatagggcaccaggcagggtcatgaggctgtttcaggccctagttcccagacaacatttctagacaatcctggatcagaagggagcctgctgccttgcagggcaaggacccagctctggcaggatccatcacctgctgatgaaagagcccttgagccctgaataaacagtagtgatacccagttaatatccaaggctgtgggccttaattgaggctaagatattctggctttagttgtgacccagcacattcccagctgtggtggccatggtgagagattccttccgcttgagaaaagcagaaggaaaattaaagggtgctttgtcttgctcttgatctttct

SEQ ID NO: 66394 - DNA, 1500 bp, Homo sapiens
ggctccagcaatcctcctaccctgctccccagcctccctagtaactaggactagaagcatgagccaccatgcctggctttttttttctttcttttctttctttcttttttttaaagagataggctctccctatgttcctcaggctggtctcaaactccgggccccaagcaatcctcccacctcagcttccttttagcccttttcaagtgtagggttctgtggcattaagtgcatttatacaaacattttgtaagttatccttttcatcattgcttccaaactgccaggcatctggatattaagactgtctccagccctttgaggttgagagaggaagcaagcacggaggaatggatttgacaacccacatgtccgtgactcaaagcaagcaaggccttgcacaaccaactcgccacccacacaatctgcacagtctcagtgagaaagcaggagcagggagctctccgctgagagtgaagaaatgtcctcaactcgacttctctgcagtgtgcatgtgtgtgaaacacagacacacacgggaggaatttggctctgtcattttagtgtaccaaagaaaaaaaaacagggagaaatcacttgtttgaagccctaaatgacataaggaagattttcccagatctaaataatgatccctaaggtcaggtgctgtgtatggtatggatttggaaacttcataatgtctctgaccaccactccaggacactgcagacaggtgtgcatttactcagcatccagtaaacacctgcaaggtgcagagtactacactaggcacagggaacagagctactgactgactgccagagtttcgaagaatacagataagtcaactattaaagctaggaaacagaccggatgcggtggctcacgcctgtaatcccagcactttggaagaccgaggcgggtggatcaactgaggtcaagagttcaagaccagcctgccaacatggtgaaactccgtccctattaataatacaaaaaaattagctgggcatggtggcacatgcctgtaatcccagctattcgggaggctgaggcaggagaattgcttgaacccaggaggctgcagtgagctgagatcgcgccattgcactccagcctgggcaacaagagcgaaactctgcctccaataaataaataaataaaataaaataaaataaaataaagccataaaacagtaaagccagtcgtttttgcctcaaatactcctccaattcatcacctcctctctatctccatggccaccatcatctctccctggaaatgctgcgagatccctctaactagactttccacaattaacttccacatgaccaccaaaggcatgccattctcctgcttacacccttcctgggtgttatggattgaattatggcccccgaagtcatatgttgaagccataacacccctcaatgtgactacatggagagaggtcctttaaggaggtagttaaggttaaataaggtcatcagatggggccct

SEQ ID NO: 66395 - DNA, 1861 bp, Homo sapiens
gtgctgggattacaggcatgagccactgtgcccagcttgaaccttgcttctaaccaatagaatatggcgcaggtaatgggatgtcacttccatgattaggttataaaaaaccatgacttcttgttgccagccaactctttccccttccttgctttggtgaagcagctgccctatggagaggctcacatggcaagatgtgaagttagcattgaccaacagccagcagggactggagccctcagtccaatagtccttaaggaatgcagtgaattttgcaatcactacatgaacttgaaagcagatccttcctcagtcctgccttcagatgagacatcagctgggctggcaccttaattgtagccttgtgagaaatcctaatacggagaacccagttaagctgtgctcagacacttgattcatggaaactgtgagataataaatgcgtgttggtttaagctgttaagttttggagtagcttgttacacagcaatcgacaaccaatacacataccattagtcacaagcagtaattctagggtcaggcactcaatgtagccactattatttccaagttattccaaagagcccccatctaaaaggtagcagaaatcttctctattttcctagttagtccagacacatgccacaccctgtttggagtctgcccagtattcttttatttacttatttgagacagagtctcactctgtcacccaggctggagtccagtggtgtgatctcagctcactgcaacctctgcctcccaggttcaaatgattctcctgcctcagcctttccagtagctgggactacaagtgcatgccaccacacctggctaatttttgtatttttagtagagacagggttttaccttgttggccaggctggtcttgaactcctaacctcaagtgatccacccacctcggcctcccaaagtgctgggattataggcatgagccaccacgcctggccaatgctcagtattcttgaaagtaaaatgacaaacttgatgacagttgtaattagataaagaatctcatgaagcaatagtaataaaatgtatctaagatctgcattaaatttaaactttatactgttatagaaacagcgtaattacagttcccagcaggaacaggattacattttttatttcctcccaaggcaggacctaaaaaatctagaagcctgggataaataacataaaactaaggtatcaacagtatcactgtggtggggacaattcagccaggatctttacatatgatagaaaaggcttctctgagtccacagcttcaccccctattcctcagaaaatccgccccagagccctttctcacaaaggaagattggctgcctgggtgtggtggctcacacctgtaatcccagcactttgggaagctgaggcaggaggatcatttgaggccaggagttcaagacgagtctgggcaatatggcaagaccccatctctacaaataataatttaaagaattagctgggcacctgtagtcccagctacttgggaggctgaggcagaaggatcgcttgagcccaggagctcaaggctgcagtgagttaggatcttgccacttaacttcaggctaggtgacagagcaagaccccatctctataaaaaaaaaaaaaacaaaacagactggttcttgtttcattctgtacaacttcaatgcggtcattagaaaaggtacaggggaaatctcaaaaccttgacatttcagagatgagcagctttttcattcccctggctaaggttcaaaggatttcttagtccagcattgccatgggctcacagcatttcctagtaatattatatttcttcttatccataaaaggcagccccttccag

SEQ ID NO: 66396 - DNA, 1218 bp, Homo sapiens
ttagtttttaatcttttgctcacttgagtaaatccttgaaaggattaaaaaatatccaacttgtgaaatttgtttaaagtccttttaaaataaaaatgcataaatgtataattactctaaacctaactgaagactttatagaattcacccaatttgaaaacaggtcttctggcctgtttcccaagtcattatgcacagctgtgggaaacatcctgttgtatgtttacatatattaacagcttcaggaatttcacaattaaaactatggtgggctggtttccaattcaggcagctgggtgagggggtgtggagagcaggcaaaccagaaataaaaacaagcttcttgaaagatgggggaaaggaaatcgtaactacttagtaatcaggagtccatatagtttgccagttctactaaacgctggagggatttcatttaaaccctaagaaatacacttgttcaatcattttgcagccttcaaaatctctcagttggcttcaaccaagaggttgcctgatggaggtaatattgtacacgatatgtaaaaaacttttatttttttctgtggacagtttcaccccaacagaaggaagctgtggtttcacctttctctcttttgtttttccagcatgcctgcccctcgtcctgacataactgattaggaaatgatttctaaatggtcaagagtccagcctcgatagccacttctctgattccaacagaatttctacagaagacaatttccttgtctcagcaaggtatgtatgatatatgtggcctggccaggccggctgctcaaacagagctgtgtttgggtcagcccactgtttaaaatgttaaaatcagacatgaagaccattcacataaccactgctggtcagatatgagtcatctccaagaacaccaaaaaaggaagcattaaatgctgattggtctccttcaaaatcacttgggaaactccagaaagggaagggataaaacacaggaacttctacttcttcaaagtctcccgaggtgatttttaatactcagaagttgggactgagttcctgatctaggttgaagtgtaatgtgaattccattcttgccagtaggtgcgttattttaatcattatctttattcttgagactgtttcactccatctggagacagctttgttgagttttggcaacactgcagagttgttaaaatcataaaacagaaccacctgtttttgagc

SEQ ID NO: 66397 - DNA, 2550 bp, Homo sapiens
ctgctactgaaacacatatattttattgtcatctggacctacaaagcttgaaatgatttacaacctgtacattttaaaaattggaagcttatgacaaatgagatcacagagaggcatggaattacaatgagagggtatcctataaaacatcaggtccatcatttgaagcacgaaaaaatcggagcttagaaaattaactggccgtgcatggtggctcccagcactttgggaggccaaggcgggaggatcacatgaggccaggagtttgagatcagcttggccaacatggtgaaaccccatctctactaaaaatacaaacaattagtcgggcgtggtggtgcccatctgtaatcccagctacttgggaggctggggcatgagaatcgcttgaacccaggaggcagaggtcctggtgagccgtgattgtgccactgcactccagcctgggtgacagagtgagactcttatctcaaaaaaaaaaaagaaagaaaggaaaagaaaagaaaattaactgctcatcactgaactgaaagttaggaaaagagtaccctaacccagttcctggcaccacccactcccccaaaccctgcttcccttgtgtttctcatctgtcccatggggataattcctgtcttgccaactcccaaatgaggagattttaaaactataaagtgctttaaaaatgtaaagaattgctattattagctgaggtcagccagcccattcagtgactcaccagagctgacatctcctgggcttgtttcccaaaaccaggctgctgtttattacaaatcatagatattaaagatggaaaaaatatcacaacacagcccttttaggagaataggaaaataaatcctccttccactcccacccccaaataaaacaaaatgcttggcagatccaggagtttctataaggagcttgaatatacaggaagtccacaaattacaaatgattttgtgttccaagagttcatttctgggtgggttaccagatgaaatataggacacagagttatatctgacattaacataaagaacacatcatttttagtgtaagtcagtcccaaacattgcataggacacacttatactaaaaaaaattactcatcatttatctgagattcaaactgaactgtgtcctgtatttttatttgttaaatttggcaaccctatctctgagtcatttggatcgattttccaaccttcggctgtgaggtctcggaaagaaccctcgccttgtgagtctggaaacacgactgcaatttctggttttgtcaattactagttctgagacttcaggcaagttataattcctttgcttgcaaaaagagaccaggaaattaatacaccacgggactaagtgggtcaatataacatgtggaaatacagtacattgagcacaaaagcagcaccactttgttatactaccctacacacatgaaaagagtgatttggtttttaagtcaggccacacaagccaattttaaaagtcggttttccacaagaaattccctggctttagcaagttcctataccatacaaagcgcccctttcccacatctgagaacgttttgagccatgtatggtggtcttgtccactaggcaaccctgtatcagccctccaccctgtcatctttgtccataaagcacggcttgtgactttgcacaaatgcttttttttgctcacatgtacatactttgttgccaaaaaatagtggattattttacataaattagtgcaaactaaaaggctgataccaatgataggaagcactggcttccgaagcgtttccagcatccccaaacagctccttaaacccaatcctatgttgcaattcccaaaactgtgtctccaacctagacttctgaatcaccaatgcttgacccccgaccacacctaggtgtcccagcaactcaaactaaacatgatcaaagctacattcatcttctaaaactactccttggtctcagtgatgccatcacctttagtcgcttatgttagaaatttgagaattgtcaacaattctcttcttttacatcttcaaatccaacccatcaccaagaccaggattccccttgtgaagtgcggctcctaccttccagttctcatccccactcccatcatcgggcccaaacccccatcctctctctctcatggacactgcagcagcctcccagatttcctctccttgcttctggcctcattccctgcccccacccccatcccccaccaacaaccaacccattccccatatcgcagtctctggattatcaaacaaaaccaggaatcaaatcacatcacgccgctgcttaaaaatgttagtgacttcctatcaggttctctgcagtttggtgcctgcctcccttatcccatggtagccccagcatcatgtcacacccagtattctggcctctcacaattcctagagcacagcactaagctctcacccaccccagggcctttgcacatgcggttcccattgactggaccactcttcccctgactggtactttcttatcctctaggtctcaacttaagtataac

SEQ ID NO: 66398 - DNA, 741 bp, Homo sapiens
atagaaaatgttaagtgttccttctggatctacagatcatgcacagaaatctcagaggatcatgtcagtaactcactaagttccaggaagagaaaataaggatgtgtacatgaatcacaccacactctataaaataaatagtgcatccaatccatggaagcttccctgaacagcaagaatatacattctgatactaagtgaaggacagtatttggtgcctgagggtttccaaagaggattttctagtgcaactcaatttcaataaaggttagaaaactgttttcaaaagccacctgcactaaatcaaacaaaccgcaactccagtagaacaaaagccactcagcaacaaagtaacaaagccataaatgacagccctgtcaataaagaccaagctactagccaaaggtcaggctccacagtactcattgcagaagtgccaggcttctcaatcacgctgtgggggatggtggccttcgccactgaaaggctgcccaggaacagaggtgaccctcccctccaggagtcaatgtcagactgagagctggtttcccactccatccccaccacagcttccaggcccatttgtcacctattaaatgcaaatatactagattgaaagactgataaagaacacagatcttcagagtggaagtggcctgggctatcccccaggacctaaagaaaccatccctccatgcaaagagggacaaggtcccaagcaggaagagagcagacacctga

SEQ ID NO: 66399 - DNA, 3661 bp, Homo sapiens
gcgcgtgcaggccaagggggtcgggtagggttgagcgggtactcaccgggcagaagcgcggcccaagtcctccttacttctgcgtgtcaatcccccttccccaatttgcatccttactgcaatccagtctcccccgtacaaccgtcacggatctgcgctccgagcaccgcccccccccgcaaccagccaccaacccccggcagggaccacaggcacacgcctccgtcggaaaagttgggcagacacttcagaacttttctttcactttggggagaaggagggagttggagaagtgggggcgaggggtgttaaagcactgggccattctctgcaacatctccccgcgccccccaacaagttgcccctcctcgtgcacacagcgaggtgacagcgcagggcaccaaactgctgagggaaggagatgcctgcagccatctcagcggggctggcggacgcgacccgacagtcaccggaaaaacagtggtgtcggtcttccccatcacctcccctccccatcccacaataaagcgcacggaagatgtctgggagtacctggccctgccacaggagctggggaggagagcgatctcaccccctccatccctcccggcaggtgggccgcggtcagatacgtttggcccgcaagtccttttcggacacgttggcatctgctcccaaagagcgccccagcaggacccggtcaccggggtcttccagaggggcggtagccaccgcacaggagccagcggcatcccccaaggagccgcaagccctacctggcttaacccccggacatgtgtgtcgctaccgatcgaagaacccaaacaccccgagatttccctcctctaggcaggtgaaaaccccacggaactctccgcagcgctgcctgcccagccggccgtgtctcgccgtccccgaggcctcgggggctcccagcacctccacccaaatcccacctgtgcgggctcgggagtccgagggcgctgacagctgctgccgccgcatcccggatctccaaagtgcggcgggagcggccagggaacctgcaggacaccgccgggccaaggggcttgggaaggtctgggggcccccggcgccgcacccctgcttacctggcgttcgctgggccccggctggggcatccgcctggtgcgcgccgctcggagcgctcgctgcgcacctggccgctgccgccgcccgcccggccccagccctggccgccgcgctagcgctgcatggcgcacgggggctggccgggggcccggggaagcgtgtctagttggcggcggcacctccggctctcgcggctcgctagtggctcccccgcctttccccgccccgcgtccgtgcacccttcctctgcagccgcccttttgcctccgctccgccggaccggccaaactggtttctccgctcggggaggtgcctctggtttccctccagcagccgcggccgccgagcctcgctggggctggggctggggctggaggcgggctcggccttctcccctccctttttccctccctagggcggagaggggctggactgcaagccccggggcggcccgaggcggcccaggtccagctcctgccccacgccctccgtgcgtcctggagtcaggtgggcacccctttcagtcttccgagcccagcctacgagcccttgcctcgcccagcctgagacccagttgctgcggctgctcttagctccccgggggccgcactcgccaccacacctctccagcccagcgtcactttcccgctgcccttggctggcttggccgtcaccccgggtcgaggactgagccagcctggaaagctggcggggccgcggcgcgcccgggacctgagctccctcggtaaggggagctgtgtcctcttgatgccaagtcatgtttggggaccggtcaccgaatgcgcgtcaaagttcgccgcgtggagggtgaagaaagaggctgcgcctcaagacttccagaaacgtatcctgtgattgcagccagcaggctttctgccgagtccaaacgctatcgagtttttttgggtttggagtcaaaaggagttaaggtgcggcccgtgaaccacgcggtgtaggtggaaattttggactcagcgcctcgttgctggctggtgtctgagcgggtgaatcgtgcctccctggcagtatagacattaccctccttcttgagtagacttttgccgctccccgactatggaccgagtcgttgggataagaatggaggaaaatcaaagatcagagtttgcttaaaatgcagtaggggagccaggactcccacacgattcccagtcacctagaggctcacatctatgcccaagagtccagactcccaactgggtcatcacagaggcttcctacaggaggccgtgcttgatgggactcaaagatccacagctttaaggatcagagttgtgtagagagggtattcaacgggtggccaactggtagaatcttgtctgataccaaccccgaggctgctctaggcttctttttcatgagtcaaacttgatctctgactaggtgctggtcagtcactcaatctatccaggcctcagtttcctcatttgtaaaatgagattggaccagatggtctcttccagcacttatattctgaagctaacgacagaacaaaggtaccgatgcaagagaacatagggcctgttggtgacactggttgatctaagacatttagacttgtttttggtagcacctgcaaaccgttgacaatttaggaccgagcatgagcatgatcaaggttgtgttttagggaaaataatagggagatagtctagagaggataaaactgaagatgggagaatcacttgagaggctgggacagcgacatacggaggagttgccaggggaagtaaaaaggaggaaattcaagggacaccacagaagagagatagggcacgaagtggccacaacctgcaactgactgggagaggggagcaatggaaggtgagccaggttctcaagactgggttatggcatgcaaggagcagcagactccaaaggagggaagccgtttaggaagactctgcccctatctggataaatgccagcaaacctaggaatcaagaggggattccagactaaagggggcaccccctccttgcagatccactaccaagtgctcaacctgtccaagaaaatgttacatagaagagactaaacaaggacgcatccaatctacacctgtacctagatctgatcaataccattctgatgtctgcatttatttacttgtttatttatttatagagacagggttgggtttcactatgttgcccaggcttgtcttgaactccccagttcaagcggtccacctgcctcagccccccaaggtgctgggattacagtcatgagccaccacctgtactaaaaatacaaaaattagccaagcatggtggcgggcgcctgtggtcccagctactcaagaggctgaagcaggagaatcaattgaacctgggagactgaggtggcaggcagtgagccgagactgtgccactgcgcttcagcctgggcaacagagcgaggctctgtctcaaaataaaataatattctttcattcaacaaagatttgagtgtgagtgcctactgtgtgtcaggcagttttctagttgcttgggtacatctatgagcc

SEQ ID NO: 66400 - DNA, 2963 bp, Homo sapiens
aacagagcgaataataatactactactaataataattgagcaggattaagagattaggatttggaggatgagtcacaattttaaataatgtggtcagggtaggcttcttgaaaagctgcatttgaaaaatgacttgcaagaaggtagagtttcatctttgatgagacaaatcctttgaaaacccattttgcatggaacccaccagatggaggcatgttaaaaccttatcctaggcgcagtgcctcacgcctataatcccagcactttgcgaggctgaggccagtggattgctcgagcctaggagttcgagaccagcctgggaaacatggtgaaatcccatctctacaaaaaatacaaaataaaattagctgggtgtggtggcccgcacctgtagtcccagctactcaggaggctggggtgggaggatcctttgagcccaggaagtgaaggctgcagtgagctgtgattgcaccactgcactcaagcctgggtgacagggcaagacactgtctccaaaaaaaaaattaaaaaaaaaaacaaaaccaaaacaaaacacccacacccacacaactccacaaccttatcctagaacacttcccctatgtaagtcttcctcatcttaggaaggaggttctcagagtgcatcagctggtgttgctgatgaaggaattagctcacctggaaaccgaccttgtcctttctgaaagaaccatgccaaattttggggtgccttgtcagggcaatcactggaagtgtctcacatgcaacaattttaaaatgcatcttacatgagtcactgagagatgacttctttgtcctggcagagccctgattccaccagccttggcagccctttctcagcattctcagatgggattgaataaacactctggttttatttagaagtcactctcatttagtaaccaacgagctgctgggggaaatcacgaaatgtaacagaaatggccatttctttttatgttttattttttattatttttttgagacagggtctcactctggcacccaggccagagtgcagtggtgaccattgctcactgcagccattgtgcccagaaatagccatttctaaaagagggtaacaatgattttcaacttttgtagttcataatttcctctgtttcttttttccccccttttcttggcagcagtcttatgtacatttgcatgatgtgggtaggaaagccagggaggttgccaagagagctagctcagttttactgaaaatttatttcctggaatttttttttttacaagataagataagtgataaaagatatgtttaaatggaggtgatactgcttgtattcagttctttgctaagcccagtggtcgtttaagctaaagcatttaatgccaatggaaagactcatgctgcactaggtgctattgtaacccatgcttggcagtcaagattaactcagttgaaagttcttcacagtcattatccagaccagatccagaattttaaatctgataagacacctcttatgtgaatctgtcctagcaataagtgacattagaattttcaaatatctgccccacatccttcgaaatggcttttaaaacaacaaatacagatgatatattctattttctctggcacaatgagttttccaacattccttctaagttacaaggctttccacttcctttactacttaatgacttctttttttctgactaacattttaaaataagaaattagattgcaaaagaaatattaaacatcaagtaactaaatgtgtctcaatgattttggcaatcacacagacttaacatgcataaaatgttacaggaggaattattcatgttattaaaattcacttccctttcttttgtattcataagcatgcaaatgtgtaggattgtctaccattcttttctacaaggaagagattttaataaaccacttactgtatttctctatggaaatgtaataaacattacctgatgttgataatgtaacaccagttaaacttaatgagtaaaattaatacagacagttcatgaataattttccaaaataacttgcgattgttgttagtatatgtcgccatgtgttcctgtagttgtaggaagtttgtatgtattatcttaggctctgttctcatcattttccattgtgtcatgaaaacacatttaccttttggactttatccctcttccttcctgacctgcaccctaaatgtggctaattccaggttgctgtgaatagaagtttactagattttttttttttttttgagacagtctcactctgtcgacaggctggagtgcagtggcgcgatctcagcttgctgcaatctccacctcccaggctcaagtgattctcctgcctcagcctcccaagtagctgggattacaggcacgcacaactacgcccagctagtttttgtatttttttgtagagatggggtttcaccatgttggccaggctggtctcgaactcctgacctgaagtggtctgccctcctcagcctcccaaagtgttgagattacaggcatgagccactgctcctggctgaaatttactagattctgaagagcacgtgctactcctcctgtttgaaatgccctacctcatgtgcctgatctcatcatccttcacatctcagttcccaagtggcttcctctgggaaagctttgccctagtctccctcaaactaactaaagcttctaacatttagttggttcttgctgtttccacagcattttgcagctgacttctagggaaagcttcccattgtattttcactgtttacctgtcttgttcctcactgcactgtgagcccattgagacataaaactgagtcttattcttcttgatctcttttggcatacagcattaaatagagcattccaggtgcttattaattcttatagaatgaatgaatggttggcatggtcataattctcaatagttgcatagtattttctcc

SEQ ID NO: 66401 - DNA, 3797 bp, Homo sapiens
ccaagcaggagtgtacagtggcgtgatctcagtccactgcaacttccgtccaccaggttcaagcaattctcctgcctcagcctcctgagcagctgggattacaggcgaccaccaccatgcccagctaatttttatattttttagtagaggcggtgtttcaccatgttggccaggctcattcactttcatattactaataacaagcttgtttggccatgtcttgatgttttccccttttagacattatctactgaattcctatcagagaggcagatttaactggcttacacatcccactcctgacaccctcccatacaaactcttgctcttactccaatctcaaatcataattagattgcaacttatagccaaatcaattttcagtggacaccttattatgactatggaaatactgtttgcagttaagccatgcagtatagtaacattgcacttcctttctcataaagttttttggatttgtgttgagttaataattgcctttccccctcatttactttgtcttccatgtgcctatcattaattcagttccaaaatgtctcacataaccataaagcacctctcagtatggccagacacaaaattcaactgtttgcatttttttcccatgagacattcccggctgtggactctgtcctcttgctttacgatgaaatgatcactgtcatcatcctgagaattccttttttgttgtacttgctagttctggtggagcacatctgaaaaagagaacactagagaaaacttttttgaggcctaaggtatcacctaggatgccttcaattataaataatagcattctggaatacaaataggatttttattactattattaggtcatctctaactctctgaatagttagcagctcaatgatgtcatcaggacccaggcactttttgtacccttgctgtgccttcatcacaacaatgatgatgtgtccgctttatgtcacaggtggctacagcagctggctaatttcatttgtcagaaactgagtcataccttagctgcacggaagtctcagaaaatgaatatatatcatttacatcttctattgtgagaacaggtctcaagtcaataggaaagaagggattgggggaatagctgttggataggcaacccacagggtctgcacatcatgtgtatttaaaaatgtgtttagtctgcattcatagtttagctgggtatagcattctaggttggaatgcattttttttccttagaattttgaaggccttgtttcaatatatcctagattccagtgttgctgtcagatgcttgatattattctgattctcaatcctttgtatgtaaccagctttccactttctggaagcttttcctctgattctaaaatatcactgtagtgtgccttagtgtaggcatgcattcctttttctttttctctttttttttttttaagatggagtttcacccttgtcacccaggctggagtgcagtggcacaatctcagcttactgcaacctctgcctcccaggttcaagtggttctcctgcctcagcctcccgagtagctgggactacatgcacacaccaccatgcccggctattttttgcatttttagtagagatggggtttcaccatattggccaagctggtcttgaactcctgacctcaggtgatctgctcgccttggcctcccaaagtgatgggattataggcgtgagccaccgtgcccggcctactttctcaatcaaaaagtaatgcagttttttaggatgcatttttttaaaaacagcaacaaaaatatttgaatttggattatctttctcagttacacttacttttatccaactgcaattgacctggggtaagcttggcaacaatgaaacatcttttccaggctattccctttggagtctttcttgttctctggatccctagacttctcttcccaccacttgatgccttgcccaacctatcctcttcacattttctttacaattaaaactgacctaaaaccattgcttaccttttagagctaacgtagctaatctaataaattaattcacaaaatacaatgatgaaccctccttacacaaaacatataggcatttaatcacaatcttcaatatttttatcccaaatgaaagagtaaaaggtgggaatttcacagcggttgatgatgattaactgatccatattttctgtccttcaaatcatattccctaatccagttcctaacagttctgaaacaatgcagaagaaaatcttggctttttaaggaatgcttcattggatagcaatttaaaaatgcacttgtattcaaatctaaacaatccatgacatctgtggggcacctgatcaagaattgctcacattccatcttgtgagtcaaagcacaggattgctgtgcttctctgagtcccagcactgaagacctacacaggcatctttcctatgactcacctaaaatacttaatttctcaaagatgtagacaatcaaatgctggcaggtgattctgtaggctaaactgtctggtcctcagctgtgctgagtgacagtgatatgcataatggtagtttttaaacttttttatactgaactttcagttgttgttttctttaactctaacacctcaaaacaggagagtcatgtgtaaaacaggagggactggggcagctgacatgattggcacaatggatggcccctgtgtcaggtttaccataaagctaatgatacttaaacttcagggactctccaaagtcttatgcctcattttacattattaatttggtaaaaaaaaattttttttgagacagaatctcactctgttgcccagggtggagtgcggtagtgtgatcttggctcactgcaacctccacctcctgggttgtagtgattctcctgcctcagtctcccaagtatcttggactacaggcacaagccaccatgcctggctaatttattttagtagagacagggtttcaccatgttggccaggctggtctcaaactccggacctcaggtgatccatccaccttggcctcccaaagtgctgggattacaggcatgagccaccacgcctggtcaaattttgtaattttttttttcttaaagaactctcctcttcctcagttgtataaacttcaggccccatgaaacctggtttcacacctgataggacccagagcttcacccctccttcctctcctcttcagccctctccaaggagccctagtcctctgtggaacaaaaataaaagacaacctgtgactgggcacagtggctcatgcctacagtcccagcacttttggaggctcaggcaggaggatcacttgaggtcaggagttcaagagcagcctgggcaacatagtgataccctgtctgtacaaaaaaaatttaattgggcatggtggcatgtgcctgtagtagtcccagctatttgggaggttgaagcaggaggattgcttgagcctaaaaggtcaagtctgcaatgggctttgatggtgccactagcctgggcaacagagtaagacactgtcaaaaggaaagggaaggagaggggaggggaggggagaggaaaggaagggagggaagggggaaaggaaagaaaggagaaagaaagaaaacaacaacttgtaacaattcctggactaggaatcaggagagagggtctgacacctgtgcttgctactagccctttgtggtcctcagtcaggtcacttggcctttttcagactccgtttcatcatctgtaaaatgggtgtgtttgacctgatgatcgccaagctccctttgaaaactaagtctttg

SEQ ID NO: 66402 - DNA, 1835 bp, Homo sapiens
ttgaggactcaccacactgtcttccacaatggttgaactaatttacttccccaccaagaatacaaaagtgttcctatctctccacagcctcgccagcatctgttgtttcttgatttgttaacaattaccattctgactggtgtgagatggtatctcattgtggttttcttttgcgtttctctaatggtcagtgatgttgagctgtttttcatgtgtttgttggttgcataaatgtctttttttgaaaattgaccagacacttttataaagactatcttgtgtcatcgttatgataatcctatgtggaagttatcttcagcttcattttaccaatgagataaatgaaactgtggtagtataaataaataacttgtctaaagatactgagtagcagaggaagcattccatcccagacccattgaattctcagatctaagatcctgccaggctgtttctggaatacagagcagaaaattccctcctgttcaagcgctaactagataagtccttcttcacaaatgccaagtaagcacagaaaaagagcaacagggaaaaagtttatgctccaaggaagaagtcaaccccagactgcagggatcgtggtgagattgtatcaggattggaccttggggaaagcttccttatatttgagactcataaaaaaaaaaaaaaaactccccacaggtggtcagtttggttcttactggcttgctggaagtaagttctcatgtttctaaatgcagaccgggtatttcctttggaatgttctcacattgttttatttttgggtgtcaaccttttcattttagtccagcaaagaactccttgttcgtttcctttgggggatttatttttcctcctttttctgaggcggcagtacctctaccaggaaaaactgattaccagtgctgtccccagagttgtcactgaggtgtttccaccgaaagcttctctgtcactttgaggtcacctgagagcatgagagccaggctcactggtgacctcatccctctggccctattccagcagcttagctttgagcttcatcatcacagtgcagcagctgactacttgctaactaacgtgttatgccattgataaccaggaacttcctgactgacgttgaacgggaaaaggatggcggatcagaacccctagaaggaggtcatcttcatattacaaaggacagcccatttagggaagtgactttggtgttgtttaatagattccctttgctctgaagcaccctgggtatgttcttttataatcaaaacagctgatcacttttcttacagagataaatttgctcaaaaataatgcatctatgtatacaatgaaatattattcagccttaaacaggtaggaaattctgacatgtgaatgaaccttgagaacatgatgctaagtaaaacaagccagtcgcaaaaggataaatactgtacaattccacttttgtgaggtccctagaatagttaaattcatagagacagaatgtagaatggtgtttgccagaggctagagcagaggcccccagcccccaggccacagaccagtaccagtctcactcacattactgcctgagctccgcctcctgtcagatcagctgcagcattagattctcacaggaccacaaaccctactgtgaactgcacaggcaagggatctaggttgttcactccttatgagagtgatgatctgtcactgtctcccatcacccccagatgggaccatctagttgcaggaaaacaagctcagggctcccactgattctacattatggtgagctgtataattatttcattatatattacaatgtaataataatagaaacaaag

SEQ ID NO: 66403 - DNA, 1320 bp, Homo sapiens
aatcactcagggtcttcattctgaacccaaatcaccactctgtgctttaaaatatctctcccttgcagtttggtgtgggtgtaggactacattctggccaatggagcttgagcagaagtgatacatgcaactttcaagtcatgccccgtgcccgttcttttctttctgcaggagggaatacagatgaattggcaggatcaggagcagccatgttgcaccaagagaagatgaaaaaagcatatgttgcagattgcaaagtaactaggtaagcatttgagtccctaaaactattcctggtatgactggtagcggcatactagcttggacttttttgtgtcagagaaataaaccttcatctcacttaaatcagtattatttggggccactctctctgtagtaggagtgaaactagtatcctaactaatttaactgtcaaaagaaaaaaaaatatgaggcgagaaaataaggaatcaagaaacaaaagtcaagttttactcacttcatagcttggctcaaaagcaactttaaatatgtgagaaatgcaacaaatgataatcatgcatacagagaaattcctcaagtgacaaatgcttttactttcatttcctttcttgaaaattgacagagtaagattcagatgcatgtactgacactcacgtcagtaacatcggctcaggttagactttggtcgtcttatccttcgactacctaagggactcatggccagtatattttacaacccccagtgccagttactgaattctcacctgagaatgaattccctaagtctgtaatgtttcatcatcttgcaacacagataagcctgtgtttagagcaggcttttccatatgagtccctcctctttcacactggggctgagtagaaggtgattgacctgcctgagactttatcagtttggagttcatgttccatgtggtgttggagggagcaatggaggctgtgaaatcagacatcctgctttttgacagggttgtttgatgactcacccaagccattttttattctcggtgcatattctagtttcccttctcccgacagtagcctgatgcacctgtgcttgcactgtccttaagcctgttgctattgttatgtggtgtcactgagcccaacactgcgtgcgtgtgtgtgtgtgtgtgtgtgtgtgtgtgtgttgaaaggggtaggaaagtgaggatgattttcaaccattaaacccttaaggggccatcttctgaagcctggcatcatcatttttgttctcaagaacatttaagtcaaaaataacaaggttccttttgctcatcttcaaattattttact

SEQ ID NO: 66404 - DNA, 520 bp, Homo sapiens
tgtatgcatttctaaacagtatagcttattttgccttattttttgaaaagagaaccgtatttaatgcatgcatccttttttctcctcctcttccttcttggcttgcttttttatgtttgtgaaattcacacacaagtagctgtaatttgccttattactgtacagtttttcattgtatataagacaccagaatgtttgtttgtttcttaaatatattccactgctgattaaaatttgggctgttttcagttggggagcaataatgaacaatgtagccatgaatgtttcaaatgtcctctgaaacctaaaacctattagtcaccaccttgttatttggcagaatatagaagctaacagataagggagccttggtgacacagtgaataaagattagcccccagccattcagagcagagaggagagggtggagagtaactctcaagggcagtccaagaatatgcagcactcatgtctcaacgactttcaaaggattgaaagaagtcacagcatcttctctcac

SEQ ID NO: 66405 - DNA, 2633 bp, Homo sapiens
ctgaggtcaggagttcgagaccagcctggccaacacggtgaaaccgcatctctactaaaaatacaaaaattagccgggtgtggtggcacacgcctgtaatcccaggctactcaggaggctgaggaaggagaatcgctggaacctgggaaacagaggttacagtgagccaagatcgtgccactgtactccagcctgggtgacagagcaagactccgtctcaaaaaaaaaaagttgtcttgtggcctagaaagttgtccctccactacacagagtccctggaggacatctaggactcaaggactcccttaccataaaatgacacatctgcacagagcagtaatttgatgaatgagtctctgtgactcccctgtagactcacagcattgcttctcaggccaagttctggaacatatcatcctattcccccatccatactgccctctgacaacaagtatctgaaatattttggcctagattcctatctcaggcagacacctagaattttagaaaacatcaagttgagtattgttgttagaggtggcactagacatttagcaacccagaagccaaacccacaagggaaaggtgtgaccagggaccacgcagtggacaagtttcagtgactgatggaaagctcgttataaccaaatgacatctcttcaccaggtgtagtggactgaataatggctttcaaagatatcaggtcctaatctctgaaacctgtaaatattacatcatttggaaaaaatatctttgcagatgagattacattaattatactgagatgagggagattatctggattagccaggccctcaatgcaatcacatttatccctgaaagagaagaccgaggtagattttacacacacacacacacacacacacacacacacacacacacagaggagagggtgatatgaagatggaggcagagattagagtgatgtgtccacaagtcaaggaatgcttgcagctcctagaaaccaaaggaggcaagaacagattctctctggaacctccagagacagcatggccctgccaacccttgattgtggcccagtgataatgatttcagactgctgccttctggaattgaaagggaataaatttttgttgttttaactcacctggtttgtggtgctttgttagggcaggcacaggaaactaacacaccaggtacagaacataaagagaggcgtcatgtgtgagagacatgcctttctcatttggcctttcccagaattaggtgtggctggtaaatctcagtgcttgatgtcggatattgattgcataagacatgcgagaatgacgtgagaggctttataaatccaatgagtcaaccagggacgggtggttggctgtggagacgtctaggtaagctgcgaccatgaccgggttaagctaacacttctgtgagaacacgtgcttcatacaaacagtccagacagacctagaagatgtgatctcctaggtctacaaactcctacaaagcaggagaccactgagatattaggttggtgcaaaagtaattacagttactgccatttaaaagttatggcaaaatcacaattacttttgcaccaatctaatgtaatcacagagctgcaacagaggttagtgctcacttccttctgcccatctgtgtgacaaagtcccagggttacacagccagccaggagggagcctcccctggcacccatgagtctcatgactcctagtttcctgttggctttctttctggctctgcctatctgctatggacctgtcattcatgcaaattgggtgcctctgtttctcgggagctgtgtagagcctagacaagttcaaatcatcccaaaggacttagagtaggtcggaatcaacataatcaatgcccctgacactgcccctccacatgccctacaggagttgggagcgcgcacctccaccctatattgttgtctccaaattcttctctcccttcccttctctcttcttccctgaggtcagcctcacattctgcaggtctagcgaaagggtgtctcacctcaatcatgagaaagaggagtcccagctccaggagaagcaggagcagcccaggaaggggcttctcagaccctgagaactgagccatggagtggccatgtgctgttttagaacacagctgacaggacaccttggctcttcttcaccagagactaaaatcaagagaagcatcagaagttttggagttctcactgttcttgccccagggccacagagcttcagctacctgctcctcccacaagatccagataactctcagccaccctagaggagtccttattcttctaggcccccaagggttctcaagcctagacacattaaaaatacctgagtatttttaaataatcccaatgcctgagtccctctcctacagactctgatttatttggtctggagtggggcccaggaatccatatatttttgaaaaatcactccaggatattctctctctctctttttttttttgtactttatttattatttatttatttatttatttatttccagagagggtctcgctctgtcacccaggctggagtgcagtggcgtgatcttggctcactgcaacctccacctctgatgttcaagcgattctcctgcctcagt

SEQ ID NO: 66406 - DNA, 1637 bp, Homo sapiens
aaaagggtaatggaaaggacttgccctactagcaattacaatttattagaaagcaaactcatataaaaatatgggtattgtggtaataaacaggccaatggaatagagcttcagaatgggaattagaaccaggagggaaagatatcttctttaatacatggcatcaatggacagttaactagctatttggagaaaaaatttcagcgggctccaacatgggagggtgatatgcttgatgtaaagatgccaacaaatgtagccaaggatataaagtttctttaatggcaggggatactgaaaagtgtctgaaaatcatgcccacacaaagtggattgagggcgcccaggtggaggctcccaggcccctgcacgtcccatgagaacacaggtgcctggaataccaatctcctagtaagagaagcgtgcacccgcctgttcttgggggactttgtgccctacctggactctcctacctgttctggagaccctggctatgtgcctagtattcatcaggtctaagcaacttgttcaaaacagctccaggactttcttaaatgtttgctgcaaggcaaggtaaattgaagctcaacttctcaggatgtgactgtcttctggcaggaccaggcctcaggcctgctggagagtgcttcctctattctcctatctcaccccttatatcagaatatcttccagccagaccaaagatttatatatatataatgaatattggcaataatagtactaatgtagagaaagctctgagaaaagcatgagtaacacttctgaaaaatgggcaaaggatatgaaaaattcaaagagggcaaaatacaagtgcgagtacatgcatgaagagatactgtcattctcaaatgattatgtaaatgcatttctaaacagtgactcagcatgtttcaatgattagattggcaaagattaaaaacattgagaatctacaatgttagtgagagtgtggtatgtagaaattcttatttacttttggagaatgttagtaaagttatcttgaagaggaatttggttgaaactatcagaagtttcagggtacattgctggtaggaattaaaaaatggtacaaccattttgggaactagatactttcttataaagttaaatatacacctactgtatgaaccaaccagtcattacacttataggtgctcaaggtccatggaaacaaatatccacacaataccatgtacaaagatatttgtagcagctttattcactgtagcttaaaactgaaaacaacccagaaatctgtccaccaaaaaatgcataaacaaattgtggcctacctatactgtccattccatccaccggatactactcatcagtgaaaatgaaggaagtactaatatgtacaacaacacatgaatctcaagggaagccagaagccagagcccatgctgggtgtagaactcttctttatagaagatctagaaaatgggccaggcacactggctcatacctgtaatcccagtgctttaggagaccagcctgggcaacatagcaagacctcatctccactataaacttaaaaaatttagccaggtgatttggcatgcacctgtagtcccagctacttgggagactgaggcgggaggatggcttgagcccagg

SEQ ID NO: 66407 - DNA, 672 bp, Homo sapiens
cactatgcaatatatccaggtaacaaaattgcacttgtacccctcaatctatacaaaatttttaaaaatggaaaaaaatgatttaaaaagttaaagaatgcattctctttgatccagcgattccacttccaggaatttaccgtacatagatattcacacaactgtgcaaatatgcaggcataagggtgtgcattgcatgatagtttgtagttgtgcaaccattgaaaatggccaaactatccaccaagagggcagtagataaacaaccaaaggtgaaagagctgctatagcctgtcctgtaaactccaagagggctgtgtctccagacctcacacagtgctgggcatactttatgcagggatgtggaaagggagtcaaggtatattaggtaaaaaaaaaaaatcaacttttaacttttaggaatagatgaacccactagaatggaactatttatgttagagccagaattaatttggtgtctttaggattatgtgagaagactgagggtcttgtaggaagactttgttcttgggtgaggctgagacatccctgggagagttgaaacaggatgagctgctgtttgctgcagggagatcaaaggaagagttcagatgcagacaagtgagggctaagtgtcccgccatagaggggtttagtccactgcagtgccct

SEQ ID NO: 66408 - DNA, 758 bp, Homo sapiens
tatggagaggcccaaagtctctctcataaattacatatttggactgtctggcagtcaaagcacccaggcaaacacaaatactcccttctggcaggacgtaccagggttatcctggatatcacttcccagtagctgacggcaaaggccagatctcaacttgggtaaggtaaattctccttccattctgtcctctcttgccctctggtaagtctgaagctatcatagaagagagatcagcatttcctgcctaagtgacactgcccttctcacaccacccatgagcctctcatgtttccttcgtgctgttggtggtctctgcaaggcaagggtgtagccaatactgaaagagtgcaaagtccaggaatgcagtgattcaggcctaaggaggtcaagaaaagacatggttggaagacacgccattctacttttaggctataaaattcagatggtaaatttaacatgtgcagaatgcaagtagtagtttacatttttctgcatcctttaggcatttgagaacatcatcaacaaagcacagaacaacatttgattgagtcaccagaagccagcattcacaggtggctcagtggatgatacaacatccaatgtgagtaaatggtaccagggaactgcagaggcaagagctctatcgtttcaatactaacaggatatgaagaaccatggcattatgagtagcaagagttgctcccttttctctgatacaaatttagccagggatggcacttttgacaataaagaac

SEQ ID NO: 66409 - DNA, 900 bp, Homo sapiens
atgacatgcatatcacacatttggtatgctcaatgaatgctattaataaaattgtgaatcacaaatgttactcccatttccttcccagctcagggaagaaacggtatgcatgacatgatgcattgaatggggcagcctacatctactttgcctcctgagaatatcctgagcatcaggccagtgttggcttcgccaggaatcctaactcaggtcttgaaagcaagattgttgctgttaaaaaggtgacatgggatttttctgtttcctcattacattgctttagtttctccctgcctgaagcttctttaatctgtaggctgtgggcaccacctttaaagttttgactcacattatctatcccaaagtaaataatgactaaagtggtggcaaagtcaacacattctttgaaagacaatgaatctgggtgttgaatgaaatcagatgccaggaatatatacattgttgttacaacgctattacacaacaggccttagaagaattccttttctccaggtaaaaactacccccgtaccagttactctgggtgaagaaaggcgtctatgtttggcaaggactaaggaatatttgacttcatgaatcaataactattctcaaagctgctattgacctctgatctgcaaatctgtcagcaaagagagattatggtaactatactgctagtaaaatgcaaacctgttggttaaacatttgctgaaagccctgctagtgacccctgttaaagtgaaccaaatttggccacgtgttcttgcaatgttctggaacatcagagaaaaataactgcctgacccaacacagcttagctcctagagagctaagagatttctctgggccagaagcgttggcagggatcattcctttctcagtctctctcttctacca

SEQ ID NO: 66410 - DNA, 4567 bp, Homo sapiens
agttctctctgaacttccttgaatgaaaatcctaaatgcatcctggtaatacccaagtaggcactttgacgtttccttttcaaaggcaaatggaatgttctgcgtctgttttctttttgaactcccaactgcacttaacatctaaatttaaggaaaggcttccgaaaaagtcgactgacgaatttctttcacttatttaaagtagtctcttgcagtcctataaatcggaaggattaaatgaactgcttgctagagaaacggtagctgggtggtgggaagaatcctacggtggctaataagacgtctcgatcatttgcatatgcaaaggataaccttaagcttgagtttgatatttcacgttgcggctcacaaatgaactgctttttattcaaagaaccatgctgtctgttttcgcgtgggtgggtgtgtaaccggggcgggcgctatgttggttttgttccctgcaaggttgacacaggcaatggcgacttgcggccacactggggcagcctctcctcggctggcagccgggccgggcggctcgctcccgggagctgacaatgtagccaagtcctgctcgtcggggccgcaaagaatttaaaggggtctagaaacatccatcttttccccttttcacagttaacagcgagctcagggctctcggtaaaaagaccaccgggaggaagaaacgctcagggcgtttttgttattgttcgcaaaatcctctatcgcccccaaacgtccagcccgccccctccctaaagcggagggaaaccgggagaggagggagggtcggcggcgccggccaagcgcgccagtacacgcccctgcggatccgccccgcggccgggtgacccccgccgcgccgcgctggaggccccgggccggggtgggcgtggggctgaactccgccacccccgcagcccgcggcccgctcgccagcccggcctgtgattggcttggggggcgcgtgtgcccgccccggcgaacggggagggtaccctcgcggcgccggtgggaggaggcggaggagggggcggagagagcgggggcccggacggcgctagcgaggaggcgggcgagccgggtccccgggagcgcagaggaggctcggaggggggcggagagcggcggggcgggagggaggcgcgggtcgcggggagggaaagcccggccgggtctgcgccgccgccgcgcgcagtgagaggcgccggggctgccgcccggtgctcggcgcgctctcgggagccgcccgcccgctggtcccgcagccttccgggaggaagcggtgccggcagcgtccagggcgcgctctcgggcaccctcacctgccggcgcccggccgcttacccggcagggcgtgcgcagggtagggtgcgggaccggggggacctggaggcagaggggagaaccggccgtccgcgccgcagcacagccgctgggagcgcctcagaccccgcgcggggcgccggctccatggcgaccgggctcggggagccggtctatggactttccgaagacgaggtgagtggcacccccttcctgctcgggactccccggggagttcctatcccgcgccggcagggggaggggaaaggggccgtccccggggtgctcgtgcccagcgtctgcaggggagccccaaagcgggagcgccccggagcgggatccaggggagcttgggtccttccgcaccccccaccctccgcaagccgagctcattgtttgtaaataaagcggcgcgacgcccttggagctgggggttcactccgcagctcctcgctttcgggaggagagggagggggcatgcgtgcctctcttccctcttcctctccaagcagcgtctcccggggctgttgggcaactttccgcctctcgcccctgcagcccgggagtccatgatgcatgtcacgtctgggtcgcgcggctggagacccgggactgcggagaagccggatcgtttccccctggaactttctctctcatgattgtgtggatcagcaggcgctcagaagcctgtgcgtgcttatcccggcgggaatgggggacacgctgcgtgtgtccctcccctcgttttgcaaagtctacggccaggattgtggatttcggagcctcggtgggggaggtgttcaaggctggtggcaggtgctcctggaaacttggggaggaagcttgcagccctgccattttttcctcccgaggattcaaagcccggcacctccagggtgggtggggagaggaaagcttaattgatctcttttattaataaagcgactgaataagccacgcctcccaggcggtcggtttcactggaaagggctttgtttttaccttcattctctcttccgtgtctcccactccccccttttgaaacaatcctgctaaatcactgcctagtcctctctcgaccagccacgctcggctcttattggtatgttgctctgccaaaaaggggggtgggacgcttgtcgcgggcgcggcgtgacaggcaggctggatggagcaggtaggagtggtttgccatctggcggggtgcgcgctcaggtctggctcccctttcgagaggtgaattttacaacccaagaagcattactcagcagggaggtatttcctatcctggttgtgcatttcatgaaaagttgatgcctggaaattcaggcgttctcgatttctctttcttcccctccctcctttcttttcagaggttccctctttctctcgtgttgggggtggggttggaagaaaggctattatctgagacaggctcgcgttatggctccgctttctgcggctctcctaccctggcatggtgtgtgtgtgtgcctgtgtgctacgtaagtgtggaatgaaaggtattttggggtgggaagggtgtttagggtatgaatttttttcttagcggtgctaggcaaagcttgatgtatttatttgatcaaagaatgatcacagtgcaaataatgtgtgatttgtgtgtttattttgcctcgctgtgcttttgtaaaataatttcccgttttgtgtaactacctggggataggtgacagtagcattgtttcattgacccggggggcttctcctctccctcctggcttctctctttgaggagctttcccttgcatcctctacttctccatttaattagtggcagtagagggcaggccctgagttgcagagacgcagacattcctaaacaaaggggctgcttgggttgacgtattgtggggggtgggggtgaggacagctgcatttcatcctaggttcttttaaaaaatgttttaataacatgattatttgtaaaaactcccccgaaaaaacgattttaagagtgttttgggaagtgcagctggataaatgaaacacgttaatgtcactgttgtttgtgctttatttacattggcagtgagtgtcagaatctacctagagcacatcttgccacttttgtccacaggagtcactactaatcatcataactgatgtctagtgtgaaagtgaagcttggaatgtaaacagagtccgagtgtgtgttggcatgtgactggattcactcctgcatgttgctagaagggaatttggggctgtataggaaatagcaagaggtgatgaagacaccttttattatctatttattgccatgtcgctggtagtatttagttccacacacattgtatttcacaagatgagtctcagccgtcttcctttttcaactttctcctaccagtgaaaaaataagccagggcagttctgatgacttcacatttcattggtatttgtttttcatgggcagtttcatgctgtcacgttgcccttcagagaatcagggaatgccttcgtagaatattaacgacaaattgttgaatttgcacagcttgttttgtctccctgaattagtatgtgtaagaaaaaccaatggaagattttagcaggctctgaaagtagaatgcccgctgaagcaaacggcagggttgttcttccaaggcgtattaaatatgggtacacttagtttgcagacttggtgtgctgcagaatatcacatatgaagatattttgaccgctatttagaagagtgacctcataaatcttttagcaaagtagacacacatacctaccacatttcttaaaagtagattcgtattttgatttgagattgttgaaaagcatggtatgtttggagtgcacttagttatgtcccatctcataaagactgttgagctctctgcactgctgatgatgaagcattgcatgaacccagaaaacggggatgccaaagcacagggcttaggtgctgttccttgcgtcatcagcagaggtctgtccactttgtagaaggtaaggggttgagatgtgggctttgcttgtgtgaatgtatgtgctgtttaattttttctgtgtgtttcgggcggaggtttctctggtgagttataattcatatttaccctgatttaagtcatgtcactttaggtagccagattcaaaaccatcagatgaaggacttttggtgttagagggattagcagtttaacaaaacttctgattcatggcccaagatcagatttggtttggaatcaga

SEQ ID NO: 66411 - DNA, 405 bp, Homo sapiens
aagaatgggactttgtggagaatcttctgctttctttgctagtctctatttttccttctcagttattaagtgagttgtctttgggtgtcctcatcatgctgacttcatcttgcccagtttgttttgggtagaggaaggagtgcaaggtttaaaggaaaagcaaagcctgtacaacatggtgagaccccatgcctgtggtcccagctacttgagaggcccaggtggaaagataatttgagcaccggggttcaggaatgcgctgagtaatgattgcaccaccgcactcgagtctgggcaacagaatgagacctcatttcaaaagaaaaagaaaaagcaagactgaatcatttcactttgtattctcctccttgctctcattccttttgtgcttcatgcattgtgtgt

SEQ ID NO: 66412 - DNA, 726 bp, Homo sapiens
ctccagggaggtgacccgaatatgcagctaagtattgcaaggatttctgggtaatattacacctgaaaggaggttttttttttttttaattatctggtgatttatgactaaataggctatgtctctcaaaacattgaacctgcaatgggcaagaaagaacaggatgactacaatgaaccttctatttggaaaaggggaaaataagacactcacagtggggtagctggctgaacaggaacagctgggagcgtttgctttggtcagccggtctggcagcttgcctctgctgaagtccgtccagggtgagaatctcgcttggtcattgtcctctgcagctgcacctggatggggtaggcactggcaaagctccttttcttgggtgctgcttggcattagtctggggcttcaggattggttgtcttggggttgaatagccacaggcttgttccagccttactgagaatgtctttggcaaaactgctcccaggaaaactcaggctctgagttttgtgtctagtcaattccatgggctggtaatggcagccagtgatctcacctagatgaggtctgtggttctgggaattcctgggtcttaacagtaagtcccacagccctgctaatccccaccacatctgccttgaggcaattttaaaatagcctagaatgaagaggcacacagttttgggtctaacagacaacaggggcagtttaacccactctgctttt

SEQ ID NO: 66413 - DNA, 2642 bp, Homo sapiens
ttgaaatgattatgttttgggggaaaagtatattattaatatgatagttatctaatgttgtgtaacaaattgcctccaaatttagcatatgaaaacaataagcattcattgtgtcacacattcattctttcttttcagtgaaagttaacctgtttccatctgaatagatttctcactctgtatcctgccagtaatcattttgtactgtttctgtgcctttcaatccaagagtccaacctgatgaggttctgctggtgtaattcttttaaaagcattgtggatgtcctgtgaatctcactggagttcactttttaaacattagacttctgtggagactgctgaaggacaacacccttacttcttagggcctttggtttgccagaattgttctctgagccattgccttggattttttcctgacttcttaacaaaggattttataggtgggaccttcaacactctggaaattgccttagctacattcagccatctccttaggtacattttccatctcccacattgtagcaggcaatggcgttgctaaactttccatcaggaaataacaaagatctccttttccagtttccagtaacattttcctctctacaccatcatccacagtctcctgaaaggccctccaggttctagcttttccagggctcttcaggggttttcgaactctctttttacagtctttccagttcctgcccattgccacgttccaaagtcactcacacattttaggaatttttctttttttctttttagcaagcataccaattccagttaccagaatctgttagtttttgttatgtgttgccgcagtacagattgcctcaaagcttagtggctgaaaacaaggaacattactggccaggcacagtggctcatgcctgtaatcccagcactttgagaggccgaggcgggcggatcacctgaggttgggagtttgagaccatcctgaccaacatggagaaaccccatctctactaaaaatacaaaattagctgggtgtggtggtgcatgcctgtaatcccagctactcgggaggctgaggcaggagaatctcttgaacctgggaggcggaggttacggtgagctgagatcgcaccattgcactccagcctggacagcaagagtgaaactccatctcaaaacaaacaaaccaaacaaaaatgaacatttactgccatacacacttcctgggggtcagggatcccagagtgtctccgctgtgtcagtatgtctcagggtttcctgaggctgcagtcattatgcccgctagggcttgggtgggactgaagcacctgcttccaagttgcctcactcacatacctggcaagttggtgccgttgctggcaggaagcctgcttttcttgccaggtggacttctctgaggggtgcgtgaatgccttcactacagggcagctgacttccctcaggacacatgattcaggagaccaggggaaagctgcagtgtcattttatcacataatcccagaagtaacactctgtcatttctgcaatatcctgtgggttacacgtcagcattattcattgtgagaggtgactacatgagggtgagtccaggaggcaagaattattgggggctatcatggaggtttgataacataattggtaagaaattcagatacacctcagacttgattgtggcataccagtgtgttgtaaaacttgtgagaatggcttgccttagaaagacaagtagtccatccagtgtcttattcttatgttaagttgggattgctattttgttacccttgggcctctatatacaaagcctctcatagtaatagatctaattgggttgaagtttagtattatgtatatgccctctgcttttattagtagattttactttcgtgaaaggaacatataaacttcattattgcatttttgtataaatgcagctggggacatggttttattacccaatgtccattttgtaaatatttagagaactttttttttgcatcataaatcagtataaatagaagcttggtttccattgttgccctggctatgaggaagctgagagtgaaatttgtcgttcaagtgtggcagttatgttactgactggcgtatttatattctcctttatttgatattttgctatgagatgttccagtttacttgtgggaaaaaaagccaggtgttcttgaactcaacaaatatttattgaattccacttgctggccagacagcattccatgtgccccagatatggcactggacagatagataaggtccccactcgcctacagcttccaacctggtcgtaagaaaataccttagcttttgctccataatgtggaagaattggcctcagagaaaacctaattcatatgtaccacgtttctacccattcaagttttatttcataatttttttttttttttttttttttttgagatggagtcttgctctgtcacccaggctggagtacagtggcacaatctcagttcagtgcaacctttgcctcctgggttcaagcgattctcctgcctcagcctcccgagtaggtgggattacaggtgcatgccaccatgcctgactaatcttttgtatttttagtagagatgggctttcaccatattggccagcctggtcttgaactcctg

SEQ ID NO: 66414 - DNA, 1145 bp, Homo sapiens
gtgcaccaccacgcctggctaatttttgtatttttagtagaggcggggattcgccatgttggccagactggacttgaattcctgacctcaattgatccacccaccttggcctcccaaagtgctgggattacaggcacgagccaatgcacctggccacacctgtgatttattttatttcatttgagatttcagactttgtcgcttgttctttctgtagaagttttttcatagaagtatgttgtttcaaaagcaaccttcaaatagtagacttagcttggatgagaatctaaaagtctttgagtccaacaaccaagcaggtcccctgtccaggaagtaccttatagctgatgtttgagtatccctgcagatgggaactcactacctcctgaagcaccttacttctacccttggaatagtaacagagattaaaatgtccttccttaatttgaggtgaaatctgccttcttgtccattttacacacactaaccttccttccaccatgcaagctgagagagagccaggttgagcctgtgtttccacaacaactcttctcagacctcctgctgccacctaccatgcacttgctcttcactggctaggttccagttgctctgtacctttcctaaagtgtggtgaccagaatttggcacagtgagggaaggttccagagccctttagtgttatcgggggcacagagcttgggctttggagtcgctcagatcttgagttgatatgcacttctttgtccttgagcaaatgattgaaccttcttggactctcagttcctcattaataaaatgaagatgaaacaagatgagatggactgtgcacatttcctgatgggggctggtatgtgctggtgcccagtgcaaagtggctgctggcagaatggtgagtcaccagtacctgctcccttcactgagtgcttcctgtgtgcctggcaccattgctcagggctttacatggacttactcatttcattttcactgcagcctagagcgtaagtaagtatttgctttatccccatcttatagatgaggcatttgattctcaaaaaggtttcatagcttgcccatgttctagcagctagtaaaaggagaagccagagttttcatttaggtgggagtcctcaacctgctttctt

SEQ ID NO: 66415 - DNA, 1041 bp, Homo sapiens
agttttgtttttaaaaaagaacatcagtaagttcagaaaccaactccatgcttatttgctgtaatgaatttttcccttacattggaaaaacacagttccatctgtcctgaaggcccataagtcacagaatgcggtgtgttggaatgtgaaatcctttcagccttgcagaatctttatcattgtgctaaattgccatgtggaagaatggcaggtggcagttagaacttagggctttctatttattctctttctattttgcattagtcagttaaggttctgatcttcagaactttgtatgaaagtcagtgcttcatacaatttcacatcaaactgtggcattgcaagaggcaaaccatttggaattcttccttaaattacaaaaagaaaaaaaaaagtgaatgcacgaagattgttttgttcgcaagacttatgacacagccctccagctctgtggcttttcattctgatgggaaggaaatgagaccattgtaaatgactgttcagaatattagtgccagctccatgccaagtgctgttaagaacatggagagagcattcgagtgtttgcctctgaatttttgcccaggccatagttcgcagttggccggcaggctgcaagggccattccaagtgggagaagcattccatccctgggacaagtaaacagaacctaaaacaaacacatgtttagttgaagtgatacagcaccaggcaaagtgttctacttttaatgagtgaaggacatcagaaacaaaggatcagagccccccacgttgcattctcaactaattatagcactaaggcaggaatccttggccctttatctggagtgagtcagagagtatatcatgccttatctaaagtctaaagttaattgagcccaaggcccttctgaatagacacacactgtaatcagatatacagatggagtgggaagaggtaaatggtttcagatgccagcctggtgtagttgcatgccggaggggacttaaaggaaacagtgagaagtattagaaaactgtagttgaccaggtatggtgg

SEQ ID NO: 66416 - DNA, 1552 bp, Homo sapiens
ggaactactccaccatcaatgctgagggacaactgtatataatataaaataaataaaatatgtactgtaaaattgtaatcttgaaagtttgatcctgtggcagctgctattttcaggcagctcagcctttgtttgcatgctcaaaaccagcttgtgatttggtttctaagatcacggctggcttattatctgtgctggcttatcatgacagtggctcggtgttatggacacagtgagcatttggtgtcgatactcccagaatgaactgagtagaatggacaggagactgacctttgtctatttgtctatgtagcagtaatgccactaacttgttgcagtgctctttatcctcaaactatttgctatatatagtaatgcttaaattacatatattatatatattacatatacatattatatatgtggatatattatatattataattatatataatatatataattatatattatatagatggttctgactttgcacagttctgatatgcatgagttgcaattaccatgatttaaataataccagttccccaacaactctagtcaaatctcagttacccccgtgtgttaattgagtaattgcatgaagtacacaagcttgctgctagtgcttcagtatacaactcaccatgtaaataacagatgcatgtcagaatccgtggccaatcacagcacttctttcaaagcccatgggtgattggtcagtgcacatgttccttagttcatgcacagacagcagagtgtgtagttctgtggccttcttggctattggggataaaccagtgtgacattttacaaaaataccaaaaatcgagagggaattggtgaacgaagataaaagtgcagcaaagaagctgaaagtgataatgctagaagtgaaaccaaaacctacatggaattatagaagaaatagctgactgtgggaatattggcagtacagctgttggagagactgcctgcgcagcccgaggaggagaatgcaggtttaccacataaacaaggaaagtggttgtgaagaaaagaataaagctgtcctagaggacatgaccttggcaaaacaaacaaatttcacattaaaggatctctcagaaccatttcccagcatagaaaatgcaaaggatgaaatgtatgcttattcaaacttacggctcctagcagcactgttcacaatagtggaaaggtagaaacagcccagttatccatcagtgggtgaatagattaacaaatggatgaatagattaaaaaacagattgtgatatatccacgcactggaatattgatttaaaaagggacgaagtactgatacctgctacaatgcggatgaacctgaaagataccatgctaagtgaaagaagccagatacaaaggtcacatatgataaggttctatttatatgaacgatcttggtaaatctgtagagaaagaacacagatttgtggtttggtttctaagatcacagcaagcttatctctaagatcggggctggggcgcggtagggaaatgaggaacaactgcttaatggatgtggagattc

SEQ ID NO: 66417 - DNA, 2165 bp, Homo sapiens
atcatattcgaatttgatttgtgtacacttttgagtttggatgtcagccacattgcttctgtgtgttaatctttatttacgggaataaatgggaagcagtcagccattttttattctttattggggaactgcattatagtggaaaaggtaaaattataagctaatgagaccagaggtctgtatgtatgaaaaccatcctcatcgcttcacagttgtctttgaaccagtttccctgggattgttcgaaatgtagcaaacgtggctcacggttaccctgacggggccagagcaatagggggaggtgtgggcacctgtatacatttgcgttgaaaaacgtacccgggctattctgaggtcctttcctgcccccagcctggtttctgggcctctctggagtctctctttctggcacttgtgttctggaatcgcttatcagcctggactccttcagcagcagctgccacagtgtctttgtagtcacactacacacctatatactccatgacatggagtgtatagaatgtttcccgtcttcctcgtcagtgctgccaggagaagcttcccctctcctaacctctggatagtggctggctctgctttattcaggcattgctttcattttttagaacagctgctccagtatgcttagtgtgaatgacagcccagcagaaagaatggacttgacactggagactgcaccactccacatttctttgtcccctcaagatgacttaactagctcccttcccttttccttcatgcaatagcctcagaagttcggctggcattgccaagttgttagagtgaaccttaacctgtgtatgactcagaattcacatctgctgtgtcagtgaacacacagatctctttgtgaacacatggttatcaagaggcacatgctcttacgtatcctgccggattctggtaaggcgctgcttgcgcagtaagcacttgtcaggtgcttatgatgcctgtgacgtgaggctgtggatgcagaatttgtggtctgaacatttttgagtagataaaaatggaaactgaaattggtgaagcagacttgtggcttttcctactttctcatctcttttatggatataactagaagctctgcttcatcaatgagtgtgttaaaacaatttgtttacaaaatcctatttattaaaataaaaatctgaaagaactgcgctgctgcttttcagtgctcgccactctaggaacctgtattcctcctcttgttcatcctcccttttcttcttttttgttttgttgttgtttgtgtgtatgtatgtgtctgtgtgtgtgtggcggggtggtgggggcggtgttgccaaatcttttgcactgaatctttgaagatgtcctgaaatacttaccaaatcactagagcgaagagaagcccatctgatttcttcatctcccagctgaggaaggacacactttctcccactctccagtgaaggcccctgtgtcctgtgggtgggggagctgacatcacactcagtgctgacatttcttgttccctgggtgggcgctgattccagatcctcttcagccccccaagcggaactgggtttctcttgaaggtcctaacctcagctcacaccacctgctactacctttctgggtcttggattttgttgttacccaggcccggggtcatcccaaaggctcttgatagccctgtggctgtgcttgctaatacactgtcctcatcttttgtcagcgaagtaaatccaataatgtttccttctctttaatccaagccagtcttcattgaaaacacttcacctctaagctctcaggctctgcagtctgccctctccaaccttacccctcatgccccaccttccctttgtccccatctttcccttctgttccagtcattctcatgggccatggagagtggaagcctgggagggctttgccaaagtccagttgcctgctcactttcctaagggccagagcaatgggggaggtgggggaggtgtgggcacctgtatacatttgtgttgaaaaaggtacccaggctattctgaggtccttttctgcccccagcctggtttctgggcctccctggagtctctctttctggcatttgtgttctggaatcgcttatcagcctggactccttcatcagcagctgccacagtgtctttgcagtcaca

SEQ ID NO: 66418 - DNA, 705 bp, Homo sapiens
ccttgtttatgttctctctggcaactgcctgtagcagggacggatgctggaaatcctggcggggccacgtcttctgtgctttgtaggcagctatggctggatggtgcttgctgtttctgtgtgtaaatgttgggatttttaaaagcccttccccgcttaatgcgttgtggttgagcagcacatttaaatgcctgaagtgtaagatgaagtctcttggatgtagagggcagtggtggtttttatttttcctggttgaacttggcctttggattgctgactgcgagctcacggtactgttaatgattttctacctacagtcacctgctgtgctgagcacatcaaatacagtgcggttagttccaagctatgaagcgcctgtcacgcatgtataacaggcagacctcattaggagggggccttgcataggggtcacattttccagcatttgttttcaaaatggaaatccagatcacgcatttgagattaaaataaaaaaagcggcctgtgctttatcattttctttaacttacatgcctgctggtccagcccagattgctgatagaggaagccctgagaaagttgcccagccagttgcccgtgcttcaagacacaaagggctgactgaggcatccgtgcctacccttggctgctgctgctcagcctgcttgcatctcgtctgttttcagttatcagtggtgtgagaaa

SEQ ID NO: 66419 - DNA, 5837 bp, Homo sapiens
ctttaaataagcaaaacagccccgccagacatagagtcatccacaaaacctcatgacctctgttattgcccatcctgtgtggaagcccactgagaacttcacttgaagatgctgcaggaacaactgcagggaacctggagataaggccccgggtgatgatgtaagctaattgctgagctgggtggagctacttaaccttatggtaggaggtggagcttgacgcaacccccttttccaccaacaagcatttctttctacctgtcattgaagtgaatcatcagtataagtagcgagctgggcgcattccttctcagttgtgttaaaacttgctggtattcccccggtatcagcagaggtgtgtacgggcactgctttaaaactgggaaggaggaagacgaggccagggagccggagggtcaccaaggtagatttccagcagcgctagtccagctgaacactttccagccttgtttttcagcagctttgaggaaaagtataggtaagaacaaagacaccactgtatgtttgctatatgaatgcataacatctgttcttggtgtgagtttgatgttggtttaatactgtttttatgtcagcggcatagttctagcatgtaccaagattttcaattttaaatgctttttggtgttcacagttagctataattggtcaattttaccctccttatgcataaaaagaatgataggcaaagaatgagccttgaaaagaattgggatcagaattctggtcccctgttctttgcttcttaactttcttgactgtttagaaaaatgtacagcttttcttccaaaaaccaaagcaataatacttttatttttgaaaataatggaaaacagagaccgctgaagttctatgaatgaggttttctgttttagaaatcacaggttgaggaggaaagaattgtgttttccttcctgttctgtttcgagtctcagtatttctgacttagaaacctcctggagaagagggagataccagctctcctttgtttcaagtaaaataccatcttaggtcataaaatagtttgcttggagaataattcatggcttatatctgaatttttggttggtagcaacagaaatctttctcttcctcggtatgagtaatttggcttacatgatttagactaaattttattatattttttgtttgagaaaacaaaagtcaaagcccagaacatattcaactgagtttttccctcaggttttctatcattttcccacccttcctactcatacatgtgaatatgctgaatgattaacatgtgatttttgtttctttactgtctcatttcatggtgattcataaactgttagttaactggttatagtgtatccatatgttggcaaagcttgaaataaatttgagtgcaggccacaccttcgtattaatgagccgggttactttcagtaaagtatttctgatgtcattaagtgttaagatggccggaattctaaagacaataaaaatgtatcaacaatatgaaatatcaaagcctacagtcaaatctgagttattctttagtacttatttcatagctattctttaatgtttattctttaatacttatttcacattgaaaagtactttacacatgtttgaatgagatattgccagtgaaagaaacaaaaggaagcaaataactctataagggaagtgggattttaaagtatgtttgtgctggccccaggctggtgagtgagtttcattagcaatgaccaggaagagaaagaatgccacagtggtgggtgctgaccttttttttttttttttaaaccttttttaatgtctgtaaggaatacaaggtgaactttaattcttgtgggaatctagtaagatggaagtcaagaagagaggaagaaatgctttttatttagttaagaggaagtaaacatctgtattagttacagatgttatgccttaacctttttcattcctattgtttttatgaaaatttgcctttttaagttaaatgaaggttttctggagtcctgtattgcaactaaatgttgatttaaaacgacacatttgggacattttcttggcactgtggaatataatgaaaagatataaaatgaaggcaggtatgaaattatatgaattctgctacttgagtgtagaagttttattccaaagtggtttgtttggtggatgtggtgatggtggggggctctatgtacttattaaggcaagtgatgggacaggagcttttgtggtcttgacggttctgttgggatgggagggttgtttgggatttttatgtttcattccaggcaatgtttattttttcagcctgtacttcttagggttttaccaagtcagttttcatgtgaagccattttcatatcgtttctttcaccttgatggaaatcttttccttcttatgtgctttgagttaaatatgatgtagtgtgctagtaacatagacggggctttcctttctacaggtgggcttgaagtgagcctgccactcgctcaccttgaatcacggaggtttcagaggccgttggccttcagggcaatggcagaagcacatgttctctgctgttttctgagtctatcttgactgcgttcccagtggcccagaattccccaagggtcactcgacacaccctcgtctacagtaaatatttgtgcttcctctgtgcctggccaggttttctcagtacccaggagcacaggtgggcagtgggatgtgggcaggcggtacccagattccctcccacaggggccacagggaggacttgggcgcttcctgccaagagccccctgcccttcagactaagtggaaatagagatccgggagtccagtggactcagtggagttccgtagaatacatggaaaacgcaccgctttcagtgatgtaagctgtcttgttcacttcacgattactcatctggcctgcagcaggcaagaggatcacatgcaattataaacagcctcctctgactaaggtcagtgactggaaaccctgtcacgttatcagaggtcatttggtcatagattcttgggcagaagccattgagagtcctgggggtgtgatctttgagcctttgccagtgctggggtttgactccttttagctcaattaactgggtccaggagtttattttggccgagatctgccatgctgagttgacaggcttgacactggaaggaagtctctaacttcattagaggaaatggcgtggcaggctttaaggcattttgatatactccactttttctctcttgccctgttttgttgaggttttcagggccataactgtacctgaggttaatcagtgagtgatctatctgaaaggaatttgttctctttgggcaccgtcctgtgtggtattatatttgtataactatttagcttaactcattcaaaaggctatttaagtcacttgtcctgttcattacttgaaaacaagttgtcttctctttattcttttagtcagttaccaaatatttcctaagtgtctcttgtgctagacattgaggggcactccttctccctttcacttgtctgtttttgttgagctacattttttccttaagtcagattgttcttttcctgttacttttgttttcacttgatttgtttatttatatttaaatatgtactttaacagtcttgaagcattggtctgaatgaggatggtgatcagattgggaaaatgccccttaattttggtttaaaaaaatttattttctttaaattatttgtttattgataggggccacccactccaggtgagtggtttctctgtgtgtatggcagaggaatgctctgtgtctggaaaaaaaagtcacttagcttgaaatattatgaaagctgaagagtacaaatgtcagagagaaaggggtattgggggggaagagaatgagaagacaagacacagtcagggccctgtcacccgtgtggaactgcaggtccctggagagatgatgcatttatccctttttagagatattgccattaaaagttgatcttgagcatgacacagaactgaaagctttgatgacaaagccagcatctcagtttagcaataaccaggttagggaaaaaaccccagaaactcaacagtgagattcagctcagcaatgtgggcggggaacccactgtcccgccttgggcagggagcagccccagccgcttcatctgcctgatgctgggttttatccgcttcacaattaaatttcctttttgttatgcttgcgcacatctatatttggctttgcttcttattttttaagaaaggggagaagtgtgggcaaggtaaaatacagcttgcaagctcccaaatggcaaatgcaccagttagagtctaagtggcctcccaaccttaaggtgaaattcatttattcagcaaatatgtaccaagcccatcagggaccactgctcgagataccagtgcaaatagaagaggccaagggcacattattaggtccggagccagtggcctgcacagccatctgtgaccacctacctctctgcttgcagggaacttcagcctggtggaggagacccataatagccaagtcaactgataatagaattagtagtagtgttgagggacataaagaaatcagggtaaggccatcacaattacatgggtggatgatcttttataaaacagcacagttttgttttcttctgccatggtatctcctaacattttccagtgtgtctacttgcagttaatatggaagttgcggctgacactaggttagtggttaaaagaaaacaagaaaaccaacctttagaaatctttagaaacatcattatcatagaaagctataaactcttatgtatagaagggtaagtggccattgatcttggagcagaatgaatggatatttcctggaaaaaaatatttccactcatcaaagatactcaagtctcttctcatctaatcaatattggaaactaggaatatccacgcctatggaatatcctcagagagaattaattattctgccctctaagaggtatagtagtttagacttagaagtaaaggcctgaacttgaggctgcaccattgaaggcaaaagtgccctttatctcccagctttgtcatttgccaaatgcaattgtgttaaattaagtgacctccaatagcagagctctatgttttctcccctgacccccaagtcaaaattgattatagtaatccatcaaaccaggcctggcaaatgatgttttgcaactaaaggataaatactgagggggagggacgaatgtgaacgcatatgcagagcaacacagtcatgagaccattctattacttcctaaatttcttaaagcttttctgtcttttctgagcttctcaagtgagcaggggcatgagttcctgtgttgtgcctggggacagggaaggctttgggacctactgtggtcttaagtctgagcagtgctaatagcctcggctcaccaagtgctgggcactgtgctagagggtgtacaaacctctcatctcatgaggcctcactgctacagctgacagagatgacatccagttgtttttagttgcacatggcagagctagaaaacaaaccagggtgtgtcagactccagagcgcatgccctctgtgatgccgctgtgttaccctagatcaaatcaaccaagccatccgttaaaaaaaaaaacctgatctttgtcaaatatgcaattgttatatttttgttagagtctgcctctccagtgaacgatattaatttccttcaagtggctactcacagatatcacaaaatcagaaagctgcctaccctgcagcctgtatctgcctccacgtccccacatcagtcctccttgctgtgcttctt

SEQ ID NO: 66420 - DNA, 1422 bp, Homo sapiens
ctttcagtttataagtgattactaacagcctcatcaggtttctggaattaaatgttttattatttcctcccaaagttagtcctcaaacattagtatttcttgtgttcttttgatttgaatatttgtttttaacacacaaggatatcaactctataagtcagttaatatgttcatgcttttagttaatcgaaagtggcttatgatttcagtttttggtatcaggtgatgttgcggaagtgaggttcactgtgaagcttcttctttttttttttttaatcattttgttgtttctttgagtgtatgtgagcttataactcaagacactatgtgaaatgaccctgtgtttcctacattatagaaaagaggaaaatgaagcaagttcaagaaaattagatttatgtggaaaataaattctgcatctagttattcattatcaggtatgagattacaggcatgagccactgtgcctggtgacctcatttgaactcgattacctctgtgaagaccctgtttccgaagaaggtcaacattctgaggtgccattgtcaggtatgaggtaaacacactgagaataccacattttggcaactcagacaagactattttccaaacatgtaaccctgggaagaaggtaacctatcatagtgtgtgttaagaagtcaagcaaccaagaaatgttaattgaaggcccgttttgtacaaggttgcatggaaaagacacactagcgtaagacatggacagtggccctgagtgacgtgcagccggtttaggcgaattaagatttacatacttgaaaagggacaaacaagtctggacgtggtgactcatacctgtaattccaacactgtgggaggtggaggcaggaggatcccttgaggccaggagtttgcaaccagcctgggcaacatgggaaaacccctgtctctacaaaaattaaaaaaaaattagccatgtgtggcagcatgcccatagtcccagctactcacaggggctgaggtgggagaattgcttgagcccaggagatccaggctgcagagattgtgccactgcagcctgggtggcagagcgagaccctatctcaaaaaaaaaaaaaaaaaaaaaaagaacagaaaaggaacaaacaacagacacaagattccatggaaaagggagtggtctaagtattcagactgtaggaattcagagagtggagaggctggttattatgggggtgcttcatcctggggagttgagggaaaggaggtgctggctgcctggagcctggaagaatcaaagatttccaaggccatggggggaaagcatgaaggatgagtgaatagacaccagggctgagcaccctgaaaactgtgaagatactagattgacctgtttggaaaaccaaacagatgtggctgttattgacaagtggttttgtttttgtt

SEQ ID NO: 66421 - DNA, 1485 bp, Homo sapiens
ttttagtagagatggggcttcaccatgttggccaggctggtctcgaactcctgagctcagatgatccacttgccttggcctcccaaggtgctgggatcacaggcatgagccactgtgcctggccaacaagtggtttaaattggattctccatttcccacctaatagaaagtcggaagcatagggcaaaagtaaaggaaggaccctgtgttctgctggttaaatataacagaggtctgactccatggctattataggagaggtgcattttgttctatgtaaattatcttgatgtgtcccctgtgcctttaccccatgattatttagcacttttttctccacggtcacagggacagggagaaacatacacccataaaacagtgtcatctagaggcaaaaacttgtaatgctcaagcatgtgctctgacgaggtggggcagggtgtgtaggaacaacactctactaattattacagagcttgctctgcactctctgtagaagtccttcaatatccagtctaacacacacagtaacttaagagaggattttaaaaaatcaaaatgccctcagatttgtattggatttaaccaggctgagatccctgagatccaaatataataatgtgtcctttttggatgaatcagacacaagcaaaaatctccagtgtgtgtccagctttagaggtgtagtaatggattccacagttcacgctggtgggccagccaagacttttaatgctgatgtgggcttcattctttctataaactccctttcttcttgatagtgcatgggcccaggggttccaaacatgggtacctgccgtaattgatctgtgtaaccggagaaaatacatatcctatggcacccttgtgtcgggatatagggggcatcaccgtaatgtggctctttttctgttgattatagttttttctttctgtgatcacacaattgttttatcctcgcttaaaaaatttcaagaagtgcagcactcagaataacagaaaagtcaggtgtctggtggtttgtttgcacatttaatagacttgaagataaactctctaaacatttattttgcaagttgtttttctgagagttgaggggaaacttttgccctttggtctccctgaggaattctaggatttcacaggtaggcgtgtgttttggactgcaggctgaacgtggttggcagggtggcatgaggagggcacatattttaagcgttcttagggcagatccacgatcctttacctgccatttctaagtccaaaaagccctgaaaaccaaagacatctttacaggtttgtaggaaattgatttgagagcaaaacctgatgtgaacagatttgagagtattctaggcatcttgtataacacttcattcaatgctttgtgcctcttgctgcacagatattaacattcacttatgggccctgccccatcccctactggggatgctatgcaataatcagaataatcaaactaataat

SEQ ID NO: 66422 - DNA, 1060 bp, Homo sapiens
cttgattacctctgtgaaaaccctgtttccagagaaggtcacattctgaaatactgggggaacatagttccccatcttataagatagagaatggatcaagacgagcagctccattctttgtttgtgtttaggccagtgccaagttcaagatcttgcctcagggctttcctggtacccctgggaatgtgtatcagcagcagctgtgtcactgaatgggtgtcacctggggggctgcctgttcagacattagaagctgccacatcccctgttaactccatgtgagggaggaatcccttccctccgacaatttcgcctgtgagaatcaagtcagattttgcagtgagaactgagctgagtgtagaataagttcccgaggtacttctggcaccgttgttactcccccaccgagaagcccagaatgttcccaggtgtgttcaaagattgtacgggaagggcttaggacggtgcttggctcatataaacactcagtggcaaagaggttgatgcttaagtacacaggaagtgtttaccagtacacataattgtataccagtgagctccaccattcaatttactgtctgtccggtacattgaccctgtgaggcccactctcggtgtggcactgctaacaggttttattgttgcttactcacttgaaaagtgtctcccttggctagacctttgtcctgagcactggacacacataggtgctcagcagcgtccctctctgcaatgcaaaagggataccgtgtgcctctgcatgtcagctctagtcctggcatcccaggagcatacggtgacagtggaagtgaagtgcaagccgagtcctgggaaccaatgtctgccagaattaattaaaagtaagcatctttttttccctggttagttaatccaggatgaattccctgagtagttcctgccgttagaacttgctctcttttttagttagacacagctcggtgttgcctccactttgacatcacgttcatagttcctgtgcttggccagaactgttttcagttgcaaggacatgggtgagactggtcaaggaattgacttt

SEQ ID NO: 66423 - DNA, 846 bp, Homo sapiens
gtgtcccagaagggttgagcaatggagcaaacccagaaaatctcattctcaactctccctgacagatgacctcgtctgcgctgtcttttgcttcatggtgatgaaggtggaacaagacccttgaataagatttccatctctgaattctttaaacccatttgagatcagtgcaggcctgcagtctctctattagaactggagcagaggcccagaagagagaactgaattttcagcactggattctatgttgagaatgaaagagacaataattgaaaagcttttctcttggaaattttgcaaaatccgagtggatttttgaccaggatttcttggtgacctctcctgagagagcaggtgcctgaggatttcctgctgagtatcttggcatctgtcagactccttatgacttcattttagttcagggagtctgtttcctagccattgatttcatgcacaattcctggcatgtctcatatctctaaggtgatgtcacccttgtatttttttttcagatgtaatcttttatgtgacagtgaggtgtcttacttgtgagtgaacagctagaacctcccaagtggtttttcttttggattttgtttactcagtgaaaaatactgaggaacctgagatccttcagggtgcattttggtgtctgcccaaccttgacgtggatttggaggccaggctcaatgctcgaacttcttgttggagtggcactaaatcattaggatccctgaggacagacagttcaggccatcattatttggtaggcccttgcacacttacacacaaatgcatcattatgaacatggagcagaagattctagggccccgtgtgtaatggca

SEQ ID NO: 66424 - DNA, 4107 bp, Homo sapiens
gtgggtacacccagtcttatgggcaagctgattttatataatcttgttcttttcagtaaattttgtatatcaaatatttaatcttacttctttgaaaaactttttagataagtgatgtttgcaaattgaagcatattgaaccatatatctggatattttgtttgattataaacccatttttacaccatggccatagagaatggtgccgtgggcactatcaggagtgatgtcattaaccccacagggctatgtggaaagcgtgtggctgggactgctgtgtggttgggacaaggcagtggtgcacatgggccagctcctgtaactttcctgtttgtggctctcatggggcactcctgctcctgctctccccgtcctcatccatgatacatactctctctcatctacgtgctcataaatttcagcagcaagaactgcatgatttttaaaattctgagtagatgcttccagcaaaggatttcctaactgatcactgccagagaagaagaggtgctaaatagttgccaagttacatgctttttttcccaaatgaagtacttcccctgctactgcttgtaaagccctgattgtgtgtgtgcgcagaacccacatctggtgctggaagcctaaggactagtgagtggtcatgtggtttatggcccctataaaaggacccattctaaaagtctccaagaagctaactccacaatgagatgatgtgtgtgtgggtgtgtgtgtgtgtgtgtttgagatagggtcttgctctgtcacccaggctggagtgcagtggtgtgatctcggctcactgcaacctccacctcccaggttcaagcaattttcctgccttagcctccccagtagcttggattacaggcatgtgctaccatacagaattcagattcctctcctacccctagcctgatgccctttcattagctatacaaaggtggttgagtttcaggttaggcttattatcgtttaaactataaactaaatattcaccaaagctagcccagcctaagcccaggaataatcaaggcagcttgaaacctaaaagcaagaggaggctgggttagatcagctcactgtataatttttgcaaaggcggttttattgaaacctgttcttttttgaaagctggctctttctaacattcaaatgcttttgatcaacctattttatggaagcagaatattgaaattaaagtaaatattagatgaactttatagccagttgttttcctcattcttcaactctttaccctacaaatcttatttaaacaacatgttcagcaagctgttatcttgcttacgcaatgaatagaacattatgttctaaggtacagtttgctcacctatgaaaagaatttaacctcttttctaagtagctatacacaattgtcataccttaagttcttatttagatgcatttcagaatattagagcattttgcaagtagatgcacgttcttacccagtgtcagtgtttatagacagacactcaccatgggtatatttaagtctagggtggtaaagaatataaatgtcatttattaaaacctgaacatagccaactatgaattatttgtgttaatgtaaacgtcgaatgagcactgcaaacatttgatgtttgaatatttgcctgtagaagtgcagtactatgttctatagaatataagtagatgccaccccagtcctcaaggtttcagtgaggtcatcattgtatcaataaaggtgccaatttaagatgctaactggacattggaaaaaatttgttgtcctattctgaaggatgagtcttatataaagtgtttttaaaatactttattgaaactgccatgttcttttcaattttggtagctcccctgcatttaatttagtcataagcgtctgtattaatgggtgtgttcaatatgaaggcatcctgtgaagacaataaattatattatacttatctagtctgcactctttatcatgttgataaaatggcccttaccagtaaaaaaactgtttcagaatgtgtaagagtaagtctgtctcagctgactgagggcttcatcatgttcatgataatcccagcagcttgaaatgtcaaactggtagctgatccatagcacacagtagtgctaattgagataggttggtgtggataattgaatttaattgaatattaaacaccagtaagtgctatgctagatgttgggaccacagtgatgaagatgacattatcctgacccgggaggcgctccttatgtgcataaactgcatttggaaattttcatgatttgagagtcatctatggttgccagtagagattttcccagaaggccaaggatatatggggacatttgactgttctttgaccataattatataactttttatttgcccagaatgaacaactgcagggtaacatttatacaaaaggaatttagtgtgcttagagtgctgataatacttgagaaactaggagagctgttttaaagcacttctttttcttttttttttttttgtttttttctgggctgttagaatttgacattgttcaactttaactttgtcctcattgaactttatcctgctaaggagctaaaaggtccatatgatcaaaaaggcagctctcaacccagcacgaaattccaggctcattcatttctgtttacctactgccaaataagtcagacaactgcatacttgctttacagacgaatagaggacagcatgttgttcaataattgtagtttaaaaagtatatgtaagatacatccacaagaagaaagatagagggagcataccgtttgtcttctagtataggctccctgcccatggagatcacagagtagaattatgatgggtgccttagagaccagcctccctcaggatcatgagttcacctcggcaccacagctctgggcaacgtggaattagacaaattaaagtagttaagttctgacttcatagaacagaatctaaacttttgttcatactgcttttgtgttcttgggccatctgaaaaccttttctgtgtaaatattcctgcaatatgcggtcttacagaggtcttatcacgcatatttccctttgcttccttatgtatcgtattttttcaagaagaagacattcaactttagagacaatggaatcattgtgttgtggctttaattcaggtcattgtccttttgtgagttgcacgtgtgcgcgagcctgtgtgttttgcttggaggaatagtgaataagcaaggagcagagtccatttgctttttctaacagagggtggggcagattctctcacaaccattaaagaaaaaaataagataccagcaataatgataatcagtcatgcatatgtaatcgtgtgtagttcatacttcagattcatatacagctgagcatgatcttgaatgttacaggaagcaagcttgaaagtcaagttacagtagaactttgctaattcatgcctgactaatttgcccacccagtagttcctactgaaatcttgccattcctctaccaactttcagaaaaatttgatagcaggctgtggagaaggctcatgttacttcttatgtcaaggtgtaaacaaaaaagagagcacaaaatacatccatcagaccacatgaagtgaagagagagaaaacatctgctgaaagccggattctctgtttttttcctgctttttaaatgtaatctgtctttgtttatgcatgccctagaaacatgcataagtaaccctgagtagtctcttagtttaagaaaacctactataaaatttcttgttgtaaaataaaattctaaaaggaataagttgtggacatataagtatcagacagtttatgtaagactttacataggatgcaaggtaggctgtaatatgatttggtaattgttttatgggggaattttgttttgtatagcgaaaaagaacagtgagtgatttaactgaattttatagtttaatattgttgttgttttaactaaaatctttggtttgctattgcaaaatgaaagagaaaggaaattttggttaatgttaactttatttccaaaaccatgtgatggatgctgaccaaatgtgtctcaatagtgccattgaggtctgttgcctttttttt

SEQ ID NO: 66425 - DNA, 2926 bp, Homo sapiens
ggagtaggaggtagtgtaaagataacatagcaaataagcattttaccagaaccctctgaagtctcatcagactgtgccatcatcagaatccctcccttctcatctacaccgtttaaagccagcatccagtcagaagcccagagctggtaccgccttgctttcctgccagttgctgacatatggcacacagtgtcagttaagggcacaggctgatgggcagcttggccacatacctctctggcttcctatctgtaaaatgggcacaatcattgtacctgcctctgaaggttgttgcgagaactagacgcagccttggcacagagcccacagagagtgagcactgtgtaaagactggctgccagccattagtactgggtgcctgtcttttggtgtctgggcaaagctttaacctgttttatcagtttagaactcagatgtctccctggcaaaacaacacgggcatatagatattttgtgaagttttgttgaagtgcacttaggttaatgattcatgggcagcctttcaaagctatcaggctgtgaaacagctttgaataagattgtcttgtccttctgctgattgtcttttccttcccacattagcagccatagcaggaggaggagaggtggcaagtggccacactactctgctcacattaagcagacaatttatggtcaatattcagtgaatttcttttttttatagtacagttaactgatatttatattagctttaaaattatagcaaaatcaggccaggcatggtgactcacacctgtaatcctagcactttgggaggtcgaggagggcagatcgttggaggtcagatgttcgagaccagcctggccaacgtggtgaaaccccatctctgctaaaaatacaaaaattagctgggcgtggtggtgtgtgcctgtagtcccaattactcagtaggctgaggcaggagaatcgctttaacccaggaggcggaggttgcagtgagctgagattgcaccactgtactccagcctgggcgacagagcaagagactctgtctcaaaaaaaaaaaaaaatagtgaaatcagccaaatagagaactaacaggcacactgcctaattccttgtgtaactgtcattggtgtgagtcactggggcagcgtgattaggtctgtgagctggatagcaaggctgtcattattctcaaggccttctgctgactgctgctcttggtaagacatacagaatctgtgggcacctcctcttaccgctctatgctagatgaggcgtctccacgttgagttgtagtagatacagctaagaaagtaaaagaaatgaaaatctcatcaaaaggattggggctagtctcattcttcatgcatacccaaaccgtggtaactttgatttttttattatccagaatggattgtttagaggagacagatggctttccagttcatcaaattttttcaattatctaaaaggaattcctacgcttggagcaagtcatttcaataaatctcattcatatttacctgctgcttccttttaaatggaagaagagaatgtttttcaagtacacttgaaaaatagcatatgtgaattagaaacttcctctgtaaactagcagagtagaaataagaggccaggattcagcaccaggtaggctggattccttcttaggtggctcaagctggctatggggctggtctcatcatatctaaagaactgcccagcttttacgcattttgaatgtggtggaaccagctgcatctttttatatgagagcggcaaatagtcattgtgttccagtttgcttctcgggtcatctaaacatcagaggccatgccacaagcaccgtaactgagggatatagtgtgactgtggtccaggccagtgacctctggagctgaatcatgacttcccagatgactcccagagcctgagaggggactggtgcgtggctccaaatgattttcacctgggcctctttgaagtcgggagagatacgtgcagtatggtagatgtggagagggagaggcatggtgtgtccaaaaattagcaggacctgatccatatacgtggactctgaagcagtgcacttactagattaaaaaaaaaacaatgtacttactggatttaaaaagtgtgtatttttttgtgagatgcagtttgtaagatgcattggtaactaggccatatactttttccattggctctcagctctcaagaagctctttagtttttagcattggatcagtaaacacttattaaaatgttcccagcatttgtttgccatcttctctttcagctgggcccagctgtgccctcaaaccctgcctgtctcttccctgactgatcatgttctcccagcttctacagaggcttccatagcattgtgcttggtagcagacaccagacagaatctcagccagctcagtccaggcgcacgggctcctggtctcccggggtgtggttactcgtgtctcctcggggccttccgccctccacattccagtgccaggccctggacctttgtctctattcatgataaaacatttttaggaaatgctgacgctcagtgaagaaatggaaacactaactctttgttctcttcctaacagacacgagacgacttcctgggccaggtggacgtgccccttagtcaccttccggtaaggacagtctcatgtttgatgcttcgtgctgggggcgggggtttctaattgtttgtagtcagtgtattttcagagtggcatttcttcaccacggtgaagaaggctgaaatgaagcacgtgtgctgtggccttagtcctttctggaaagtggtcctttcaaggggatggaggagaagctggctgtaagagtagtcaagggtgcctgagtcgtgcgcttgcgttcccatccaccagctccctctcttttctgcacttcagctgctccacctttg

SEQ ID NO: 66426 - DNA, 4340 bp, Homo sapiens
tctctaattgtgagtctttctgcttacctagtacctagagtttctcttcccaagttttaaaaatatcagttctaagtaggcctagcgtttctacatatttttagggagaggggaccctttctgtggcagctcagtgttcagcattcctgtaagttagcatgctctgtgtatagcagatatcactagtaatagcatttagtaagtgatgttcacacatgctgctgtcatgaacactatctcatgttgtgtaacactttcatttttccaagaactttataatcagccgacttgaaactcacagtcgtcccctcagaaaggcagggcaaatgttgttatttccaatttgtcagaagctcagaaagcttattctgttgctgacagtccttgcaagggtcagaatcaggaccggagccccagatgcgctggtgtcactgatgtccccgtgccgggcatgagcccttctgtgcaaggagctccaatgtctcccggccagtgatgatgtgaaaacatttagaaccgacctacacaataaggcagattttcattctgtacccaaaacaggaacacagatttaatgcagagcaaaagggctttaatcaacagatatgttcatttttcacgtagacctattttacaagctaacttgtaagccagaaaatgacattcgagattttcaagtgagaacaaatgatttggtccaataattaaaaaaaaaaaaatgtacgtgtaatctcttcagaagctgcactggaaggatgtttgtcctggtacgttgttggaaagttttcaggaagagaatgtaaaaacttgctcttcttattctatcatgagaactacctctggagagaaaagataatgaatgcaagaggaagacagtgatttttcagctttcacgcatcattccccagaaggagaaaggcttgaaatatctcaacatttccgcccacacctcctcagcccctgccaggagacagagcaggcaagggaacgggcatcataggctgggggccacatgttgaaatctgctccttggggaatttgtcatttaagacagtcgaacttgcatacacagtgatgactgtttaagctttttttccaacattttcaggagtagggggaactgtgatgtaacagtgatgtttggagaaccctcacgaatacaggaacaaacaaaaaatagttgctgggaatcacagactttcagaaatagaagagctgagtcacgtttgttcatccagtcaaattcttccacttaacagtgaagaaactccttagtagagaggatgtgatgcagagccagctgatgagagtctacccgagagtgcaggccttctaacgctggcaggagagagtggaaggaagtcacttttttagttcctatggggtcatttttttcctcatggcactaccacggtttattcattgatttcctattgcctgttgctctcaacagcttgtgagctccaggagggaactgggaaagctacctttggtttatgtactgttatttttctggcacctaaaatgccttgcacagagtaggtgctcaagaagtatcggttgaatggacgagaatgaacaccagaaagtgagaaataaactagagaggaaatcttagtttgtgacgggatgtactgttggtagagcagaaaacatgatctctttattggcttatgtcagaacattgtattctttttcttattttggtggttgtccaggtattaacaaatttataccttgcctagactcagaattgctatgtggtttcatcagactaaacactgcctaaaataaataggatgtgaggtcaaatctgttgttcagtggaaaatcaaagaagactggcttaaaaactaagaaaagaccataggcagtgtaaattgtctatagattgctcctaagctatataaagatgatgtattttttgctctggaattacagagcaaaacactgacgtgctcattttctggaagagtggttgtttgttttgtttcgggttttttatataaacatgtcttaaaactataaaagagggaagttcatgttcttcatttcttctgtttctggtcaagataagtatggtgaaagtgtaaggtttggagtctggagatactagactaaggatcagtatattttattaacttaggccgaaatgataacagcagaagtattctctgctgaaattcatactagtggctaaaaagcaatgagttgttttcgaggctgtcatagttaatgtctgtgtatatgcaaaacccaatcctttttgctcataaaaatatcgtaagctttttcagtagccaaaactcacggccctgactctaagatattgtaagctactttacaaggtagcaaataaagattatttaaatgactacattaacatgttactcctttgcctgaagagatatcacaacttttgaatgactatagttaactcaattcctgagccctcaactggggtactatcactctatttcatagataaagcatttgagatttaaagaaatccttgcccaagaccactaaatattaagggacaaaccttctgacttctaaattgaggattttttgagaatgccatctgcctgattttatattccttgataggagtgtcagttcacttccctttctgctcgttgtatttccccacaaaaattcgttaaaccgtaattagacttttcaaaatgccaacgtaggtcattctgggttgtatgttagaagtatttagccaataactcttacctaaaccacagcaaaaaagaaaaacagaaacaccctgactcatattctgacaaaagtcacttggaaagcatgtttagtttgtgtagcgtaccccaaatggtttctcaaatagcagtatagctgttttcaggggtgaaagctgcattcaaagctgattagccctcatcagttctaggactttcccctgtgctgtgtagacattatctaatttttccatggataatctgagaagtgagaatttacggtttatgactcatgaaattctcttgaatgttgcctcagtatacataaaatttcaggtgtattgtttgcattatctatatttataaatttatcttccaggctgtcccttactccagagaatttaagcagaaatatgactacttcaggaagaaattaaagaaacctgtgagtaatcatgccttccaaaaatgctttgtgttagtcatttgtaagttaccacagtcacttcagtgagaacaacttggttgttacttttatatgaatgctaaaaatattaccttccttttctctctgcactttgatcctcctggttctaaaatctgaattttctttttaacagaaatggtaagtgaaaattaactcagtgttacatatcaaatcacctgaagggtaatttcctatgtaatacataaaaagacaggaatgatttttatgggatataaaataattcagaaccctagtcacaaaatctgtggaagcctattcaattatgcgcagttatcatatttaattaacctggatcccggtaagaaaaatgttcaagtccttccttgtaaatgcaaaagcttagtttcaactacagtatttataatatagtgttatatttaattataataattggcagtattacgtccaaatgtaattttctacttataattatccctggcagtttaaaacctagaaactctaaaaatttttatgggcaacattttaaattataacattgcattttctaatgacacaccatccccaaattgttcaacattgcatcctctgttttactttccgattcctccttagcagttttctcttcaattttctccatcactatggttacacctctagggaggggagagaagcggctgcagctcagaccccctctggtggcctgggctccattgccatctctccctgcctcctcccctcagctggttcctcctgcccgggaacatctctggatggggcacaatgtctgctctcatttaggggttttggtctctgttccaaagtcctgattcaagagcttgcgggtaactgctattgaaatgattctttgccttcaaaactcaaatgatcactgaaaattccacagttttctttgtgagtcatgtcccctggtaatgatgatgactgtggtcatcacccagtctcactctatggctctcacatagcagtgtctgctacccggaaaccatctctgcacattcattcttacagccagaccaagcctggaccgcctctttgcaggaggcagttgccacaaccttggtcaagtgttttgttattttcatgtcagcgaaccatgctttgggctgctttccccacacttggcataatcaggatcccactcc

SEQ ID NO: 66427 - DNA, 971 bp, Homo sapiens
tatgctgaagtgaggatttagtattttttaaaaaagcaaaacaaggttcagtagtcctcagcaattctccaagtttctctctttgcctaaaatggtcatagatcttgatttctctgaatcgtgatgaccacacccagtcatcttcacagcataattgcaggtggcagtaaagagagtgtgctgggtaaggagcagttgctgggtcattccttgggccccgacctgcccggggagtagccctgggggagagagggcagtgttgcctatcccagaggtcccagcagtcacactgctctgcaggccgggctctctttatagccagagaaatcaccttaatgcagtctctttagttgtctgctgaagctgtagttattatgggccacttacatgaggctgagaagtacgtgccggagctcacacactgcctgttgcggttctcttaacatcagttatcacagctgcctgtgggtcccgggtatttccattcctgccccttgttggcccgaggaaggatgtggaaagagcacctggtgggatgaaggtccaacagcctgtgcctctccactgctggccctggagccggcagcagtgaggcattcattgtctgtgttgcggtgtattcccagcttcagtgctcttttcctttttgcctgaaatgtttatgcttctctgcagccagtcctctaacaaatctcaagaacaaaggtaagacacttggtttttgtttccaggacccttcagaaggtgacatcagatattccctaaattcagacaatgagggatacagagcgacttggcatgtattatttctcccatgtaaggacaaagggacagattattattgttatttctgagacagagtcttgctctgtagctcaggctggagtgcagtggctcaatctcagctcaccacaacctctgcctcctggcttcaagcgattcttctgcctcagcctccccgaatagttggg

SEQ ID NO: 66428 - DNA, 3628 bp, Homo sapiens
tcccgggttcacgccattctcctgcctcagcctcccgagtagctgggaccacaggcgcccgccactatgcccagctaattttctgcatttttagtagagagggggtttcaccgtgttagccaggatggtcttgatctcctgacctcaagatccacccgcctcggcctcccaaagtgttgggattacaggcgtgagccaccgcgcccagctggggaggtttttgagggtagggggcatacttaagtttacaaaatccactgacgccagtggaatacgggatgccagcacagtgggaaaagacagcctgatctctgggacagccccagtttcagcacttaaaagacactgcactgcctttctggctgccacaggacagaaccccccgcctccctccagcctttcccacaccacaaaacaagcatctaatattttccagggaccttccagggacaacacaaacttccctttgtccaacagaattgaagggtgaagggaccagagactgaggactggattttctactcccaggaactccttgatggagctctgagatgctgaattttttaaagagtttctgttattaaaggattttagatattaagttgtaacatacagtcatgcaccacatagacatctcagtcagcaatggactcccatagacgatggtggacccgtgagatgataatggagctgaaaaattcctgttgcctactcatgttgcctagtgacatcatagcctttgcaacccatcaccctttctatgtttagctacgcttagatgcacaaacccttatcattgtgttacaattgcctgaacagaacagtcacatgctgtacaggcttgtagcctcggagcaataggctggaccatatagcctaggtgtgtagcaggctatgccatccaggtttgtgtgagtacactctgatgtttgcacaacgatgaaatcgcataacaacgcatttctcagaatgtgtcccagttgttaagcaacacatgaacatgactgtatttaatattgtttatagcagaaagttagagtttgggatttgtcttttgaattctagttatgtagctctcttagcaattctaagactctgccactagggtcatcaccctccctcacaacccctctcaccatgacctcaacccccatcctggccccctcttgccttctctgcattctatatttacttagaagatccttgcttgttcatgagttgagattgtcagggggacatgccctccgcaatgtaatgagtgtttaaacaacagtcaggcctttgaaccccaggctccagttaaaaagtaacaggctagatactgaatcaataggaggcaaatattagctacggaggctgagagagaccgagttgggaaacacttgttgctggtgacatgcaaagagcaatggccatacccacctgaggtccaggaagccctgggagccccatgaccttcggcctgtcattgtcctgctctacatgttgtaacattgaagccaccagcccttaattagcttctagacctccctcagtctggacttctgcaatatcccactaaatggtgtccacctgatttttccccttcccagccatcttacactcatgtgagcctgcttccagcaaactctgatcttgtcaatcttctgctggaaaattttccatgactccccattgcattcctgactggtgcgcaagggcatctacctgctctttgggacgtgggcagggggatggcagatctccaggtggtcacatctaaccaccaattcccagtcttctttctcccccgtagtgtgctgccttcagtgttatcgatgatttcttctgtcttgatactgtgtctttggtttccatgacatttcaatcttctggttactctctcactcttcaaatactcctactattttttctcctctcctaaaggtaggtgttccccaataatttgttcttggtgagctctctctctctctctctctctgtgtctctttctccttttcctcctcctcttcctctcatggcttaagttagtacctccatgtggacaattcccaagtgtatctctagccccagcttctctcagggccctcgtctccaaaagcctaatggactcatcgtaggacattcctcaagtcacccaaactctaaatgtcccaatctgaactcacacttttaaacctctcctcctccgtatttccaaatctctgggagttgttctcttgtatcttccaggcatccacactggaacttcctcagtgacctttcacatggttttgctccctaggttgaaagagtgacaaagttcagttttctattcatgcattcactcattcattcaacaaatatgcattgagtgcctgccatgtaccaagcactcgtaggggttaggaatacagcaattaaaacaaaacaaaagaaagatcacttccatcatgagatatttatatgtttctcatttagttgcctccactagaaatatgtttctcatttagttgtctccactagaatatgtaagtacaatatatggtgtgttaaatgttgatgaagccaggggaaaaaataaagcagacgaaggatccaggtagtatgggagggtgcaattttggatggggtgagtcagggtaaagagcaccaggaggtgagtgagcaagccatgaggctttgggcagagaaacagcaaatccagaggtcttaaggaggaacaggaaacaagatagagcccctttgggactataccaaggtgagccatctgttagccaagtgaagggtcaagtagaaagtggaaggatcatggatgtcaaggaggtccaggctggagctaaagcatcatcagcgtgtatatggtctttaaagctgtggcactgaaaaggaggggtccaaggacaggagcatgagatggatccaggaaaggaggagtggccagagaggtgacaggaaaaccaagagacagtggtgaccctggagaaatttggctgggaggagagagtttatttatgaaggacagaccaagcgtggtatggcctgctggtaggtcagcaagatgaggactgagaagcgacaactggaattatcaatgtggatgtcattggtggccttaataggagagattttgctggaatttgggggcaaatgcccccaaaagaaggggaagaggaactggagacagggacacccatcacagctcaggcatctggattcttaccttcatttccaccccctctccaccttgcttgcctctgtaactgctgcccaagttatgacaataatgtcctgactgtacctcccacttgttcccttcccagttcccagtccagtttgcactggtgcagcccaactccaatatctacattctcttgcagaaacccttcaaaggcttgcctgtattgaccaatgaaaatgaaactaaaatctacactccttatgagcaagggcattcaaggtcaggctcataactcaccttttctctacgctcctatagtcacatcaagggaaccgttccatccccatgcagcccttgcattgctaccttctcgcctgtgctcccaccactctctctactcagagtgaccttcccatatatccaaatctagccaaccttcagggcccatctcaaatgtcacctcctcca

SEQ ID NO: 66429 - DNA, 6445 bp, Homo sapiens
tggggttggggaatatgacacagaatggggaagacagacgcagtttcttctgcaagaaagaattcattcgttcaagaaacaatcaagaaacaatcactggtcattgtttgcaccaaggattgtgctaaatccatggtctttgctattaggattttcatttaatgtcaagaaagaaactaatcagagtaaaatgtgccacagatgcgggattcaaaagtcttcggtctagatgtattatgtaatgcaggtttgtttatttttactttaggaaagtgataccttttatatgccatccattatgtaagatcctcagcagagtctggggcagcaccttgtcagcaaacccattaatatttctacagcaaacatatgaagagtcacactaagtggagtaaataaagactatcaatagctgcatgtcagttcaggtcaggtttttgccatcacatatggttcttgccacaagtcaggttgcttcacatttacaaaaaatgagtcttggaacagcagacaagggcttgtgtcccttcccagaggttcaggtccaggtaaagaagggttcatagaggagacgttgctcaagctgaaacttgaaagatcaactggacaagatgcagaagaactttccaggctgatgagccacaacacacaagaccacaatctgcaaggattctagcaacccaccgggcaactagggccaatcctgagggacacaggatcctgctgctcccagagggtggcaggtatccaggtgcaacagtgaccaggtggtactgactacctgtgccagcgtcacacaactctgggccctcactgtaagcatccagggaaccaagtcctgcaaattgcatttaaacaagttctccaggagatttatccctgctaaagtttgagaaccaccaatttatttgacacatcctaagtgtcaggcattgttctacattgttttagaaatacgagcacatttaatcctcctaacagccttactgggtagatggagaaattaagataccaagaggattaaaaaactcatccaagatcgcaaagctgtgagagatagaccaggaagtctggttgcagtttttatgcttttaacctgaatgctgcctttgtactgcttcgggcacccatcccaagtgacagcctccctccacctgcagccacagtgaacctggggccttgcttcctctgcggtcccggctgtgttctctgaaggtgcagatccagccccatgtgccccgacccacagggaccaggacccctgtacagagcagtcctcaggagaaggagtgaaagtttgatctttcacccctggggttggaagcgacagagagaggttgacaagagtttgtgataagcctgttagccttgggttcaaagcccatgttgctctcctttttatctatgttgttgatatctgattcaatagcttctgtttgaggaggaaaagccagaacgcaggggcaggggattggagtctgctgaccggatggtcaggcctggagagcagtgtgctctcttcttgtgtcaattccaaaaggcagggtttggaaacaaagtcaacagagagcttttcttcatctccacataaacagccattcagcagtgtttggggagttgggcaatgctagatggggttgggtcaggggagaagtcaactttgacttataggtctctaggctggcctgggtttccgtgtttctatcagcttgcctccagctcacatcaaaaggaaaatgttccaggcttttgtgcagccccacccacctaccatggaattagtacaggcaagggagaatgttctggaacatcctgtcttctcgactcaccctgggtgcctaccattggtgtgcgcaaactcctctcaccaagcaacctctttttgatggccccagagttctttcttgctcaacgacaactgctttctagcataagccaattctgaaaggactggaattgggcccagggtgaggggtgggcatagcaaccatctactctgagaattttaacaatagagagggaagattagagattatttgctccaaaccccttgcttcatagatgaggaaactaaaactctgaaaggagagatttcttgcccagattacccagttagcaaatagtggggataaatcgaagcccactcactcaacctccagtaccatggtgggttgagtttttcccatcacactatttgacctcttatcatttgtctccagaacttcgcagttcatattcttagtcatccattgaacctcttcttcattcattctggagtttcctctagagccaagcgataggctggaacctgggaggaactgacagcaggatccattccttccttggagaggccccggagggggtgcctcacccctccttcccccctcccttcagagctctctcctggctttggagggaagggagcagaggtgtctgagccctgtcacaatcctcatgtcccctcatctgtcacccacgaaggcagctcctagcaaaagcctttgccgactgaagccactgaagtaaaaagaatgacctctgccatgagcacctctaaaggagaagaagcaaatgggttgaggaagttacagaatctaaagcaggtgcagatgggagcccgttcagtgggaagagcttttcctttaagaggaccggaactcacaatgggttcagtcgcagctctactgataggggtttcactgatctgctgagcgtatgatgtgctgtcagaaagccctagacagcttcctgaatcactgagagggtttccgagagtcaatggaacaaaaaattagaaaaggaatggtgttctgttgagattcttgcaccccttgaaatttaatctgtcattcaaaacgattcactcaccgacaagaaaaactaaaaatatttaagcatgacatttgccttcattaaatagtcattttgtcatacatggctggaaattgagttttctgaaagattactaggaattgtctgcctctgctgctgggtgtttgtggcttcaaaatgaactcgagcatgggggatgcccacatgtgcagaaaggatctcagaactaagtccaagctatcaattcatgcattaggttggtgcagaagtaatcgcggtttttgacattaaaagtaatgtcaaaaaccgcgattacttctgcaccaacctaatattagcagcagcaattggattcaactactttgacaaaaatgcaaagggcctggtggctgtgcctgccctcagcctgctccagggagggcaccctcctgtccctccatgagtgaagctgctctattccaagctctggaaagtaactgagtcattgagtttgtctctaggtgattcaggtgcatcaggtttcacagatggtatcacccaggacccatctgtgaatttagagaccctcattctgtgagtcaaacccacagtgtttccaacccaggtccatttcacaggtaagggctgatcctcccactctgtaatacaagcgcctaaacaacatgggtccaaggatccagaacttgacctgaaagggaacaggcagaaggattctgcccccaaaggatggggaaggaggaggaagccaccaaaaggacaagagcgaggtgctggaagagaggccctatctggagaacagagtgcagagaacacctgtcccccagggtggggtgggcctgaccctcacgaaccatgctgagacagctgagcccagacccccaacaaggcagggcagcctggctactgggcacgcaaattcaaaagagtttgagtttgagggcagaacagcagtcttcaagaggcagaggatgtattcaaactatgaaaatatgaggctcaactctgaataatgtttccccaaattgattcaaacaagagacaagctcaaggtctacgtgggaagctgcctggcagcactgtttttgaactagcaagagactgaaccaatccaaggaacagtttaaaccaatgatggcccctttttagagccggttgccgtggcacctggaaggagttgattgagaagtctcaatccatgaagtgtaaatataaagtttcttttctgccccctaaattgcctttgtgccccctaatttgcctttcaactgccttgtgtctaatctctcctgactgtcctttaatgacaacttgggcagatcctgcaactttctgtagttggagtgtgtccagttctctgtaaatttcaatcttgttaatgttcaaaagcctcccctccccagcagctgccgagcggtggcctgggccgagctctgaggtctctcctgatgttgggggcaaggaaggtagccagatggctgagttcttccacttgctggtggcctgtcggaggcaggagctccctggtatctgctttagcgaagaaggttctgtagttggagtgtgtccagttctctgtaaattccaatcttgttaatgttcaaaagcctcccctccccagcagctgccgaggggtggcctgggctgagctctgaggtctctcctgatgttgggggcaaggaaggtagccagatggctgagttcttccacttgctggtgggcctgtcggaggcaggagctccctggtatctgctttagcgaagaaggttctgtgggatcctggtggtctctgaggtggtgggtgtggctttcatgggagcagtgttcagctccaccccaggccctctgtcactggggacctgccacaggaaggggctttgtccccttttggtccagcctggggaatgccagctcccaaggcccacttttggcactcctggagcactctggaaaagctccagtaggtcctcttggtagtgctgaggccccagaactgggatggcagggctgtctctggcttcccagccatagcgtcctacaccccacagatcccttctgccctctagcacaggcagccagcgggtacccagcctctatggtcacacaagcttcctcttggctgtctcaatgcccttcttccatggcgtgccctcatatggaccctcgattccgcggctcagcgagcatcaggctgaaggcccgttgtctccccttctagcaagctccacaagtgactctccaggatccctttcccatccacctacatgacaggaagctttttgggaggaaaggaagtcacgtctccccaggcagacagaagtccccaaggctgattttccacctcctcccaggcctagtgtgctccccacagaaacctgcctgggtggttgatgcataaggaaggtttccaagtcctcttaagttatttgcagaggcgacggcggcctctggtcagggctctctgtagaatgcaggaacacctagcatcttttgtttacatcatcgacccttggctgtaattccagaacaagtggaaaagtcccacatcacatcctattactcatccaaaaataaagaataaaggaactctatgtgtactgacacaaaatgacctcaacaatagattgtgaaattttaaaagccaggttcggaacaccatatgtaatggccccaatttgtaggaaaatgtaggctacaatctacacatatgtgtccatggtcgtagtctatttctgaaaaggcacaggaaatgggtaacagtggttgctttgggggatggggcctggggtcccacttttcattttaggcttctttcaatggaaggttcagagcaggcaccagctgagacaacaagctgggaaggcagagagaaggaccaattagagttgcctttacattcatgaagcaaaggaaaggaatgggtgatagagggaaaaggtggcatatgtgaagcaaagggagaagggctttggtgcccacaaaggaaacaaagacatattacttttattaaatttactagccaggcgcaatctgcttgcgaagaggatgagaggcagtttaccataaaaggcaccagggacttattagtctaaaaacaggaaaaagaacagccagtggaaaagtagtgaggcgagggaataattgtttctataacaaaggcacagacttcactcttccaccctcatgcaaagcacttgctcacacactgtctcatttcaacatcaccgccacttaaggagatgctatgatcaaccccactttgcagatgaggaaacttcagtcagaagctgccttggttggtgtagatggcacaggggaccagcctccactttttttcattccaagcgtgattcttttttctgcatatgctcccagaagtctagtgccctagataataataataataatggtacttttgcatgtgcatatgagaagcccctgacatgtgtaccatctcaatccgtcctctcaccaaatgttgctcttagtcgtgtttgcaccttcactctacagaaggggaaacaggttcagagatgttcagtgactttgatagggtcacagaatttgagattggttgagcaagaattgagtcctgggttcatagctccacctccct

SEQ ID NO: 66430 - DNA, 13026 bp, Homo sapiens
agttacctgattttcactgttggtgaagcccagtcttgcagcctgtatctgaatatacacattagggattgagacattctaaattaaacttcaaccttccaagattcacatctaccttattttttaaaaaggcactcatctttatttcttaaaaaataaaaagtcatggacagagtcttattctagtgcccaggctgcagtgcagtggcacgatctcggcttactgcaacccccacctcccaggctcaagcaatcctcctgcctcagcctcccaagtagctgggactacaggtacatgccaccatgtccagctaatttttgtagcttttgtagagacaggaccttgctatgttgctcaggctggtctcaaactcctgagctcaatcaatccgcccacctcggcctaccaaagtgctgggattataggtgtgagccactgtgcctggccaaaaaatcacttttataggcagctgaggtagagttgtgtgatttgccagaagtttgataaacattcatcgtgtctctgaaattcagaatccttgcaagtaccgtggctaggaatgtaaagaaaatcatctgaaagctgaacatgtgtcttcatcctggttttctaaatgaagggaaaaccatatcagcaaaaatgctgatgaaagtgacctggaaaatgtgggacgaggcctgggggtgggaggggtttatcctgccctttgaaagaacgtctttgaaagaacgtctttctttcaaagggcaggacaacggggagccctgaggaatctgtttcactttaaaggagaaaaaacaacagttttttcttctttaaaaaggcactcacctttatttcttaaaaaatgaaaagtcacttttttctttctttcccagacagagtcttattctagtgcccaggctgaaaaaaagcgctgtgcacttttcagaatttcttttcagaattaggatggctgaaatcaggagaagcaactttaaaagtgcacagcaagtttgcaaaggcagtgccaacactgcagcgccagaaatgtgaccataaaaaaaaatcccattgacaccatatttatccaccgacgctgcggagcacagggctttggcgatttccagagagccctcgggatgtttttctcgcctcggggtgcactgtttgggctcttcccataggaactgaaggccagtccctcagccctgtgggagggccctgtcttctgtagggccaagtgtgcaggatctctcaggtagtcataggcaacctgaaggaacttagtccccccaggaccctagggagcatgccaggaacaaacagtggtgcccactcactgggcccatttcttgagttcagctctttgacaagaaaaaaaaaggccattagtatattttttcatttttacctgaaaagaaatatgacaactaacaggaagtatgacactatcaggatgacaatacctgctagtgaaattaaggccacccagctcctcagatcatcatcaactggaatgaccagacctcacttcagcttgcatttgtgtttactagagagagcaacgaggagtttccttttaaagaataagaaggcaaaatagcaatgtggtgtgaaatctcatctctacaaaaaagtacaaaaattagtcaggtgtgggcacctgtatcccagctactggggagactgaggcagggggatcccttgagcccagaaggtcgaggctgcagtgagctgtgatcatgtcactgcactcctgcctgggtaacagattgagaccctgcctcaaaaaaaaaaaaaaaaaaaaaaaaaaagaaaagaaaggaaaggaaggaatgaaggaatgagagagagagagagagacagattgagaaagttgaaagaaagacgaaagaaagaaagaaagaaagaaagaaagaaagacgaaagaaagaaagaaagaaagaaagaaagaaagaaagaaagaaagaaagaaagaaaagaaaagaaaagaaaggagggagggagggaaggaaggaaggaaggaatggaaggaagcaaggaaaagaaagaaagaaaaacaaaataacaaaatgacctgagaaggaaaagaaataatcagagacattaaaaataatcgccggcggatgggtctggtggctcatgcctgtaatcccagcactttgggaggccaaggcgggaggatcacctgaggtcaggagtttgggaccagcctagtcaacatggtgaaaccccgtctctactaaaaatacaaaaattagccgggcgtggtggcgggcacctgtagtcccagctacccaggaggctgaggcaggagaatcgcttgaatccgggaggcggaggttgcagtgagccaagatcacgccactgcactccagcccgggcaactgagcgagactccatttcaaaaaaataagtaaataaaaaataaaaagcaataataatagccgacaacagaatacagctaggccgagcagcagcctcctctgctgtccgtgcggctcgcctgttgcctgcttcactgcctgactgtgggctctgtttgtcttggtccccgtggcattaccagagcttagcagataaggaggagcttcatacataattgttggcgtgaacaaaggaatgcatggttaactacgtcagaaatgaccagttcaagaggagaatgagattggcttccaaatgttggtcaagagctctacgtagcatgagccaaggatctattgaacttagtaggctcctgtgaccggtgactcttctgtctctagaaatctggggaggtgaccaggtcatacatggcagtcttcccgtgaggaacgttaaactggttggaagttggggttctgaggggaagatgtattcactaggtgacctgtcttctctgcctcggtggcctccatggctgcctgctggccgcacacccccactcagcagaggaatggactttccaatcttgctgagtgtgtttgaccaaaggtggtgctgacttagtggcctaaggtcgtgccctccctcccccactgaatcgataaataatgcgacttatcagaaagagaaagaattgtttacttttaaaccctggatcccataaagggagaggggagaggcctaaagccacagaagctgtggaaggcgccatcctgcctgccacaggaagggccttggactgagaggaccggagctgactgggggtaagtgcggctctcccccggcgcctgccgacccccctgagtgatcaggccgttctttggggtggccgctgaccgagaaatgacgggaggctgctgactccggtgttgaaaaagatgccacccagcgcctgagcaacaggaggtgttgaacacaccataactttgtcttccatgattattctgtttcctcagaaagcttgaggaaaactggagactttctttagagagagtaacagatggtttccgtttaaagaaaaataacaaaatggcttaaggaggaaaagaaatgatcaccctgcagagggagagaggatgaggctggggaggagctgagggctcagggacggtgtggggttttatttctgcccttggagtggctggacattaagccagttcttgtttttacgatggcctgattcagcaataacaccaaaccttcaaacaaaatgccggcattagagtcgttcctttggcatgcctctgtccaggtcatattgttccctcaatagcactaaaaatagctggacacctgtgcagaaatgagacagttccttaggaatccccaagcctcagcaattctctttaaaaagagtccgtggaggccccaacttggctaaaaatgtacccagtgattccttcttcaccactgattggtgagaaacacaggcatgaataggtgcatgaatagggaactttccagatttcccttctagatggatttcaatgaggaaagaaatgctgctttgctccctgttgacaagaacattctattttaaaatttccatgcactttcaaaatgacaagactcagaagcataataccaacttcctttgtcatgtagactaacagcctaaaataatcaaatggatgcatttaacacatctattttaaatggcagtaaacgtggattcagagtaaaaagcatctccacttatctttcactttttaagaaatttttttttggtactgatgggttaggtttgcagcaaggtgacacttcacagtccccaaagcacccaaaccccctatggggttggccctagaatgctctcagcccctgggaacaacatcttaaagcaaagacaagctgctcgtgcccagatctgacctgagaaagtgagtgttgcgatattcctggtacttgtgaatctaagacgtcacgctgggagctgtggtgcatacagaatgcgtacagagtggtgaatttgctggagggtctggctttgtaaaagcttcctccttaatgagctttttttctcacttatgaaaagaaatgcagggcattaaaagaggagcaaaccaaatctagcctgtttttcatactcacggatccagtgggaaagctgcattctgaattggccacagcagctagagatgcctggagatttcatcactgttgggaagacgagtgcaggaagatgacagcacacagaaatttcgtgtgtgtgttttctttagaaatgggatctcaaacaactgggctcaagggatcctcctgcctaagactcctgagtagctgagactccaggagaaatttagtattaatagactgccattcaggaatggctagcactctacctttctcagggagatctcaggaagtaaggcataaagagagatggtgggagatttatgtggatgggatcggggcccagggaagctaaacagaatccctcaaggccttttccacactgtagaaaattgtgctggcatttggacaagtcaccctgcttaatatcaaacatctttgccttaagcattattttttcaaaggaaataacgtgttaatacttcccaaccagtgtataatgtttctatttgttattagctcgtactatttaagttcagttgttaagtttgaaaatactagaacattaaaaatctgcagaatgagaaattattttgtgaatgtttaaaatattcaaaagtggatcctgacactaaccacttttaatttattttactagcgatatattattggatgactttttttttttaaaaaaagaaaaccttctgcttgtttgtttaaactgctttgtaaattgacagtttaaccacctctgcagaaacaaagtagtaataaaagatgttggccattttagcaatgtttaaaaattgctcacaagacagaaaatgattggcactcaatatgtgtttagtgattgatgcaataataccataaaattattgtactgcataataaagtatttcactaataatttgctaaaaaattagcctgaggcctgccactcagcacagcactaacttttcatgcttgtgacaagttgtatatgagcaggatgggttccaaccttcccaatttcagaagagtattttgcaagaaggaatttgtattgagagtccagaaagaaaattgcctaaaagtttttaaatcctcatttttctcaataaaaaagtgccatatgaatcataaattaacaaatgcacacaaaaggagaaaatgaaaacaaaccataatttctctactgaaagataaccatggttaacatttgatgttttggcctcaggcatgtatgcattttttcacagaaagggactcatactgtgtatattgttttataaactgttttttaattcaataacatatcttgaatttccaagtctaccagacttttctacagaatcaatttaaataattatggtctatcataaatatattactcttctcctatagctggacatttaggttgtttccaatgtttacccttataaacaatgccactatgagcaaccttataggtaaatctttctacaaatttttgacattttcctggagatagatttctgggccatagaaattgaggttgatttggggtggggggagttggtaagatttacctgtaaaggttgatttggggggtggggagttggtaagatttacctgtaatgcattaacttcctcatctcttttcatcttccatctgttccttcccttttctgtattttgcagattattcaaagccaaaagccaacagagcccccatggagaagtggaggatgctcagatactgctatggagccctgagaagtgaaatgggtccaagcccttgcccaggatagagcgctccaagcgcatcctccggggacccttttaatcagtgaattgttcacctctcactgtttcttcccagcagagctaagagacttctagagcctcttgtggatggtcagcgatagccctggtatgaccaggaggtggcgatttctgttctaggtccctcagcaaagactaagcaggacaagcctggctactgtgttaggaggagctgtagggaaagggaaggacaagatgggccaccacatgcctgtgtccactgctggccacacccagagtgctaggggtttgtggcagtgactggggccacctagagcagttctagggttcgtagtcattctctctgagtcatggaaaactgcccaggaggcgagtcccacctaagagagtatgtgtagcactggcacggcctgctgccttgcaaatgaccacatttcatgaaagaaagccagggccacagacaggaaccaaaggaaatcagtcacttaggggaagataacgaatccacaaagtgaaaaagggaaagaaaaaaagaggcaacttcaacactccaacccatgggagcagaacgactttcagctttcgcagggggataatcactgcaagtccagcttgaagagggtgatttcaggatctacatgagaataaggcgcaattttttttttttttttctgaaaaatacggaagggttcatttacagctgttaaagatgggccggttttagggctaaagcaagactctggtcagatgttaacaactcagttatcctggggaaaaaataactggctcccaaccctttcccttttcagcatttgcaggaaaagaaggagtaggtaaaatgctttatttcctctcattctccatggtgggcaggagttcacataacaattataaaccatctttaacaggaaagccaagtaaatcctgtagggatttatttggagctccctttttgctagaaaatgagtatcatgaactaaaaatggactcgtttcctctctctccatcttcctctctttcttctctcccctcatctcccacccaccgccatggtggaaaatgactgtggtcaagaagattgaacatttgagcaagaccagatgcctttatatccaatagatgccacggagagtagatcacaacacatctaactgctgtatccccatataaaataattttaattttcctagactgcagaattgatcacatttactgatgatggattgggaagtaggtgaagaggtgagagttggagagtatccattcattcggccagattattctcatttataatgtagtcttccaataagtatttatttccagaaatctattccctctagagattctttctctctcagccattttagaaaattgttgcaaacagagttcctgtccattttcacaggaagtttttgcagaaggggtttgctgggtggcagtggaacacaggcagtggacccctctactactctactgttccagaacacagaagcctttcattgagagtgttcagctcttcccattgctcaagatgcttgtacccgtgatgcttcttttctctgcttaggtcacaatatgtggagctgacaaggttcccctattatcagtgacaatggtggaatgtggaggtgaagttaacaccttcgtggctacagagtttccttagcagagctgtggagtgtgacaatggtgtttgtgtctaaactatcaaacgccattatcacactaaatagctactgctaggcaatccttccctcgataaatgtcttggcatcgtttgctttgagcaagaaggttcatctgatatcagtcttctcaatcttgtgtacttactgaataaagtctggctcttttgcactcataaccaatatggttagctgaaccctgcctctcacatgctgttgttacataccttagctggtgattaattttcttgttttcccaagtcaataaaaagattgcagaccaggcacggtggctcacgcctgaaatcccagcactttgggaggccaaggcaggcggatcacttgagctcaggagttcaagtccagcctgggcagcatggtgaaaccgtgtctctacaaaaactacaaaaattagccaggcatggtggcatgtgcctgtaatctcagctacttgagaggctgaggtgggaggatcaattgagcccacgaggttgaggctgtagtgagctgtgatggtaccactgcactccagcctgtgtgacagagcaagatcctgtctcaaaaaatgaaaataaaaagattgcagagttcctcagagcccccaacacaaggccaggcacgaggtaatcatttaacccatgcttatagacttaaaatgaatagttaggaaagtgttagacgcagaaggctaagactgggctaaatctatgttatgcagacagaccgcaagcttataggtacaaaattaaggtgtgtgggtccttctcttttcgtcgttaaaaaatccaactttctaataaacttacacatggtttcactgacgtttcagaaattctagaatatgtttgatttctactgatttcaatcaattactaggctgattactgaattcgtacactaggcctttcttcctcttgcatcagtgaattaccatcagaaaattgtttatgaagcatgtgtgagctgccatagcaaatctgggacccatgcagtttctaggacagttggcccagccaggtgctctggtttggaacccattctgtctctgagaggtgtctaaagtcaggagtaggtttcgtttgtgccagactaaagcttccctccccaggcttggttaaatgaagtaggacatgtttaatcaaatagacagggttagatcaaccatcagaaacaaattcaaccattcaaccattcacttatgaaataaatatgtgtagagactaccgtgtgcctgacactgtcctaggcattgaagacacttttaaattaaatgtgtctgatgttatttccagagatgggcattcactggctcgcattatattttgggaccattgtaattgttccaaacgggagccaaatgagcaaaactttgcgaaataattctgagtcccttgctggaaagcctcacctgaatgcagcccacacatttatgatacactacaaaggcttcaaggtcatgagatgcctctgtccaaagaagaagaagagcacccctgcctgccctgcatctcttaccacctctcatttcttccctcctggcaccatctactgtcaagaagagaatcagactccctgaaataattgagacactgacattcctttttgtgtgtatttttttggcaaaggctctaattgaacaggcattaatagagggctctactgttatacagatcacgctcatgcacactgtattagtctgtgttttcatgctgctgacaaagacatacccgagactgggaagaaaaagaggtttaattggacttacagttccacatggctagggagacctcagaatcatggcgggagatgaaaggcacttcttacgtggcatcagcaatagaaaatgaggaaaaagccaaagtggaaacccctgataaacccatcagatctcgtgagacttattcactatcatgagaatagcaggggaaagactgacccccatgattcaattacctttccctgggtccctcccacagcacgtgggaattctgtgcgatacaattgaagccgagatctggatggggactcagccaaaccatatcacatgccatttcatttgatccatacaacatggggcaaagatgatcggtttgacaaacagagtctaaagggttctggaatcgtctggtcctccagccacaactcaacatggatctcttaagtctaaagttctgtcctgtacctgcagcctcctttggcctagttattttgtgaaatctcatgcttcacagtcgaatctgtgtagaacctgggttaatcacgccagtatgcgatcaatatcctcatctccccatctgctttgtcagtggattctgagggaaaacctgtaaattagagagggatgagccatataagaatgtctccttgtgagtgttcattgtgcagagaaagctgaaaattgcaaaaccctgtaatcatgaaatgaaagagaaggaacatctaagtggtagctttggggtcaggaagagggtagacaaactgtcccaacaccaagcagccatctacatgacccagccacctgatgtggcaccaaatgacccagagtcttgaggttctgaactgttcccagactcggggacaatgtgaggactgggtcttccatgctccttttcactcccactcaccctgagatttttctcaggtggaattaaacagggagccaagtgaatagcattctgtgtcttttctgctaggttggctcatttaatggcttattatgattgctgcctggattcgttttgcattcgggattggagacctgtcatttctgtagatctctaaggaacacacatagaaggcaaagcttccctctcccctttctacctctaattacaatcctgctgctccaaatctctgatgatggcatcttcccagaccagcttttatctccccttccctccccaggatgattactgccagtcatttccaataaagcattcctggggacaggtactgactctgaatatggtttgcaagatgaaagggttcacttggacgtgcagttaaaaatcacactcgtgctggggaggcagcagagaacacagtcaccttgacatgttttcttccccgggagacaagccacttgagtctagctttgctttgtggatcacaccatggagtcctgatgaatcctttcatcttagtacaatgtgtactttgaatgtgaaagttgccacttgcagcctgtccagtgttctatccagccccagaggaagttttgtgaaataacatggcagttagcatgtatcgatggcttatctacatatttttatgaactcttcttaaacctatattttctgattcaatacttcattgaatcagaagacaaaggaatgctagaactggaaagcagtctactctttgttctgatgaggaaatcgaagcctaggtcttctagaatttactagacaggtccacattcacagtcccctcccctgcctcatcagccattccctgagcagacatgggttgtatgtttctatgtgccaggtgttctactgggatctggggatccaaagaagaatgaggtcaggtcctttccctgagctattctcaatgtaggagttgcacagaggcttaaacaaagacatgtatgcctccgcgtactagatgccggcacagaggcagagacagcgtaccaagaggccttacttatgcccttgttttctttccaggtgaagaaacactgagtctttgatgttatgatcctttttgttactgttgggaaaacattccttctggtttattttggtgattcaacttccaacaagttatggataaaaggcgtttctttgttttgggagacaacgctgtcatagcattgtctcccaacgtcttcctgctttcactttgccacttgccagcataatgagcagctcagcatctgttgagggactgggagtggatggtacactttccaggaatgttgtggagaattttaatttctccaaggatctgggagaaatgttagctggttgttcttcaaaatgcaggctgggttaatgctgtttccttcattgctgcctcacaaaaagcctcctccaaggtcacctcactgctcctcagtttcccttcctttgggacaggctcaggaaagccgctcagtgtaaatctgtggcggaagcccccaggccttgtgaagaggtagcagaatgggggcatctgctttcttctctttgatatccaagtttctaaaaggaagaaaagggagaattacaaagcacatgcaagctcacaaaaatgtagatggctactgaggatcctaaagggcctgatcacaattcctcccttaatttagggagccaagtgcttcccaatgtgctctggaaaaaacatgtgacacaaacatgcacttaggatatctaaacactgtgcataggatgcaaaaatgagtcagactctcgcattcactcctgcacgcattcgtctactcaatcaacattcaattgtgcgttcctactgagtgccaggcatcatgctagtcactgacaattcacagaggtgatgctctccccagaacctagttgcttccagctcagtgaggacacacacaggcaaatgagtcatggctgggttgagctgcaggttctttgaagcaggtatggggtgtaccatggggcccaaaggaagaaaacaccgtccatggtttgtgagaaaggcatgaataatactaagaggtgagcactctggcacttgtggtgaccctggcagccctccaatgaaggagaacgttgtgacctcggctagcaaagtgtaaaagttttcactttgacagaggttgagttacattcaagtttctaaagcattccccagcaattccctccagacagcaactgagctatgaatctggaatttatttggtagggacttttctctctcagaaatgcagccaaacaccaaagaaaaagatcaccttttaaataaaagaagcacattgtactatttggcaagtgactgggggcaggtgtgtgtgtctgtgtgttaacgcacatatatgtgaagaattttaatttctcaaaggagctgggtaagatgcctttaatgtttcattcgaccgggactgtctcttctttttctttctttcaaccaggg

SEQ ID NO: 66431 - DNA, 1947 bp, Homo sapiens
gaaagcagtaacaagtgatcttgtgccttttttaaccaagagggtaagttcagtttcatatcctcttaccctgtaagggacaaatctttttaccttaggaaatggctacagacagcagaacagcagtggtgattagctgtgcagacaaatgcaaaagaagcccatgtccagagtgtgatcagaagaacacaaagagtgaagttggctgcagggagagggtacttagcatggggacttctctgagagatcccatcatccatcaccagccctaaggagccagggcttggcagcacccccacccaccactcagtctgggctgagaagtcctcgggttgtttctcccagggccatccaaggagatcctcccatcccagcagccagctcctcatccactggttcccagcgggaacaacatgacctgtgctccatgaccttgctcagctatcagtagggccgctctacgtggacagctgccctttcaaaagcccagggaactcagaaggacctctctccccagagtggagaatgggttcctggttaccaagaaggtactgatggccaaatagcaccagagggtgccaccttgaggtctccatgaagccaagacatgccactgctacacagagactcaaaccaagctaccactttcttcttcttggtttcttcgaagtatattagtcttgccctacccacaagaaagtcttctgacacctaatttccacgctttagcctgttaaggaaagtacccaaaacttgcggacaaaggaagaggatcacagtcattgttcaacaggatcattgaggatgatctagtgaaagagaatgctttgctatttcccatttacacagaacccactcagacactttaagttacaggttaacttttaggtttctgtgcagtagaaaagataactcccaaagtttattacctgtcaaacattaaccagttttatatctatttcaaaatgtatttccgcattcctttgcctgatggactatctaaatcttcattcctcaaatgctcctttgaacaactcttgccattgtacaggttccctcatgatttagtaagttcaagaagacctttgctccacgttcatattatatttgagagatttcaactctttgaaaatgatacaagacagtgacatatttcatggaggcacaaatgaagggaaacgctggactggaagtaggcatgagagaaattagcaaacatttgaaaacccacttgaaataatataaatgatctctcaataaacaaatgaattataactcttaaatattctcaagtgttagcatggagaaagcaaatgggttcaactaagccagacactgtcaccaaggagaaatgaagcaaacatcactaggaatcaaaggccttagccacgcgtcatcagtaagtagaatgcttactaatgacatatgctccccaggggaaggttaggtttatcgtaaatacacatcaaatggaaaagggacccgcaaatattcaagtggtaattctgagctcagagcaaggctgatgaatggaaaaacagtgaaaatactggttaattgctcttggctgacagcttcagaaaataatttaaaatgaataattagtacctttttaagtgaagctctagggaacctccttgacttaaaaagcaaaccatttcttttcctttataataattcttaagccatacctaagacaggcagggtaatggtgacattttaggcaaagtggttatgctatcaattacaatccagttagatgctctggagtgatgttagtagaaatgaaatcatagctcaagtattccatgattacatttgagaaatagtttccagacatatgttccaagcagacatatatgatttaattaaacagaaaactcagattttctcactttttcagtctactggtgacaaaattaaggggattggaacccctcccatttc

SEQ ID NO: 66432 - DNA, 1229 bp, Homo sapiens
tgaccgtaataatggacaagaatgattgaaatctaaacattaatcccccaactccctctagctattagagatttcctagaaaactgcaaatttaagcaactctgtgttccagggggccctttgtcaaattcatcattataagcaaaaagcctcctgacaaccatcatttatttaatgatttctttctctcttaggaaatagatggaaataaatcgaatgttaactgttttgatcaagtaagtcacaacaagagctgtgcgcatctttccagaaagatgaatctcacatgatcataataaatgaaataaacagtacttgcaaaacagcaataagcaatctttgtccccaaaatataacagcttgctggttaataattgctatggtttggatatttgccccctccaaacctcatgttgaaatttgatcctcagggttgaaggtggggcctaatgggaagtgtttgggttatgggggtggatctcttacgaatagatttatgccatccctcaggggtggggggaatgagtgagttctcaatctattacttcctcgttgttaaaaagagtctggcaccatccccacccccaccctgcttcctctctgtccatactatctctgaaaatgccagctcccctctgcctcccatcgtgagttggaagcagactgaggccctcaccagatgcagatgcctaatgttgaactttctagccaccagaatcatgaaccaaataggcctcatttcttgataaactacccaatctcaggtattctgttatagcaacatgaagtgcactaagataacaatgttactaaaaaacagagagaaggctgcctttgaacccacctctaatgaataaatggacttatgattggccaccagcactgccaatcatttctttcctagagaagcttataaacatcccagaatgtatcccagactttaaaatagatgcccagtggcaggcagaccacctctacaggaaatagaagattcaggactgcttaggtttttgagaaaaggggagagggggagggagggaggaagagaggaaggcagagaaaaagaaacctcacattctgaggattgagcctttcatggtactatatgaacgttccatgatattggatattgttcaaggaagcagcaaactctttgactaaatccttgtctcatgaaacttttagctcattgattatttcaaaacaaagaaaacttatgtccagccaag

SEQ ID NO: 66433 - DNA, 2968 bp, Homo sapiens
caaatatttagtgaatgcctccaaagtactagggagtgttttagataatggggatacaagacaggcaaatgctcatctacaaggagctcccattctgtgttctagtgaaggcctgttatagcgattagcatgcggtagatgcttactaagtgtttgttgagagaatgaataaatgaatgaaccatgtaccagttgagacagctgtagccaacttcacccattaaagctctacacttgaaagggtttgaactttcatctgctcctgactttgcaacaaccccattttaaaagagactttgaaccctaagcactactggttatcctggtgttcccggaaagaaaagtatatttattccctttctatatccctttttcttctttattaaaaagaagaaatatcatttctgggaaataagggataaggtatttttttaaaagagtttgatgtgcatatgctttcctctctatacctcaatatctgtaacacatgtaaagagtacttttctggtttggtattttggttcagccttttaagaatatgctatagcacaaatagactgagtcattaagcacagaaaacatggggaacttcctggtcattatgtgaaatgtatagagagactgccccatcaaaagcaccaccacccctctctccggcctttctatcctgcctgcatttccactacctatgtcagtcccttattttaaggtcctggtattatcacagtatcatcagtgtcaacagacatttatggagtagctgtcatgtgcagaattctctgtcaggcactgggcaattttttccaaagggcttcagttaaaaagttactatgatatttactgggatggtacctttattcttccgtgattgattactattacatcagcaaagtaataagcgggtacctagaagagactgacctctgaagagaattaaacacaggacaagttttcattaggatgagcttggtcactggaatagatcatcatagtatcatgccgtgatttacaaaataatcatattccattgagatttatttgcacctttcctcttgtattagtcagttcttgcactgctataaatacctgagactgggtaatttataaatgaaagaggtgtaattggctcacggttccaccggctatacaggaagtatggtggcaactgcttctggagaggcctcagggaactttactcatggcagatggcaaagctgaagcccacatcttgcccgacaggagcaggaccaagagcgagcaagggggaggtgccgcacacttttaaacaaccagatctcacaagaactcactcattgtcacgagaccagtaccaggagatggcgctaagccattcatgaggaaccacccgcatcatccaatcacctcccactgggccccacctccaacattggggattacatctcagtgcaagatttggtagagacacagatccaaaccatatcgcccctcttacttttaaattaaaattctacttcaaaataccctagtgaatctccacatgtaaaaaaattggttgaatccttgaccgtgtaaattcatacatttgacacacatttagtgaccatctactttataccaggcactgttctaggcagctgggaaacatcaatgaacataacagagattgctggcctgtggaagttacgttgaagcaacaaaccgtacaactggcccgctgctgataagcaattccataaatttgattttaaccaatggggttttttttgaagtgaagcctttaacagcccagttcatatttgtacttgcttacggcatcagtttcaagagcaggctcctcggttctcatccagaggccagctcacagagaaagggaaaccacagactcacaccttcccaatgagtcagacctttcttttaggaggagatttcttagttaagtcattacaaaagaatgctagcaaatgattcttctgctgtgcacctattctcagcatagaatgagtgctgaaacttcgagtgagtgctgacacaatttccttatgtagggaaattgtactcattcaagtgaaaaaaggagtgtttggggctctaggagtaagcccaacatagtgtgtggtgcgtggacttggaggactagcaaccagcgtttgtagcccagcttaattggatatagcatgcatgaccacgggtaacctctttagcttctctgaccctctgtctcctcctctaagactaaccacatgcatgtctgcaccatcttgtcaagtgcctgacatattgcctggtgcccagaaggcactcactcactgatactaattttccttcttctctgtgaaaaaacagcagtagctcaggaaaagaggaagttggggagctctgacaggcagagccttgagctatgagctttatgagggttttctcatctgatccgtaaaataaatctgagaaaaagatgttatcatctcttctttactgatgagatgaatagcctaggtccaatcatagaaaccacacagtaggttatataagagaagttcaatataaagaactattgactgtgatagaagagtgctataaggtataaggaaactgtctatagtactctaggtaagggaaagtaccaaggaaggacaaagttggaagaggtttagacctacttggagaaggtgtggttaggccaccagatagcacagaagttcactggtgcatccagaccagagctggcctggaattgccgagaaaagcaatagacctcccttccaagtgcaggccaggagtaggtggtcagcatgcagtggcgtgggtgtgcaggggagtctgggcatgggtggtcacaggggctgaagccttcagagcttgtgggctacatgtggtgtgggtcaggagtttgcagagtgctagtttgaatgtccactcaaaactcatattgaaacttaatccccagtgtggcaatactgatgggtggggcctttaagaggcgattgaa

SEQ ID NO: 66434 - DNA, 589 bp, Homo sapiens
gacagtgtctgagctgccctgcatgggtaggtggaagggtggctagttcctgtgtcctgaaagggaagcaggcaaagctctcctgtcctctcagtttcccttagcttgctccaccacaatcccggcattgcaaaacgtggagtcaggacctacgtgcccctctcaccctgactctgtctccgtcaccttcctcctcccagtagctctgagcagggaaggctgtgtccacttgtccacaccctcacacctgtttgctttcagattgtgcagagataagattctctgatctaagaagaaaggaacatagaaaactctctcaacaaagccagactgtaaggttattgtcctgcttaaacaaatacaaaacctatttattttcatctgtttgctttccacagcacaacccttatctatgcctctctcacagtacaacccacattctggtgtctatgacatacaacctccttcccctcctccatcacgtacaaccccatccccatctccatcacgtaaaaccctatccctgccttcatcatgaacaaccccatctctgtctctatcacatacaaccccatccccatctccatca

SEQ ID NO: 66435 - DNA, 1796 bp, Homo sapiens
cagtatgaccttatcttagctaattatatctgcagtttccatgtgcacaaaattgcagggaacacgattcaacccactaaagcaatccattctttttccagcctgtccttttggccccccactccatggtctcccatttactgtccacaatcagcagtgaagcatagtcacttgactgggtgggtggtgtacacttgagaagagaaaggtttcaaatgagattttagtggcaggacaatgatagggaggttgtccctctcctggaagttatgcctacttctgtgctaagcaaaatctgtccagagagtggaattcagtgcagccaagtctattccttgtcaccagcccaggcttccagaccctgcagtcagcaccagccacttcagaatgttctgatgaagaccaacccatgcctgagtggaatgttctgctatctccttatgaagaggcagggactgaagagttccttaagtttatggtcagatttagaccctgaactagaaatttaagagatgaaggagtaaatggttctcatgatggttattttcccacccaaccccatcagtttgatggtaaatgtgaaagcacttgtttttaaatcatcactttaaaaaaaaatgccccaaatcgcaaggcagtatcaaaatacctgtgctgactcagaaagataatttttcaagcatcagcagaaaggggaacttacagaatttgcaattttacctcctgccctacctcccaccccaaccccagttctgcaaatgtggtagaggcagtcaattggagggggcgggggaatataatttttcacgtttctgtcttgcctcattaatctaattcctttcaacaaatattgacagacactgtgtttcttctgcgcattccaagatgaatcagacctagtgtctgtcccaacccagctcacagaataacaccccagctgggcaaacaaatgactatatgtaaaggctagcacagagacagaaataacttgctacagtagaaataatctacttgggggagaagagaagggacaagtgtatcaaggaaagatacagaatcaatatatttgctgctgatgcatgtacattcattaattcctttattcaacaaatacttgttgaaagccgtctatgttcctggccttgtcctagcttctaaggaaaacatcgccagacaaagtctctgtcttcttgaaacttacattctgtgtagggaggtggtcaagacttagggtcggcaggtgttctataaggagacaaggttgttaatgatctagaaagaaagctatggcagtggcccagatgaaattatgaagcctgggctaccgtggtggctgggggaatggagagtgggttgattgtgtcccgcaaaaataggttcaagttctaacccttggtacctgagaatgtgactttacttgggagtaggtttttacaaatataatcacattaaaatgaggtcatactggattacagtgggcccgaatccagtgactgttgtcttcatgggaagagaaaaatttgaacacagagacacagagggaagaaggccatgtgatgatggaggcagagattggattaatgttggctccaaaccaaggaacccccaagggcttctggccaccactggagctaggccagaagtatgggatggcttctctctcagacctccagggaaaaccaatactgccaactgtctgctgatttcagactgtgcctcctcaattgtgagaaaataaatgtctgatgcttgaaggcaccccggttttgggtgctttgttatggcagcccttggaa

SEQ ID NO: 66436 - DNA, 4840 bp, Homo sapiens
aagcacttgtctcttccctacaagttgaaagactatttctatccataaaccaaattccagtattggattctgtactctttcctcagtttggtttatctacttatgtacggcaactcccacactatctcatgaccacagctttatcatttgtcttgatatatgattgggttagttcaatgctttttccatctcctttcagagatgcaaattcatcttctatcatagccaaagaagaccaacaaagaccaacagaggccatgtctcgcattcagctccaacagcaggcagtagatttgttacagagactaaaacccaccttattgccaagtgaccctcctctcaccagcctcccctgctgccacccaaattcctgccactgaactactcctcaaaataaaacacagctgtaaaatgcacacctgttttggattagttacaataaatcaggatctgtacttatttcagttccccagacaggtgaagaacaagctgcgtttatagcaagccaactagaaagcagaagaaaattccagtcacgagtttttgtttttcctcttagggcaaaggaggttacacttgaggagcctaaatttcttgttgtttccaaactcctgtgagtctttacagaaatgcctctaaaagttgtagtattctctctctagatccatctaactgagcccatggtttccaaactttaatgcccaagagaatcctcagaccgcatattaaaaatgcaggttcaggcctgcatttatttctcagacagcatattaaaaatgcaggttcaggcctgcatttatttctcagacagcatattaaaaatgcaggttcaggcctgcatattttttcacggtggctcatgtctataatcccagcactttgggaggccgaagcaggcagatcacctgaggtcaggagttcgagaccagtgtggccaacatgacgaaaccctgtctctacttaaaaaaaaaaaaggccgggcgtgatggcaggcccctgaggtcccaactactcggaaggctgagacaagagaatcgcttgaacctgggaggcggaggttgcagtgagccgagattgcgccactgcagtccagcctgggtgacagagcaagactctgcctcaaaattaataaaaatgcaggttcagcaagtctgtggtaaaacttagggacctatgttgtttttttaaacacgcacctcatcaggtgattccaatgcaaatagtccaggccctcactttaagacactgccctggggactccaagcagagtagaaccacctgaacacgagacatccaaatccttagtgcaggctgtttgccaggacatgtttctgtaatgagttagctctgtgagatcggtctacaagagaatgatgtcagtataaccaacacgtggcattggttcatacgcagtttttctttggcaaagggaaccagaatagctggaataaattacagaaaattgagcaggaaaacaagcctttgactcagcctctgcattggcagcaggggccctattaagttgtattttaacagaatttcaaatgcagcctgccctcagtggtcctctctcctaagaagcaaactccaagcccgtgtgtctaagggcaggttgagtggcgcccccagacccactttaacagcagctttgctggctcagagacccacttctgtctttgaggtctccgcaccctcaagctggctccatctgaaagatctccagcatctccactctgttgtgtgtttttaatatctgccatggtggcctcctgccagcctgggccacctccctgggcagtccaagtgagtttcccgggcacatgttttgattttattagtttctggtttcaaaatggtctgtttcctaagtgacctcttggggatgctaattttccccaaagcccttacactttaagggtgtgatttttcagaatgtgaggtgtttctgggatgcatatatggcactaggacaggaacgccttatgtgtgaagaatacccattgcctctgtttgaaaagtgctattgaataacctgatgctgtgttccttggctaagattgtgggaaatcacgggcaaggactcccgaatccccaagaaagtacatcacaagctgtatagcctttagctctctgcagccctactcaggggaggtggaacttggaaccccccaggatttagctccatatgggctccaggactctcaaccacagctgtgcctcagttacccagggtcagctggagcttccataaggcacgcacgcctgagctctaccctcgatctattgaaataaggacctccggggtggggcttgtatgtctgtatacagttagcctctgtatccgtgggttttaaatttgtggattcaaccaatcatggacccaagagatttggggaaaaattgcatctttactgaatgtgtacagacttttaaaattgttactctcagcaatagagtataacaactattcacgtagcatttacattgtattaggtgttataagtaattggagatgatttgaagtgaacaggaggatgtatataagttatttgcaaatactatgccattttatatcagagacatgagcatcctcagattttggtatctgaggggggtcctggaaccaatcccctacagataccaagagacaagtctatttagaagttacaggctgggcacagtggctcacacctgtaatcccagcactttgggaggccaaggcaagagaatcacttggggccaggagttcgagaccatcctgggcaacatggcaaaaccccatctctactaaaaatagaaaaattagccaggtgtagtggcatgtgcctgtagtctcagctgctcgtgagcctgaggtgggaggatcacctgaggtccaggctgtagtaagcagtaaccaggccactgcactccaacctgggtgacagagacccagtcttgggggggagaaaaagtttccatatgattgtgtagctcagccaaggctctcaaccttggaagtatagagaatcacctgggagcttttagagcttccaacgcccacactgcagaccaaatcacatcagaatgtctgagggcaaaacccaggcagctgaatgttctaaagctcccaggtgattccatgcatagctagggttgagggcttggctttggggtcttttctaatctgagaaggatcctatactctgtggactggggctattggaacttcagtgtgtgtatgaatctcctacgagtctggttgagaatgcagattctgattcagtaggactggaacagggcttctgagcctgcatttctaaccagctggtccgcggactacaccaagagttgcacaactgcaggcactaatgactctttattgattatttaaccctgactgaggataataactgtagtaagccaggacattaaactgcaggtccaggacagttaatggtatttggcagaagtggcacagcaggctttgtgattaaaaagaaaacaaatgtttgtgttcctccctgggtcagctaaggaatggtactgacaagaggcatgctggccacactctaagagatgagtgactagaaacctccgcccttctggctgggcgcggtggctcatgcctgtaatcccagcgctttgggaggctgaggtgggcggatcacaatgtcaggaggtcaagaccgtcctggctaacatggtgaaaccccgtctctactaaaaatacaaaaaattagccgggtgtggtggcgggtgcctgtaatcccagctactcggaaggccgaggcaggagaattgcttgaacccaggaggcggaggttgcagtgagccgagattgcgccattgcactccagcctgggtgacagagcgagactccgtctcaaaaaaaaaaaaaaaaagaaaagaaaaacctccgcccttcccatcatcggctaagatctggcttatcagccctctggagtcattgttttaatagtttttattttgggagaatacaattgagtatgcaaatgaactcaagatctcaggtggttcttaaatccgagcactgtattacaagatggtttagatcagctgccttgtatttttctatgccctaaaaacatttactagagccctgtgatgtgccctgcctgttactggatggccatgcagattttcaggctgctgcatactctgcctgtaccacctgcctagtaactagcctgaacttagattaacatgaagtttcataccacatcagctcaaatctgcttagcatagaagaagtaaattttctgctgatacttaaaacacaactgggaattagtgggctatggtggcagtttgccacctttgaaggcatgaactctcaaggtgtgaatacatacatcatttagtaggaactattggacttgcacgtcaaggcctctgtctctaggtctctctctcacccccggctttctgtttaaatcagtcaatcctcatattgtgggcaaatccaggaaagacggcacatctagacttgctcattctttccaaatagcacataatagtcctattgattaactaaatgcctcttagaaaccaaaacacccttggtttcttcaacctttagttcagctgggtttgatcatctgttcagtcctacaggctgatgggggcacctctttcctggctatacgcccagctcgtggctgcaaggctgatgttttcctggccactggtaaaatccctggcaagaaagtgaccagaagctttcctctgacctcaaagaggagatgagaccctgacatctttctttttttttctttttttgagacagagtctcgctctgtggcccatgctggagtggtgcgatatcagctcactgcaa

SEQ ID NO: 66437 - DNA, 4062 bp, Homo sapiens
tatacgtgtgtagaaaatacaggtatctcctacaactaaatagaaactttttgcgtgggtaaaagaatctcaaatatgccagtccctgtggcaaaattttcctgctttactcaaaggaaaataaacaccacagatagaaagatcgtatttctaactccaggctgcacggaactgctcttaaatgtacagcttccattcacatttctggttatcccttgagtgagaggtcagctctgctactgaccacagcaaagtgagaaaaggtctctccacttgcagaaaatgcaagcccttcggtttgctttctgaacaacagtgttcacggttctgaggtaattgccttagtcacaccacagcgcacaggttggaccttcagctgatacctggtggagtgggtatatagtgatgaatgtgtgtgtgagtgtgtaagcgagaccttccatagagtacatgagatagatgacctgggtcccagaaatggcccattttacttgactgacttgctagtaaacaagtgagccagggctctcgatctcagaattcagtttaggtcacaagctgaggatgacagagggggctcttccctccagctctttgaaatttggggcagatggatgagacagcaattgccttccacaatggtggatctaaaaccaatatcgtcagtaaataggtaaatagcccccttcccttccacttcttttgagctactttatcaccttcccccaccttcaataataaagtaatttgtccagtgaaacactttgagtggataaatgactgtaaaaaaagcacttagctgagcacggaagagcattttatgactagaaaaggaaatgccatgtttatcaacatgaaaaaattaacattgtcactttattttgtattaacatatggtcaaagcacctccctaagcttatcttgggcatgaaactgtggtcattggtgtgtgagctgctaagagacatgtgttaaataactggataggagaatctggttctcctgtgaaaagtaaaatataaatgtggcttttacctggccagtttggccagcagaacagaacaatttgctcaatcaacagttacctaaaatctggagatttttagattggcttttttatgactgggtctatagaaattcatgtgtcaatttttaatattttcacagagttaagtcactttgcattgggaatattttatctttggagtgtatctagtcttctataaaaataatactagttttctagtacaaaattgggaaaaaggggaatacaaagtatagtaaaaataacagacaaataagttttcttaggtatttatttacaaaactcaaatcttgcccatattacagcgtaagtccaaagctcatttgggaccctttgaaactgaaaatatcattaaaaatataagttatgtatcaagcacaacatcttttgtgcattgattattcctataaatttaattccatctctttacactcccaaatcagtaataagggaaaacaaatttatttcttggcagctttttttctcttagcctcttttatactctgttttaaacaaaataagacaaacatccaatcaaaaacatcccaccagtgaggcaacagttaatctgcctgctttccctagcatcacaaaaaaagtgaagtctacaagtctttcagacacactgaagtctttcattcataccacaaattctgattaaagccaagacctatcattttcaaagcacttccctgcaaatgactaaaaacaatgtttttttcccccttcttcctttaaaggctacacccaaaacatttgcttgagaaactttctgaatagtggcattgcctggtaaaacacatgcagcagacaaaatatcagatttctttttccagctgtccagaatcccattagtgcctcttaacttctatcagtcttttgctataattaggatggcttagggtttatctgggcctttttttcaaaaccagatttccttccgagcagcagcagctgtcatgcacaagtaccctgatggtgttgggaaacttattttgatttacattatggtatagcaattgtgaatgtgaagtaaaggaagagacacacacacacacacacacacacacacacacacacacggttctttttatctcgtaatttctttaaaagaaaagtcttacctgaggaggatcactccagtctggaacctggcttgtttcaaatagagtattaacttgcatgccttctcccttgcaatttgtgttgccttctttggagactgagtctgttgaagtttgaagggtttttgcttcttgctctgcctgggttgaaatagcacattctcttgcatcagcatgggaactccgaccagtcgctgctgctgtggtgtgagaagtctctcttttatcactctgggttagtgggggctcagcagattctttggcagagcagagatgaagggtaccttctgttgtactttctctcaggttggcattcggcttcttgggatttcccttcattcccggctgcctcaccctggcagatttccttgaacccctcttgctccataagtcctttccccccactctcttgtcagctgccgtctcccaacactggctcatccctgagttttctgactcaccagacaagagcttcatctctgtctctcttactgattcatccatgttgagcagattgtcactggcaaattcctctcttgcttggtggctgtctctggtttctccttgaattcctggataatcattttcagcagcctcgggagcagtggggagtttatatctcccctgttctgtcactgaagacgttccatcctggtgaggtcccaaaatgagagtcatccctgtttgtggggatgagggaccgtgcttggagactctgctgctcctcaccccaacttcttggggttgtgagtgatgaccacagaagccagcagtggcaaccataggcccagcgtcacccgacacccgagacccacaacccattccactgaggaaatgctcacacccacccaggcaatgctcaccgaattccatctcttcgtcatcgctttctaataaaaaaacatgctcagtccccagcaggttcctttgccaaactgcattagagtaatccgtcataacatcagaacattccagatactccaggtcatcatctgaaaactcctcggtgtaggttagggttatctctgggcaaagttcatagtcactgtcagagtcttcactggaaagctgtgggctgggttgtttgttggccacggcactgtcacctgggtaaatgtgtgcagttgcctcagatagcgggaggctgaagctaatgtatttctgtactttgggattttgctgactagagcgtaagccttcatcatgaggaccatcattgttcaggtcaccatccgtgaactttgatgccatggaatgcactgtcttgtggcaacatctgtcttgtttttcataaatatgacttgaattaagaaaaagcaacccatttgcaatttcttctgtgttacttggatcataagcctctccagtgtgccttgttcctttaacacccaaaggattttcagaactggacacactaatgtcaagattgcccaatgactggagggagagtgaatggttggatttggagggggaggagtcagctgacctgggagtgcccggggagatgctttcttcttccttataaggatgttccttctcatcaatctgatttgccctttcttcttcatgtgtccctgtttcatgtttccaacccctgtccctgtcatcttccaggttaggagacaattgtgggttctctgatgagcactcaacctcaacggaagcagaacaacagatcattccaaaagagtttttagccgagatttgatagacagcagcatcatttttggtacagctaggatgaagagaatatatagataagtttgccacatttggacatgcatgccaacattttcacaccatggcacacagagaaaatgaccatcattttactgcatgttcaaggagatctgtgatctccctggaaaagagtttgtggccaaaggcaactga

SEQ ID NO: 66438 - DNA, 774 bp, Homo sapiens
tcaggaaatgaagccaggagcacagaactcgagccccgcagggaagaattacattttggctgggtggaaagaggggagggcattcctggcagatgcaccggagctggaatgatcaggtcatgtgtaagggacaataaagcaatgagctgatgtgggattcgcaggaggtagggctgggggagagggccctgaagaactggggcagtgggtggggaggagctccggtgtggagggtgcggaattctgtccaggggcactatgtgtgtgtgaactgcaggggaaagtttacttttcttcttcacccgaggacaattcgaagccgattgcagaggcagttggcaaagtcagtactgcatagtggttaagggacagacttagcagcgaatgtgcctgggttcacatgccggcccatctgctccgcagcgttggagaagccacttgacagctctggacaatagctgaacctccatcaacccggtgacatgaggattaagggattaactcctataaagtgctgaaagcaaagcctggcacacagtaagactaaatcaatagttctcagccctggctgaacgttcaagtgacttggagcgcttcgtaaaaataccagggccggaggattttagggcggggagactactgctgattctgcagaggtagatacatgtcaggacacctttgtccaaacctgtagaacggacaccaagagtgaaccctcatgtaaactatggacttggggtgatgatatgtcagtgtggattcatggattgtaac

SEQ ID NO: 66439 - DNA, 2599 bp, Homo sapiens
gacagggtttcaccatgttgtccaggctggtcttgaactcctgacctcaagagatctgcctgccttggcctcccaaagtgctgggattacaggcgtgagtcaccgcatccggccccagtgggggtgtctttaagtgattcacctatactcatttgcccagtttcattcatgaacaacaactcatgtttttcagatgtctggcaaacggtttaggtttccttgggtgattatgtatagaaagaggctgatggccctccccagggcacaggtgacaagcacttacaaagagctctcaaaccagagtatcttgaggaaggtaacactgtaccccacggctcctagggtctgtctgtctgcctggacatgagaaataaatgagaatgccgacacattactgaagtcacagagtccacattctaaaaacaatccactctgtgaggtgcaacagttaatagcatgttagagttctagtggaaaagaaaatgaaaaactatccaaacagggttgcaagcatgaaacgtgtaacaaaagcagcttaaaaccttgtgtctgggtgagcactctctggttcaatacccgtttctgaaatttcagtgtctgtttcctggacactggactgtgtcccactggactgatcccactggactgtgagtgggatcatagagaactttgcttcctcttacttggcactggattctagagcatattaagtgctcttaatgtttgttggataaatgaatggttaagaacaggccaagagtggcagctcatgcctgtaatcccagcactttgggaggccgaggtgggcagatcacctgaggtcaggagttcgagaccagcctggccaacatggtgaaaccccatctctactaaaaatacaaaaattagccaggcgtggtggcatgtgcctgtaaccccagctacttggaaggctgaggcaggaaaattgcttgaacctgggaggtggaggttgcagtgagcccagatcttgccactgcactccagcctgggcaacagtgcaagactccatctcaaaaaaaaaaggataaaaaaattataggcaaggggcagtcataggtggctttttgagaaggataaagatacatgcaaatagatgatttaaaagatcaattaaatttcccacagatagaagatacagattacaaaatctggctacaaattccactcatgtgagtacgcacaccttgttgcaatgtgactttgccactcttcaaaagtagagtctatttttcttaaatgtgggttggcctgtgacttgctttggccaagagaatgtgagagaaatgatattgggtggaactcatgaggccctgcagctccgtgaccttggaatgctgcccttagactgccctgtaaggaaaccagtactgtcctcctgggggatgagagcccatgtggaggagagcaaggcgggctagccaacagcaatatccactgccgggcctgtcagggaaaccacactggaccttccagcccagccaatccgtaaatggacttgagtggcatgaatgagcatgaaaaagccagggaaaaccagcagagaaccagcccgccagcccacagacccatgataactaagaaactgctgctctacgagagcacaccagttttgtgatagtttgctaaagttgctcaaccttggtgctccagacatcttagatcggagaattctgactgtggggattgacctgtgtactgtccaatgttcaacagcaggtttggcctcctcccgccagatgcagtagcaccccaccccctcctgtcaggacaatccaaatgtttccagacattaccaaatgtcccctgggggaaaaacacaagtgacccaggaaaccttattgatttccccttcaaatccttgaataatcaatcgtgaatttggggcagagttgaaaaaaatgtttttgcccctttgtccctagacatctcccactgggtagtctggatgaactcagctggtgtgtctggaaccaacactgcattctcagataaacctggccagtgcttatgtccaggtaggcaaaaagccctgcctctttttatgggattgcttggctaccccatgtattagcttcctagggctgtgtaacaaactaccgcaaactgggtggcaaaaagcaacagaaatttattctttcacagttcatgtgtccaaaatgtctaaaatcaagttgtcgtcaagccatggtccctcaaaggttccagggaagactcttctcttgccccttcctagcctttggtggctgctggcaatttttggcatgtctcggcttgccattgcatcaccccaatctctgtctctgtcttcccaccgccattttttctctgtgtgtgtctctgtggctctgttttccctttttaaaagtataccagtcattgaattaggacccaccctgtcagaggtgtttgaaccagaatgactccatcttgaatagggtctgggtaaactaaggctgagacctactgggctgcattcccaggaggttaggcattcttagtcacaggatgagacaggaggtcggcataagatacaggtcacgaagaccctgctgatagatcaggatgcagtgaagaagta

SEQ ID NO: 66440 - DNA, 1554 bp, Homo sapiens
gctggtgtgtcgccgggcacatgaaagtccctgagtcaggggagagcgctcgccggggactgcgggcgggagccggcgactgagaaccgcttgccccgctctctggcgtgagtacgcaggcctcctcccacggtctcaggaagcccagacgccgcaggcttccccgccgtagaggagctgccggggcgtaattcctccaccgcttcctcctccagctgcacccacccgtcctttcctgctcgggagggctgggtttgaagcgcgcgccacggccagcccgggaccgcgggggagggcgagggaggcgcgcagccgcacgcacgcagtaggcagccccgccccgcccctcgaggcccaaggtcccgcccctcgaggctccgtgccccgccccccgggtgccccgcccctttgcgcggctggcgcggccagcaggccaggctcccctcggcaaacctgtctaattggggcggggagcggagcttcctcctctgagggccgtgccgcgctgccagatttgttcttccgcccctgcctccgcggctcggaggcgagcggaaggtgccccggggccgaggcccgtgacggggcgggcgggagccccggcagtccggggtcgccggcgagggccatgtcgctgttgggggacccgctacaggccctgccgccctcggccgcccccacggggccgctgctcgcccctccggccggcgcgaccctcaaccgcctgcgggagccgctgctgcggaggctcagcgagctcctggatcaggcgcccgagggccggggctggaggagactggcggagctggcggggagtcgcgggcgcctccgcctcaggtgagctcagggccgcggcaggccgggcgcgcgggtcgagcggggtgggctgcggtggggaggtgggggcgctgtcggtggggctgagcgcggcgggggccgccggcgtgagtgagcggaggtggggaggacttcggtcattgaggcggagcggaactcagcagctccccggaacgcctggggtttgagagcggggcccagggctctggagggtggaggcaaaagtggcccagcggctgcctcgctccctgttcccacccccgcccctggtgaaagggagaagtcgaggttgaccccggaggatagtgagagaaggaaagctgtcaggggacccctaggatggggcagtcatccagaggacttaaaatgcaaaagaaagggatgtggacactgctctgggagacctaaggaaggctgggaagaagcgcaggcgaggtgatgaatgcagagggtggggtgcaggaattcatgaacattttgcaaggtattgggaaagactgacgccgaactcatcatctccctccatcaaaccaggttaccacgttctcttcttgacttcaccatgaacatgaaactcgaagtaaaactattttccttgttaggtttggaatggctgtattagggttcctgaagttttggtctcgagactcctttaccctcttaagaattattgaggaccccagagagctcttatgtgggttagagataatacataca

SEQ ID NO: 66441 - DNA, 776 bp, Homo sapiens
gagcaggtttggcttcaagagaatcaaggaacaatcctgttctcaacgcattggttggtttttgtctttgctcttcctttcttggcattggcttccttccatgactgactctccacatagcgcaagacgtctgctggctttttctgggctccttcattcttgccccagcaaaacccagagggttcatctagttaactagcttcggtcaaatgcctagctcttaacctgtcactgtgccaaggagatggaatgtgctgactcgcctggcttgaagccaggagtggagttgggttgagtctgctttcctggaaccacatggatcaccaaacaaaattgaaactattagaaggaaaaaggaagtagcagatactggggaggtaaccaaaaagtttactacaaatggaaagggccctggattataaataaggagacttggactcccaatcatcccctgctttacaaggccctctgtagatggtaaaataggcctctgataaatgccctatgaatttgatacacactgtattggatgcttgctttctatttcccagcgcctcttcctaccaacagggctggggtgggaataactagctgctaatgccaccctcccaaatgcaactgttgtttggcaccaaacagtaaactttcttttttaaacctggcccattactgatagaaacagtagagttcctaaagtggtatttattaatttttatattgctggtgcttgaagtagcacccaagagttgtgacatttgaaatctactagtctaggt

SEQ ID NO: 66442 - DNA, 476 bp, Homo sapiens
cttacagtaaatatttaatgttttttccccattctttcacctaaatatattaacactgcatatatggtaaagaatttcaaaggagacagaatgtgctgtcactagctaatcatttatttggtgatttatttctttcaatatgggaaggccagctgttgagctcatctgaaccgtgttttgcaggattgtgcttccatgacattgtgcaataacatcagattgccagggaagtgacatttccaggcctgttgttaggcatgcaatgataaacaaaaagtaccggtttggctcctgtatctttccagttattttattttaataatttctgaatttactcttgttatttataattagattgatatgataaggcaagtttggtcagaatttttaatggtgctcaaagtagaatttttaatggaacaaaagctttttttttccccccaagatttaccacactgttgtgtaagggatgggga

SEQ ID NO: 66443 - DNA, 2243 bp, Homo sapiens
ttctaacatgcattgcctatctaggtcacagtttgctaatgtcttgtagcctggatggttttattgatccccgagagaacttttattatcctgagggaaaacagactggaaagaggacgggaaatttgtttggctttggaatagtggtgggggaggaataaatgggaagaaggaacgtggggagagatggacgctaagcaggagagatggggcgagggagaggggaccacagccacgcagaatggaagagcaagaagagcagggagagcgtgaaggcgtgagaaccgaggcagggcaggggacttcagaggcagaagcccttcagaagctctgcaaatccaaatgctaagaagaacatgcagtcattttgacaagggcaggtcagaaaatgccacgcgtgcgcacagaggatggaaggccaggacccgccgccaagcagggctgtcggggactggtcgcctcctctgggcagcgtcaaagggcaagattggtctggtcctctttctaacacctcccacccgggatgcagccaagagtggctgcagcctaattttctacatgtaaacaatgacctcagtgatgcccacggggcccctctctggccttctccccctgggaaaagactgagttctcgacgggcatcccctccccctccggaaccaagggctctgggatgttgacagcccccgccacctctgagaagggcaggccgtggaaaaccatctcctcccttccttccccctctgcctttcctagctggggcctctgcacaatgcagctgggccaggccctgttgctaagggaaccagcagagggcccagccccctccccatagaaataaccccaagagaggagtgaaggattcacttgccctcatctccaggctttggaggagggtaggtgcctggccagcagagtggccactgctcactggcccagaggaagcaaggccaccagcctgatcccacttctccctccggcccatcttcactcccctctcctcaaccacaagccccgccaaaatagagacccccggctttgctcccctgctgcaggaagggagagccaccgccagacactgcctgcctggtcctcctgttctgatctcacccggtgcttggaatcaaagaggacctggcttccctctcgggatacgtgattttctttggttgtgactcattgtctgtaaatgttgctggagatgaatcagaccccacctgctacctgcggctgagatgctgccaacagacacagaaaggtgtgccgcagccaccacccgcctcctctctcccagctctgaaggagcccacagctcccatgggatgaggtcttcatcgtggctttcaaggccttccttagagcctttggatcagggaagcctgccctaaactgcacattagtgtccatgactcacctttgaaaaattcccataaccaggcctcacccgaccctgcaaatacagatgcagttactctgggcagggactcagagcaaggagttttttaagtgccccaggtcctgggctgagagcacctagtggctgtctcagatgctctagctcagccgagatccagtggcttgtccaagttcacattgtcggctggagagctggagcaacaacacaggattcatgccttgagcacagtgttctatcataggattttcctacttaaaaaagtaatttgataaaattattttggaaatgtatacaatatagaaaggtaaaaagaagtccattaaatcacccctaaacctcaacacccggaggtaagcactgttaacattgtgggttgtgtttttatttattttcaaatatttaatgtgtaaaacaggtcatacagaacacacagctgtgcgtcctgcccagccaaactgaccatgtttttagcaggctgttggcaaagagtgtcaagaatatcttagagctgggcatggtggcacgtacctataatcccagctattcagatggccgaggtgggaggatagcttgagcccaggaggtcaaggctgcagtgaactataattgcatcactgccctccagcctgggcaacagagtgagaccctgtctctaaaatatatacatatatattttttaattgacatttttcagcccactaattccatttctaagaatctattctggctgggcacagtagctcacgcctgtaatcccagcactttgggaggccgaggcaagtgggtcacctgaggtcaggagttcaagaccagcctggccaacatg

SEQ ID NO: 66444 - DNA, 1642 bp, Homo sapiens
ctattttatatcacaccacttcctgactaatatcccaagctcctgccacgctggtgtaagcaccaaccccagaacacaccctgtgtccttgggcctcctccgcttactactgactggtgagatcttggataatttgcttaaccacttccaccttaacccctcatctataaaatggggataatgctaatgacaccttcttgaactcctggcctcaagcaatcctcccatctaggcttcccaatgtgctgggattacaggcatgagccaccacgcctggaaacaccttctttacagggattgtggtgaaagcaaagcagatgcaagaatgcaacaaccatcatttatttgctcacagttttgcaactggggctaagcaggcagggactgcttggcagctgaggtggatcaacagggctggaggatctacctccatgtggatcactcggagttggtgacttggtgctattggctgggagttcagctggtaccatggtcctggagcctcaattgtactccacttggactttccaggtggcttagggacttcccatagcatgtcagctgggtctttctaagagaggggaagcagaaattgccaggcctcttaaggattagacctaactggcagagcataacttccatcacatcctatttgtcaaagccgtcataggccagcccagatcccagcgggtggagagataggctccacctctccaaaagggagtggtaggtgcatgggaggaaagaaaaaataatgacagctatctttgagataagtccccaccttagggtttctgcagccttgtctagtagaagagatgctcaacagtttgcatttactgaactcttaaagcttgttacttttgtcccaagattgcttggattgctgccacaaatcatgatttgactttttcctcttgctgtgattagtcatgatattccaagtaaatattaagctctttgagggcaagactcttatctacagtaaacaatttttattccccccacagagatgtacacattgttaactgtgaatatgcagcatttgacttattttcagccctagcacttgatttattgacagccgtagtacacggaagggaacacaagagttgcttttattgaatttttgttgggtcaggaggctttctgggctctgaggaagactcagagaaacggctcctttgttctccagccctgcccagcccagagccttccagaagggaaaactcagtgaggaggctgcagactgccgagggcgtgttgaggaaattccattcaagaccctcatttccgaaagtgctctgtgattagcccggctttgtgccagccccagtccagaggcagagaggccagcccttaggtcaccaaaagcatcaggaaaatacaaatgcgggcccctttacagcccggcacaggaggttaaaggatttgctttgtagtttgtttatctcacagactgaagccaattatcccaattactaaaaaaataaaataaagtttactacagattgtatttttaagttcatttaatctccaaaacaggctgctacacacagttttcctttggttccaacaactcacgcccagtctctgtggcagggaagacagcccctaagggtcacatgtccaagggccaggg

SEQ ID NO: 66445 - DNA, 1741 bp, Homo sapiens
ggcttacatatgtatctttttgtgttccgcaggctatgaccacctgctgtatgtacaatatgtgcttgttacatttgtacaccatctcccttctagaatttaaagacctagctattacatcttgtttactcaatatcattcccccattaaggaaaaaaaaaaacctacatgaactgaacatgccatgtttcaatctggccccagtggctttttctctgaaagcaaacgtgtgtcttttacaccagggctttctccccaccccagggggtgtcttccatccttttgtggctcagttgaaggcgaaaagggctccaaaccactaactaaccagaggagagccccttcttccacctccagggagaatttcagatttaatttgtccgaagatagcgtgctctcttcttactcatttgccatcattacgaggaaaacaaaccaccaccttggcttcaagatcctgggtagaggctcacggtcttttcaaccatctttggcgaggccttgcttccttccactcgagtaagtcgcggcttggggccacggaaaggactgggtgagagcccgcaatgtcgttggaaaaaagcagccctccctgcgccccctcaccagccccaccaccccgctccactcccggggcgaagccgcgagccagcggccccgtatgggcgagacttggcaggtccgcggggcgccttctcgccgccgccggactcggggctccgcagcggccgggcgtcggcgcccgccggccgcggggcttcgcgctgccgccgcccggtcccggagctcccttcccccaccggccgccccctccccctcgcccgcgctcccttttgttcgctcgccgcccgggccgagccgccgccgccgccgccgcccggcccggcggcgaggccgctccaccgcacacgcacacacagaccccggcagcgggaacgcagatgacacgcccgtaacatggaagccgccgccgccgccgctccgacgacagcagcagcagccacagcagcagccgccggcggcgccgcgctgaacaaaggtcatccgagctgcggcccagacgcccgggcttgaccgccgcgaaggccaaccccgggaagggggtgggtgtgcgcctctgggggtgcggggcggcgggaggcggccggggcgaacgaggggcgcagggcagccggacccaggggcgcgggtgggcgccgggcagaggcggggtgcggcccctcgtgcccactcctgcgggccggggtgagcgcgtgaggctcaggcccctgggcctgcccgcagtggcctgtcccaccctggccttggggacagccggccttcgcgccccgccagctggcttggggggccgaggaggaaccgcccgggctaggccccgcaggttacgagacgggggccacgtgagcgcggctctcctactccccccgccggcgccggccgggcacagatgcgtttccagaggcctccgtgccccctctcccactggccctgccttcgccccccgccccctccccagacagccccagttttcttcccccgaggtgaagggatttggacttctccccccaggtgcttgaaagaagagaaggttggaggaggaggaggagactggggggctgctggtggtggtgacagggctgggagagagaggagagggacggaagggaggagggggctgggtggggtgggggtgacagcagagaggagcctggtcaacaagccagcaccactgtgctaggag

SEQ ID NO: 66446 - DNA, 842 bp, Homo sapiens
ggtctttagaatcaaattgcactaattttgcccttttcaaatttgaaatccagtgagtttaagttgaagatggctgttgtggccattatgttaatgatgatagttagctaagcaatttaaaaagacatgagtatctaatgtgtgtagttctcaagcctggctgccatcagtaagaaaggatgggtcgggataggatgtaaggagatgaaaattcctgacaaaacccagcaaaaacccagactgttactagtattccaagaatgtgaaaggcatgaagagaaaaaggcttgctatttactaacgtattgatcttagatgtttgctcaagtcagtttgttctagttgaattcctaataatgtattagcctatttaaacatttccaggctgatgggaaaggagagagttgttccgaaatggtttgttgtagagaggcctccctctgggatgttacaggaagataaagtaccaggattaatttgtgttcaatacagaggtctttctttaaagaattttaaaatggtacaaatatataggcctttaaaaagcatttggaaagagaaatgcataacgtatagcagacttttatctcttttgaaatgtatatttagcttaggtttttttctttatatattaaatatttctgaatgaatataaactggtgttgaaatgtgtaccacatgttaagatagcatacttgtgctttcttttagtgttgtgatttgtgatagatatttcttttctttttataatgtagtctatgcatggaacattgaaaagtattgaagggcctccaaacttgggtataaacttgcctttgagcattaagcctgcaactcaaaat

SEQ ID NO: 66447 - DNA, 2765 bp, Homo sapiens
aatgctatttgttttttaaaaaagaacaaggtaggcacaggtccgctgatcagagaggatggtgtgatgttgacaagagttaacgggaagtagagcaacatcttccaccctttccaaggtggaaacagatgcatctgtaagcaggagtaatgaatgtctctactttgccagttcagcacctgaacttccctttccagtgttgggggtacctgccattgtatgaatcttggcaagagatagatcttacctcccactgcagaatccagaaggtcactcaccctgactcccagcagcctaacttcaggcacgggatgaccaaaactatgctcctgctcgactcttcagtaggtgatacaaaggagcgggccagttcaacaccatttgtctggtggcgtgatggcagcatagtggcaatggccgtggtgactctgaattgagagtagacttgtgaactgtttgtcaaggtgagggaagtcagtttgtctttaaggaactactgaatgtcttggacacaagcagtgccaacatcatggggagaacctaaagtttagactcttggttccctctgaataagacaccagctaaacaacatgccagtctctgttgtttcagaagagaccaaaataaatggaagcgagtgcctttcaattgctataagaccagccccggaagacctccctgctcccgtcaccatatctaacctcacctcctatcacttccccctactcccatgtcactccttttcgttcctatccacgattcatattcctgttacaggaccttggcacatgctcttccttctcgtggaatgctctttccccagttctcatgagggtttttcacatgtttcacatccggtccatgcagaagtcccccgcctggagagccttccccaattcccttactgaaatgtgcccaccccactgagcacacacctgctttgccactctccatctccgcttcccattatttttctccctggcacttatcactgcctgacatgatatgcttatgtgctaagtgtctgccatcccctggaagaatgttctaagattttccatgaactctctgcttgctttctaatctgaaactgccatttcctctcattgcaagaggcattcttccttttgcggcctgagagcagtgggtattagttatattttcccctttgatccttattctggacagtcaaaactgatccttgttttctcaaacccattgccaagtgatgggagcccgaatgccctttcctttttaatagttacttgaataaagtgaccgtgtcataaataatagcaccagccggttgattgctgctgcttccggaaacgttagaggcctgctttcaggaaacgaaggcattatttattttcatgtcctatttttatgcccagcaaactgcttgcaaaaaacaaaaaacaaaaaacaaaacaggtacctaaaatatttttgtaaaatgactgagcttccttgagccttgattagtcataattttttttttcttaggggttgggacaaacagaaggatcttgagctattaattacccagaagtaagatcctctttttcttttttatttaggtagtatttttaaaccatcgtaagtggtttttattcctaatgattaaaatgtggaggtgggttctgctcattatattttttctccacttgaaaaaagatgaagtatttaatgctgaattctaaaagcaatgtcattcttactttcagtgactacatgacatcagcaactaacccgggaataaatccaagtttcagagatttttctgtttaatcattcatacagacttcccttggtattggcagtggaaaagttccagaaccacttcctgtggataccaaaatccactgatattcctggatataaaatggtctagtatttgcatataatctacattcccctctatactttaaatcatctctacagtacgtacaacacctaatacgatataagaacttgttacactatattgttttatttgtatttttaaaagttgtttttttttttcccctctgaatcttctttccaccattgattcaaactgtggatttgaaaccagcagactgcattcaaattatctaaacctctagttttttcaatcccctctctcacccttttctaaggtagaaagatggttaagcaaaacaaaacccaaaaagcaacttggcagtgggagctctaatgctaacaaacatttatttaggactcgggattctataaatgtttctgtatcatgagctttaagttcatactacaatgcaactgtgtgaagtaggctgagttcataattttacagatagggaaattgaacctgcttctgtaagagccaggacttaaaccctggtttctggcaccaaattcggtttccttcttcctacaagttgttgatttatctacatattccaagttggatgctttcatttttacatggaaatttcattgtctacttcaattagacaacactttcagaggtgtttaataataaccaacacattaatggtaaaaaaaaaaaatcctttttgtatttttgtttgttttttgtagagatggggtttcgccatgttgcccaggctggtcttgaactcctgagctcaaagaaatctgcttgcttcggcctcccagagtgctgggattagaggcatgagccactgtgcccggctgaaaatacttttgaaggtagatgcagaggatttcaaagttagagacctgagaggtaatttgtacaaggcttgaatctctctaatgcc

SEQ ID NO: 66448 - DNA, 849 bp, Homo sapiens
gtatattatctatctagccaggtatttcatgtgctgtttaaaaaagcaataaatcattgcaaatcaaattcaaatttcaattcttgttggataagccgtaaatatcctagaaacaaagataaatgtgtagttattattaaattagcatttcaagtgactaagtgactctgtaagtctaatgagttaatagtccttattatttaagagatttgtcaattagcctaatttttcagactaatgccaagctttctagccagagttgacattagaataaaataaaatattagaaataattgccgttgataaaaagatgttttgagaaagaagcattcaaagagaaacaagatggagattctctttgaggaaccaggaaaagaaaacggcctggttgttgtgagctgagctgacgtgggtggatggataaggggaatttagtctttgctgcccaggcatttttccagctctggcacagaggcagcagatagaaattagaggtctttgcccagggtaaaaggtccccatctggaaaggatttgtcagctattccttaaagctgtttgatggagctgccaatatttcctctacagatgtgagacaaccagctcggcagtaccaggtggaagctgtttgcacggactgcactcacccagaggaggggagcagggagggctggtctcagatcgggcgagaaaaagtgccccagtactgcagagggagagcaagatcctggcaggtcaggacgtaactgcttttggccaaaggctagggcaaaacgctgcacagttgttgtcatagaatgttataaaatttcacccaacagactttaccagagttcctaagaataaaaat

SEQ ID NO: 66449 - DNA, 1557 bp, Homo sapiens
aattaggtggttatgtattcatttaattaatatctattgcaacccaattatggtcaaggcattcaaagatacttccttgcatacaagtggtaccactcaaaatgcagaattcagcggcctcaaaagtcccgcctcttccaagccccgcccaccgcagtccatctttaggccccgccccaattcggctcagcccgccccagcgtagaggcaccacctttcctcgctgcagtcatccaatagccaagatacacggctaggtgatttgcgagcgggagttaggtgtcctcttggcgcctgaccagagtcgggaaattcagctcctcttgagtagtcccttccccgagttgccccccgaggtatgcggggtcactcgctgctcgatgttccctccgaagggtcggacaaggctccggagccctgtagctgccctccctaggagccccgggtcttcactggccgaggtgcccaccccgcagcattctgggagtggtagttttcttccttcaggttcattcctggctggccagtgcccaagactggcgagactacgattcccagacgcccaagcgagtcgccggtcacgtggccgcaaggacgctgggccggtgggcgggggccggcaggtgctccgcagccgtctgtgccacccagagccggcgggccgctaggtccccggagaccctgctatggtgcgtgcgggcgccgtgggggctcatctccccgcgtccggcttggatatcttcggggacctgaagaagatgaacaagcgccaggtgacggaggagggtggtgagcgcgccgtggccgggaccgcctgtgctagcggggagtcggggcttcccagtcagggctccggctcccagtgaatgcggccgggcggccacccgaagctcccgcgctgggctctcaggccctgggttctacgcctacgtgtgggcatgggtgtgcacttccttgccctgacaagagcacaattaggggagggtgcaggaaaggggagaatagaaaccccgtgccatggaatgtcaaatgtggttgagaatgccacagccacgcttgtgggagagatgactcggtgaacgacagctctctgagcgtatttgaagggccacccggtgaagagggaaccgatttctctgtggggcttcagaggcctgactgccggcaggtggaagaggcagaaaggcaggcgagagggaagaactttcctacaacgggagctgtccagcgatgcctcccaaagcagtttcttcccagcctgggcagttgtttttcccctgaccgtgggtcgggactaaataatgctccttgtgcctagagagctcacaagctgtgcgcaatcattgtggactcaaccagtgttcccagcgagattccagaagccttctctaacttctgagatggctgcactctgaatataggaggcagtgtagggtctttgggcagctggggtggttgaattccctctcctttgtgagaggacctcagaggaaaacgttcctcttgctctctttttagccacttattggccatcatcactgtctttggggccttatc

SEQ ID NO: 66450 - DNA, 1761 bp, Homo sapiens
ccttatagtaaaaaaaaaaaaaaaaaaaaagattaatcacacacaaagatagaattcaaactgccagagctcctcatctcatataaaggcatttgccacttgttcaacgggtatatctgatggtcactgaacagagcttatgtcatgccaagtgctacgattgactccttagtcagcagtgacacatcagcactaaaaagtgcagatatgttttctttcacgtaagtaaatgctctagcaaggctctcttatctacaaaagtgccaaacacagagagtgaataaaatatgaacccaagattatttcaatgcttccaatttttttaaagggctaaaaatgtaatgctattcttagtctcaggttcagaaacaatcaatccctaaaaatatatcccttctcctaaaaagttacataatgtgttactacgagagaaaagatcaaagaccacaccaagtcactgagaggaaaatgtgtagttccaacagtataagaatgtcttctgacatacaaagacttaaaaaattactctaatactactatatgccatctcaggagccgtcagtgggcatggggttcaagcgaagcattaaccattgctaacaccggagcaaagaaatcggggatcgggggtggggggtggaagcgggaaaggaagtaagggggcttctagaacatgtctcaggttgggatggctgggggtagggcacatttctcctagagacgtggcgttgtgaaacatgatacctagaagcaagtttgagtgctaggaagtgtaggaggtaaccaaacacctctagatccaacggaaagtaccgacgagatcaaagaagggaagacagcaggcgggtgagagagaacagaatgggtgagggaaagactcggggacaagcggagggaaccgtgcgaaccaggagggacccggcggaggggctgccaggagggtcccctccacagcgcatatggtgtgcagctgctggaacgggaacctcagcacaccagggtagccgcggatgaaaggcgaagaggcagcagaagggggagaggaacccggcccccagccctctgctccggcttactccccgcgtgggcccagaagggcacggtcccgtcgctctgcaccaggtgcggccccttgaagctgtatttgtactcgaaacggcgatgtggcaacgcgaccgcggggtctcctcccacgccgtcgccccggacgaagcgaccgagtgacagcagcaaggcgcagaacagcggccgaactctggcccggagacccctttgcctggatcccgccatcttggattctggaacgcggaggagggcgggagagggaggggcgcggatggctgcggatggccaacagggcgctcgctgattggcagagcccgggggacccccaagggcaaggggtgagccccgcccccggcctccgctttccgcgcggccgcacggccaggagcagctgtgggcggggccacgcgcagggggcgggtctggggcggtgcggtccttcggccccgcccaccctccgggggtggggaaaggactccaaccttcgcttcccgcgcggcagagtgcgggaagcgccgatgggtccttacctgcagggagctttctccggcttcttagaatacctgggagcaggaattggctagccctaagacctctggacccagcctgtacaaaacctttttagtatattagaagaaaggtgttccttttgatgtgacatcagtttttcagtggcacaatcccgaatgcttatgg

SEQ ID NO: 66451 - DNA, 1757 bp, Homo sapiens
caggctaccttggttcatttcctgcctctgccactttccagctatgacttcaagaagttaatctccccgaacctcagttttcttatctgcaaaatgggcatagtaagaggatctactttacaggtttgaggagaggacaaaaggggtaatccaagtaaagctgaagaactgtgcttgccctattttgatgctcaagcaacatttgtgcttttacttttatttttttgagatggagtctcactctgtcgccaggctggagtgcagtggtgcgatctctgctcactgaaacctccgcctcctgggttcaagcgattcttttgctccagcctcctgaataactgggattgcatgcatgtcccaccacgcccagctaacttttgtatttttagtagagatggggtcttgccatgttggccagtctggtctcaaactcctgacctcaagtgatccacccgcctcagcctcccaaagtgctgggattacagtttgtttttttttttcttatcaactctggagagcaaagttgtccttatacatagataccatgatgccaaggaaaggggacaaggacacagactttcctcttcaaaaagacctctactttttcttccttgctaggaatgcaagtatctgcaacttttcattaaggctgggggataagaaagagccagtgaaaatgagaagggccagcaaatatgtcaagtggccgatagtagctgccagtgtttgttgttgcaacaggacctcgtggatggacgtgagtcattaacattccactgataggggcaaaacaatctgtgctgaaaaggaaagtccagggggtcactgcagtttatctttgtttacctcctgttatgactcatcttcagggtctgtttctcttcttaggagatgatttggctcattaccacggaccttcctggcttgctaactaagtttctatttaattggtttttacaacatgacctagttcctgagacttcagactcttggaaggcagaatgtggcaggagtgtaagatcacctgcacagcggccagaacatcacagcaaacacacaacacacaggtgagtgtctgcaagctgtccacaccactctctgccaggatagatagagcctttgtccaaattcaactttccactcagctcttccttggaaaacaccgggtaacctttcttatcactatctccagttcaggttatcttaaaataaaccaaatactgattaagctccccagggccagccagatcacttgtatatcacttcttcttccttgcagtttcccttaaaccacacaatatagaagcatggaagctaagagtgcacacttcttagtgtggcacagcaggtgggacaggtcattggaggtggaattctggtactacacaagttatttttgacttctgtgcttctattttctcatttttgaaaaatgggtgtagacaacattgctaaagcccttttgagaaaaagaagctaagaacagggcatcaaactggcttttattgattcacccatgaacaagttgtgcctttacactgttgttatttgtaaggaatcctgggtatttggcattcctggaatattctatttagctaccttggggtccaagttccctttaactgggggagaagaacttttcacctgtttctatgcatgctcacaaggataagcctccatgatggcaattttggctctgtttcagataaaaattcatttagtaacatataaaggatatcaagtcatgaaggcactac

SEQ ID NO: 66452 - DNA, 967 bp, Homo sapiens
caaagccactcaattgtcacttcagtgctggtgagtgtggatgcaggtgcccagtaaggccagacagcaacatccctcagggtgagttatgacccaggcatcaaaggaggccacctcaacgcccagctgccaggaggaacatgatagtcaaaggaaaaaacaagggtggggcccgtgtgaagaggcaaaatatattctcactttcatcaggagctaggatcggctgggtggattacccagcccttggctagagttctggaggattcagattagagatgctggatcaaaacaacggaagaaaaggctgtacagagccattctgtaaacacaggccaaattttactatttgctgctctacctaatgttgtgattactactgagtgcttcctctctttgtttgttcttctgagccaacctttgtcctctctgcctagacactcattttcctggtaggacactctgagttccggaaagacgacaagatgaataactaaggctcagggagagataaatactgccccgtctgcaaaaccacaatgcctggcaaccacctagagccccacacttggaaacagaaagaaatcctggggtttctagaaaccaaacccactgggaccatacaacttcagacaaagctgtggcctcacttgagcatagcttacaactctctaacgttgatcacagcagaagccccatggccatatgtactgtagcagttggggagggcgtgaggtggaaaaaaaaaagtttaaaaaaaaagtttccattcttttgaagcctgagttgaaataaggagaggggaagaagctgagaaaagcaggaactaatcgggcagctgactcacaggggcagaatctcaggttcatttgctctcagcagaaaattatctctctccagtcagttccactgttttcactcatcgagctgatagcctaaaaatagagattaatgtggaacattatctttt

SEQ ID NO: 66453 - DNA, 858 bp, Homo sapiens
catgaagcggctctcagtaaccgttaaccactcctaattactcctcttcataatagtagaattactcatggcctcgccaaacattatgcaaataatttcacgttcccaggtagctcagccctcccacaaaagatttgaacgttttccatatgataacgatccactcgtttttgctaaacatccacaatgggcgatatcgacctatctggaaggacacacacaaatcccttcccaactcaaacacgatgttctttctggctggcaccagggcttctgtttgcagtgacttcctgggacccggagctttctcacagggcctctggcatctcctctgcggtgattaaggttcttctcatttcccttccctgttactgcccatactcttcaagttcgaaaagtttccttttccaatctcttttctgggcttgtttacccaagtctctaattgccaaggcctctggtctctccccacccacaacgttcctcctggttaaacccttcccctcccgccactcccagctcccgccactcccagctcccgccaccactgccgctgacgacgtccagcgtttgcagatggtcaaagccgacccccttctcctcccacctcgttttgtaaggaagtaatttcggggccgagcgctctgcgccccccgccgcgggtcggcgccgccgcgggtcgggagcgtgtccgggcaggtcgcgctcagcggggtacttccccgcccgcgtcccgcgtccgctcccataacgccgtctgcggggcggggacaggggcggggacaggggcgggccgggcgtctagtttccctacgtcaccagggaagttctcactggacaaaagcgtggtctctggcg

SEQ ID NO: 66454 - DNA, 640 bp, Homo sapiens
aaaaaaaattaaaaaaaaaaaagaagtggggtctcactatgttgcccaggctgatctcaaactcctggggtcaagcagtcctcctgcctctgcccaccaaagtggtggggttacaggtgtgagccactacacccggccaccataagttctgaatcctgaatcctgccacataagcctgggctgcagaggaactggagttcaaggtctgtaaacaagacttgccttgctcttgccagtctccacgtttcagctcaaccccagagatcagggccctgctccctgctgatgcacttccctgaaatccacagccaatcctgctggactttgagtattgcctcccccatcctcctctgtcatgctctgcctgcctgttggaacatcctgaccccaggggtgaggcctatccacccaccccatgctgagtgcctgccaggactctggtcaacattctttgtatccttgagttgctctgtcctggacagcacaccaaatctcagcccaacagcagccgctgggctgccaccacacagcaatgtcactctagtggccatctgctaaagattggttctgtccaactgcttctctgcccacagttcactttgtcatgtctgccttcactctgaaaatccagttaatagca

SEQ ID NO: 66455 - DNA, 642 bp, Homo sapiens
tttgaaaattttcacattaaaaaaagtattttacatgcgttgactctatgagttaggatttattatcatccccattttatgaattgagacacaaattgggtgagaacttacccaaggtcacccagtagtaaatagcagagctgtcacctgaccccatagtctggttcccaacttttagtcactatgctatattgtctcatattctgtattggtcatgtaagaatatgccgacttcctgagttttaataattgcaaatactttggctgagccgtgtgaccttggttgagtgattcaacttttcaggactatgtagtatggaacttaaccttgctccaaaagctgcctggactttgcccctggcttctaggagataacctttataggagtgtttttgcttagggtgggtattgaccatgccagaaagataatcatgtgatttagggtgggagatttgggtcatgcccagagggtctggggactgaagactgagatagattcacaatgtgggtaatcagtcactcaatcaatcatgctcacataatagggccccaataaaaactctgaacacaaaagctccagtgagcttcctggttgttacacatgtactgggagggtaatattatcccagtactatagggaaa

SEQ ID NO: 66456 - DNA, 1062 bp, Homo sapiens
cttttaatggaattgcagtagtaatactgtcccaaggtgatgggctactatgactgaataatatccccagatttcatttcttttattaaacaacagtaggacacagactcatctcatgaatgttaatgtgatcaagattgttgcccactggaaaaatgtgttctaattgagtcgtgagaaagtgtgccttgccatataaaacaaaaggaaatcaatagctttcaaaggattagagttcccagaggctccatgggaccaggcaagtaatgctattttgtcaaaatcatgtttttgaaaaaaattccaaaaatctctccttccatctatgggatggattcacttaagcattttatttttcttgtcaataaagtgtcaaagcaatttgactaaatgtggaggtgaacacgtgatttcagtcttattacacatactctgccagcttgtttaatgatcagctaggtattttcctcaaagacttggcatcttcctaagtgggaatcaggccagggtatttatttaagctttacagaatagttctctcatatccaacccctcttctccgtcaccatgaccagctgactgtgacatgcttgtgtgccccatggcctttctcacatgtccctccataaggaaattcagatttcagcctctttcttctgtcctcctacctttgcatcaagaagagatccctgcaatttaccttgattacttgtgtgaaatgagaacagccatggtcaaaatgagttaataaatgctccccatacaaggcaaatgatatggtgatacagaaaagtgagggggcactttgccaaaatatgaagcaagctatttacactgggtatattgatgagcacatctcaccgtccaatggaaaccatgcagtagcattgcagcttacagaatcttcgtgcatatgctagagggctaatgttgcatgcaagtgagttgctttgttagccttggccttgtgaccatgggagacagtcagagaggaaaggactgtgtacttgctgaatgaggtattggtcgagaactgccatgtcctagctggcagctgctggt

SEQ ID NO: 66457 - DNA, 2512 bp, Homo sapiens
ttcggaggcaccatttcatcttcagtgtaccagacaaatttttccagatcaggtaactctggtgacaggaagctcaggccacagttcgggcttgactgggatatgctgatgccccagttgtttctgacagttacagaggatctgcttccttactcagccccaggtcctactgaattaattaacagcagatggagtaccatttttttgtttgttctgaggacatatctcctcaaatttccaggagaatccccatctttaatatatttttcctagcactcagatgcccatcttcacataaatcttctgtctctctaacagtatgtatgcttgtcacatcatgtgctgcgtttggcgtttagatatggcctcctgctcctcataaccccactctgctccactctgaagcctaggtcactcttgacctccctgcccccactccctgtgtgtttcaggcacgtcacatgcagtatcacttccggttcctcttggcctcacccctgctctggccatggccatggtgaccaggtccactggggctttgccagcttcccacagatatggccacagagggtgcctcatgccaggtcttctctccttggctcctgcctccagccctggagcatctctaacaaggagctgctcaaaagagccacccagactggggtttagtgacagcagggttcatggataaatgcttccccccggcccctttaatggccagttcttaagggcattttatgaagcttctcagaaggttccagcaggactgagaacgagatgcttgtgtcaatgatactagatactagatactactagataatgcattcttgttttggctttccctccccgtccctcacccctgctcctaaagatcatgtatgcctccaagtaaattactggtaggtaagcctttcttaagccctttttcagcagaattgaagttgaggcagaggatattaacaaacaagtgtgtgtgtgtgtgtgtgtgtgtgtgtgtgtgtgtgtgtgtgtgtaggatttttctcctgcctttccaattttgggtttagtcactaatacactgattcattcaatctcagttcccaccacgtaatggaacagttacatccctgcttatgcaatcgttcccttccacgcagttttgcacaactcagattttgcgtaagtcaaaatctgggttattgccctggatattaaaggtgcagaacctgctacacaaatatttatgtgtataatatcactgaaacttgttttcactgttgaagccaccaaaatattttcacatgttggtccccaggggcttggcattttatttttttactctaaatcaattgccttcagtttacaaatgcgcctccactgttgttttatcctggtggcttttggacaagattggaaggctatgagagtaaagacataaacaccctggaaataggatgagttggtgcagtaagaaactccaccggagccccgtaaaactgaaagtgaaaagcctggcctcttggaattcatggagtctatactgcagcttaatatgtgttttcatacataatgcaacctttccacatctcttacatgctatcagcaccttccagaacaatttgaaaagggtcatatttgcattaggcatagcttatgggacctgggggcagctgtccctgatcaggaatcataacagggaaacctcatttgcaatcaccatttagcctctctctccctcagatagtagaaggactggaagttgtttgttcctaagcgttttgtgatatttatgagtggccttattttaaaaagtccccattagtctgtttatttttaggtatcatattaaatgcaccagcagaaaaatacaagatcaaagcccccaaaggtcaaatgcctgcttcttagctggagtcacactgtttagaagctgaaagcagccaagtcccacgacattaatatcctgggaaagaatggagcactctcatccctcagggatcctttcccgggttcaaaggcattttgcactctatcaggtgaaaggaaacacacattagccaaatacaggcagacttcacagatgcaataaaagattcccagtagagctccttaaagctcctctgactgatcttcgacttcaaggttgtgcctaagcaaactgcattggagctgatgtgttcaaatgtggctaacagctcaccagaatcaagccaatctatgccttcagcatatctcttctacaggctgagacatgtgcttgggctcaaaatgtccaaacctcccccaccatgggctccttatactcccagctaggtaggaggatcagtgatggcctatcaagaatagaagagactcactccctctgctgactgccattcttgatattatctaaatattttgagcttaaatttaagtttaaaaatcagcatggagcaaaaaagcatagactgggcatggtggctcaaaatgctctaataccagcattctgggaggtcagggagggaggatccctggagttcggaacttcatg

SEQ ID NO: 66458 - DNA, 1325 bp, Homo sapiens
taaaaagacaaaaaccaaaaggatgtgatcttgttcatatgcctagaaaggtcattatcaacatttaaactatcacagaaaaatgcaatgccctgatcctttagctctttatgtgtctacgggctcccaatatctaacacatattcttccttcacaaagcccttcaaatagaatggaatctggactcaaaatttgctagctctgatgagaaagaggacccgggaacaagccctccaatggcacaaagaagccctccttttcccttctactcgaggttaagatggagaggtgtcagcagttcctgaacacctctgccctaagggacttcagacaggaacaaaaaaattaagggactttggacgattgttcccagcagaagcctgggaaatgaccaagtcaggtatttgctaaactatttaatgaggctgcataagcaataaggagaacttgatagagctttagggtcactgaggtttccagggtgaattaaagcagtgaagtaagaggagaggatttaaaaattaacctgcgtgtgaatgtactatgttcggaacaggaattaaaaagcaaacaaggattaattgatcccctcctccctcccaagctgcacgctggcatttcaggagcaaaatggattggttgagaatgcactctgctgggtaattaaacaaggaggtcgatcaatactcagtagctgggatttaaatacccattgaaaagctaacagaggaacccagaagggaacagaagaattgctggttggctcaggcaagattggatcttaaggtttctgcatgtaaaaaatgaacaacaaccaaaaaaagcacctcgttcttttcacctctctaactttaaaaacctctttgattcagtattagcccaaacaaaaataaggatctccactcagagcatttctcttggtggcgagtgacagatgtaaagggcccaatttgtgattacgtggttcacttctacaactgcaattaagctgcccgttaaattcacgtagctaaataaaaattacaatcagttacttattagctaccttgaacctgcctccctgagagctagagggttggtgagagagccaattcacagcaaagctaaagtgatctgccttgcttagttgttgtggttttcaaatcagataggtcatgagcatctgtgtatgcataaacaactgaaactgcccagagatgtctcatggctaatcagatcagtaggcccaccagccagcagccaagacactcaactcccagttggatgaacgtgatctaactttgctgcaaatacgggccctgggctcttctcttcagcacccacct

SEQ ID NO: 66459 - DNA, 1578 bp, Homo sapiens
tctccaaccctttgttccaggctgctttttacgcctcaaaacttaccagattttgtctgcacctcccagacaacctcagaaatgtgtttcccaaaaatctctttccctggtcagtttctctgtcatgcactactttcagaaacccagactatcctctggcccatcagccctcatgcccagagacccatgccaagttaagttgttcattgggcacagatatgtctccaaggcaccttctaaatctgtcaaggccaatttaggaacagaaggttgaggccagatggaaaagttgggaaagcacccatggagaacagagctagcccaggcctggaggcacaagatcactaatctgatgagtggctccaatcaaatgagaccacatggacattggcaaagagcataaggaaagttctctcttcactcaagcctgtagcctgtcctagaacaaaggagcaaaggttctttcagcataaacattgccgactctctggaggaaaacaggctcttttttatatttacaaaatcagaaccagcagaggccagacctaggaatctgtatttttaaaaggctccccaggagcaatggaaaccactggtctaaattaaaaagtgatgacaaataaaaaagccaacatagggtgttttgtgttcgctctcattctatggtgttgtggacatccatagagaatgtgctatttatcctatttatttacttgtttttcgaaacagcaaaaggatactgagataggagactttgctcaacaagccagtgctaatcaccataaagggtctgttgtgtcacactctgatgaatcaccacatgtcagcagggacacagccaacggaaatatgttctatggctttggtttcctcttttcccttgatgcatgaaaaaatccttttccccaagctaagtttagggcaagaggctctttttgtttgtgaatggaggcagtctgagggtgaaacaggatgccccaaacagaaggaagggcccaaggaaatctgccatctggagagtgagctgtaggggcaccttggattcctatgcagaattgtccttagatttaggcaacagcctggcgagcctgactcttgctgaacagagaggctgtgcctctctcatgtgaagagtggatgtcatccacacacgtgggggaaaggactccttcaggggctcattcctcctccatctgagggcgctcccaccagtctttcactatctgcctccatccactgctcctcagtaccttggcctcagccctctttgcttccttctcagcctctctatttctcccagtcacccagccttagaatctttgtggccaggcacagtggctcatgtctgtaatcccaacactttgagaggccgagatgggaagattgctggagcccaggagatcgatggtgcagtgggctatgatcatgccacttcacaccagcctgggtgacagagccaggcttgtctctaaaaataatactagcaataatgaaaacaaacaaacaaacaaacaaaaataatctttttctctatgagacataatggaaagagaaaccgacttggggtctgaaaatctg

SEQ ID NO: 66460 - DNA, 747 bp, Homo sapiens
atggtttgatagttgtctttcaacatctatactcatccctaagtcaaccctcctttcattttcccagagaggtagatgctaactaaaatgagtacataaacctacaaaaaaaattctttaaagcaatagttgactcagtaaagggtattcatcaaccctagaaaggatcatagccagatagagatatagacagacctaggatggagcaagaagacactgcagtgcgaagttcatatccccccctttctgcagaattacaaaacggactcatctacaaaatgaagccaccggaggctgctttcagctctttctgtgctttccagttgtgacttttcattaatgtgcaagtatgaatcctggcctcttgtgtcagtggactttggtcacatgggtagatgtgtttgttaagggtcattggtaaatgccagaagaggccagagcaatgggatgccaagcaacattaaaacatcattaagcctataaaattctatctgggagactgagattctctctctctctctctctctcacacacacacacacacacacacacacacacacacacatacacaagaatgcacaccccaacaaacaggtacacaaataactgcaagcagatccatttaaacaatttaaacaatgtttcttaggtcagtaagactcacaaaaaaaatctgattttggttgttgttgttaaatttaaggtcaagaatctaccatacagccgattaattttgcactgcttaat

SEQ ID NO: 66461 - DNA, 576 bp, Homo sapiens
ggttgtgttgagaaaaaaactcaaatgcagagattaaactaggcactacattgcttttcttttcctattgaaatagcacatctttctgatacaggccatctacttaaatcttcaacaaaatataaatatttgaaatgggattaaacaaaataatcacaattccatttcatctggtatttcagctggcttgccagccacttagttatattggatcttagcaaacactccaattagtggcaagaatgggaatgcccggtgacagatgtgtcattgactttttgtcctctggtagcaaagagcaatccttccaggacacaactgctgcatacatgcgtagtccaattgacgtaactacagtcattgttttaatggagcaggactttgacaaacctcaactgagaattccattggctcgagctctaatatttgcacagtttcctcctatgagcatcctggtttgctgtatttgatgaagcaaagaatccagaaagtgaaaattgtcgtttaaacatgttttttgtttttttgagatggactctcactcacccaggctggaatgcagtggtgcaatcttgg

SEQ ID NO: 66462 - DNA, 454 bp, Homo sapiens
gcctcaattagtcatcttttgaacgaggtattatttaagctggggtaatcagaaggtagtgactacaattttcagttttctactatgatggtcatactgctattggtaacctggaatttcctctctctctcctttcactagcacatcagggagaaaagaacccagtgctgaatcatggccacttcaacaatgagagaagtaaacaagccaagcaaagctcgctgccaagcttatatttcgcctatgtctgtgttcaacctgacgtgaaaatagcaggcggaaaaaaatcaatgtcacatcaaaatgcaactggtataatagcagcaagttacatgattttcctgaactacagataactcacagactgtctcaaatgctacaaaataccagcaatagggcttttaaaggtcatgtggaagaattcaaacaacctaaatattatattttaaataag

SEQ ID NO: 66463 - DNA, 435 bp, Homo sapiens
actctaagcagtgattcatggctgttcctatctaaattactaatccatgtgacaaacctggttggcagcacaaaaaacgcaatactatttgtcccccattgcctttatagactttgttgaattgtttttgcaaacttcctaaatccaagtactagataatcccctgctagcagcttccatcccgttgtggaatttagtttagagtctctgttgccacagagagtttcacaatggactaatactttgtacctcagaaaagaattttctgaacattagagtttagacatagagcccaatggacttccaaggaaactcactttaagttgaaggcaaatattcccatgacagctgtcccaatccccaaagaaacctacaaaaaatctgctcaaaaacatttttttaaatgcctattttcttttagtttgcaaggaaggc

SEQ ID NO: 66464 - DNA, 2678 bp, Homo sapiens
ggcttcttcaaagggaaggtataaagtcatttgcaatttatttctttgaaccaggagttttagcagcccccacaccttctcacagataggaacgatgttgatgcagaaaccacccaaacagccctgtgccagcactgtcggcccaaatgacccagagacacccaggcgctacccagatcgtggggggttacctgtatctgtcaccgagtctctttcaccccttctgcgtgatgacatcaagtggaaatggtacacgtttaggaggcaagaggctgacaggcaggaaacacaattgagactgagctttcttcagcctgcagtgaaatacatgcaggaagggttagatacgcgccgcggagaaggaaatccaagcgccctcctgggcagacggggctggagcgggtgcactagggaggtggagcaaggcagatgaggtgtggagggctggcggccgagaagggggcgtcacggctcctaattgtctctacaggataaataaccacctcccccctcctccgcagtctcccccgcccacgagttcccctctggtggcagagcgcctactagcaacagtaagccctaggaaagaaagaaatcggagcaggtggggaataacatcttggggcaaagacacactggcaaaatctaccaggtaacccggtcatatgggaatgcggggcgcctagtcagccgcgcagacaggcacacagcgcggcaatcccgagcatctttctttcgtttgcccctgtccgccacctcatcaagtcaccgccacctcatcaagtcaccgtcacctcatcaagtcaccgtcactctgctttggcgatttctctactctctccagacccaggcagcgctccccaagccatgccccgaccccaggcgggattggggaccgccgcttcccgagcagcgccccacgagtccagctggctttgtcctgccgctgtccttccaggagcaagcgccccaggcgcgtgtgtctgcacaaaagacccccaacatctggcccttcacagcgctctctaatcccgggaggggccctggggcaacttctagggctggagaaggcgcgagacaaggggaccgggagaagatgagccggggtgtgtgcgggccgggggcgcaactggggcgggcgcgcgcgcacgtgcacacccaggggcgcgcgcggcgcgggcacgaggaaagctccctcggaccggagctccagggggcatccgaggactcggccgagcagccgacagcgccgctccccgccgcggccgcccgcccaactccgccagctctcaggagacacgcaactcccgggaccacctcccccgtgccccgccagaccccgcgctcccctccccgggaccctgcggccccgccaccccctccgcggtccagaagatctccccagttacagcaggcggcagctgccctttcccgcttccacggcttcggcgcggccgccgtaggggcgcagacatccctgcgcacccctctgtccgcccccgatccggagccggcagagcagagaaacaaaccgaaactcactgacctttctccgcggcgggctcgggtgctcgctacagaggcggcggcggcggcgacagcatcgccgggtggtcccggcgcgcccgctcctttcagccagactcgcgccccgggccggcggccgccgctcctccggccgagagccacggggcggacgctgacagcgcggcggcggcgcctgcagccccagcacccggcccggcccttcgggcggcacccccacctgcccggccgccctccgcgttcgcggtcggacaccgccgccaggcgctcggcaccgagcgagagctttttgtgtcactgagactccggcaccaaagggggtggggggagaggctgggctccgctccccgcggcaccgccctccccggcggctccaccccctcctccccgcccacagcccggcgggcccgggacttctctccgtcagtcccgaatcgcccacctcccccggggtgaggggctgcctaccctctctcgcgcgctccctcggctttgcccccagtgcctaccctcggccaggacctcgacgccgtctctctaccgtgcaaaagcgggacctgagctggcggcaggtgtgaaaggaggcctgggcagccgggaggaggggcagggccgggaagggggccggggccgcggtgggtgggttggggggtgcccagtctgtgcctaggacccggacagcgagagggaggagctgagatcatcaggtttccagaagctgccctgcatcctcgtcaccggatactttttggctgcccctaaaagttcacgtagtccagccagggtggggccccgctttccaaagaggcccgaatggacaccccactacttgaatccctcgaatgggggacaagaagcaggggagtaaagagatgcaagtcctaggggttatatggaagcgcgaaccccacggaacctcggggcccaccctattccacaccttaaaacctaacttcgacctagggaggtgcttagaatgtcttgttccccggagaaaatctcccgcctcttgagttaactgcgaaataggagaatggaggagaaaggtccttggtagaagatagttccatgccctttggtgcctttttaaaggatttctctgcagcatgaaaacctaaaactctcttcttgag

SEQ ID NO: 66465 - DNA, 1063 bp, Homo sapiens
agcctagaaatgttatgattatacaagaatgactttaaagactactcttcagaagctaatttcagggatcagtaattgttccaaaatttttcaactcttttattcagctgcttttggaactattgtttgggggattcaagcattcaactcgatgtggaataaccacccccatcctgactctttcacttccactggctgggattttaattcacagagcatcatgggtgttctgccttctgtccagtcttgtaaagctgtcacacagagaaggttaattaactagggcagactgggataggccagttcttaaggctggtcgtaggccagcactggggcgggcaaaaacagtttgagtcagaggaagaacaggcaacaacacgtcccagcagagtcttcggtgagaaattccaggatcaaggctgttaggaccaggtagtgtttagagctgcaagccagcaagcagcatggtcagagaatctggcattgccctggagactgggcactgcccatgtgtgggagagagagagggaatcaaggctgaatcccaggtcttgaaggactagggctgtcaggatgggaccccagcactggggactgagataaagatccaaatattcatgaattcatacaacaaatattcattgagtatggactatgtactgggaacctggtcctagggttaggatagagaaaacgcccccaaattcctgccctcacagaacttacattctaatggaggaatcagacaataccaaaaatattgatgaaaagagttgaactctgtaaaatatttgaagagatttattctgagccaaatatgagtgaccatggcccatgacacagccctcaggaggtcccgagaacatgtgcccaaggtggtcagggtacagcttggttttatacattttagggaggcatgagacaccaatcagatacatttaagaaatactggtccagaaaggcggaacaactcaaagcaggggcttccaggctataggtgaatttaaacattttctggttgacaattggttgagtttgtctaaagacctgaaatagaaaggga

SEQ ID NO: 66466 - DNA, 1468 bp, Homo sapiens
atgttggagagtgaaaaaggtaagggagaaaacaaagtgggggccgggcgcggtggctcacgcctgtaatcccagcactttgggaggccgaggcgggcggatcacgaggtcaggagatcgagaccatcccggctaacacggtgaaaccccgtctctactaaaaatacaaaaaattagccgggcgaggtggcgggcgcctgcagtcccagctactcgggaggctgaggcgggagaatggcgtgaacccgggaggcggagcttgcagtgagcggagctcacaccactgcactccagcctgggcgacagagcgagactctgtctcaaaaaaaaaaaaaaagaaaagaaaaaagaaaaaaaaagaatagaaaaaagaaaaagaaaaagaaaaagtgggggtggggcattatgaagtctgtgtgttgggggggaaattttagatcagtggccagggagggcctccctgaggaggcattttctgagctgaaaactgcaggaagaaaagcacagtgtcatgccagtaaatagggaaagcctgttgccatcatcagagggaacaagtggggggtgtctgcacttccccgcgggcaaaggtcgagatgctggaactgggttacagggacagtcagatctataacattgattgatgctgagtcacctgaggttgtattagagttgcttacattggggcagggatgagttcttcatctttgtacctgcagcatggagcacaggtgcccaataaatgtttattgagctgagcccttaaatctcccagaacctggcatggagctgagattaatgtgatcccataatacccagggcagcccttctgtcggggatgacactttcacaaaagaatgtgatgatctcttcagtcgcttttcattactgtcttcctgatctgggagggcagagatcatctttcaacttgtatcctcagcacctaacacgctaagaagaaggcggacagtggggcaagaaggcagagagagagagaaatcgggaggaggaaacaagcaaaccctattcagtgcttgattatcactacagatcctaatccagtccaatactgagagtgacttttctactcaacgtgtttgaattttacatgttaaaattgcaccttgaaactgaattagggtggtagttgcacaacccagtaaatctactaaaaatcattgaattctacacttaacacgagtggattttatggtatgtaaattatacctcaataaactgtttaaaagcattgaagtgggatcccatgtttagacaattttcacaagctgtcaataataagccacaaagtcgtctttaaccgaacacgttatcatccttcctaatagatgtttaaaatttgcagaccaaattgatctgccaatttacttttcccttatgtgatattagccaccttaaagtatatatagtcttaaaaagtctaagaagtcttaaagttaggccaggcatg

SEQ ID NO: 66467 - DNA, 1202 bp, Homo sapiens
gatcacagtgcatcctctactacaaagaaactttttggttgttctcttccaattggctgggcaggggccacatccttcagaagaacttgggaggttccttctatgctaatccaatggtctcttttctgagaagtgtacattcttctatttcttggtgtcagaaattcttgatcatcaagcagattgtctaagacctctattcttttctttaaattatctttccttccctttattctatgacaatattccttcacctcttaatgtgaatgactgctttctgtccttacaaccttctctgacatttcattcagccttcacctaattctcccactccaatttctgatgctccgacaatagtgtcagttgcttctaagaactccttcaggagctgcagtcaagagtgaggactctatctctgcctctctgtctctttttgtctctttttctccatctttctgtctctttctgtctctgtatcttcctctgtctcatacacacacacacacacacacacacacacacacacacacacacaaacaatccttagaccccatgttaggaaatactcttagaaatatggctagtacctggtataatttaagcagaacaacaagacctaaaagcctgagagtgttcctggaaacagaagatcctattattgccaacagtttgaaatcgtcaagtactcacatttttcaagccactttgccaaacagctaaacatgatgcaagtctgcactatttcaagtcatagttccaaagttctttatgagaggggttatctctggcatgtgtccagatggatgggaaaatgccagcaaaccacggcaaaaaatacttggctagcttagatgtagaagaggaaacaaatttaatgagttccaggtataaatcatccatgctagctattttattgctcttcccctggaacaacagtgtcttaaacttctctgggattggcccagatagaacatacatagggagaatcatcactccataggctagagccacaattagaagagctgtggtttttttctatgaagcgagcaaggctgcctgcattggacactgtgttcacaaagtatagactgaggagatcaatcaagcatcattttaaggaaagaaaacctcaaaggcctgccttaattctgatactttgctagagtcccatccctcaaaaaaatacagttgtttacccttta

SEQ ID NO: 66468 - DNA, 2507 bp, Homo sapiens
cacgtggccagctggcagggctgacatgaaggagtgggctggctgacactcaaagacatgacttggaagtccagaagactgtcagagaaagaagtctatatggtgactcacactgagaggctctataaggcagtaaaatgccctttcaaactcaggtctccatgatccttcctggaggctgactccaaagatgaacaccaacaattcctctcgaccctgtagatgccttttgtgcctccatcaataggtggactcgatttcctcctcctgattggagctggccctgtaatttgccttaactaacagaacatgagagaagtaacctagtgatagctctgagctgaacccataaggggcctggaagcttcaggtttcactctctcggaacctcgagcctttatgtcaagaggtccaggtagcctggtagagagaccacatggagagagattctagaagtctgaaaactcaggcttcagatcctccagccatccctgctaggaagctagacacatggccactctaatccagcatgacctcgtcttaactcattacatctgcaaagaccctctttccaaataaaaggagttttatttggaaaattaaacctctgaggtcacattctgaggttctgcataaacataaactttggggagacattatctaacctagttcaaatgctatcttcaatgttcctgtcccattcaagcccccaggccactccagctgcatgggaaactacacaaagatgactagaaccactcacactgcaaaatcacaagcaaatacatggctgtagttttaagccactaaactttgagatgatttgttacaaagtggaaataacccaaacagtctttttgagacattagagagatttgaccaatcatcaactttaattactaataaaatgctaaaatacataaatgaaactacagtaaaagtatgagaacgctgaggcctttgcaaaaagttgttggcactttcataagatgtcctacatattattcattacattgtttttcttcacccaagggtttctgaggggtgatttcctgtctaaaatgagaaggaaaatggggaggggagaaggcacatacaggtctgtgcctcaaaatgactgtagaaggctgagtaatatggaaggaatgtgaaatgctctgaaccagggaaagaaagtgttgtttgttgtgaaggacactggattttaccatagtcaatagcccctgaaaaagaaaaaggaagggactgaattgacatcttagtctgcaacaattagaaggtgaacagacttaaggtgtagggaaaaaaggggggatctggtcctgaccatgggttcaataattccaccctcaactcctttagacagaagagttcaagtctcagccttcagcaagtcttagatcaaatggatgaagagtgttgtcaattttctgtaacagcctccaaaaaatgtgcaggatgagaaatggtaaatatttgtctcttgtgaccccagaaacagcgtgggctgacacaaaactgttgagagagaaaatataaaatgagaaaacaaaatagtctcccaaaaaaagaggtgactagaaaaatctaaattttcttttccatttaataaccatgaacattgggtaagttccttatgcaatttgtggtttcagattcctcatttttaaaaagggaataataataccctacttccctctgaaggtcattctgaaaagcaaatgcaattataaatgtgaaaccactttgaacagtccaaaagtacatgccaaagataaggtttcactattattagtcagcatatatcgaagcatgttcactgggaaaacattttctgcagtgacaatttcaaacgtgactgattaaaaggaattgctaaagaaatttgcagaacagtagcaatgaggcagccatgatctccttaacaggatactaagctctagtacttctgaattctcatttcaatcctgtccaggaatttcagaactttattctccaaaatgcttcctctctcccctaccctcatgtatttacaacaatgatcattatttgcaatctataaacttccagttaacgtcctccaggaaaaccaccttcctgaatctccacaccagattcagctgtcatctcctatttactctcaagtccaactgagaccactgccaagatgaagctggtgtctggagcgtatgttttctcctggggtcttgattaccagtcagtttggcatcttacgagatgatggaaagagaaaagactgaatttatttttctgtgccactacaaaatctcttgacatttggctttccaagcaaacctaaaagaaatgaattaagtaattaaatcctgctaactacgtacaagacaacttccaaacattatttcatgtcatccttacaaatgtctcctaatattgataatattttttcccatttatatataaaagttaaggtcaaagatcttcagttacttgcctaaagctacagagctaacatgcaatcaagccag

SEQ ID NO: 66469 - DNA, 869 bp, Homo sapiens
tcctagttacttctggcatgggatgttatatggtgacaaattaaccttacccaaaaagaccgctggtgttcattctcagctactgggaggcaatttctgggcccttggaatgtcatggaatgtcatgcctcatagaaggttctgcctgagggcttggccactggacagtctaataatgtgatatatgatgagggctttgggccatattaccagctgtatccccagaagggattaaaggtcagccaggtaggcagtatgtgatcaagccccactaaaaagtctggacaacaaagcttaggtaagcctggttggcaatactccatgtgtactgtcacacatcaatagtgggagggtaatgctgtcctgattccacagggagaaacagaagcttggcatttggtgtcctggactctgccctatgcactggaataaactgtaactgaatataacagcattcagtgatttcagtgaattctagtgaattactaaagctgagggtggtcttgggaactccccaaagttgtagacataaaataggttcctctttttgttaatgagagaggcctacctacatacatcagaactcatttattgcagctacgtcttgattaacatcttcccaacagaaaagctgtatttcctgtttccttccttccttccctccctcttttcctttcatttttaatctgagagaagggttaaaaatcaacatttcagtagaaaaatgatgtattatctaaatttaaagttagctttttctgctaattttctttggaaggttcatttcagatacaaagcaacatggaagacgaggtatgacaaattcaagtagtaagacttttgacacctgaagaagagcacacatcctg

SEQ ID NO: 66470 - DNA, 2313 bp, Homo sapiens
ctccttattagcggaattgatttttttttttttttttttttttttttgagacggagtctcgttctgtcgcccaggctggagtgcagtggcgcgacctcggctcactgcaatcttcgcctccggggttcaagcgattctcctgcctcagcctcctgagtagctgggattgcaggcttgcgccaccacgcccaactaatttttgtgtttttagtagagaaggggtttcaccatgttggtcaggctggtctcgaactcccgacctcgtgatccgcccggctcggcctcccaaagtgctgggattacaggcgtgagccaccgcgcccggcgtggagctgattttataacaaccactcttggcttaagtttacttatctgtctactggtgagacagcattagatattctgaagggtccctgttgtgtaaatcgtgtattaaatcctaagcgtttattgagtacctaacaatttgttttccaactcgacgatgttcccagatccaggcaaatgccaacctcagcgttcccttttccgtttagtctctccagcccccgtccccacccacaggcaggaccacctccggggctgagaagtcgtgctgtcgctaggcctcccgagtgtgcaagcatgtggcagagaagggaaaagaaaggaagtcacattccgactacaggcctgggcacttgctatccatggggacaaaatgtcaccactggcagcaaatagcgagaaaaagtgcagcgcagtagggaaacagcgcgtccgcgggcgcgacaccacagtttgggcgccgacaccctccgcgcactggtccctgaactttacctggagcttatcccggtcaggcctgatctcgaaaacgagggctcctcagcgcgaaggcaggacccagctccattaaagctctcgggcagtggtcccctctacccactgaagcgatagccgggagggtattcctaagccaccactacaaccacccctcaattccggaacgcccccaatacctgcccggccgctgctgctatcgcgataattctcgggccagtctcccgtcagtccgctccacgccttccttctctgaccaatcatggaggagtcgtgggtggagttttgcttttgagcggagagcggggccttcaatctttgctatctggcgctgggaatgggcggagctgaagtgggctggggcggggctggggcggggctagatcggggagaggggcaggggcacgctccagttctcgcgagactggagaccaggaagacgcctgcagagccgggctgctggtgcagcagaggctgaggcatcaggtgcagctgcatccggatctcctgccttggagcgtactccttgtctctaagtcgggaggcaggacgtggtcaggccggggctgtggaggtgcgctgtgtcccctgaggcctagaggattcgggctgcggcccgtcggaaccagtcagggaggcgcccacactcctgacaggataagatggcggcgatggcgcctggaggtagtggcagtggtggcggcgtgaatccatttctcagtgattcggatgaggacgatgacgaggtagctgcaacagaggaacggcgggcagtacttcggctgggcgccggaagtggcctagatcctggctctgcgggctcgctgtcgccacaggatcccgtggccttaggaagcagtgcgcggccagggctccctggggaggcgtcggcggctgcagtggccctggggggcaccggggagaccccggcccgattatcaattgatgcgatcgctgctcagctgttgcgcgatcaatacttgctgaccgccctggagctgcataccgagctgttagagagtggccgggagctgcctcggctgcgcgactacttctccaatccaggcaacttcgagaggcaaagtggaaccccgccggggatgggggcgccaggggtccctggagcagccggcgttgggggcgctggaggtcgggaaccgagtacagcgtcgggcgggggacagctcagtaagtggacgcagcctgtcacactccggcagggtatttgggattgtacggagttactgtaggggagagggggtatttctgcgtgggtcccgatagggacattttaaggaacgagagtattggggtgggggcgctcttttgcggtggaagcaagaggatcaggcaatgactgttctctctgcctgcttccaacccttggctggtgttgcacttggctcctggctcccctactggtgtcagtatctataaaatatcaagagtttctagttcactggctattacgggactccagaaggttccctt

SEQ ID NO: 66471 - DNA, 1271 bp, Homo sapiens
attacccagtcttaggtagttctttatagaaatgtgaaaacagactaataccctattctgttattaggtgacactaatatacagtgaaatgcacacatgtgaagcatggctatgccacatttttgttatccattcatctgttggtgaacaattggggtgtttctactttttgactgttaggaataatgctgctgtgaacattcatgtagaagcatttgagtggatgtttagtggaactgctgggttgaacaggctaactcacggaaggaacgcatcattgtattcctctaacaagcacaatagtagaaatttagtgagtcatcagcttcttgctcaaaagtggcaaccaatcaattttcctgcactttggaattgggaggggcctctgctgttggctggcccatgttcttggtcagttgaccatccagcccatggttgtggtgtgatattatccaattcacatttctccatctcatttatatggcaccatgacagagcctttgccaacatccacacacatgaactccatgaattcccccgatctgctaatctagtagtaatccagaaaaagaaaaaatgtggttagtttggcatcacctattctaaattctactcatgactaaggctgaaaaactgactgctgaatgataggtactaatctttaaccaggaagtaacactaacttgttcataattcttagactccacatttccctctttaaaaaaaaaaaaaatctttacatcagaccctttgggtgtttgtcgtgtctctctcattgccctaattgttcagccatcaccccgcaacagctcccagccccctgcaatatgactcatctgagctcgaagttctgtctgctctatctcacgcactcaggatgttaaagctgtaggctcctccctctctgggtttcatagctctctaagcttatttttattatacgcttcctggtagaaagatcattttccgtgatacagaaacaaaagcgttattgagcagttctgagtagttctgcattcttcttggcagatatttacactacagtctcccttaggtctacgagttgtcttccttgttccctggctctgatagatcaataaagccctctgggttggccccagcatttgtctcaagccctgatctctacagtgtttagaacttcctcccgtggttcttaaaggtccaggcccttcttttgagaatgtctttggatggctggctacaggaccatttacctgtgggaactatcttggaataatttctgggtagtg

SEQ ID NO: 66472 - DNA, 1720 bp, Homo sapiens
cctgtaatcccagctactcaggaggctgaggcaggagaatcacttgaacccgggaagcggacagtgcagtgagctgagatcatgccactgcactccagcctaggcgacagagcaagattccatctctaaaacattaaaaaaaaaaaaaaagaaattctccccaaagaacatggccctgctgacacctcaatttcagacttctggtgccccagaactatgagagaataaatttctattgtttcaagccacccagtttgtggtgctttgctgtggcactctaggaaaagaatccactcttccagcagagagaagttacagcgtgccttgggggctgaatgttgatctgagcagtgtttaatttcctggaattctcaccatataaaattatagcaggctgcctctacacaagaggggtgaggggattgacaccatctgtgttcgggccacactgagtaacaggtgaagaggaaaaaatgaaaacatttaggatctctgcaatgctggtcccacctgggtgggaaaaaccaggattttcctctctccagggctgagagccagtttctgaagcctgcttctgtcttcagggagaggacattcatgtaatctgccaatgccgggttttttttttttttctttttacagaaacttacaggacacgtgccttcctctctcccctccttccctgctgttttcccagctgccaggaactccacctccgtgtccactctcttctctccagtcaagagtaaacgaaactcaagttattgggctttgaaatatcctagctcaattcacatgcgtcctgtttaaatccgtggtgtgttacctcggcttattcggatttaggaaatgctccatcatcctgttgactcagcgcctaaaataagaggcagatgccaggccacttacgcaaaagggactcccttggcagcatcctgcttgtagttaagaatgatcccactagatggagctccacttaaggtccgaccagaggttcttgcactttcctcttagtatccagcaattacaggagcaaaatcccagaatgagcaagaagcccaagaaggcagatttagaagacaatgatacttacccttcgcgtttgacttaattttcagattagacagaacttcctactgcttccctcattaataagatcatccacgatcaaattccttctacctccctccctcaaggtacaaaatgagcttgcaataaacacatgaccaaattgtaaaagtgcatggcaacaggtgagaaaatgcttatttggaggctctcagggctttgaggctgaatagaggaggtaactgtcaatcgaagttagtttggtcctcagcacagccagtgatcaggcaggcagagaaggcattgcagcctggcactggctggacagtctgtgccagttaacagcctcaaagagtggccagctgagaaggacaggatgattttgacaccatgacgggatcaagtgcatttccagttgaaatactcaagacagaagaaagaagaaaaaacctgaaccaacttttcccatcaaaatcactgtgtttaaatatgggggcaaaaccgtagggggctcaacggtaataaaactctgagaggtgctctcaggctgcccttgctttatgccttaaaagagacttccagtttgtattgtctatagaagactttactttttgtaagtggcaaagtttctgttaaacaccagcttcatgcc

SEQ ID NO: 66473 - DNA, 2996 bp, Homo sapiens
ggctcactcctgtaatcccagcactttgggaggctgaggtgggtggatcacctgaggtcaggagttcgagactagcctggccaacatggtgaaactctctactaaaaatacaaaaaattagccaggcatggtggcgggcgtctgtaatcccagctactcgggaggctgaggcaggagaatcgcttgaacccgggaggcggaggtcgcagtgaaccgagatcacgccactgcactccatctcaaaaacaaaaacaagcaaacaagcaaatgggcaaacatttaactgagtgatttctcaggccccttcagggcttggctaggaggtcagatggccttggctgggccatcctgggctgctgcagatggtgtcaaggaagtgaaagttcagatcctgaaaccgctgctccctccctcaggcgtggccgcaggcagttccttgtccccatcccggggacattgctgactttttagctggtttccttgtttggcatcctcagaaccattaggccctggagatttccagatgtcttttttaacaatcagagctggatttcctgggcaatgcccgcctcatgcaaacattcttattttttatggcactgccctcagagtgtgcaggaatgagttctaaaggacaactctggctcggcccaaggccatgcttccattccatacaccccctcacacaatctcactccaacctgtgacgcaggatggggtagaatcattattcccattttagagatggggaagctgagatgccaaagcttggaatgaaccacccaaggtgatacagcagccctttggggcagaactggaactagaacaccctcatccccatttctccttactcacccaccccagctccagctagcttagctcaggcttggcccaggcccagtaatcccggttacacaactgatatcgggcacgtactcagctagagagtataaatagacccagtgccttgccactgagaatttatgattcaaaaatcacaaggttttacattgagtaaccagatgtctttagaaatatggcaaaggagtaatagcatagaaacagctcatttctatgactttgtttatttgtgtgttttaaatttgtcacctatgtctggcaacaacacatttaggaagctgtcctaaaaaaagctattcaccagggatgacacatttgtggcacatgccctgaggagtccctggggatgtctgtggcacgttgcgactctatcacagctctgcccacttggcccagatgagcctcagaatcttccctaatccagcactctgcccagacacgtatctgacaggggatttcagctagtgagccaaattcgatttgctgtccctgccacacatttcaggctgcttattccaggaaatgtgaaattccggttgtttgccctttcagggagctgcagcctggtaaccttactcttctctccattcacaccacccccccaccccccaaacaagcactaggggcaacgagctgctgggaagtgctaagcacagcttaaaacagaagttacacacctgaggtctgtaaaacctcggcagaagtggccgcagttgactgtggaaattatttcattggtaaagcactccttcctgaatccttcccaggattcctgggcagatgttctttgtaaagccccctcccccagccagagatcctcatgtgcctcatcgccttgagaatcgcagctgtcttgaagatctttcctatttctgggaggactgagtcttgaaggtggagtcaaatcgtttggaaatgatttatgtggacatttcggccggggtgagtggtgaggaaggaaccctgagcgccagccacaccctttacccttcctaggacgtccaagtcgcatacccattaagttagtccgtcttaaaggtcaacatggggtaagtccgggattaggacctgaaaggagccatgagccctgtgctggggctaagttgcattcccccaaaattccacgtccacccagaacctcagaatacagcctcatttggaaacaggatctttgcagatgtaattaaggggggagatgagatcacactggattagggtgagccctcaatccaatgagagtgtcctcataagagagggaaagggacgcacagagacacggagaaggccacgtggcgacggaggcagagaccggagggatgccgctccaagcccaggcgtgccgaggaagaggcaggggacgattttaccctgggaccttcggaaagagcatagctctgccaacactttgatgtttggacatctgacctccaggactctgacacatacatttctgttatttcaagccacccagtttgtggtcatcggttccagcagccttctcaaactaatacactttccaaataatatacctgctcccaagtcttcactcaggttctgctcttgggagagaggaaacccaaactaagacagtaggtataaataccctcatattacaggtgaggaaactgaggcacggcttcactcacaaagcagctgtgggacccaagcacccagcagctatgttggggctcagatgaggctgagtccattctctacgctgtctgctgtggcgcatcagtgattctgaatgtaaactgaaggcctacggcagctttgtcagctcagcagccaagcaaatgacccgagaaaaatgggggcaatcacaggctacttggtgctggaaatggggtcattaaaacataaaattatcagacccttttgtaagcaatggttgccgtgagaaggcccatgaggcagtagggggtggggaactaatctctttctttacaccttggggaagcagaccttcaacaggctcagtcgccaggtcctttgtcgcatacatggtcattggttgggaagattcagttaatcagggcactttgcctgagaaaatcgctttaacaattttttttcttttttattattattattatactttaagttttagggtacatgtgcacaatgtgcaggtt

SEQ ID NO: 66474 - DNA, 3057 bp, Homo sapiens
tacctgtgccataggtaaaccatgtgcatattcagggaggtaaaggaagagaaggatttttaaaggaaaaaatgaaggggattacataattgttctgaaatacttatccctggctaaaagatcaacaacaagggtgacacccgtccaaggctggagaggcagttgctgggcagacgtccttacagaagcatttgttgtataaggctgtgacggtcttggtacaaagttgtggtctctgtagtctttcgtggtcaggcatacaagtgtgagaatcctctcttcatggccttccttggatctgtttgtcagagttttcttaaccttagtgactccattttgcttctgacaactttcacatccccaatgttcccactttggaatcatctcactttttcctcccatacttaatatcaccccaacaatacaataaggagtctgttttttgcaggagttagctattgtatgcagcaccgctagacttgctttccctctgtttccattgagttgttgctctgtgttgggggtggggtggtgcaaccactgtgtcatccctctctgttatctctgaaacacagagcttagtaagtaggaagggtcctttatgtcactactgatttgctggttaatagctaaacatcaagtcaggcaaattaacatgcttcccagttatgccctttctagtcctatgtggtgtggcctttgctaattatttgcacttccgttattctggagcgcttcctcccttcactcataagtgattaatgcaatgttgccggtacagcttcgcccaccaccacctccaactgttgccaactgtggtttggagaggctgggccggcatcccggaggcctgtttgtttgtcctagtattcattactagttggctctcctcccatctgctgccaatgcagagttatttatatcaaattggagaagccttggtgagctccgctgtgataactcacatcctcagaatgcctttcatcccaaaggactttacacgtggtatcctcgcaggaaaccctttcccgctgacccaggggtaaatcctggcttccctgggaagtggcagctgctggtccatctgcttggctgataaggcctttgcactcagattaagagccctggcccacaaaacgtgcggtggaacttgcccaaagaggtcgtgacagctgagtcacagggaatagcactgaaactgcgatcctggggcatggagaatgtctatgaggggtgagccagggtgctgagtcatgcctctccgcctggcactgacttgctgagtgtcagagcttccagaaggtgacactgcttagaagtcaccaaccttcccactgccagcctggtccatgagctctgcacttctgaggctgacatgccatcccctccaaaggatttactgtcatcagtatcacatttgggtgataattcatcagctctcattttttcaaccaatataggttcattacatccagcgtttcaccgtttgacacaggatagagctcaaatgaagggcttgtgatgttctggcagcagtctaactcaattaacagattaacacgagtccacaggcacaggtctccaaagaaattagatcgctccgaaagaaatcaggctggggtgggaaggtcaatcatcattttaaatgaaactgagaaaattattgacaaatttgtgctcttgttggggcttccagcaagtagtatcagagggatgactttgggaaaagagccaaagagaaaaatatatggcctggcaaaattttttatggagaaaatatttttttaatttcattttttttctatttgtagttttttatttcttttctctttttttttttttttttttcttttttgagagtgtctcactcttacccaggctggagtgcagtggcacaatcagacagagttcactgttacctcaacctcctgggctcaaccaatcttcccgcctcagtctcccgagtagctgggactacagatacataccactatgcctggctaattttttttttatttttaaatgtttttgtagagatggggtctcgttatattactcaggccagtctttaattcctggtctcaagcaatcctcccacctcggcctcccaaagtgctggaattataggcatgagccactgtgctcagccaggaaataaatttttaaatcaaatttattgacaggttggccatacactgtctaatcagtgcagggaggtgatcatgcagttgagggaaactgctaccaagaagcctaccccatcccatagcctccaggaaggagtttttgccaggggaatatcaatattgcaccaccagaccagtgttgaaattcagtgggtgcagggagatggcaggtgtgggcggtaaatttcaaaacacttattttgaaacgcccacgatgcctggatcacagatcctgtggctggcagaataaccagtgctgtttacacatccgtggagggtgaatcttcttctccggctatcagaagagcattgcatgctctgtaagagcaaaactctggttgcttggactttgtctcttaaatgcagcacttgccacagtatattctcactggttaaagttttccccctcctcttacagattcctttctcactctctgaagtttagttagaatcaatatcacaagttggacttttaactcaggacaagtagatgttaactgttctgtcactttcatttctggagaaagggaaatagatgggggtttgtagaatctccaggactggctgagctctttagtagagaaactagttttgtagactaacagttgatgccccaagataaaacaatatacatcatttatatcccacttttgttcattttggacgttttaagagatttctttttcatttgatttttatcatagtatattataaaatcaggaataaaaaaattaaaacctttgaaatttgattgttatttctgtttttcatgttctcaagccttttgatgcccttttcaccttaattatcatatatataatatatatagagagagagagagagagacagggcctcgctttatcacccaggc

SEQ ID NO: 66475 - DNA, 1228 bp, Homo sapiens
agttttattgctttgaatgttaaaaatagaagaaatacaaatctttaaaaacaatgcagaagttctatttcgtaacaaatcagccattttatgtttcctactagtttttaaaaaacgtattcgtgttatataattctacaacataggtgaaattttattttccttttaaatcataaacatttgtgtttctacataatttcatacttttatcaatgtttactgattcattgtattccatctagtacacatactacaatttacctgcaatcttttgctattacaaatatctacaacaaggattttcatgtgtatatggttttttcctttgttggaatatttccttaggaaaattcataggatggagattattggtctaatgggtattttttcttttatttgtttttcatgcattgaaatgtgttttgtttggaaagtttcacaacagcatttaaggtcacagggaacacttgtgtgttgcaaaaccaaggctggggatcccagggcctggcattgactctatcaagctttccactggtctagagacacaccaggctgtccttgaagcataaaggagtgcttttcagaggcagatagaaaaagagagtcacatctgaaacaatacagacatggtatacaaatgactacactaagaaaaatgatcttttgccttattgattttttttctgctgccgtacagcatgtgatgaaaatgaagttcccacttttcattttatctgtgactcatcagaaaatcttttcaactacattcaggactagcagtgggccttgttaataacaggcactcaacacatatttgttgaatcaaattgcagggaactgaatttttataggactttattccattattctgtttttgcagtggacatatagcatgaacatgaaataaaccattgttgtcatagcacggagatttgagggtttgttactgtagcattccgtagacgctccgggctgatatgctacctgtcaagtgctttatttgaaaaatggctaaatgcacaaagctatttgtagtagtatttataattacaaaagaaaagaaactatacctttgtctaccagattgggcaaaaaagaaaaaaaaagaaaagaaactactgtggaaattaagtaaataatggaattccacttcatttattatataatcattaaaattaatgtttacaaagaccttgaaattacatggaaaatttttatgttataagat

SEQ ID NO: 66476 - DNA, 693 bp, Homo sapiens
gatcagagaacataaaatctctttttatcttgaaaaaggaatcatgtgtttgtataagaggagtaattaactgcttattaatgaactgaatgaaaggaatattagaattttctggaaaatatttaaggccttggctgaactaacaaaatgacccacccctggggggtcaccccttgactgaactaacaagaggacccacccaccatacctgaggggggtgcaccttgagaaggactccttgcactgactgggtatttcaggtgaactagcgactcacctctgggaaaagagccaagaagcttaactgcctttttaaagatagtgtcagaggcaaaggtgagtcaacacagcaagctctctgtcccttggggccaacgtgcataatgctattgtagtaactgaagtgaaaacccaggctgtcattccaccacttttgaggccaaggcaagaggactgcttgaggtcaggagtttgagatcagcctgggcaacatagtgagagcttgtctctaaaataaggaaaaattcaaaaattagctggacacggtggtgcatgcctgtagtcccacctactaggaaggctgagatgggaggatcccctaagcccaggaggctgcagtgagccataatggcaccactgcattccatcctggatggcagagcaaaaccctatcttaaagaaacaaacaaacca

SEQ ID NO: 66477 - DNA, 1781 bp, Homo sapiens
acaacttagccaagcgtggtggggcacgcctgtggtcccagctactaaagaagttgaggtgggaggactactggaggttgaggtggcagtgagctgtatttgcaccattgtactccagcctgggcatcagagtgaaaccttttctcaaaaaaaaaaaaaagaaaagaaaaaatatcaagaaggtgttggcagaacatttagggcccttctgagctcagggtcctgtctgcatgggtcccctgccctggtggtgtcccgtccctgtctcctgtccccgctccatggctgctttatcacactatggagtcccactctgaggatgacgattgcttgtaccctgtctgagccaccttgggccactcagctgtcctcacagagcctccttctgaagccagattggttgaatatcctcctgtcttctctcatggcctcttgcacatgacctgggagtcagtttgcctgcacccacaatgggctctgcagtatgtctggctgctgcgagagctcacttacaccaacaaggtaagcatggtagccccaaggccctggtccagtggaggagccaagatctgatgacctccaagaccccctcaagccctgaagttctgtatttaattgaggctggcatgtactgttacacctattttcacagatgagtaaactgagactcagagaacgtcagtggctgcagcaaggtcatgcagctcacactgctggttaagagtttctttcaagtgtaacgtaggaaaatgtacaacatttattggttttacttttgataatactggctcatatatagttacctgctaggtctctgttaagatcgagactttttttttttttaaatagctttgctggctaagtttcagtttcgtttcattttcctcctatcacttaagtttcagttctgtttctcaggatattctctttccctttttactagtattatctgattctgtttgttagaattgttccttggtgccctttaacctgattaaaatgaacagttattctaaggtagatattcccaagcaggaattttaaacagaggtaaaccttagtaccttgccaatttattccagcattggcaaaatgtatctgctgtagtagagcataaatttgtccaatcgctgcctgagtacctatgtgttcgtggcttgatttaccttatctgtaattcctggatgttaaaaggacaccaaaaatctctgacaccctgattagcctaccttgaagaacccaagcccaggatttctgcctttgcctagaaaaaggactgattcagaacttcctgagctacctagtattctggccataaagtggaggaaaggaatctataatcccattttcttcttttcattcatagcttattctcagttctgcaaaaatccaaactgccccagggctcatgggacaacataaactagaaagtttgtgggaaagatttaaactggccaccaagtggttagacactcgccagacctgacggcacttggcggggttgggggcaggggcgggggtggggaagatccaacaatttggacaatcacatacttcagacacgaaatcactaaaatgtttaaactctaaaaactgtctacttgaaatttaaatccttgatgcctcctccatatttgaaattatattcttttttattcagaaattatgcccaattttgatgatttggaaaacagaaaaaaagtagaaagaaaaagacaaaaatctaaatggcaatccaggcactaaaactcatcttagcattttggtatattccctctcat

SEQ ID NO: 66478 - DNA, 931 bp, Homo sapiens
aaatgtgttataaccaggcacatagcataaaatagcatacacatagcataacatgagcctacacacacacaaagcaaaaagttaacagtgccctccaccaagagataattttaggacaagagaaaaaatatatcctaaaagatagcattgaaaagtaaataaattatattccaaaggaaaaaaaaaccagaaacaaaggtgtaaaagattttccccaatcttaatgctttaaactagaatagtaagggatggaaaatataccatttcctgaaatttctaagagattttagtgattgggatcaatagtagcaaaacattggtggatgccaattctctcctgtgtaaaagatatgtaagttcagttctgagtgattgcacaagggtaaaggtattgcaagcgttcacagatcactcactctgcacataatacctttgccccaaataaccatttgcaccttttatacagtaaaagaattacagccattcttttagtaactagtccctaaaacataaaggctttctttcctctttcaagaattctaaaccatgagacatgtactatacatattgaacacataaagagatgagaacacatgtaaagatgcagaacacatgtagagtttttgttatagttttttctctcttcaaagcatttgtattttttgaatgaaagagggcccaatcattacttaatccaaatcctgaaacctgtaggtagatatacagtaactaaggcataaagaagagcagatctattcactgactgggagttgaaaaaaaaaagaacaggagacaggggaagtgtttaccatgagttgtggtaaatgaatctatatattctattacaaggtttctacattttgcataaagtggaaacaacattaaagttactgtgaaaagttaagaatgtctattgcacccctatagaaac

SEQ ID NO: 66479 - DNA, 2544 bp, Homo sapiens
caaaatcattaaatcatggtatatgtcacttatgtgtataagctttgatcactatattgtttaatgttggccaaagctataaacacccaagtaatcattattgattacaaatttgaattctggtataaaatgtatgcatcaactattgtggagagttcatatcaaatggcttcttattgccaaggaaaatgcccctttgactgcgtcacatataaaactcaatttgccagcctgggcaacatggtgagactctgtctctacaaaaaaatacaaacaattagccaggtgtggtgtcacgtgcctgtggtcccagctacttgagaggctgaggcaggaggatctgcttgagcctgtgctccagcctgggtgacagagcaagactgtgtcaatcgatcaataaaacaaaaatcaactcggaggtaaagaatttatttgctcactagatatccagatctagacagctggctcactatgaacctgtgaatatctagcaagattaatattattactagttgcctaagtatttcaccctaagctttagaaaagtgggaacaggagatgagatatgagtagaagatcccagggtagttgagggtgacagcaaaaaagggcaatgacgtataagtcctcataataaagttttcttggctgtaaattacatctaaagactgtaaagaactagcaaattacaagaaagagtgacttttatatattttgccaacctcaaatgtgctgaaaacagttctccctctcaccctttcatccccgaaactgattcaggcttcagttcacccttttactgaactgtgaatgagcctcttaggacataaacttgtgaggtgaacagagttcagcatatgctctcccaacagatgttccagcaccaccgcaaagagttacaatgtgattcttatctttctgcatactcctactacatagctgtagtaggacttctaaatttaaagtcttaagattttttttaacccaccttttaattaaccctcaaaagatccagctgagttttaaaaatttggactatgttgctaaaaaaaaaaaaaaaaaaaaaaaaaagtaacagtgcgagtgtaaacatcttggaagcctaaatctgaaaaacgtaacaaaactttttttttttaagtttaaagcctgtcaagttggtagcttattaaattcctccagtcacatgaaattcacagcagaacaaggattcaaaatgggttaggcaccgaaatgtcatttagcaaatcaatgattcccaaaagatagaggtttaggggcggggaagggagaggcttttcctaaactatccaggaaataattttcacagagcgttacagactaggagcgtccccagcagcgctcaccctcggccggccgggtcccgctgcgcacctcccggccgcgcgtccccacctgcgcacggtgcctccagcctgggcgtgggcgcggcccgggatcgcggcgccggggccgcaaaccggggccgcaaaccagcgccgccacccgcgtccggacccagtcccctgtgagcgacacctggcaaagtttcacaaggtgggagacagcccaccgccggctttcaggaagtgcactgggcggtgaggactcgaacgagctcgtcccggggctggcgcactcacttcggagaaacccctgctcccgggacgcgttcactccggccgcgcaggcagcccgggcaccactggcggaggcggggcggcagctggcaagcagaggagaatcaggagtccaaagccgggccagggccctcaggaaaggtgagagcggccgcgtccctccgctcacgtgggcctcgcacgctcctcaccgctcccgggctaccctcacgccgccccacggccccagcccgcgtcctcctcctgccgagcaccagcctttaggaccgcacggaagccgccgagagggaggcggccggccagcagttgggcgtggcttcctggagaaaggcggccccccagggggcggggagagcgacgtcaccgtcgattcgcggtgctgattggcggaggtgaggtgcgcggagcccgcaagcttctccgcccggcccggctgctccacctcctcacccagccgctccgtcctcaccggctcgcgagggaacagctcaggcaccgccgccccggctcagcgcggacggcggagagagggaggcggaaggaggacaccctcgctcgcttgctcccacccgcacccgggctcccagaaccggcgaggagcccagggggaggagccgtcgcgggcacgccccgcccccagcccgggaagacgacgccagcgaccccgccggccggccaccgcccccctcgccggccgagacccgcccccggccccggccctcccccggcggcatggaggggccccgctcctgacggccgcgccgccgcctcggcccgtgctccacctcgcggcccctcccgcccgcccccgctcgcatgtctgcgccgccctagccgaggatgctgaggatgaagctgccgctgaagccaacgcaccccgcggagccgccgcccgaggcggagg

SEQ ID NO: 66480 - DNA, 4233 bp, Homo sapiens
gcgcggccgggcgcgaaggcgccttcgcgccgccgccgcgactgccgccccccgccgccgccgccgccgcccgcgggcccgtcgcggggccctctgccgccgccgccgccgccccggggactcgggccgcctgttgctggtggagcggcggcgggggcgggtatgccgggcggcggcggggggccctcggcggcgctgcgcgagcaggagcgggtatacgagtggttcgggctggtgctgggctcggcgcagcgcctggagttcatgtgcgggctgctggacctgtgcaacccgctggagctgcgcttccttggctcgtgcctggaggacctggcgcgcaaggactaccactacctgcgcgactcggaggccaaggccaacggcctctcggacccggggccgctggccgacttccgagagcccgcggtgcgctcgcgcctcatcgtctacctggcgctgctgggctcggagaaccgggaggccgctggccgtctgcaccgcctgctaccccaggtggactcggtgctcaaaagcctgcgcgcggcccggggcgagggctcgcggggcggcgcggaggacgagcgcggcgaggacggcgacggcgagcaggacgccgagaaggacggctcaggcccggaaggcggcattgtggagccccgggtcggcggcgggcttggctccagggcccaggaggaactgctgctgctcttcaccatggcctcgctgcacccggctttctccttccaccagcgggtcaccctgagggaacacttggagaggctccgcgccgcgctccgcgggggccccgaggacgcggaggtggaggtagagccgtgcaagtttgccggccccagggcccaggtaaggcgcacggagcctccctggactcgcggtgcgatcgctgccccggcggcctccccggcctcgctctcggacgccccttgcccgagccccagcccggcgcaggtggctcggaatccccacccggcagctcccagcgccagagggctgagcttcgtctcgctgggccgctccgttccactcccccaccccaccccacaccccggcagacacagccacccgccatcacagaatgctctagaagtcccttccgtgccacggtgttgccacggaagacgtggagctccccgcccggggcccctctcggaggaaaagtgtcgggacgtttttggctctgagcatctcagcgctcggtgcgggagccgccgggcgctggaggaacctgtgtgagagccagccgcagtgagccccaggcagcgccgtccttccccgcctgcctggccggggctccgcctcccgtctccgggctctgccgggccctcggcggggtgtcctgaaggtgcgctcccggcgagctgcccttgtctttggcacagagggactttttttgcccagtgtgtgcctgagttaaaaggggtcgtacgggtccttgtggcttctgctctgagggcttgtgttcccagcagacatctgacgtagagacctgcgaatggatctgagatgagtagtaacgcaggttgtccggggagagaaaccttttctagcgcggcctgggatgctttttccctccggcacacgcgctttctcacgggcttgattcctgcctacagattggggttccgggatatttgttgagcgtttacgataggcgttaatgttgcccaaaagaatcacttaaacaccaaaatgtagtagacgagaatccagatgagacacttgtcgcaaacattaaagatgaattttttttacagccatgaaagcaatttaatgataattagggtccagtgagtctttgaggaggacttttccatgggaaggtggggagtaggtttcagtaagagtgagaactgtaaagtgagattatttgtggggtcacaggcttttgaaaggtgttgatttggatgccatgtttttcagcttaggtgatctctaggagataatggaaaaggggattttctcctctccttgcttgaacgttaattcagtatatatatatctgctgtcattcagtaccccagaactaaaattgggcatggtatttcactagtggctttgtggactcagtacccgtggaatcaatggatttggggctggaaggaatttagagataatctagcctgaaccccttttttaaaacgacgcttctgtgaggtaactaattcatgttttgggacgtattttatcaaactcagatgtaacgctctagtgcccagcattatctcggtgagtttgaaattttgtcatcttccagcgcctgtttaccactagcatgcagtgcgtgtgctgatggtaaaagcctcctccactcttcagcctactcgttaatttcccaaaagtcctatatgccgcacagccattaaatttagagacaaaaacatgaattcaggaacaatgcttatttaaaatgttattgtaataacatacaatattgtaaagatagccttaaattgcaggtctaaagaaaatgtcccacagtggaacctcatatcattccattcatactattccaacaaaggtacttgatttctgattttaactgctgaaagtctttttttctttcccttttctttctttaaattttgtttttaataagcgtgttggagggcaagtagagaaaggggagggatgcatgcagaccagagtaatgagatttttatgttgaccgcaatgcgtgaccttttctgcaaccagtgagtgctgggagggatggacaaagtgaggttgggcatcctgccattaacgtcagcacatcactgcttctcaggacgtgtcaagtgaagtgggggaataaatcataggggccgcgtactacaggtgacactgggctatttctagatgcgtggtgtgtggtgaacttctccagcagttgtttagggttaccgtaacacatcattcacatctcattaagttgttacgaccccgcattttctgctgcgtagagtgacctccgagtcccagctgtggcttgttctggccttgaccttttatctgatgatgttgctcccaggctgtcactccagaggccgctgatgtgggtgggctgagttaagccctcattcgctgcagtccggcccagctgttctcggcctcccgccgccgccgccgcgcacccggggagggcgggcgcacctccccatcgtcagggatgagcccaaagctcgcgcgcccctcgcgtggaggcgccgcgacccgccttaggggctcggaggtcacgcaacgcccggagctagcgcacggcgatatagggtccgtggcgcggggctcctccccgcccccgccctgcaagatggcggccgcgcgcgcctcccacgtgaccggcgcgccggccccgcccccggcgcccttttggcctcttcccgcggaggccaggctttgggctagcgccggagacttccaggcggactcgagaaccacgtggatgctgcgctgggccgtactgggccgtggcgataaccctggtaaagggaaattcgtgtggcagcatttcccccgccccccccccccccgaaagtaaccttttagacacaagtatgcaattttaattgggagtcattctttttcttaactactaagtgaagctctttggtgtgccaaacgacgtattttcagccttactattggttaacgtaaagttagcatctttttaattctcttttctattaaagtaagggtatactggcccagaatagtgcacctggctctcacaggacttccttgtatccagtactgaatcagcttgtctattaaaaaatttaaaaactaatgacatttacagacagaacatgtctttaatgccaattttatattacatgctttgaagttgactgggcccagcaactgttagtgacatgccatggttacaatgttaatagttgaggtataacacgtacacaggttgccggtagaatatatactttttaggctacattggaaatacaggaaagctcaacaaggatgtttttacttttaagagtaacatttctagagtttttctattatttggatgactttatggtaaatattacattggattacaacttaaatgtcagcagtttttttaggaggcttgtacataaatctcacattcctcacacaactgcggtggactgccagtaacttgtacaaaattcagcaaagaggccagggagcagtagtgaagtcactcactactgtgagtgtcctaggaactctgtgtgattgttacaatcctgt

SEQ ID NO: 66481 - DNA, 1727 bp, Homo sapiens
cttagggtcttctatttgcctaattttttacagaaaaaaatattaatgtatgtttactgcagatttgtaaaatcataattgattcttaaaaccaagttgattttgatatgagtagtgttttgagattctgcacataaagggaggggataaggtgcaagctgtaataaaaaactgtcataaggctatttatttacttacttaatatgatgttgtaacagtttgtatgtgacagtgcttgatttctggcgagctgtttgtaagtttggcatcacctttattactccaagcatcggatctaggagtcaaagttaccccggttcactagtgattggctgagcaaactcagttaggtttagagcacccagttgctgttagatgactgaaccttaatggtaaactccctgcctgtacatattcttgtttagaaatccttggcatgtattgatgatacctttcataagactttttcctaataaagcatctttttagactgttattaaaaccaaacaatgaataaaaatggtgtagtgattcttgtaaaaagtacacatgccgttccctatggaggattagtgtaaagggcaccatttgttatgtgttcctttgatttggattcagaattgacatcattggcaactctgtatattattaagcaatttcctgtgtcccaagaaagctaggacagtcaataattaatagagtgctcatcttctgcttgcggctctcacactgtgcctttgtgcccatagtgtgcagtcacctattggacctctaaaaattgccactaaaatggttgttagtaaaatgagaagacctaaatctgtgattattactcttagtccatggtttaagttaacgtatctccctctttctcatctagaacaactctgctcatggtgattacatgcaaaataacgagagcagcttaatagagcaagctccaatacctcaggacggacttaccgtggcacctcacagagctcagcgagaaggtatgctctcttttttgtaaacttaaagcattaatacatcaaaagattacagggtgctctttacgctgattaactctaaactttttactctcctttttgaagtggagaagtcctactggtcctaggcttcactcaagagccagtcctcctagttctgccatctgcacgctgggtgtttcctgcgccacagccctgcttgtcctagcacgcacacagtcattctgctctgtagtccattgtcttggctgaatcttaaacctggttgcatgcttctggggggcagagacccccagagtatttagtatagtgctttatttgcagaattgagctcagtgtctactgagaaaatgaattttatacaagttctctggaagagtaaataagttacttacaaatccattcttcctgcaataatgcagtttttaagagggctggaatgaatgggtggaaggacattgccatctgaacaggaatgaattcaaattattctttcctctttgcatttggggagccattaacctgtgctgggagagaaactgaaatggaaaatgtagactgccatctgggctttaaaagagccaaggatatatgataagcttcacactcagttataacaattttgaatttatgtcattatgtctcctttttttttttttttaccagtaataatcctttttgtgtaatacatttttcctcacagaggaaaaataggtctgaatttttaatgttgaacat

SEQ ID NO: 66482 - DNA, 636 bp, Homo sapiens
cccctggtttagatgaacccaaatgtcctctcaatcactaagattctccatagcttcttgaactcttgagctttggagatcattctcgaagtttctataaataaaagtggaaatcagccccctccttaaaaccagtgagaggcttagagagcacagtaatcatgatgtttctgtaatcctcccagaaccgaatcagaaatggccaggacactgaggcattcacatgatagcgaggagcaaagtgcaggcttaatgtgtccttccaaagtccacatttcttctgctagcaatttcttaaattgccacagaaattgaaatggataagaattttggtttgtcaacaagataaaaaactcacagataaagtgagttatctgctttttgttcagaccaaaaggtgactttaccagaaattatgctggacatctagggaattaatctggatgagtgagctcagcctgacataaagatgcttcaatgcccttcttagcaatgatgctgaaatagcaacagctttagcttgctgaggcaataacagctgccagggcaaaaaagagaaatgagaaaatcaaagccattctgaggtatgaggcagcaattaagagaatctccccttgaagggcttacttaagtaag

SEQ ID NO: 66483 - DNA, 733 bp, Homo sapiens
ctagtcagcaagaggacgcatttcccaaaagtccacatctgtgtgggggttgggtgcacgaagcatagcactgagtgattatcaggggagacacagtagttcaaattgcagttcaacttctttagcccatcatccacttcctccttagccctgttagtgacaccattaaatgaccagtcaccagatttggaaaacctcccttcagcctaataaaaatccactgagtgtatctgtaaactatgtcacccctttgaccccctcattatcactcatgtagaccaatgcagtagcttcttaaccctgaaattcttatcccacccttgccttccccggctccactctaacacaatggcttccctttaccttaagaaaggaagttcacacttcttagtacaagagtccgagttccccactaattggccatccccctccttcatcagcgtgtgccctgtgaaatatagtgaggaatggccagatgttatccttgatctgatctgatgttgtaactctcatgttaatttatgtgcctggcacaacgaatgactcattgcttaaacatgccctatatttctacctgggtcctgagctcatgttattcctgtgcctgaacggccctcctgtcacctcctatctcctctcaagctgacctcaaacattcagcaagtcagaacaattcttcttcttgtgttataacaatggcatttaacatcttttgtcttgtgttgcatagggt

SEQ ID NO: 66484 - DNA, 3624 bp, Homo sapiens
agacttcaagagcaatgggaaacaatgaaacctcagtcctttgctattttccttttcaggtacaggagagggagaggacagacttagggttgtgccttcgaacaagcacattcaacgacagcctcagttagaattcccagacgctgcctgtcttcctgggtcttgaaaaagtggggaaaaagtgaggttggcccactcagactgccagtgatgctgtggtgtgacgggtgtgtatctctatctcatacaatgggcgcaggtgaggaccaggacctgcgaccttcgtacgtttacagtccctgaaagccctcacctttaattagtagggaaaataaaagtcatctggcaagctggagtgcgggtaaaatacaagttaatgaacatgagcattcgtgttcattaagaactctggcacagagttcaacggcagagggcacaatactcactggccacggccagctgctggcggccaggagaagcagaaccaaaggaccgctgggacttgtagtccaccatgtttccctcgggattgccgatccccttacgagaaccacaactcccaaggtttaccgcgcgcgtcggtcttcactgccctctccgaggccggctcaggaacctcccgggaaactgccccccaccccgccctcgtacgcacgcgtcacgtttgtttaccctgaagctccgcctccggccatcccctggctctccccactcctccctggaatgccgtcatgccggcgatgaatatttatgaggcacacgcggccctcccgccctgccagcctcccgccttcccgctcccggcgcatgattaatattcaatgagcccagatccgcggctggttcgccgggttgaggcgggggtagcgggcggggccggcgctggggagcccgcgacccgggcggggagggcgtgtgtcgggggggcggtggcggcgaggcgggcgcgcgggatggaacactgagacaccgacggaatgctccgaatcgccacataatcccctggaacggccgcgcacaacgccattggcttctcccttctccgcgcgccgccgccgtctcccacctccgcctcatcgcctccctctccgcccgctgcctccggagctgggggggaaacgcgaagccccactgcaatggagcccgccgccgcggccacggtacagcgactccccgagctcggcagggaggaccgagcttcggctccggcggccgccgctgcggcagcagcagcagcagcggcggccgcggcggctctggcggcggcggccgggggcggccggagtccggagcccgcgctgaccccggcggccccgagcggcgggaacggcagcggcagcggggcgcgggaagaggccccaggcgaggcgccgccggggccgctgccgggcagagcggggggtgccgggcgcaggaggcggcgcggggcgccccagcccattgccggcggggctgcccccgtacccggggccggcggcggcgccaactccctcctgctgaggagagggcggctgaagaggaatctgtccgcggccgccgcggccgcctcctcgtcgtcgtcgtcctcggccgctgctgcctcgcactcccccggcgctgccggcctccccgcctcctgctcggcctcggcgtcgctgtgcacccggagcctggacaggaagacgctgcttctgaagcaccggcagacgctgcagctgcagccgtcggaccgggactgggtgaggcaccagctccagcgcggctgcgtgcacgtcttcgaccgccacatggcctcgacctacctgcgcccggtgctctgcacactggacaccacggccggcgaggtggccgcccgcctgctgcagctgggccacaaaggcggcggcgtggtgaaggtgctgggccaggggcccggagccgccgccgcccgggagcccgctgaaccgccccccgaggccggcccccggctggcgcccccggagccgcgggactcggaggtaccgcccgcgaggagcgcgccgggtgccttcggggggcctccgcgcgcgccccccgccgacctacccctgcccgtcggcggcccgggcgggtggtcgcgccgcgccagcccagcgccctcggactccagccccggcgagccgttcgttgggggccctgtctcttcgccccgcgccccacggcctgtggtctccgacaccgagagcttcagtctgagtcccagcgccgagagcgtgtctgaccggttggacccctacagcagcggcggcggctcctcgtcgtcgtcggaagagctcgaggccgacgcagcctcggccccgacgggggtcccgggccagccccgccgtcccggccaccccgcgcagcccctcccgcttccccagacggcttcctcgcctcagccgcagcagaaagccccgagggccattgacagcccgggcggggccgtccgcgaggggtcgtgcgaggagaaggcagcggcagccgtggccccgggaggcctccagtctacccccgggaggagcggggtgaccgcggagaaggcgcctccgccgcccccgccgcccaccctgtacgtgcagctccacggagagaccacccggcgcttggaggcggaggagaagccattgcagatccaaaatgactacctcttccaactgggatttggggagctgtggagggtgcaggaggaaggcatggactcggagattggctgcctcatccgcttctatgcaggtaaggaagtcacctgccttgacgggtggttgcaaaagctgccgaggaccgaggagtgattcaaattgcttgtcagtttgcccaacccaagagtaagtgcgggtcctgatgagtctttgtcttaaactttacagctttttcatacagtctgtgtagtactagattgagcaatctttaaatctgcacgttttatcaatcttgagggctcagaggttggaaagcaatgtgaaagaggtggctgaatcaccaggaagtacaggaagcagatccctctgaaagcggcaagagcacctttaaccataaaggtgcttcctcaggggcatgttgggtttcaggcagtttgggatttcaggtaaactgtcacgtgagcataagacggacagaagaaatgacaataaaaatgctctatcacacttttgcctgcatttgactgtccagttgagcgttctagctgtatgtgccaccgggagctcctgacttgtcaactggtgcctttgtttattcagctctgccacactcataaattacccacggagccctcattagaaatctgacaaaagggtgcctttttaactgatacttttccccagcgctttttttgctcgatttctgtttcgtctgcaagtttgtcttgcataaaaaaaaagattttgcctgtttctctcattttcttccagcctttatggtcagaactgaccaccgcaatacgccttgcaggaaggttcacaagaaggatttaagtggttgctatttcttcagatgtgtcctgaaatcttcccccgtcttgtttcagtacattagcaaattcttgactaggggtgacccatgtaatgtttctcttttggctgaagatttggctagtactaaattcaggagctatagatgctggatattgtacttgagttttctaag

SEQ ID NO: 66485 - DNA, 1464 bp, Homo sapiens
ctgatgtcttcagatcatctagctattttatattcccgtagcaaagttgtgttttgtagatttttaataaaggtagtttgagaactaggatagaaactcttgagaaagaaccataattgctcactcttcatatgatgaattgctaaacagcagtaagagtggaaaaaaataatagaccgttcttgattttataggccctggtggaatggctgtagagttcggttgttttttacttgctcaggaactttgtatttattgggctagcagttgttggcacaaaggtttgtttgtgttcaaaagtcactgattagtggtaacagaaactttttttcatatgggacactgtctttttttccctgagtctacttagtcaattcagatgtggagtgcttgcttcccaaggtataaggtgctttgaaggctgggggaaaagatgagtcaccagatcctctgccttttcagaagcttaagccaattgcacaaggacgcagattatcataaaacgtaagacagtactatagggttcttcctctcaatttcttgcaaatacttcttgaactttgtgcctcttgtgtgccactctttaacaagaaggtccttgcccttgtgacttcaaagtagggagtaaacttaccaaatacttttataaataattgtttaattgtaattgttatgtgtgccacgaggaagaaatctagtatgcagtgaattcttgtttaagctgagacctgaggactgaatagtagcttgggttacagggtacgtgaaagagcattgcaaatagggaaacagtgtgtttgaaagccctgaggtaggaagcccggcaagtttaaggacttagagggaggaccagtgtgaatatagtgtactgattgagaatatcaggaaattgtaaggggccatataatgggtgtgtggtctggggctaacttctgcctgaccgaatgctttggtcattatagtttttctcctcttaaattcaatgcaaaataggtagatatatgaattctctgttaagtctagctacaaaggcctttgaggccagtgttttggaattgattttaagataatgggaaaccattccattgagttatcaaatgttctttagatttgtctttttcaaggacaggtgccatgactatcatttcctaactttttatcttatcagtaggagggagaaaagagaaaaggaagataaaagtaacgcggtcttttctataatctgaacacacaagaacaaccactttttctgttcttcctatgtacatgactttcttcatcttttagccacctacacagctgtgtagttccttatacagctatattgattgactctatgttatctgaggccccaagatgctcccagaatgcaaaggggtgtggtctgagaataaaggcatagtctttttactggcttcatgtaattttttttttttgagatggagtcttgctctgtcgcccagg

SEQ ID NO: 66486 - DNA, 1718 bp, Homo sapiens
tggctttcctgtcttactggttttgaacttgggctggaaaaataagggtgttaaatattgaatctcttttacttcaacaccaaagacttcatctctaaaatcgagttaccaatcactaactcttaagagttatgtgagggtaacaaatttaaaatgagaagtttttgaaagataaactgtctacagatgtatagatttataaatgttcttgggggtggaaagtagaaacaagctgggacctgttattttataattaactgccatccacagattaaattctagctcctgccagccactctcctgccagatccttggattacaagaaatggtggagggggtggcagtgagtggatacagcaaatgaaaaatatctcgctttgagcatttaactcggtatcaggccctaaatcatagtattatgatatctcagtatatggaaaggagacaatatcagatcaggaaaattaattttccaacaggaatggggaaggttaaaatacataatttcaaaggagaccactaaaaccgagattccttcagcttttcaaaagtgccacaatgttatttggccttctctcagttaatgaacagtgggaaatgtgcttacattggcttaagagagccaaaaccgcaattcctgcaaccacttgagaaagtcctagaatttgggagaataaacccattactgtataaaactagagagaaaatcatttgcagttttctgttggatttgatccattcttccgtacatgaaaagttacggcccatatatggcaaaacccaattcagtttttgagcgctttaaatgaaatgattgaacagtttggagcatgacttgcctgtggcataggcgtgaaatcttaggtaatgactcataagaattactgttgccacagagttttagaatgcaagaattgatctgtctctgaaaatatttatatttgattgcatttctaaataggtaagtgggtaacagctgtttgaatctggtggcatgtgtgtttggaggcatgggggagaatatagactgtactgcttttgtgttagagaaattgtgctgttttattttttcctatctggttaaatagagtacaatagcagaaaaccaatcagttcagggagtggcccatttcagtgtggccctcttcatccacaaagtggtttggaatgaaaaatgctaagatgcagtatttggctggcacttagataactaagaaaagagaattgacttaactgtagcaaagagagttgacgtgaggctcaagtcatcttagggctcctaggagaggatgagaatccattagcacctctatatctggggagaggggtgttgccaagaaggcctgttttgtaagtttgttttcattgacactgaatttaatttatatcttagaaactatccagagaagtctaaagttaaaagtttgagaactgcaatgtagtagtcaaagaggccacagcttggatgaaaaatttcagctgctatgattagagaaaaacaaaaacaaattaaaaatcaatattgtctcccttttttcaagcccctgatcagtcagtagtcaccttgagaaccaaagggattgaatacagtggagaggatccaaaaacggaaccagacatgacctgtgaggcaggaagtacagcatgaacttttattgaaaacagctcaacagtgatatcattggctgacgatggaggaggctattttatatctctct

SEQ ID NO: 66487 - DNA, 5264 bp, Homo sapiens
tctcacattaaaacacccttctcattggtgtcctgcatatcatgtctgccttctccaatctatttccataatgccataatgtcataggttattactttaaaattactccaatcattcgtgttactaccctgctgaaaaatcctcaataactgtcaatttcccaagagttgcctaaatctaggtgatgtcacttgttggaatctccatgtcataccatatgacaaggagagagtgaatcagccagttttctatgtaaagaattaatcaatccctaacttggaggacttagccataacttctgttattatatttactgcattctattgtcattattttgttagattgaactctttttaatgtattacctttgatattcttcccagcacctcctagaccattgtgatacaggagactttttttgagggaatagttgaggaaccttggcagttaaaaagacagcgctggaaatcattgacttgaagggcagactgggcagccagtaaattttgggtgctatgttgtttttaaaaatcattttatacttagaggggctaacttaaagagaataatctggaagactaaatatagcctttagtttaattaggaaatagcttctgttgaaccggcagtgaagatgtgatgaggagaatggtaagagtaaattcattatttattcttttggtaggaataaattcattattctgaactccctctgacttattgtataccgtgcttattccatcagggccttgctgttgttttgctcagagacatagctatttaagtgtaagattacatatttttagaaataatacaagcgtgtgttcaaattaagtttattctttagagggtttttttaaatgaaagtagagctccaaaaaacaccttgtaaaacttctattactgctattctaaggtagtatacaggctaagtatccaggagatagaataatttagtctgtggagtaactgttagtttattgattaatgtttatagcttgatgatgtggtatagattttgagtcattctttagcatatttgctcatattatgctttggaaatattttaaattaagccttctgacttctttggtcccacaaggttagccgtaggcttgtatattgttaattcagggaatgttagtggctggagtaataaactcagaggctattgaaaatttgtaatgattttgttgtattcatatgtaattagaccctgtcatgctcctatttaaaaccttccaggggtttcccattgcacttagaatgaaatctgaatgccctcctaggccttcatgctcagccttatctcctacccctcctccccttggtagccttgcttccgctactctgcctgagcatgaaagtgcatgatctccttaggcctttgtatttgtggtcccgtctgttggtaatcttcttttccagaccttcagatttttttttttcttcaggtttcatattaaatgtcacctcctcagagcaatcttcagcagtctccattcctctctagtcacctattccattacactattttaactgtctccatggtacttgtcaccctgcctcttgttggtcagtaatcctcaggagagtggttgccttgctgtatggtttacttactgcagtatcccagtgcatggagacacacagcaggtgcttggtgagtgtgcagagggatgaatgtcatctgtatcatcatcctcactgaagtaactgacagtcagaaacaacttgtgactaaataggtactaattgatatgattgtctgtttaaattactcagtaattgattcagcttttcattacgtagtacagaatttaattatggtagaaacagatactgtcttttgtggctggagctatgcagattacagggttctgtctcgtattcaatttgtcgggtcatgatttctcatcatatcaattctttaatgtagctaaataatactcttcttttggttttaagtttcgattaattccagaggtgttttgggacttgctgaagtatcatcaggccatgtgttctgttttttttgagttaaagcttggctgaggcaggctggtagattgagagctctctgggctggaggtcaggaagcccagcctctggttttagttctgccagtagccaactgtccacatgaatattttggccctcagttccctaatttataaaataatagagttgaatgaaatggtctcaaatgttagtctttttttaacagtgtataattatgtaattctgggcaagaaccagtcattttgcgcttgtgggaatttttataggttgtatgcgtatgtggtatatatgatagttgtccagttaccattacgcttttcaagaaggaatagtcgagtttgttttacttaactgaacattaaaacatctgaaggattcagaagtggtctagtttatttcagtttttgtttgttttcatttttgttagtggctgcaataagaaatactgtacatgatttattgggcatattgatttaaaaattggcagtattatttaagtggataataaagttttgtcttaaggatacttatttggccttctcacagtttgaaggttctcaacctttttcttctttggaagtcatttgagaattttatgattgacttggcctcatgtgtcctactttagcacatcagttttacttaaggttcatatcattcttcattgacattagatatgcatcagttttaagaaatcttatagaatgctgaatgttccattccgtgttctgtagttcagtgctcatcagaatcaccttaggatttgttaaaacatggattgctgctccccaccctgagtttctgattcagtaggtctggagtgggacctgagaacttgggtttgtaagaagtccttaggttatatcactgctgatccaagaaccatgcttggagaacctctgctgtagtttgtcaaattctttatttgcatgtgctggcagcattttgattaaggagtcttccttactgtatactgatgcatctcaacaatacaccttgtggtccttggattccctcatgctatatgatacctcatatcctctccagcttcttggttagtgtgatacataacacagttttcaatgccagtggaactcttaacaacaggatgctgccagtaactttaaccttccaggttgtgtgtttcaatgggaaaagcatgcatttagacatttgggtttattcttgagaacactggctttggaatccaaaaggccttggctcaaaggttagctttaccacttatttgactatttgagtttgggaaaactatgtaactcttctaaatcttagtttccttaatttaaaaattgttgaaattttatatttgcctcataagatttttgggagagcttaagtaaattagataaggtatataaagtgctccgtagatactcaataattgatggtcttagaaaagtttgtacatcagtctaaatgattataactttgatgtggctttggacaaattttctctccatttcatgtcttgccttaatgtgggttgctcacctaacctgcctaccagggcctcgccatggacagtagacaggtgtctgcttcatcttacgtgtttggaaatgctatgtcttgttcctgtctaacctggctctatcactgggctctcagttttggctcctggctccacatcaggcctttcctgccctggtgacctgttgctgcctgtttctctgacgctcaccttcacttgtgagagtcactgggttctggagtggttttgtattcctctttctggctccatgtgaaaaacagtgtgattagaggtatatctctaccctcccacctgggataagatgattttttttttccaccaaattaattatgttaaatatgtgtgattttaatttatagtcaaactgtcttctgcattttaagctccagttttaatgctgcatgttcattagaaacatagcctcatgaagataactttgatttattgtattttcttaaaaagggcctatattcaccagattttcattagcttggaatacatatgagaaatttttagctgtgagtcttgctgattggaatgaagattcccctaagaaactgttttagtgactaataaaagttttgtaagaaagtgccagttgcctccatcacaaataacacttggtagcagtgttggaggttcagtgacttgtcattgtttcacattcttttttgttatggtcatgaattctctgttgtcctaagtcctattgtaatatgttttcagccatacttttgatttcatgcttttcagatgccaaaggggtttgtctttgttacatatttacgcaaacacttcgctgcctatttcctcttcactttactgatgctcctcttgctcaactggaggatgtctgccaagaggcatgagtctgcctgtgcaggtgtctcctaatcctgatttttgcttgtatttgtgaacatgtggcaagcctcttctgctgaaccaagtaagggttgtggagagagaacagaggcaccagacatagactaaggtgtaaggagcaagatgtaatagtttaactcaattggattttttaattgggtggaataattcagggttgccacacaatattatcacctaaaaagatgtgacttactgtgaaggattcaatactaaataatggggctctctctgccatatatattcttgcttaaaagtatcttagtacagtgcagacatattatatacaaatttaatttacatgaattcagctatatgcactccatcttttatattaactataagtgttatatatgtgacagaattcacaaatgaaggaatttacagcaataatttcaataatatgtgattttatcctattcactgactttaatatctatccctaggtaagatagggataaatctcctatcctataaattcttacctgtaaattatttgagggaaggagaaataacaaggggtagtgactcttggcggtgttaaagatggcatagcaaaaggcagtgcagtggtaatttttgacagattaagatcagatgttttcggggcaaagcgctatttgttttttgacttccagtggtctgttttttgacatctgtttgtgctgtagtaaaattaatttatttacttttataatgttttaaacacttagccatagtttgggttgcttccagctctcataagtaaatcactttgatgagagtttatgagaatctttaaataatttagggaccaataaaatactgttcttgccagaagatagaa

SEQ ID NO: 66488 - DNA, 706 bp, Homo sapiens
aagtaccttgttaaaagtaaattccaagtttgtaaaactcagaattttcagagctgtaataataatagtaaatatgaagtatcattgtgctttacagttatattggcctatttaatcctcacaacaggaaggtgttattgtttttaccattttacagggaggaaactaagacagagaggtcagtagagagagtaagaggcagaggtcaaacctaagctgtctggctttggaatccatgttttggaactactgtgctgcattgcttccatgatgaattagtagttaaaagaaagactttgaacctagtagaggagaggaaggaattgttcaaacataactttaaccttcattcctttccctgccaaggtcccaggtctttttgtattttgttatttttgccagatagtttatgaacttggccgaactttacagatggaagtatttgaatatttgaaatagggaagagttgaaggttattagaatagaaaaagttcagttcttttcttggtgcatagtcaggtaggtgcctttagatagaatgtgccagggaccctgtccataaacaaagacaagagaaagcatttgagcatgattattctttctggaaaatttgttaaaaacatgaacaaagtgctgttttggtcagccatctgctggaagagagaataaacttgttatgaatttacagttgtttcagaaaactgtt

SEQ ID NO: 66489 - DNA, 588 bp, Homo sapiens
tttctgcttctagattagtcatggataatgcatacaaactcacctataacatctttcattatatgcagttaaaattctcaaggggaaagtgagtgagggtggctgaagaatgggctgtttgtctcgggggagcatatgaaaagaagagtctctgttgtaaaaaccctctcagtttgatatttactttggttcatgttacttgttttgttgtttagcgagtttctgcttatgatcctaataataacctatttagagtagggctttattttctagagtgccttgaagctattcgatgctgagctggcttctccggctacctgcattctttgcatgacttaatagtgagcttttgtaaacatgaactcaatctttaggggtaagaatctcttgtcactgttggtggaggagacatagagagaagttcagctgaaatccacttttacttaaccagaaattccctttgttggtatttgtgcaaattaagttgagagttgaattacagctaattccttccttccttgcttccttccctccctccctccctccctccctccctccctccctccctccctccctccctccctcctt

SEQ ID NO: 66490 - DNA, 1234 bp, Homo sapiens
gcaaatttttaaaatggacgaaaattcaccaatccgtttactatgaagatagtaggattatggttatgttgttgtgtcttttttttttttttaacttccttttcttttaaacttttgttaatggggctgtatttatagtaattagaaaacatttaagtgagaactctatggattttgtgtgtggttctaagaagttttaaaacaaagcttctaaaatttccaaaaggtaaatcttagtaataggctaattataggaggttttataattttttaaagagattcctaataagttgagagaagccatctatttggaatgggtttaaggtatttttctgatgtcatgtctatacaagatagcttcttaaggtcagtttttgaacttttgaatccagactcaacatatttaatgtgatcagctttgtagggaaaagggcagtgagttgattattatctaatgcagtagagaggagtggaacataaagtttttaggaaattgttttgctcttggaatttttgtttataaaagactaatttaaacaatagctgtgtattacacagtagaaagtaaactctataacccaacctcctagttagaaccactggaaaagaatttttaattatattgggacttatatgattgtagggacgtggctcttaatcattgtctgaagtcatcttggccgaagtctgtttgcagcaaagaaaatggaaatatagttcgttttttcaccgtttgaagagagagaaacagtggtgtagattatcccaaaatcattcatgcttggctttcgaatttttattttattatgtacttaggagtgtgtgtatgctcagaagaaacaccacagcactcctgataaaagcatgtcacagtgaaaacttgactcagttggagctgtggagctgtctagcgtcatcatcctgatttccacacacacagcagtgtgcatcacctttgacacagtcatagttcttatctaaaggaggtagctacgtatgtttgttcctttagaggagttaagagtaaataggggtatactggaccttagacattccaagagttaacattgagtcattcctaaggcctctaaatcctcatgacagagtgtaattggtaatttttctgaggctgaaatttgagttaagcccaccctgagtgaggcctgctgcccagcttcattgtttcagcgaagttcagttgtgtctccttgctcatgacattgcacactttaac

SEQ ID NO: 66491 - DNA, 1596 bp, Homo sapiens
tatgtatatatataatataatatataattatatataatatatattttataatatatatatataatatctagtgcttttgtgtttaatgtaaaccagaatcacattataaataagacaaataaatgctgatatttcaggtaacctgtgtaagaatgtttttatatctcatttagagaattaagtgtaaaataatggggtggattgcagtccttagtgccttggtttgggtgttgtttttgaaatgacaaaatctctctagggtgccaggagcattacaatggaatatgctttcatatttttgaattggtaatttaacttgttatccaagttcagtgtgattcagattgctgtgtgatgtaattatttgtcaagtgaatgagtaagggaataactttggaaaacagttaagagaaaatttgagaacagtatctagaaaatcattttgaaatactggccacatttgaattaccaggtaaaaaccattgcctgatgatgagatatcatttaggagagttggtttctcttccttttagagaagaagcaatgggtagagagtttcggttgatagggcttagaaaattctctcaacctaatagacaaatggaggttctaaatgtgtaaggcagcactcctgcagggaaaagtagggaagaggacccttgtccttcagattcacatgtagaattaatgtgatattagaagtatacttgtctggttttaaaattattcatatgtttacaaatgtgaggagatgaggagatattaaataccattgggcttttatatttataatttatcatttttattgtgcttttgtatgtatttatatcaaagtggttttatgggttgaaagcagtgagtcaattgcctacgctctgctttgttcagaataaaatgcctaactaggatcaaagtgcagcacatttctttctgtatagagatgttgatattttaaatcaacttttaaattattaactttttctttattttggaatacttttataattacagagaagttgcaaagatagtacagagagttctcaaacatagtttcccaaccccctcactcagtttagcagatgtattaccacaatatatctctcaagtataagaaaccatcattagtacttaactctgaactaacctgtggaatttatttttttgtttttgtttgagacagagccttgctgtgtcatccaggctggagtgcagtggcacgatcttgggtcactacaacctccacctcctgggttcaagcaattctcctacctcagtctcctgagtagctgagattaaaggcatgtgcacatgcctggctaatttttgtatttttagtagagatggggtttcactatgttggccaggctggttttgaactcctgacctcaagtgatccacctgccttgacctttcaaagtgctgggactataggcgtgagccactgcgcctggcctttatttggatttcactagtttttccattgccttttttctgtttcaagatctaattcaagataccacattgcatttgattgtcatgtctcttttgtctcctctagtgtgtgacagtttttcacttttctgtttttctttctct

SEQ ID NO: 66492 - DNA, 1067 bp, Homo sapiens
atttctcctttactgaggttcctagaaggttggggagtggtggcatggggctgcttgggatcattccagggtgtgatgacctgagaaagttgtgggagtaggggggcttgttttgttttttgttttgtcagcaccttctaggctcagccatcttcttctgatgagctaagtgccaggggtctctggtgagtgaccccacagatcttacccagaggtgccacacagccttcttggctctgatagaggggtcacttctggaatagcctaagcagaagtgcagcaggccgagaatagcctggtcttggagaggtttttgactaaaagaggtcattgagtgttgtgtctggtccaggaagctaatccaggaacaggaaggtgctgtactgggagccaaggcatggaggccagagcctccctccctcccgcagagcatggcgcccagcccgtcctcctgactgccccgtgctctttgcctcctccctctccaggtctcatgtgatgtgtttctgtgcggctgctggcccaacctcttgactctcctctctgccaaataccaaggccagctctgtctccttttgacctccgaagctgtggatacagtgaatcactttttctcctaattgtctcctctattcttggcagacttccttaaaagaaaaaaatcaatcgcaagattaatattaaccacaaaggacatgtttttctacttttttttttacatctgatttttcaatctcaatcgattcagtttgttgcaactacaatagatgatggttaaatattagaggcaggagcttggtggcaaaggcatattgatagaatttatatcaaatactgaagtttgcaacataaaaatgaatcactttattatttcctatagacatgcagctgctcaaaacagcatgctcccaggtcacaaatgcgtgtatcgattagcatataacacatgcctattggccttgagctaagcatccaggactctatggcccttgtcccccaggaggaggaaattcaagcaaaagtctttggttctcactgcaacaacatccatgtgtgcgcccagcctg

SEQ ID NO: 66493 - DNA, 471 bp, Homo sapiens
ccgcgcccggcctaataatatctaatttgtagggaaaggtaaggattaaataacgggcaagaataaaatataagtggggaggagcatgactgtagttaaggctttctaaagtcctcaacaggagcataaagttattaattaactttaaatgttgttagcatgcttgtttgtcctagagtaaccactaagaaaaagacatattgcatcatactttccaaataagtggaggtgggaggaatgaaataaagaaaaaaaagaaacattttaaagaagtaaagaacgaaaaaactacaaaatagtagaacaaatagaaagtacaaaataagatgtggataaaaatccagtaattactataaatgtaaaagaactaaactttctggtaaaaaggcaaaaatcgcatggctggattttttgttttaagtgtaggtgtatgctgtttaagagacatacgtcttaagcataagagtaccg

SEQ ID NO: 66494 - DNA, 476 bp, Homo sapiens
aactctaacgtgggcatgtggacagcttgtggtgccctgtagctctgcaccatgggcctgcaggtgcacagccagtcccatggcctccagaggagcagcgcaaacccttagcctgggtggggaaggagcacagcgccaacagaactactgctggagtgggcccctgtctatcaccagcacctggaagtgccccatcccaggcctgtcccagcccggcatctgagctaattacagctccgttgtggggagagtcagccgtgtcagtttaactgacagcccagataagaggtactgggcagagtctcacaggttgcacaacaaaccactctgccaactgagggcagaggcaagtctttttcagtccctatggtcagaaacgaatttcctggatggctgtcttctccacctcctctccatctcttatttttagttttcaggttggtctgaattaggttttggctttttgggggtggggt

SEQ ID NO: 66495 - DNA, 2006 bp, Homo sapiens
aagggatgtcttctctggatgtgtcctacttctcagccataaacaatatccattatttatggtaacttttgatgataagttaataccccaaccaaaggagtttatggttttcatccctattcctcgggcaatggaaccatacatcactcaagattacagtgttattccctttggatgcccccaggagatatttcttgtatctcctagaataccctcttgaaccaaaagtttccacatttaagtcttttctcagaatgtttcattctccatgcccgacccctccctgcttggaaaatgcagagaaaatccatcagtcatttttgggttatcagactgtgacaaatttgtttttcaagcttcagaagattgttgaactgcgcttccccgctcccccccatttcagataactcaaaactggtttggatccgtgacatcaaccttggcatgtatgaagaacgaggaatgaggactttgccttgtttggaaccaaaagagaagaatatccattttctctctctctctcttttccatttttattaagtcagtattttttccttttagccagatgatgtatacttttaacattccaggaaaaaagtgtcagtgatatgcgagtcataataaaagaaaatcaaaagaaatgcaattacaagggacagggaactgtatcatttttaatataaaatgcccagatgaaaatctaatttaaaaaattaccagcaccatataaatgagaaaagaatataagaaaacatttgttattttaaaaattagcttaatccttaatctttctggctcttggactttcaactttatttttaaaggccaaaaatggtctttcggtgctggatcaggagtaaacctctcaatgatgcaatgagatactgtgaagtggcaacgaatttccctggcctctggcctgctgcctggaatgtagtaggaaaaaaaaaaaaagttgttaaataaaaacagtgaacaaacaggatgaaataataaccttctcattctccttattatagaggtatctattacaaacaaaaacaaatattcacatggcacgctgttgttgagaaagtgcttccatatagatcatctagtgtggtcctcccaacaagccacagataagttattactgctgtcacccctcttttagagatgaccaagaatacgtaacttttccaaggacacctagttaatcaattatgaaaccagaactcaaacccagaattctgacataaaatatcctgcctttccactcaatcacgcggcctccctaaatgtagctatgactcccagctaaacgggcctgcccagagccacgaagtcataagtgtgcatggagcagcgacgtgcttatgctgacacctctgtctctttgataacgtttacattatgagaaaagaatcaagctcatttatgtcagcagtccacaacctttttggcaccagggacgtgttttgtggaggacaatttttccacgaatggggtgggggatcatttcaggatgaaactgttccaacacagatcatcaggcattcggttcccataaggagcacacaacctagatcccttgtgggcacagttcacaatagggtttgcactcctaggaaaacctaatgtcgccactgatctgacaggagccggagctcaggcagtgatgctcgccagctgctcacctcctgctgtgcggccctgttcctaacaggccacagacccataccggtcccgggctatatgtataagttgcaactgttggctggtgccagacgactttcgcttgttctgtctctgtttctcttctagcccagggagatgtcattctgttaccctcaacccatgtgaggggaagctggaactattcacgtatttacagggagagtccgaataatcatgcagtaacccagccttcctttcaaactctttgcttgatgtaatcgccaattttcatttcaggcctgaaaaataacactgttatgacagtgaccggcagatgattaacagtgaag

SEQ ID NO: 66496 - DNA, 765 bp, Homo sapiens
gggctcatgatgccaaacgtctggtggaggtcggcacagggcgggcagaggtggcaaatggcagtgtcctttgtccccaatcaacagaactgagctgaacatgagactctgagaaaggctcgggacagcagggccacagcacgtctcctggcctccagggacagtcaacttgaggaggcgacaaatctcatttgcaaaggtgagaaactgtacagcaagtcaacagtatcggatgagtcacgagacaggacgtgattgatgtcgggtgggcgtggaatgtgctgtgcattgcgtggggagggcccttagtgggggtgagcttggtgggaaaaggagggtctcggagggtccagctgctggggtggaggccacaggggcccaggagtgcagggtgggcgcggtaaagagactgccgttgttgcctttaggctgttctgctgctctctgcttccccctgttggcttgggagggaagagtagggctgttggctgagacggacgttagagcgagcaggtgagaagaggctgggaggaaccggcaatgcagcgaccaggagcaggtggtggagcggggaagagagagggagggctgcttggccagatgccaggcactctgccaattgcaggccctgcagatcttgccccgagctcagggtcaccttgaaccctctcctttctttctccagagtgcttgtcgcaccctctcccttcctggggccctcactcatgttctccttggaggttagaggcccatcctccctctccc

SEQ ID NO: 66497 - DNA, 1154 bp, Homo sapiens
tgttcatttgcatttggtgaaatcccccccttggaccaatttagtaagcagtgccttgggcttccttggtgattgttctcttgtcttctgtatattttttcctgtgaaaaaaatttagactcagccagtgaaatgaagttgcagcctctgtcactgatgctttctttttgctcagatgatctttccatctcgcttgggacagaattccttcttctttgcaacgaatgaagaccttcgaggctcagctgaggcccttgtactccaagactttctgaaagctccctcgcccctccccatctgaccttctgttggactgacatacttctccatatttcagcctcagatggcttggtgttcaccactagactgtgttactgaaagttaatcaagggtcctagggccatttacaaagtgggactgtaagagaaagtctagctagatggaaatgtatcctaaatacccccaagtcccagcacaggggttcccatcaacaaaaagcctcacctccaaatacattgctgaggacgcagggccccgtcttcccacctgacgcactacacaccacgtcagctgtcacaggaggtctgagtgctttatgaagctgcctgctttctctcttacctccatgtgtaagccaaccactctggctttcagaaacatatttctttctctatgagtaatttaaaagtgactcatcctcagcctcaccagccggtccatgtgacctgcagtgctggttgagtgttatctatagatgtgtaaaccaaagcagttcttagaacacagattccccctcccacgtgctgttgatttccctttgctacacagggagggaacgatgtcagacatgagcagccagggactgcccgctccgcactcaaatctggaatgtgtccattagaggaaacaaaggccatcacccagtgacagaaaagaagagacaggcaaaaggcctaatatatttattttagtattagcagaccatcaagaagctctgagaaaactccacaaaaattgaagacgatgatgacccatataaacaaaaaactgctcaaagttctttttctgagccagtagaaatttagacctcatgaaacagagatgacacccacacccaccccaaccaaaaccccaccaacacgtcttcattgctc

SEQ ID NO: 66498 - DNA, 1976 bp, Homo sapiens
acccctctcccagcccggggactgtggtatggaggccgagagaggcccattttaaggaagaagcaagacatatgcaccatcccatccaaggagtaaacaggcgggggggaggtgggcgtggcctcgatcaatcacctcccctgaagctgcaccacatgcacattttaggctggaaataagaaagaatttcctggctgtaggaattgttaaataatagggcggatgaccaagggaggttccggaatctcctcttgagatctttaaaaatgcgatacaagatcgcatgtctgagatgatttcttgcagtcctggctagagacagacggactaggtgccttaacgggcctgaccctcctcccaaggcatatgattctgtcttttgctttctcttacccttagcaatatcctcagtgcctcctttatatgttcatccccctggtgaagctcacttactgccatccctcaggctagttttcacccaatccctagcctcctcacacctttccttgttattttatggaaagctggtcaaaggtcagagttgcccaactccccacacatagtttggtggtagcatctgatacccagacaaaacacggcaaggattccaataccagcatattgaagcttaaacaccaaatctggatggaaacagagaattagctgttgctaacaacccattgtaaatgaaaatatgatcttggtaattgattttaaatagttttttttaaaagaacccttggccgcatttcatcaagaatacagagtttcaaaagcgttcattccagggttggattttttttttttcctctttcttctggcttaaaccccaaatggccaagatcccagtctgaataaacaatgtgggtggtgacttttctgtgaggcccagtagaggatgcaatcactttcttattcggttcaacattaaatcatgtgaaactagcctgattactccacacaacttttactccgtaatggagggcaacacaacatgtattctttctctgcttctcagggagaaagaaatgaattctcctaactgggagtgtttaattatgtataaagttcgttgacctcacaggcggctgtcagatgatcttgctaaggcctgtgaacggcatcccaggaatgcagtgatgtgggcagaaaccgagtgagttcatgccaccgaatgctttaaatgggaccgaatcagcagccgtccagaaagactccagcgaaaacagaacttttggataatcagtaatttaatctcacctaagcattttgaggccttcaaaagtgattgttataaatcagaaactcaggaaaaatcccataggcatggggcccataacaacggggtgaagtaattttgtttgctggttattgccacagctggttggaaatgtatgtatttgcaatgttctgtccccgttttagaggtaatgctttctgacttccctgctactgacattaaaagaaaatgatgaagcaatcccattcataaatacatggtggggcctgaaggagtgtgcagagtctatgtttatttacagttttgatataatgcagcctccacatgtgtatgcagtaactatacctacttgtcagtaaatgccttgaaatgtgttcttcctacgcagagggctgggttctcctctttgggctcagggagcggaagggtaccagcaagatgagcgtatggattgtgtgttctcttttgtctctacctggagcatccccatctgtctattgtgaaaggaccaggaaacgctgggagacgggctggcatgtgcttcttggtaacgagagagcagagcccctggagagctgtgggatggctaactgcgggagccctgctactccgggtaggggagaggcgggggcctgtgaaataggtgggcttggtgcttcctataacatttaaattacctgattgggggtccaatattatgttccttcagtagctttctcaccaaacacacatttta

SEQ ID NO: 66499 - DNA, 948 bp, Homo sapiens
aaatgttaaagggttgttttggaactctatagcaataaattcacttaaaaaccaatcacaaagcacatatggaaattagctgacccaccaagcatatttcatggtcacctattttgtatattgtattcctttaaagcgaaaaattcttatcccaagaaataagggtagtagttttgccatttacgtcatcatgactgagataacttgatatgataagatctcagagttactgagtgaaaggtctggtgctaggtcatgctgaacttgacactctcctgggaaaggggaagaaatgctcccccatcctgctgtccagcagatcatctggtctctaattttactgctaaaatccttcccgaggttattaatgcagaagatactcctttttcttgataaccctctggaaaatatccagctagaaagagcacaatagaatctcacaagttcagcaaacacacagaaaagtcaagagtaactacgagaatctgatgaaaacaagatgtcccggcctgccaccctggcctgatttgagagtgcctcacccgtcattactcttgtctcgctatcaggtcacctttcgtaaaaaatacaactttgaaaaggagttggatttgaattgtggccgacactaataggatgcaaagtcctaggtcaattgcttggtttggaacaaattcaactagtcctttccaaggtatgaggaaatatacaacaaacaatgtaccaatgagcaccccggctgacattttgtgagatgggtgactccaaggtgtagatcttcaaactgcgtcagctatccacaggttgtgatgaaacagttctacagatttcttctaagaaggaaaaaaaaatgaaatttgagtctttccattatgccaagcttctcctcaacaccagaccaagtaatgggatgaattctgtgccttaagaatatgagaaaacagaggc

SEQ ID NO: 66500 - DNA, 2103 bp, Homo sapiens
ttgtaaaaccaaaacaaatgcataaggcaacgatcccatcaatcttcagcactctccagttatagctgatttgaaacttcccaatgaatcaggagtcgcggggagagggagtaaaaattaggaggatttccagatcgattcccagacttctgcttcacagaaatgtcaatccgcaggaatcccaaccggagatctcaagagctcgagaaaaaaaaaaggcagcggcggcggcagatgaattacaattttcagtccggtattcgcagaagtcctgtgatgttttccccttctcggcaatttacacgcgcgcacacacgcgcgggcacaggcatgaatctctatccacgggaccgcttcacgcctccccaggagagagacaggggagaggggacgatgaaggagccggggacggaggcaggaatcctcttctgattaaactccgaacagcaaatgcattttccgaaaagctgctggataaatgaaggcaggacgcgcctggcccgccggtgccgagcgctagaagcccgcgctgtgtgtggtgcggcgaggggtggggagaaggaggtggtgggggagggttttattttttccctcttttcctaaaaaggatgactgctacgaagttctcccccctggaccccctcttccgctgcaccccaccggcgcaccccgcctccgggctgcgcaccctttctcctcctcctggtcctgcgcggcggcgctggctacggccgcctcccggagctcccgccgcgcagcccgctccgagcgctgacggccgccggcagggagggcccggagccccggcaccttcgctggcagcggcggcggcggcagcgcggcggggccacggagagcggcgggcgggagcgcggcgggcgggcgggcaggcggcgcggaggggcgggcgcgggaggaagggggcgggagcggggctgtggtgcctgtcctcttacttcattctctgcacagcccgaccggtttcctgtgcgtaacgtcacacggttcattcaaaaaaagaagaaagaaagagccctcctctgagccacccgaccgccccctccgccccgctccctggcccgggttaaaggcgccgcggcaggcccgggagtggcgcgtcccgccgggggcacatggcgcgcggggccgcggccggggagggcgcgtccgggccggccacccgcccgctccgctgcgcccgcggggcccggccagtgggtggcgcgggcggcacaggcctcccgcgcggccgcggcgcggtgggtgtgcgcggggccttctgctcaggcctgcggcaggccgcgtgcggacttggtggtcgctggggtccgcgacggggtgggggctcccggggaaccgcacgcggccgggccgggcggacgacggagtgcggaggggggcggctggcgggagggtgcgccatgaaaacaagggctggaaaagcgccgggaaccgcctggaccctttctggccgtgtgagtgtgtgtggagtgtgtgtgtgtgtgtgtgtgtgtgtgtgtgtctcgcctggaccttttctagccgtgtatgtgggagtgtgtgtgtcgcctggaccctttctagccgtgtatgagagtgtgtacacgcgcctacacacacacacgttgtgttaccggcgctcggccgccgggggaagacccaggccaatgccgccccccaccgcccccagcagtgggacctcagcgctgccctgctgtgaagacaggtgactctgcacgttttaagcaatgtctagggacgccccgagcgtggtgtttactttcaagtagcttcctaggtgtccgcgcactacacacgcacgcgcatccccgcccgtgtccacctgaacacctagtccgtggcccaggccatgcagaactcagcgctccagggaaggggtttatcaagggctttacgacagtttaagtcaatgttttccctctgtccctaacaccttttacactggtttagtgctacacgatgaggacttccatatagtaactttcaggcccaccgtcctaacgctggggtgggtgggctcctaaaggtctccacctttgcctcgtagccaatcctagttggccgcactttctcaaatgaggt

SEQ ID NO: 66501 - DNA, 1742 bp, Homo sapiens
aagagaaagagggaatcctagtaatgtggacagaaatcagtcggacacatcagaaacagtggagtgtgctcgttcactttaagtgagataaaatggtcacaaagcattgatcagcactcagaaatggacgcacggccttggcagatggcagttctcaacaagtgagtccacggacccctgcgggcccccaaggacaaatgattgtcctaataacactaagacattcattgtcttttccacagtgtgttgtatggaaaatacagttttgcctctgcaaaactgcagagacatgggcaagaaccacggggttcttgccaaactgtactaggagtcattgtcacctctactaccacacgcactcgcagtaataaataatacacaaagaaaatacaagttctaaaattcttttaaaaatcaaagtgtcagttttgctttaaaatcctcttgataaagcaggaaaattcatcattttgttcaatggcaaccctcgaggacatgtcttcttaatactctgtgtgacaaatgagaatgcgcccaacgcgcttccgcagcactgcattccagggcgggacaactgcctggaacaaaagtccttgtgcagctcctgaagtcaagggctaaactgccacttctttcatggagcatcatttgtattgtttatttatttattttcgacagaatctcactctgtggcccaggctggaatgcagtggtgtgatctctgctcactgcaacctctgcctcccaggttcaagtgattctcctgcctcagactcccaagtagctgggattacaggcatgcaccaccacacccgggtaatttttgtatttttagtagagatggggtttcaccatgttggccaggctggtctcaaacccctgagctcaagcaatccagccgcctcggcctccaaaagtgctgggattacaggcatgagccaccgtgcctggctggagagcataatttttatatgaaagaccattgacaggaaatctatagtaattcagacttaggtatgtggcagatgtgcagaaagcgaagcaagcaagtgtgtcacttcaggaaaaacaactggccacgtgtcatcaatgtgaaatctgagccttcaagaaaaaattaagatttggaaaaactagtatccaccatcacgagactgtcagctgcatacttttatgataagatcagcagtaatactgatgaaagcgatttttctgatcactcagtcaacccatattttccaaatgactaatgcataatgttacgaaatcatgaatggttaaaagatccattcaaagtacaagacggaccaatggaatttaatgtaacagagaacaaaacattcattgatgtagtttccaattctatactgcaactaacctttaagaaactaccatttgttgagtttgggtttgatatcaaaaaagaatgtccataattatctgaaaagcctagtaaaatagtcttccctttcccaactccgtatctgtctcaggccagattttctgtatatccttccatcaaaacaacattattacaacagatggaatgcagaagcagctatttgaatccagctgttaatgcagaccttaaagcaactggtgaaaatgtgaaccaatgccaccgtcctcactgaacttttgttttgaaaagtagtaaattttgtttaaaaaaagtcactttatatatatgtgactttatatatatatatatgtgactttatatatatatatatgtgaatata

SEQ ID NO: 66502 - DNA, 288 bp, Homo sapiens
ctgcaaaaagccctaatgggcagattcttcatcccgcaaccaccccttcacctacaaggattctaaaaccaaagtaaagggccggggcaactagccaggtgaagcaactagctggatgcatcatctgctgcaaaagggcagcagacctggggtcaaggcttggatcgtgttgtgatttctgtcactaagtaactatgtgactttgagcaacacactgaatttactgaaaactgggttttcctctcatcaggtggcatcacaacatctccctcacatactttacaaaac

SEQ ID NO: 66503 - DNA, 2486 bp, Homo sapiens
atgctctataaactcaagctctgaaaggatccaaggtttaaagccacgcttttgaggcagcagttctcttgcggatgtaaaactttcagaatttagagtgtcaagttttgcctttctcttatttattttttgtaatgaatccacactctttccccattaggaacaggaggtgttggaaaaagctaatagctttacaaaggagaaattaaacagatacattttctcattcacaaacccttgtacagatttaaagcatactaagaaaaacgaccatcttattttataccagctcagcggggaggctcggatctccggtgcagagataggacaggaagaggtgtgcggccaattttgtaaccaaccctccttactcctaactcctcgcctcactgtgcctcgggtttgggagatccaaacgagaatgctcgtgagaaagccactgcaaacgggaaagtgctgggcgcaggcaaggaggcattctctctgtttaagaaaggtgccacatttgcagaacagggatcgctgaatatgcgagcttccgccaagaaataaatcacacctatccacctctccttcattcctcgcacacaagccttgtcgtttagctcatccttcccactagaaaacagcaaaggattgcattggagcagcaatcagcagatgccacgctgagctcagagacaagcagtgtagacgggacaggcgtcccaataccgctaagccaccaccgccagcccgctgggttctgagcagtttccccaggtgagtcacttcctggaatcctctggcagcggctcttcccgtcactcgcacaggccatcttccagttccgagctgcctcggcgggtcccggcggctgggaccccacttccccgctgtctgcccccgcccggggccgcgcgccgcaccctgcacaccaccgaccgctgtgtccttggcaaagtttctcagcctctctgtgcctcagttgactcatcggaaaaactgaggacaaaacatccacatcccagggatgttgcatggattcacgagcagccacagaacccctggggccccgggaaccctgcggccggcggggtcccccgtcgcacgctctccggccctaggaggagcccgaggctgcggagggcgggtccgcgaggccgggtgccggggccgggggaaaagcgccggggtggacggcggcaggtgaccttccccatttggccatgccttcctggggaccgcggcctggaaaaagggacgtaggctacgcggcctcggcggcggaaaggccgcgcgggccggtaagtcggggggcagcaacaggaggccactcaccaccacatgcgccccgggcagggcgaggggcttggggctgatgagcggagacaccatgtacagcagcagcacgaaggccacgaggaaggcggcagccagcagcagcatcgctccgcggggccaggggcccggagcggccgggcgggggccgccgggcaaggcgcgcagggctgggctgcggcgaggcgagaatcacgcgcggcgggcgggcgcctggagtgtttgggtttgcgggccggggcgggccgcggcggaggggaagaggaggagccggcgcgcgcgccacccaggcggggcggtgcttccagggggcgagtaggccgccaccgccaccgccaccgccaccactgccagaatcgcctctcgggggtcgccgggtgtctcccactcccccggcctcgggacggggcccgcagtccgcagcctctcccgtggaaaccgggcctcccgtccctgtgcgtcgcgagcgggctccggacagcgccagatgcgagcgcgccgggaagggctgcgaagactcgctcttcgggagctcgaatggcttcttaggaccccgcagggcgggtttccaggcctgccacggcctccagtgtgggcgtgacgagcgctcctccctggagttcagccctcggcttgggactgcccgctgggttgctcggaggccccggagcatcggaaagggcggctggaggctcccggagcgggctcagcctgggagcccagcgactacgctctgaaatcccgggctccattccatattttttggcgtttttagaagatggtcacggcccactttcgcttttcagaggaccggaaagccttaacagggagttttgaggaatcactaaggtaattcaatttcattgagttcagagttcatctttaccaagcaggttcaaaacaaataaataacgcaaacaactcagctttattaaggtctcattcacgtactataccatacaattcccgatttaacgtgcgtaataggccgggcgaggtagctcgcgcctgtaatccccgacctttgggaggctgaggcgggcggatctcttcaggtctggagttcgagaccagcctggccatgatggtgaaacccccgtctctactaaaaatacaaaaaatcacccgggcatggtggcgtatgcttgtaatcccagctaccctgg

SEQ ID NO: 66504 - DNA, 383 bp, Homo sapiens
gaaaaaaaaaatgtatcttttcgaaaattaaagatatgcaactgatttttacctggggcagggtagggagagggaaacaaaaccaaatccaatagagcagacaaaaaaagtgtcttgctttacaactggaataaggccacttggcacagacccactgggttacccaataaatgccaactgagtgcgcagtgtgtgccagtagtttcaggtggtggggacaccactacgcttgagtgtaaactcaagattttgcccttggactatatctaccactgaagttcttggcatctaaagatgttctctattcattacctggtctgttgtcaacacattatccttacagtgttttcctagacatcccagtagggtaggcaagacaaaaa

SEQ ID NO: 66505 - DNA, 836 bp, Homo sapiens
atgaaggaaaaattaacctgaaatatttgtaatttcagtggcaaaatcagacatttacattaaaagttatgcttacttattttaaagaatgtagtaaataagaagcagtcacgttatcatcaatagagaatcatgtaaaagaaagggacaaaaagaccagaatgaagtcaggaactagctccaaattcccatgacatatttaggtatgtattaattcataaatgcatgccccacacatcactccatgaaggattcaagatgaatcacaggagagctgcaaacaacaacagtaaaaacatcaggactgggcaagatataaattagaacaagaggtcatattaggaggaaaaaaatctggaacactaaggtacaaaggtctacaacccttagtctggggattccaaaggacagaggaagcttcctgatgacaatgaactacacccaaagaacaagtaggtcgatcaaggcatttcattcatatctagggatttatcttgaggaaataattttagacaagttcaagcatttgaccataaggataatcacacccacactgtttgcaaaaggggaaaaagtaactcatattatagggactagcatatgacaggatacattgcaacatttaaacgtgatgtagaaatagtttattggaaagatattcctgatacaatgttaagtataaaagtgataaagccaaaaataaggcattatatcatttttaaaacaataacatataaagggagataaaagcatgacatgttttatgccaaaatggaattgccttggttatcataggacggtggggctgtgggtgaggtagacactgcaaaagattc

SEQ ID NO: 66506 - DNA, 532 bp, Homo sapiens
aattatttaatattctgaagctttcatatttttcccttacatttttgcagatagttcaaagttgcttgtcttagacaaacccaattataaaaaagacaaatagaaggaaagcagtattaatcatttctatgaatgtctacaaaagctttatttcagaagagtaaagtgatggaaatcccatatattctgtgtaataccaacatcgtaaattttactacacaaaggcctctgtcagagctgttttcaaagtgaactttggcaacacgtgcaatagatgggatgagccccacatagcttacaggttatgactcattcttagtctcactttaacataaaacctcagaactaaatgggagaagctcaaaagaacatcttcaatcatctaactgcattccatttaagagctatgagggcaggggtcttaaccatttctttccattgtatccccagtgcctgccacgtggtacacacgcaatacatatctgtaaagacacaaatagaatgtctcctaacctattttccactgactaga

SEQ ID NO: 66507 - DNA, 2070 bp, Homo sapiens
attctaaacgccactgaagccctagatccattctggggatgggagacaccattacattaagaaatttcttttctgaacgaattccattccacagaggactaacgattaagcctaaaatcttaagattccatgatttgtgtacaaaacactgtgctcattgcggtagaggaggggaagtggagccacacagaggtttaagaatactcctcgatcttacacactaccatctgggagccacaggagtgtgcacataaattcaatgacttcacggagattgcatgcaggctggctgtaatctcagattcttggtctgttcccatatctctactcacctgacagctcagaatgaaggggtctgctgtcagcttgagaaactaagaccgaactatgaccaccctatcttcaactggtccagaatagggctttgcaaaaattacgttctttctttctccgttaaccctgattggagaaacctgcccagatcttggctggtttggaagcgggaagtgtcaacaaaagtgaagagtctcacaaagccagtagctcgggagaccccaagagcgggccagaaacgacctttccgttggaaaacgggcccctctcccacctgctgcaggtccccggacccgccctcctgcgcctcgaccacaggcgcggccgcttcctcccttctccccgccccccacccgcttctcgcgcctcccctcgatcccagctccctagggggacgggagatgagcaatgatacctggaggttgggcgaagtggatgacatggcggagttcccaggcggttcccaagggaacgaggggcgaggagagccaacagcagcaacgtcgaagcgcgcacggggtaacagccctcaaactggggaggccggtggttctcggaccgcgaagggcagcctcccttccggaacttgttttagacaacactctctccaccagagctccgaccctccccaccaaacttccgcaatcccgaggccctctaggttctggtcccgcctctgctccgggcacttccgatttcgtcatcagcacgcgcacccagtcaccagactcccttctctagccacagcgcaggccctccctgggccgggagaagtagcctggaagccaatcgagccctggcggaagtcgggctcggcgcaggcgcactgagactctggcctaggcgcgggcggcagcctggcagacctaggagagcgcaagcgcggaagcacagagccgggttttgttgtttgtttgttccccacccccggggacgtcttttactttgagatgaattattggccccggctcccttccctcctcatccacatgctttgttgcctcgtagcttttgagtgaaaaagtcgtccatttccaagacccgccgactgggggctttgggcctgtgactgcgccttcactccgtgtcctctgtggaatgggggcgatcaccgtcctcgtctcggtggtgaataattcaggagggagtgcgcggtgaggcggccgcacagcggtgcgctagcagtcaggccgcgggcgggtcggcgctcgttcccgcttgttcttcccacgccactcggcatcttccaaatgactgttgtgttgggaagatgaatgtaaataaggcgtggacggccgctgtcctcgagtatgtggtctgagagggaagcacttgtcctgtaaaatgggcatatcagatattatttatgccagttatgtttacaagcaaatggcttgaggaggttgaatgcgtcagggattagaggcagaaccaaagtaaaaccctttctcagccttcctatggtttgcagccaccaccacccttttcttcttttcatagttaacattctcaaaggaaagcaacatagatgtttaatcactccatcatttttttctcactcatttcttaattttttctcatctggcatctccgaaagaattaaagtcctctcctcttccctcttcattggtattgtcaactacccagttcttgtttgtccagcttcccaatattccttatctgcttccttcactgtctccctttcttactcctccctgagcttaagctgaatttact

SEQ ID NO: 66508 - DNA, 459 bp, Homo sapiens
agctactggaactcataagcatgattatattttaaacaactatataagaaattttgggcttgcaggatttgtgcttatctttccacattgagaagaagaaacaggatcttacttcaacattatgatgccatatcaaaaatcacgcaatgtgatttcagtatgagtcagagataaggcccaaggggtcatgactcttcattaggaaatgtgatgaccaaaggttctttatggatgctgaagtcttccaaaaaatgtttcaaatgggttttatgtgctcaagtccaggaaaacaggaatttgtcatggagttaagagtgttcaaacatttataactctaggagaagatcacaaagatatgcatacttgagcgctggggaaagtctatcacctttcttgagtaaatgggatgcatttattacctatctctccacgtgtttgggtttcttagcagagcttggt

SEQ ID NO: 66509 - DNA, 743 bp, Homo sapiens
ttcacatggcagggagagcaatttatctcttcttcttttaatgccactaatttcttcaagagggcccaaccctcctgactttattttaccccaatcaactcccaaaggccctatctccagaaactatcatcttaggggttagggcttttacataaaaattttgtgaggacataatacagtctatgacctatgtcttttcctaagtccttagttctttttttttccacttaccccaagacatgaagtgacaatttctcttttgtaccttctacatctgctgccattacagtatttttaaaaaatctattacttaataattctttgtattaattctcttctcttcaaatctctgatgtagtttgtttgcaaagtgaacactgcctgatgtaactgaataagcatctctcccactattatgaaagagtgtggcaggagactgaagtccacagtgtggatctagcaaacacattctggcttgagggtgtgcagctattagaaaaactactccattaaaaactgaaaattctgagattaatgctgaaccagacaggacactagaacaagtggcaggaactcacactgtttcaacaatcaatggtaactctattgataagctaaaatctgagaggctatcagggatctcctattcaactttcctatctgcaacacattcaatcaaagcacgaaaagatacgtttagaaaccaaagagatctttctaattccctccaaattctttgtcac

SEQ ID NO: 66510 - DNA, 2424 bp, Homo sapiens
tatttgaactgaattttgaaagacaagcttgcatgccaggaaccccatgtatatgaacagaggatatgaaggaatgtaaataatttgctatggctctaaagaaaagaagggagaaatcaagacgtgaagaggcttacactccttgctcaatagtttctaatttatctttttggataagaggatgttataaaggattttaaactgaggtataaaataattagaattggaatgtttacctgaacttcagagtaggcaataggttggcatggatcagaactgtaggtaggaaaattaattgtttaggagagacatgagacatgatagaggtgacagagtatggacaggaggaacacaaaagtgatagaagtaacaggactgttgatcatttagttaaaagaactgcggagggacacacccaggtttctgagagatgtccagtagtacacaggtaacatctacggctcgagacaggttagagattttgaagaaataagttaaaagttgaaacatgaacctatggatatagtggaggtcatacaagaagatcatattataatgaaaagaagagggcttagaatggtaggaaaggaatcaggataccaagcaaaggagtcaggaaagaagggaagggtgctctggaaatcctgggaaggtcaaagaagaaagggctaaatgtcgccaacaaacaaaatgaaataagacctgggatgtattttttggccaaggcaattagaaaatgattagtatccttatcaggagcaatttcagagaatgtttgggtggacgtctaactacagtggagtcaaacgtgaatcaacggtgaaaaaaggacaatagccaatgtgtacactttttataaaaaccaccctccaaggaccaggcactggccctctctccggtgcccacagacatccacacaggcccaaagaatcagggattgcacaagccagagcaatcgaacggttctgagtcatctgccggaagccttgccctcaatcaaggcggacgtgaagcatctacaaaggaggaatagtcaaagcagcagcggcggcggcggcggcggcagcagcagcagcagcaggaggtgggggcctctgccaggtaccgggcggggcaggcacggaggtgcccaggttcccgcggaggccacctcttccctggagtgcgtgagagaggggaagggaggaaggccagagcaggaatcagagcgaggcaaaggcgggcaggaactaggagaatgacggcgggaggcggccgggaaagagagtcgcggggctgtgggggtcgccctggcaccagccggggtcccaagccccaccgcgagacccggcgaaggccgagggccgggtcccgagaacaggtgcgcccagacccgccctgaataggaagctgcccctggagagggagcgtctgtttctaggcttgcgatttgctgcgctgtgatttgctgccggatgggagcggggggtgacgcgagcagtgagtttggaagcgccggaagcttgggcgggagccccgggagggcgagtgggaggagccgccgctgcggaggaggctccgggagtgcgggtggcggggcctggaatttccgtggcgcctggggcagatcggggaggcgccgagtccctgctcccctggcgcccaagcttgcccctgtgcttacagcctattggttgcaccttctccttcccttcctgtcccccccctccgttctttccacccctgccttcatctttctgtatctttcatattctcttcttcattgtctgcttcctctcaaatgggatggggttgggggtgcttcttcacctacgcccctctctgttgcagccaccggcgttactttaaccaattcctcactttccagacactctcagtcctctggctgctgcttcactcctgagacctctccattccaaagggcctcacccagggctgctctccgggcccctcccgcttccctgcctcgggctctgcgtagaccgcgccctcttccctgggtccactcgcaggggcagactcgtctccccagttctcccagcacaccctgatggctgggtctcagtctccgtttcgcgcgcgcgctctcccctcgccctcctctgtctcttccttttactacctccagatattggaaattccacagaaataggtggatttcttcccttgtgcctccactagatgttctgtgtagtttcatccattctcatggaacctctcggaatcgggatgctgatggctccaggtctctggctctagacagtctactcatccccgtccctaactgtttacaaacatccttggctgtctttgttacaggttcacctggtatggtgtgttccacgcatctcaaatggaacaagtcatattccccattccagcctgactcctcatttaaaattccagtggttcacgacccaccct

SEQ ID NO: 66511 - DNA, 724 bp, Homo sapiens
tttcaaaagctataaagtccaaatgagattggaacaccaggaagacagggggaagagtcattctgttacctggttttctcccctgcctgacttctgacctgagcagaggccaagggggtgcacttgtgtgtgagtgtgtgcacatgtattgtggctgcagggtagatattgatgggaaataccacatactgaccagcacctgagtgttgaaaaggaatggaagtggggacatgagatgaaggaagaggaaagatggaagaaatcagaagtagcagtttgcaactaagagcagttaaaatgtaaagatgagattgatgcaatagttcagttcattcagaactattgaaactattgattcaatagttcagacaggatgattaaacacacctacacacacacacacacacacacacacaccccaacctaagttcatgcttgcttcaccctgagtccaaagctcttatgctaaggttggatcaaatccaaatttatttgtgtctctgtcttacccagtttacccaattctctccatctttaagtttctttggtgccaccttctggttggcccagttctatgaagtctgaatattccttcctgcctcccagtctctgaaatgtcctcgagtgaaagatgaggttgtggaggaccccgggacttgcctgcacatactactctgccttccaacatctgcagaccctagtataagctctggagaggtcttat

SEQ ID NO: 66512 - DNA, 814 bp, Homo sapiens
aacaaaatgcttttgcatttgtgggaacctttaccaaatgagactaaactcagtgttttgtgtttgcaggactttaaagaatactgtcagaagttctatcaggcagagctggaggagttgtcctttgctgaagacactgaagagtgcaggaagcatataaatgactgggtggcagagaagactgaaggtgagacagtttcatttctgttgatttggaattactatacaacgaggcttagattgactgggatgggacttcccagggtgttgccactgtgacctgcataccacaggcctgtttgtatgtgtttgctgagtttacaggccagcaatgcaactctgtcatttcttatcagatcatgaagtactgatttctaaaactaatgttgaatctctgacctcctcccctgtggaccgtgctggaaaatccctggaaaatggctcctccttggaattctgttaatcttctatctgagaggcccttccatgctcggagacagaatggcattcaattaagttgcggcttagagagggcaacatttcatgctctcatgttatctcctccgcgtggtaatgggacagctcagtagtttgatctgcagccttctccttcctttttaacttggccatggctacatttgctctcagagtgtggccttttctgaatttgttccctattctggaggtgcagcgacatggagcctgcagtgttccctgcccagaccacattccatcccaccagaaatatttctgccagttctttacttcagtaggaaaaagggggagtcatactttaaagcatcctaaataccta

SEQ ID NO: 66513 - DNA, 2056 bp, Homo sapiens
gtatccttttcaaacatcaaatgactgactattccagtagcactctgtccctcttgctcatatttaaacatttcaaaacctaactactgttgaggccataggagtcttaagccttcaaatgaataattcttcccagtccagagaaaaggcctcttagggaaaggttgaaagagaaagttaagctctactttataaaggtcagggcacttaaagctttgtcaggtgcagacagatcctgcccttgcctttcagaaaggcttgcaggtgtgatgtctttagtgcagactgaggctgagaggcttatgggttttatacaagaggaagctcctttgcttcttccttcgtgcatgaagactgctgacaatggcttacgggcacatataaacaatgaggtcaacaatcagcttattaattagagagagtataacccaatctaaagatcaaaactattcttcagatatcatatgccaacgcaattattctacacagaacggcagcatcattatggaattttaatggctagctagagatgtcgggcaactctattggttttattggaacttatttttctcattatataaaatgaggtgaaatttttaaattcctgggatctttttttgtgaaactgtgacacacattgaaaacccacacagaagagaggaaggagcccttccttagagccaagagtttcatcatcaaatctcagcttactggttaactcagtaacattgcacaggttgttgaaattccaatccccaatttcatcatttgtaaaataaagatatttatactgaccttcagacctgttgtagcaataagcgaagataatatatacaaagcaattctattatacctgttgataacttttaccacatttcctttctctgtctactcattctttctaaacccagggagatggtccacactgaggaataaccaatttctgagttgcactcctcatttctggcagaaaattttctattttttaaagtgcagttttgattaacttctaacattatgcctggctgaccgctggtttccacaaacaagtggctgtttaaagaatgcaggagtaaaggaataaatgaacaaatgctagctatgcaaatgttcttccagcatctggctctgtctgtagctggccattatgaaaaaccttccaaaagctgccatgctctagtaagatggatatgacctaattatttgattaaagcaccttttaaaaaataaatctattctcttttttttgagacagtgtcttagctctgttgcccacgctggagtgcagtggtatgaacatggttcacggcagccttgacctcctggtttcaaatgatcctcccacctcagcctcctgagtagctggaggctactcaggcacatgccaccatacctggctaatttttttttgttatttttttacagaaacaggatctccccatgttgcccaggctgggctcgagctcctgggctcaagtaattctcccatctcggcctcccaatatgctgggattacaggcatgagccaccatcccctgccaaaaataaagttattctttttaacatgaaacagtttaccttcagcaattacactaacattttatcgaatgtacctctcatatgaagtttatgaaataaaaataattaccccattgtaaacttaagagagtctcagaataattgaaattttttccaaggtgacttaggtagaaattagcaaaatcatgacttataccttggagcatctgattccaaagctactaatattgatcagtacattatacggcctgaagtttaattggatggtgctcacacactagttagagaatgaagccacaagcacacgtaactatagataaaaagaaaaataaactaaggtctgtgagactgcagaggagagttgacccctacttggtagactgcccagtgatctttgcatatttgctggtctttacacttcctttgagaaaatggcaaattttgacagggggataagattttagggaaatgaagtgcaaattatggcatgaagaatgatatatgtttattatccagt

SEQ ID NO: 66514 - DNA, 1168 bp, Homo sapiens
tttccttagaaacacaccacagtgatggaaccaaacccaggtccttcttcctcactttacctttagctcattgccaaggtccttgtcttctctttaaaaaccctttaattttttttgagaaatggaaaggccgagcctgctttccaactgcttttgtctatttgcccagggcataactactctcagggttcttgggaaaggttatctggttgaaaagggcaataacatattcggattgttgggaaaccacatgggaacacctctatgaaggcaaggcatcttctgaagcagatcaccattccaggggcaggagtggatattaggtagggtcctttgtaccctcagctctccgtccttctcttgttccagcccagcatgtagcagtgtgactgacagcttcctctcccccacgctcagacctgaccctgaagaaggtgccagaagcccaagcctgaaaacattagcttctggtgccagaatcaaaggtcaaggcacatagctttctcgctgtccagctcccagttttgctaaggtgcccgcttggaaggcacaaagtacaccagtggcattgcaaagagcaaaggtatatttcctcattctctcatcccctctcccactctttaaaaaaatactattatctgattatgaacaaagaaccttctctttaatgcatcctacaaatctcaaaactaaagagatcgcacaattttagataagaaaaaaaaattgatgttttcaagcacaagggctaataattacagtaattttctattccttggatctctgattgccaatatcttcagatggcttcaaatatcattttatagctttagatagagcttcactgatgcttttgaacattctagtaagtattgacaatttatctttgaatggatgacagtgttatagttttatttaaatgggagaaaacaagagtcattttacactggctttatagaaagagatgaatattccaggcaaacagttatggggaaatgtgcacaggagggatgattgtacccactgaggaataaagtgcaaatagcaccattccctcagaaggactcccacataaaggtacaaaagcaattatacaatgcaggtatttatcctctttataaacttagcggaaaataagagaaggcatcactgtttaggaaagtaatag

SEQ ID NO: 66515 - DNA, 2018 bp, Homo sapiens
gtctcgatctcctgacctcgtgatccgcccgcctcagcctcccaaagtgctgggattacaggcgtgagccaccgcgcccggcccagaatgtatgtacttttaaaaaaactttggtcataacttttaattacaggtatgtggtattctcattgttattattttttgaaaggctattttttaaaaaaaccattcagcatactcttagccaacaatggcattaactacctttgtcatcttacatgtttataaataatgattcatgtgtatttcctggataatgcttgataagcattgttttaagctttttacatgtattctgtgtattatttgcaataacctttcaggtaaatgctcttattttctcattttacagataaggaaattgaggctcagtgttggcaggtaacatgttcaagatcttgaaactagcaggtggcagagctggggttcatctgtctccatgtgctcagagtaagtatagcctgtttaaattgcattgattttcacagtttttgtaactaacaaagtggaatatgtttttatgtttaaaaaaaaaacctgttgaccgtttatcattcccccttaataacttgcttgttgatatctgcatccttttttttctgtgtaaaaaatggccccaaatctcagcagcttaaaatcacaggcttttcttgttgctcatgaatctgtgggttggctcgggttgagtgtgtctaggctggacctggttgtgtgctttgttttggaccatggccatggaacactcctgcttccctctgcaggacggtgggttggttggcactgggtccggtaaatctgtctcatgtgtctcatcctccttagcctggggaactggataggtgtgaaataagaagtattttttatattggtctcttcccccagatcctggcacagagcttctaaagcccttgtaatttcctgggctatagagatggaaggagaatcttttcttctaatatttggtctttgatcccaattcctgacacacaaccactaaatcccttggtatttcctgggtgatgcaagtgtcttatgttctaatgaggtgactcttggtgggctcctggatgggagctggttgccagaaagaccaaggcaagactggaggcttagaactttcaaccccagcccccattctctagagacaggagaggactggtgactgagttaataatcaatcatatctatgtgatgaaacgccataaaaatctcaaaagtacaaggttcagagcacatccatgtggcaaacacatccctatgctgggagggtgatgcaccccaattccatggagacagaagctcctgcactcaggacccttccagacctcaccctaacatatctctttatctgaatgttcatccatgtcttagaacgtttatggtactgtaaaggaatacatgagctggataatgtataaagaaaagaggtttatttggcttacagttctgtaggctgtacaaaaaacacagccccaatatttgcttctgatgagggcctcaagaagcttccactcatggtgaaaggcgaagcagagccagcatgtgcagaggtcacatggcagaagagagagaaagcaaaagagaggggagggtggtgccaaagtcttattaacaaccagcttttggggaaacttatagagcaagaactcactcactgcctccctaccccaccaagggagggcattaatctgttcatgagggatctggccccccaccatcattcacacaccctattgggcaccatttctttttctttttttttcgttttttttaatcaatagaactttagatatctcttttttttaaattttattattattatactttaagttttagggtacatgtgcacaacgtgtaggtttgttacatatgtatacatgtgccatgttggtgtgctgcacccagcaacttgtcatttagcattaggtatacctcctaattctatccctcccccctccccctaccccaaaacagtccctggtgtgtgatgttccttc

SEQ ID NO: 66516 - DNA, 613 bp, Homo sapiens
tgaaaccattcctaggaattcctaagaggggtcactccttagagatgtgtggatcgaatttaagggtcttttatgattcaaatgtttgttccctctgaacctcgggttgtgacttaatccctcatgtgacagcaataacaggggaggttttgaagaggtcaatagatcattaagaaagattaatgtctttctcgtgagacttgatgagttctcatgggactgggctagttactgtgagggcaagttgttaccaagtgaggctgcctctcctgtgtactatttttgcacctgtctggttctcctcctacttctctagcatgttatgccacaggacaaggccctcaccagaagccaaccaggtatggcccattgatcttggactttccagcctccaggaatgtgagccaagataaacattgtttctcataaattacccagtctcaggtaatctgttatagctacaaaacaaaacaaaaaaaaaggactaagcgttcttaacttgaatgagtctacattgcatctttttttttcccactcataataaaatttaccaaataactatcatatttgaatagcctgtgactttgtcatcaaaagaaatcagagatatttt

SEQ ID NO: 66517 - DNA, 1596 bp, Homo sapiens
taaaatatttatattaagaaatatttttcctcattattaaatttgggaaaggaagaaaatgaaatggacttttaagttttcatggttttctttaatgtgaaaatacagccctttcaaaaagcacaattttcactttgtttagaccaatgtaatttactctaagtatttgcttgggaggtgtatattgattttgtgactgatcttattccttcttcattaaatgcgctcaagtcaggaaaaggggtgatgacgatgatgaagaagaaaatacagtgaagagaggtgtaatttacaatgcttccctctttcctcactaaaaaaaatataatattatgtctcaatttagagtacaattctcatagatttcttctttaacactgaggtttctagactactgtagataatgctgaagatttctttgggagaaaaaaaattaggattaaatttttctgctgaaataccagctcctgtctggtcctctcttcttctctcgggaaagtagctggcactagttgctacatcaaaagtacaagttgtacctagctctttcagtcactcaggacagaaatactgagtagcatattaatcacccaggtgattaaatgtcatgatgctttcacccaccaatagattgttcttgaaaaaggaaaagagtgctgtttgatgatgatcatggctgatgacgcaatgcagcatttacggcattggttctgagccttggaaaagcctagcgtaacaacttcttagattgttggtgtgtgttccatagtttccttattaacagaactccatttgcaacacttgcctcctccaccatcaccagtgctatgaaacatattctttactacacagtgctaatatgaagataacttgagagtggaaatcccaactaatccaagcatgtacttacttgaactgtttcccaagatacatgaggggcagtgtagttgggtagcccagtaggagtctctgccacctgggtggatgcctgggttgaaatctcaccaccactctctagttactcctgccccagagcaaggcattagtgacttaattccttcatcattgaagcagaggtaaaaatagaaacctatctaatagggattttgcatgtcttaaataggttaacaaattgtgcctgagaaagtgtaagcttttcattaatgactatagcatttgtactatgcatagtggacataaacatagaaagctgttcctgaattctgggaatatgtatcaattcaaaggaaaggaatgtatttcctgataggacctgggccgtatcaggttctagggatgtcgtaatgctttagtttaccaaggttctttcttacttagatttgataaatttcctgacactgtagtctgcccttttacaagtgataacacatttcctaatttcctgtggtttcttaaagatatcaaagaataatagagtttccttgtggtgtgagattttgctcctaatagatggcatttataggacaagggtagagaaaaatataaccagatagttgttgtgagacatatagggttaagcttcattgaattcacaaaatcaagcatctttctgtgatagattagtttgtttgcttt

SEQ ID NO: 66518 - DNA, 646 bp, Homo sapiens
tccctctagcctccaaaagcattacccatatgaggtatacaaagtcttgtacaacacattataatgtcactacaattcttcctatttattcccaaatgaggaacattagcaatgacattaagaaccagatgagaaagaaatcaaacttcagaagacagagaacagagcatacgctcatatctcttgtggatgaagctatgtttatatcaatgatagtgaatttcagaatgtactgtcctgaattttgcaagctgaacaaagacatattgtaaaacaagatcacgctttgtggtagaattgtgaactgctaggaatcaataagaggagaaagttcatgttgccacaccccagtcagaaatgaagtggaaatacaagaaaccatgccaaaggtaggcggctttgcaaacaaaccacaagtactgactccatgagcagcttagtccctaagcgcagatatttgcctttttgaacagctgtttattgtagaacttgactgttctacaatcaaatttttctcaaggaaacacagagttattacagatcttgaatatattgttcagaagtcacagtgaaaatgtaaaatcaagagtactctctgaaataccactaagacagagtgatttctgatacattcattcccaaaaca

SEQ ID NO: 66519 - DNA, 837 bp, Homo sapiens
ttgttatacagttagcttgaaaccagaaacattctgcttataatctatcttaattaatgaagagaaataaagtcttgatttttatctatttataaagaatgtttatgtattgatgataattttacctaatatcagaagcaaaagcaaaatgaaaaaaaaggaacattttttcctgaagtgctctgtgattttttttttaaagagtattgcttaactttgtccttgaacttggtgctctctcttatgtaaatgcatttgtgctggatttgatttatgagtcattgatggaagctatgcactgtaacacacaacatcaaggtaacatcttcttgcctacttaattcacaaaggaaatttgaaacataacatatgaactctagattcaagggcagaaaagacagtaaggtccaacaggaacttataccctcattttctaattcctgtttcatcctgaacatcactatttttccctaggaagaagttatacataataatttttccttgattttctctgttacaatggttactttattttttcattacttctagtgataattacaattttcatcacatttttatgtttcttaatatctaaccattctaattttcagtttaggatgacacggtaactttcatccttttttattttcattttagaaagtattgatttccttatttttaaatcaaaaatataatgttgattcaaaaagcttttcatggattccaaaatgtgtaagtccttgaaaattagctttaaattttagcaaacacacaaaatacaccattttatatatatattatatatttatatatatatttgatgaattttatatatat

SEQ ID NO: 66520 - DNA, 914 bp, Homo sapiens
aaaaaatagagatcatcagcaagaaaaacaattttttaagtgatctcaatatgtcatttctgaatgtgttaagttaagtctctttcgtttaggaaagtagtgaatatatttcagaacaaaagttaagaacatgggctccagatttaacactgtccacagttaattaatctcattagcttatttgttctttagtgtgaatgtaggtaatttagttctggttgtctgttcctagttgcgtatatccctggttgaaatagcatcccttcttcttcatcgcacttctcaagttagagaaatgcagcactgggggaatcatgtcatggctcttaaagctcttgccagaaggtggcgcaggggttctccctgtcataccattcagcgaaggtaattgcatgacagatactgacatgtgattgtatgtggcaatggaacacaaccctcttgtcaaataaaaattttaagagggtttataaaagaattcaaatatgttttgagcagcatttccaaagaattacttgtgaatgtgaaattaataatatggaaagactgattataatttctgaaattatattccagctgacaagctgaaagattacgggatccataatcagaggaaggaataaacatgagagcagaagtcctttaattgtaacagaagataaggcagaatgtctgggctcaaatatacgcagatggtagatttgtcggtggaaagttgaattaggtctcatcaattgactttattttcttagtcaagaataaggcacagttatcaactgcaaattggtagtcagcatgagatgttagggagaaagataataaataaataagagagtcatctttgtgataagaaagcaaaatttccagaaaaagaaggatgaacagatattcagtttttctaaagttttagccat

SEQ ID NO: 66521 - DNA, 408 bp, Homo sapiens
ttctcttaagggctgtcaagaacaaattcctgttttctttttgttgaaaagaagatttgtaagaagttttaaaaactacaatttggatcaattgttcaattttcttccctttattcctgatggcacagttgagccagatgtctttttgtgggtgagaggagcaaaaagcaaacagaagcgataattgtgtgttcatgcctgagagtttcctgaacccaattacttaatcaaaggcaacttgcacctgcagttacacaacagcaggaataacaagttgctgcagggatattggactgtgtctagaaaatttcaaagacttgcccttttagtctgccctcctacctttttgaagtttgattccctcgttttgtagataaatacttgaacaagaccttcagaatataataa

SEQ ID NO: 66522 - DNA, 900 bp, Homo sapiens
tgacagtgattctggcatctccttaaaaaaaatctgctctgtgtatcaatcattttaataacaacagactctcgctgtgagctttctttacagatgggctcaatgtaatctataaaaactctactagtggtcaaatactgtgttaggcacacaggaatcaacaatataaggacaaggaacattcggcctcacaaaacaggcaagctcctagggaattcgggtattccagttcacagatgcaaacatgcagtgaaccgtatattgagatgcagcatgttcaatgaaaatattaacaaaaagttctctgatttgaaactggcaatgattttgtctgctgcaggagttagggatgatctcaaagcaataaagtgtgttagtgtttggaagataaatctgggttgaccaggttgctcacgtgggcggaagggctttccagttagaaagaagtagcaagtcatgttgaggatattgatttgcagtaatagggatacaacaatcccagaaattaatgaatccaatcctatgatattacaggtgagaaagctgaggcccattcaaacttagtgacttgcctgaagccagtaagttaattattaccataagcaaccttaaaaaatgtgctgggtcaccagataagcctctgttcaatgtccttactgcgcctctgctgttattgaccctgctattcttcctctgatcatgtacgactacacctttccagtctctgttctcccctcagagtcctgctgatttgtgtgctctcgctatgattttctaagctgtcagttctctgaacctagctctctgttctccatctttccagatcttgcttgaagccaatccgaaggcattcatggacagatcttcctcagtggtttatacatagtctatatattgtgt

SEQ ID NO: 66523 - DNA, 1571 bp, Homo sapiens
taacgtggcttcagtcacttaaaaaatgtttgtattcaaatgcagtttacacaaagatgagtcctgctatccttgttatttcttgttcccaaggaccgagggacaaaaaactgaaagttgaaaagatctttttttttttttttttttttaattccgggggaaggtttagagttcatgggatcagaaggtatcttcctaatgagaactactcggaccagtcacttttctcggcggggtaaccgcgaatcgtgaccaggcgccaagccgaggggcgggagctccgcgctcggcgctcacctgtggccgagtccctgtcctcaggtggagccgccagagggagctcggaccccggtgtcgaaagacgcctctccgtgcccgtccgcggctggaagaacctaagcaagtttcagtcttggacaagtctcccctctgtaggaaacattcaggctaggagtttcctgatccgccccgcctgttgcattttttcactggcgtcctccgaccctgccgcccccattctccgctccccgctctggggctgagtgaggcaggatggcgagagacccctgagccaccaagtccgcttacctcaggcagatcccgacgggggctcggcgccgcactgggccccaagggagacggaggtggagagttccagaaaactgctctgcacggcgggccaggctcccgcggggctccgcaagacccccgcgtcgtctcccgcgctacggcaggcgctgccccagctcggtctcctcagccgcgctcggtccccgcgacccgcacggcccggacacgcccgccctcaggaaacgccggacgcttgtgggggcaaccacggaccgcaggacagagacccgcgggcggcgggttctctcggtggcgccgtatccagagcagcgcccgcgtgcccaggcggtgatgtcgccgcggccgaggatcctctgtgccagctccggccgcgcagcccggggagggtgagacggcgacgcgggccggcaagcgggggcggggcggaggcaggacggggcggggttgaaggcggggctgaaggcggggcctcagggaaggcgagagacagcgacgctggctggcgggcgtggggcgggacggagacaggacagggcggggtcagaggcggggcttcggggaggacgggaggagccgtgagcaggccggcggcgggcggggcggggccgaaagcaggtgaggcggggccaagcgccccgggtttctaagcggaggaagctctaggcgtttgtgttctgggcttgcagcggtggccgcgcgctcccggaggagtcgagctggaggaggggacagtttgggagtgcgagagtctaaagacgctgccaggctggcgttaaaaccttttggttatgggaagacgacaactatataatagagccatagtgggggctgtgggattgactcaaatgatgggaggagctggagtgggaggggataagccctgggacgacagaaatcatccttttggaaagagcaagggctggggaaggagggaatgagcactcccttggaactgagaggcagcctggctgagcttgctg

SEQ ID NO: 66524 - DNA, 520 bp, Homo sapiens
tcatcatatttaaatggctttgaaggttcatctatatactgattccagtattttcaagagcacatctaatttgatgaggatggaagattgttaatgactcagaagctgggaaaataggtagaaactcaaatgttgtaagaaatcactagaatgtttgcattttttcagaggttcactccttctgttctaatacctggagtccagccaggcacaaagcaagctggctgactactgcagaaaggaatgctggaacctctcttgctgacctgcttccagagtttccagcacagctagccagagacttcctatagacaatgaggaaattcaaaaacaaagaatgtagtagtttggctatttctctaggagcccttggggatgagactgagccattttcctgcagctggctgcaaagcaggccactgaaaaagatcagtatgaaagaacaaggcatactgttggtatatgcgtcactgtgggccagagctttttgtcataggattcagtcaaactcaaaatgcaa

SEQ ID NO: 66525 - DNA, 1868 bp, Homo sapiens
agctttttaataggtagaataatggagctgggtcacaggagcttatgacttccttctagctctaaaacaccaaaatgttctgacaaaaacaagcttctttcttttattgaaagaaacaccttaatatttaataattagaaactagactatcttataatacattgctttgctattgaaaatctttgcatgaaaaaatctgtaaaacacattttcacttcccctatagtacaaatttagcaataagcaaattcttcatctatttgcctcatagatttccttcctgaatatcacctcattttattctgagtatttagtgaaagttaaattccaacagatgagtcatcttcagtagctgttggttccctcatggcttctaatttgtaaatctgtattggaatctgtacttgacttatatttatcgcctatatttagctcaagttcaatgtggactacaaaaccacatctggtctccagagctcccagatctaaccactggcacaaatcttttccaactgataaggagcttcacttaaacaccttcagctggaagcacagtgcaaatgttctcagctgtctggcttggcacctggaactgtccccattacattttggtatgacgtgagtgggtgtcactttctgaataccttgaaatgaaagaaatccttgaattctaaaatgtgccagaatgtgtagcatttataaaggataataaatttaatttcgtatttataatagaaagtaaataatgtgatgaagtaatatttagaattacatggcaccattagaaccacaaattttcaggaaaatgaatatgatttgggatcctcgttttcattgcaacaatctgtgggaagtgtgttaaccagctcccatgccagtcttgattctatctgaccatagtattaactgctgtgctttgggtatacttgctgagtatgggcacaacatgttttatttttcatttccaaatgaattacgttgtttagtataaggcataaaaatgtgtacaaatcaatagtaagcatatcatatgtaaatagttttgattacgggatttcacacaattagggtaaaaatattgatgtctttgccactaaatcaaccaggtctatggtgataaatatgggaaagttgattgcagtagtttgggatctgaaaagccttagaactgagtagtgcagttgtgacataaacaagtattgaagttatttttatttcaatgacagcattagggtgtaatagaaacccttgaaagaggaggacgtatagtgtgacaggagcacagacgaccctttcactcgccctgcagcattccacacagagtcctatctcttgattcagaagccagatgtgggtattagtcaggcatgtgtggctgtgtgcggtatgtcagttgtaatgtacttagtggaaaagagatttatttttacactcccctccctaaaagtcattaataattaatgaaactttagtgtcctttagggcaaattcaaagagcagttgcgaaggcttactgaaaacaccatgaaatttaactcatggcaatctcaaaacagcttacgtatgagcttctttttattttgacactgttttccattaaaattcatagggagaaagagacagacaaaatgtttgtgggtttttctgaatggaaataccattagagaatgatctcagctatggaagaaactactctaaaattctggaaaagccataaacatcatttttccttgtttttattcctccagtaaaaaaaagaagggtagccaaaattttcaaaagtagtcagtgacaaaaagcctttttattcttgatgaattggaaaattatccttttacttccctaaatgtttttataacagtagctaa

SEQ ID NO: 66526 - DNA, 1245 bp, Homo sapiens
gctgcagggtcagcttccctacttttgaggttttggaactcagactggcttccttgctcctcagcttgtagtcggcctgttgtgggacctcatcttgtgactcaatactccttaagaaactccacttgatacatacatctatcctattagttttgtccctctagagatccctgactaatacagcacttctctggacatacaatgaattctagttttcttaaaccctaggtaagtttaaggattattactatgaaaataacttttcctatcttgtgttaggacagttgatttttccattgcatgtactcttctcacctataattttattgctttctgccctttgtaccattctcttattcattaacatgcatttattgattgtcctcactgaatcagtaaaatataagccagcaccacagtggtgagcaagaaaaacacagttcttgctcttgtagcaatacattcctgtgtagggtgagtatggaatttaacagtggtatcatttaacatagtgccttattaaatccaaagttaattcaaattctactgacataaaggaacgcagaatggttgtgaggacctctgataggggaagttcaggaagttcttaaagtttcagaagtgatgcttgaatatgtcatgaaggatggttacacattacctaggtgtgggtgggagaaaaaggattccagcaaaataaattccaggcagtggccctaaggccattaggtgcagagtgattttgagtaatcaaaaaaaaaaaaaaatctattgtgacttgtgctcagaaagctgatgaaaatgtcatgtgtcacgtcatgttgagctttgtggccatagttaagggggcaaagaaaaagcaattgtaagaactgtggaagccagtaaatgaattgtagcacgggagggaaaagattagatttgtatgttgcacatgcacacagactacagacaccacctcccttgtttaaaaaatctcttcattggtacagtttgcagatccttcattgaaaatagatctttctttatctttctcccccacgtctgttctatcaaaattttaccagctttaagtcaacatgaaaagtgtttaacagaatagggttaagaaaagacttccaggcttgccaaaaactttcttttctctaataaaactggcctaaaattaaagatgaaagaaaaatatccagctgcatttccccccttgtaggcatgctttgccaaaattgcattaaaacatttact

SEQ ID NO: 66527 - DNA, 1672 bp, Homo sapiens
gtttttgacctttcacaacctaccaaaaaattcatcactgatgcatcccagggtgcaaatgatgcaaaagcaaaggtagttcatccatttaataaatatttagtctgtatgcaaccatatcgtgaccggccaagttctaggtaagccaataaatctaatacacacagttcctttttcctccatattttcactctcatcttacgtctctttttaaccatcctatctttttggaatacaaatagacagcattcttctttatttcttttgctttagtagcaattacctcttccgtaaaaactccaaatgccattcaaaatatttcccctcaaatagatacgtaggaagaaagtcgagctgcaactctaatacttattacacggcagtgcctgacacagagtgggctctaaaaggttgttaagtgagcggaccccagtgagaatgagggcactccatgctgacgggaggcagctgagaaccgctgacacacactcaggtccttttcacaccgcacaatcccggcggcctgaccctgatctgtcctcgaccaccctctcttgagtactggtggtaaaaatccttaaacgtgacaagactcggaacctaaagccaaggcaagatttggtcgttaagctgggacggcggcatccttcttgcccatcaaaggagtaagctttattgaaacttctgccacaatgagaaaaacacaaacacaaggcagcgcgcccttcccacgtccagcattggtccggcacagcggcggcggaaggaccccaaggtgtccgctccgtcagggccaggcagggtggcgcggcgggggcggcaggacgctgccgggaatgggtgggcatctccacgaaccccgcaggcctcgccccagacccgggtccaatcccggccccacggcggggccaggtcccacgcgcccgccagcgtcccgaccgctgagcccccattacctgtggcgcagagccgcagggccgtccaactcttccacgctgccatgctagcccgggagagctgcagaagctgactgtgcaaaagagggataaagacactggggtccgccgcctgcccgcccggaaagggaaacggagccgacccggagcggaagagaagcaccgcgctaactacgggggcggggctacccggccagtctccgtctccggctatgcgcgggagtgcggcgcatgcgaggggagtgcggcgcatgcgacagcgcctgcgcagtcatgtcttaagaatcctttgcgctctcggtgcccccctccacgcccaggagcgtgggaaccctgcttaagggctttactagggaaaacggtgctggttcactggggcgcgtttccgggaaggtgaataccggtgaaagttatgctgagggtgaggtaggctctgacgacgcacttgcaggttgaatactggcacatcatttacttgttactcccgtgtggtgagtgcacctgtgggttttgatgctggatcaaattcctggaaagaggcgcgcattaagactgcggattgctgagctgcgcgacactccgtatttttccaaaacgtatttgtaatattctttcaacctgtttgcataatgggacatctcttaaatgcagcaagctttaatgcatttttgccaaagtaaggattgcctctttaaaaactttctcttgaaacttga

SEQ ID NO: 66528 - DNA, 852 bp, Homo sapiens
gtacattttaatgtacattatctcatttatttattctagtagaatgtgagcttcttagggccagaactgtgttacctttgcaacaaagatgctcaaaagaaaaaaaaaaaaagtttaaaatatcctctctatgagctaccacaggcttgttccaatacatgaatacactgtcttctcatagcccctacagtttcaaagttctgggagtctggcatttgcagattacttatgtaaacagctaatacacaaattcaactatagaaatgccataaattgcagagtaaatctgtagaaaggtgatgtcgatttgctgaaggacaaaccataaagagtttcctaccagaatatgtagttctggcacttcttcccaaggggactttgaaacatgtgggaactatgccttttcttttgatgatgcaagctttctaactatgtccttctccctagaaactatttttaacctatgccatttcacatcattgaattcattactagctctggagcaaaactggacccatgttgcacaacaggcgacctttagaatttaggtacagagataaatttattttagataaactgtcacttattattccaattttattttaattatttacctaactttggatttcaatgcttctcttttagaaataccaacacagagtgagagataaaacttaaatattccacagtgaaggatttatgtgtcttatatatcatcatattaaaatgtatcatatttccagacattgcatgagattaatgtactagttaacattgacttatagaatagttttgataaattccttatctaatggattttgatttatggatgtaaagaccatctagataatt

SEQ ID NO: 66529 - DNA, 696 bp, Homo sapiens
tgactcctatggaatgaaggggcaggatttgcaggacagaaactaaaaatgtccccttcatttgacgctcatgtcttcagtggatactaggaggtggacattcttgagacaggcaatagttgataggcatggggggcgttctcttccattcaaactccctgcttcctaagagtgaggaccagcattttctctgccaggtcctgccctgcatccacaccctcaccccacctcttctggacttcggaatgctgggattcacagaggccaagagcctgcgactaatcaattgtgtcagatcaaaagtcgctttatatcagcttgtttcttctaataccatacacttcacacagttttgcattttgctttaacattttggacatctctccatgtgaatatataaaaggctgccatattatattgaagggtttaatgttttttcttaaatgtaatcaggcccatttcagggacatttagtttccaatattcactgtaaataccagcaacaacaaaacaatgctgagacaaatattctcataatcacaacatttcacacagctatgagtatatctgtgaaataaattcctggaaatagaatggttgtatctgactttatgtgcatttttaattaaaaaaatattgccagtgtttctccatgaatgaatccttatttctccacattttactggcagattacct

SEQ ID NO: 66530 - DNA, 594 bp, Homo sapiens
catttcctcagtgagacctctggaaactcagctcataggttctctgcatctgtttactacttgacctcttagcatcttgtcctgcacatggtcagctgagaaactgtcacaggtcctcaacgacattttatgcagacgctcggaggacttcttggcactttcctcctttctgatattttgccatccaaatcccaaccactttcacagccccagactctgacctctgatttctcctcccactcatattgagacctttgatctctgtctggccctctttctctgtgcagcaatttgaaaaattcccctagtgaaaaatccagggttaatgtaagtcttacttcatgctcttcctttttcttaaatatcatagtgtgggctgatgcattcaaacatgtttttatacctcttaaaatacattttgctccaaatttataattgtttacagctgttggatgagtttgatatcagctactttgttttattcagaaactattaagttcttgacatctatttctgccactccctaataaatcacaaaatttgattaaatctccttctaaatttaaactttccttctgcctttttgttatttct

SEQ ID NO: 66531 - DNA, 1099 bp, Homo sapiens
taaaatgccatgtgtttctacattaaggggagaaagtttttcattttttgtttgtacaagttgagcatttcaggaagtcattggtatccattgataacaaccacgttctccattttcccagaagagccaggagccactttcagtcctagttaacgaaaacgcatgcataaatcaaccactcgggtcggtcggtcttctccactccttcagcagaggacgtcggcgcccggctgcctcgcccgcctgcctgtctctaggctgcgggaggattagacacatgcgcacgattggtctctttgtgtgcaccaggaagggtctggcgtcgatttacacttcctaacggggcagagacctggaacggccgcgagtgcttgggaataaaaatgtactgtaaacaaggccaatgaaataagtgtctcgctcccgctggccttccgcgttggaagtgtccccactgccctttccccgctgcacagcttgcgagtggagatttagagcccgggaatgaggcgccgtgtccttaggaatctcgcgcccggggagcgctgagggaccggggagccgggtggggagcgggcctcggggcgcccggcggcggaggcgctcccacccgcgcggagagggatggagcgcgtcttgcgagcgtctccgagcccagccaccccacgggccagggggagggagcggggccggcgcatcagcccgccccccccggcccgccccctccccccgcgccggggagccgcggtggtgcgctccggccagctgtgcgccgccgagcgaggcgccagcccgtgggtgctgccgggggcggcggcgcggtgggggctcccgcagctggcggaggcgcgggccgcggcgctgggctcgcggcggggagcgaaggtgagcgccagaacgcggagggctggcgcggctcgcggcgccgggccccgttccccgtccgcggcggccctgcaggcgaccccgcgtccccaccggcgggagctcggggaagagcgggcggcggcgctgctgctggcggcggccggctggatgcgagacccgcgcagacccggcggcggacggcggctctcgactccggagagcggatcgcggg

SEQ ID NO: 66532 - DNA, 562 bp, Homo sapiens
tgagttaaaataactgtctttggaatggtggcagcagcagggaaggtctatgtaattagagatcccactacaccagttatcaattcacaatctggtccaaatatccttaatgagcccttactggatacaaagatctttagtttctttcacaatcctcttagcccctcttgaagtcctaccaacattctacaattctaccaacatgccttgatgttgaagttaccagttcacagcaggtcagatgggaatttagaagcaatgagtcataaagatgaaaagactgctttccaatgactgcaatgacaggaatgacacagaagaaatgcggaaaagaaacagaatatagacctaagagtctaggttatctggcaggaggtgaaagctactttctccttgcatcttgaacctgacttagcatgtaaatagggaaaaaatagacctgatttgatgatggaggactagggggaatgacatatgacatactttaggtcagcataactaattttggtgaaaatattttttcttttatttacttcgagtaatataaaaatattcaattaag

SEQ ID NO: 66533 - DNA, 1394 bp, Homo sapiens
taaaattaaacatctctggttgattaaaaaaacttttaaccccaattatttaactttcaataaacgctacaattaaatgactaagaaacaagtcactcgtctgattattttctttatttcaaaatgaccctaccttaaccaatctgcttaacaggttcagaacctcttccttcatcggaacggacgggaaattgaaccattccagcaaatgaagaaaaagttgcctctcctgaatgagatcagcgtagcagattaagttgtgctcaatcttgcagagaatactcttgagagcgcgctccctgatctcggccagctgatgacctgtcaacgaacggcacaaaactattttatttcccgactgcaaagagactacgttatttatgctgtgggcaggagcggcgtgaagacggaataaaccagtttttttcagaagcaggccactggtgccttcgggacgcgaaccgcgaagtttacacaaagtccgagatgggtccccgggggctatcctgacaaagcgggggtgaaagagggagcggtcgcggagcggccggccgcggaaacgtgacacgaccattctcagcaagtggccagagcgcggggggtgccttgggcgaggggcaagctgacagttaccgagtttcctgatgagccctgccaggaccatctcgtcccgtcaatctgcagccgccggagaattaaactgccgcgccactgcgtccagccacaattaatgtacccccggaaacacgtcctgtgggacggtgagttccgcaacgcctgcgctcaccaggagtaggagtcattacgtgagcccttcgcggccccagcgtcgccaggagagcttccagcctctctagaatcactactgcgcacttcctggacagcagtctccgtcgcaagaagcggagggaaaaaaaaaagcaacaagcagggatagaaccagcgttggccgccgcgcacgtcgggagttgtagttctggctaggccgtgcgtcctgcaccgatctccgggcccgccgcggcgcccgctggcctggggttccggcttacagcgcgggaattcgggaacccagcgcgggctgcagaggccccagcaggagccccgcctcccggctcgtcgacggattcgttcttggccctgccaatctgattctcagctcccagaacttcacgatttagaatgtagacttttgctttgtgacagttctccccatccccgactactaaatgacgaaccctctttaactgtgaaatgtacctgcaaagtcaagcagtgtctttggatacccaagttcagatatgaacaagcaagctacaaaagcggggtgggcgggtatgagtgagcagaagagagaaaccgggctgcaaaaaaggaaaataaaggcgggacgtggg

SEQ ID NO: 66534 - DNA, 994 bp, Homo sapiens
ctaaataagttttttgtcttttgtattttgtgtgtgtatgtgtgtgtgtgtacgcacatttgtcttttgatatacagtttaggtgtctatggcagcctcaagccatttggatgcgtggcttacatgtcagtttagggatccagaaagagtgatcaggcaaaataggtagcagtcacatccccttttatgacctaacctcacaagtcatggagtatcatttttacagcattttattggttaaaagtgagtcacaacagtaatcctagattcaagggaaagggacatagggtatcaaagaacttgtgggctgcttagcttcttccacctattgttacttcttgatgattatatgttaaacaaggggtggattattcatgagttttccaggaaatgggtgagcaattcctggaactgagggttcctctccctttttagaccatatagggtaacttcctgactttgccatggtatttgtaaattgtcatggtgctggtgagagtgtctcttagcatgctaatgcgttataattagcatataatcagcagtgacaacgaccagcagccacttttgttgccatcttggttttggtgagttttggcctgcttctttactgcaacctattttatcagcaaggcctttataacctgtatcttgtgccaacctcctatctcatcctgtgactaagaacatcttaacctcctggaatgcagcccagtaggtctcagccttacttcacctagcccctattcaagatagagtcactctggtttgaatgcctctgatagtctcactgggagggaaagcagtggtggcagttcaagaccctgagctggtcataggaatccttgtgtctggttattgcagagaagaattctaatacattcttccattgttgggttaatagggggaattgtagatgatattattctctatcataggacataccttctacattttctaaagtggaaaatacatgctgttgagtcataataat

SEQ ID NO: 66535 - DNA, 692 bp, Homo sapiens
gcaggagaatggcgtgaacccaggaggcggagcttgcagtgagccgagatcgcgccactgcactccagcctgggcgacagagcgagactccgtctcaaaaaaaaaaaaaaaaaaaaaaaaaaaaagaaatattgcaattcagggtagagtgtgaagtggactctaaaaaggactgaacccaagtgaggttcacaaatgggattacatcatttctgatgggacaaatctgaaccttgactgatgatgagtaagattttctatttataaacataattaggtggtagggagtgagaaggaagaaaattctaggcagacagaaaagtatatattaagatacatggctggatctgtctagagattgagttacccatcttggcctggcaaagtgaagcagaaagaagcagtgaattgtgagcctggagaagcaggagggggccacttctccaagagctttggatgtcaggtcaatgtgtcatgatcttaccctgaggtggaatttgctacatgaactgggatgattttgagatgaaaggtggcatgattaacagttgtgccagaacaacagttatgacctggtattgtcctgaacaaactgggatctatggtcacccaatcattggaaaattcttcaaagagaagttttggttgggaagtgccatggcttgaatatggtctgtctgcaccaaaactca

SEQ ID NO: 66536 - DNA, 3168 bp, Homo sapiens
caagctttactgaaatactaatgatattcatttttttaaccacttttcatcgtaagagaaatacaaattttcctattgattcttatgcacaaaaatcaagtttttgtggtactgctatacattagtagtatgttcagccagtttccaaagaaattagtcaagatcccaacatgcaacttgtataccacactaccttggaattcggcggcacaaacaactattccttgtacaaaacctccctgaaaacgactaaatggaaaagtggatggcttgaaacaaggaatgtttggttttttaaaaagcatttttcacaatttagtcgaggtgtggggagggtttccccacttgtggctctgcacagcgtgcgcgcgcgtctgtcctggggtcccctccctgcggggacgaggccggggtccccgcgcgagcccagcggacctgggcagtgcgggggtccgaccgcccgccacagggggacagggaccgcagccgccaaatccgcggggccggggaacgaggagactttcctttccgcgttagccggggccacccccgccagagggaaagcaccaaaggaaaaaccaggacagggactctgggggccggaggagcggcctcctgcaggcaccagcggaggggcgcgggggtgggggaagggatcagggctccgcgctccgtccgccccacgaccccggcccggcgcccctcccctcggaacccccacttagtgcccggcccccgccccgccccgcgcggcccccggcctcagccccgcgcgccccgacgccccgcctgcgccgcgggcccgagtagtggacggggggcggcccgctcggctcctccgcacccgctccccgctcgggccgaggcgccgcggccgcgcgcccctcctggaggaggaggaggaaggaggcgggaggaggagttgccgagaggagaaggcgagcgcggcagtcgcgccggcgctgggcgaggaagcggagccgggccgcctccgggtaagcgtccggggagctcgggcgggaggcaggggcagggcttcgccgtccgcctccgggtcgcccgcggtccgggacacggctggttttcgcctcggagtgcagggggcggatccggcgcgggccgggccagggaggccgccgggcgcggggctgcagcgacgggtctgggtcagcgcgaggccctgcgccgtctcggcgggtgcgcgggcgggggccagggccggggaacgggggccggggccagtcccgggagcggggacgcggaaaccgggaagccggggccggggcgcggcggcccctgaagggccgaggcctgcgcggccgcggacggctcttctcgacccctcggcctcttcggccgcggcgcgccggcctgggccgccgcctttgttgcccgcagctcgccggggagaggccggggctccgcgaggcctgggcagcggcgcggggcctgcgcggctctgcgccccggccgggtccctcctcggacctccgcgggctcgggctcgggctcggggtcggggcgcggcgaggccgcaggcgcgagggcgggcctggggcgcggcgctgggactcggggacgcccccgccccaccgcgaggtcgcgccggcgctggtggaggtgcaggccggggctgctctgcggctgaaggtgccgccggccggctgcgcactcacccgggtgtagggaccggacgattgtggaatttaaaccgctcctgggaccgacacgggcctgaattttcagtttgcttcgggagttggcaacttcaggtacacccttgtggctcacggagcagaattatggacgtttctcaggggcagatcctggcacaaaacttgggatatgtgcagtagtgtgtgtgccaacttaacgttcagttggaatgtgaaattggggttcccatccccactgtttggaatgaagggccaggtgggaatatgtggcgggactcagtcttccggtagcaaaataaataatgttgaattcatttcaacaaatgtttctgcaacgtctgcccggataaggcagcatgcactgtgcatgaggacagagaacacagtaatgacagaaataacgtgaattacacactgaacgtctcccagagacattttaaatttactgtgttccttgggataaagatacatttggaatcaaacaaaagtaaacgttctacttcaagataaaatatctgacatcttctcaaccactgaaggtagcaatttatcttgacttgtttttaaccaactaccacaacattaaatccatttagcttacttgaatgaacgaatcttaattgtaatatttaatgctgtggacagccttacttaaaaacacgaatggcattgctcaccaggtttcacaaaaaccggaaaaaaagtctgtaatacttttccgtgggctttctaatttctcctcctagtgggttttgtgcacgcgtggatatggtaaggtctaggatccattcagctctaaattaaatatgtggccttaaccctttggttcaaacaccctccctaagcctgccttggtgccttggaggaacctggttcgtggacagtggatttgataaggattcctagaagaacttctatctggagtttggccagggctttccgcttgtgcctgggtaagggtcagccaggtattcacccgaatctatacttttttagaactccattcagcatctcttttgaaacactgtttctctcttacctttatcgttatcttctaaattaccctctaaattggtagtcttgcccctttctcttcagcagggcctcccacccaagcgcacaccctcgggtcatcccatgaccccctctcttggtgggccccccaccccgcagggagtggcagggaaggaatttgagagccattgactgggcgtagggtggaaaatggtgctgtactgactgggtttctagtcattttgccttccagtgtttttcttcattcttgcattagaactggaaaaggtgttcttttaatggcccccctttttttaggaaacagaaagcaagtatcttcttttttgtttttcctctgtcacccagggtggagtgcagtggtgcaatcatggctcactgcagccttgaactcctgggctcaagtgatccacctccctcagcctcctgagtagcttggaccacagacatgtgccaccac

SEQ ID NO: 66537 - DNA, 592 bp, Homo sapiens
tgcttcttccttttggggacatgatagtactgatcccctgataggttgtctaatctgagtggtttttagtaagaatgattccatctgcacaccacccgaatcctatctgtaactaaaaggggacaattgtcaggttctctctctcctgtcagttcccaccttgtgtaccattatattactgaagggttgatactacagtttatctgttcatacatctgtctctcctactggattaggtgaccatcagttattcatcaatctgtgtattgccacacagggctgagccaagctgactcagcagaggccgagtaggggcttagtaaaggcagagtgaattcatgaatgggatcaaagctagagccatagtcttgtgccaagaaactgagtggcgctaaactgctgatttgggaggtcagaatcttgttctgggctttattagcatttcgctcaagtcaagcgaatcaccttgtcaagtcatatgcagagaaggcagaacatgacgttggaggaaagaaaacattctacacagtttaaacacagggcctttgtaaagtagtgttaggatcacttaacgtggtttatggaaccaaga

SEQ ID NO: 66538 - DNA, 6039 bp, Homo sapiens
caagcctgagcaacatggtgaaaccccgtctgtactaaaaatacgaaaactagccaggcatggtgttgtgcacctgtaatcccagctactcagaaggctgaggcaagagaatcacttgaacccgggaggcagaggttgcagtgagccgagattgcgccactgctctccaaactgggcgaaagagcgagactccatctcaaaaacaaaaattaaattgaaaaggaagactcactttgtaatcacaagcaatggatttccccacaccaagaaagctctaggaagcacagataaggatataagggtttttccggatctctcactcggtttcatgggtctagtatggtggcatccagggacactaggatttaattacactaggtcacaaggtgaatatataggcgtccctgggtatctgcaggggattggttctaggaccaccctctaccctccccacccccaaccaccacctgtggatacaaaaatctagcgatgttcaagcccctgaaaggcctctagctctgtggattcaaaccagcagatacagagtcaatagtaacaaatgctttgccttccccaaagtaagggataaagaagtatgaacactagtggctgcctgtaggctgcatatttactttgcataatagtggcttgagtaatcatgacttagccacccaagcagagtcaagaaaaattattgcatttattcatctgtctttattcaatctttcccatcccacccaaccagacactcaatactcattctccaaaggtaattcaagccttatctcacaatgtcttctctccttatcccaaatcaaattgattaaccgctcctccttgaaattctcataagccttagaaagaagaaaggaagggaggagatacaacctgtttcactgttgaaaatgaggaagaatatgttcagtgatccctataaggatgtatgtcctcataggacaatttaattttaaaggtgacagaaacgcacatgacactgttcagttttttctttttcacaccccatgaaaaccttcaggttttacacagaattgttgctatgcttcttacacagttctccaaattttctaatagagactcttaagctatcccataattctgaattaataaagctgatgcaaaagggatgagccagcaatgtaatacccactcagtgcgtcaggttttttggtcattttgttaaataggattttagagtttccctgtgggtatgagattatgaaatcttccagttgaagctatcagtgtaataataagaaatacctttcttacatgttactcaaaactggcagatttgtgagataatgattgtctcagctttaggtgtccacatttgaaaaatgtggatgtggtgccctaggattcctgcaggtggggagctggaaaaggtctttttaaagtctttccaacttgaaatttctaataagatttctaagacaaaacctaaatagaggaaaagaataaaagatttgaaggaaaaaaaaactagaaggaaaaaaaagttcaaatttgtaacatagttgcaataggctgagtccacaatgagtccatcggtttggtatgcccatttcatttaagttcctgggataagagccttggagtcatgatgtaaccaggcagtgcatagagcacttctccagctctgtttaaatacaccattgacttgttgcctatgacgccatcaagagtgttcctacagacacagccagacagctaagtcaggcagagcccaaaataggccacccattgactcagaagctgtttttcagccttgagttcaaattgtttccaggtttagtcagggttgaggggccttggttctaaagggtaaagccaaggtgctcagacagtgtagcagggaaacacagcagtcccaaggtgaatccaagacccctttgacaatccagtgagttttgtccctctcaagctcactttactatccaaatggactgaatgtttaacaccttccaaaactcaaaagatgaaatcctaatacccaaagtgatggtattaggaaatggggcctttgagaggtaattaggtcatgagggctttgccttcatgaatgggattagcacccttatgaaacaggcccccgagagctcattggcccctagagaaggtgccatctatgaagcaagaagtgggttctcaatggacaccagatttctggtgccttgatcttggacttcccagcctccagaactattagaaagaaatttctgttgtttataagctacctagtgtatggctttgggttacagcagcccaaacaaagacacagatctttacttactcccacaccccaaaatagaaatacatgtaaaattgtgcctataaaataaacttcttctcaaaggtgaatgagtaaggctgctattacttattggaaaaacaaaataatatggtagatcagtttttgatatctaatcattttggcttatgtttactatggcaatagatgttgaaagtgatgactaacaaatgaaatcatgacactacactttgcctggcgatgatgggtgtggtgtacactgctagttgctgaggcaacatcatgtctctatttcgtcctcattaagaaaattgtaatttttacaggaatggcagtgtgcccagtgaaaaaactacagttaccagactctcttgcagctaaagatggttgtgagatgtagttcaggcaagatatacatttattggggtttctggaaatgttccacttcctgctatagccacttatcctcccttcttcatctttcttcttcttctcctggcttgctaatgtaactctccgatgctcagcagttacacatgcaggacagaaaagctgaaaggtcaaatgagctggccctggagcagctgcactgggccctgaaatgaataccttcatagtgtttgcaagataaataaacctcttatttgtttaagcagcgtcaacgtttctgttactctcagttaaatcaatcccaatcagagagtgcagattgagaaacatcaaaattttccaaaattctatgggttttattcatatcaagttgtcatctttactttcagatgaaggagagctttagaaagatgtgtttgttgtctgtgtgcttcattgcaacagccctgccacactaggaggaagacaggttttgggtcctgtcttggtgataaagataaaactaaaggacaatcaaatctcatcaaacttctctctgaggtaagctgttgaatacaatattttattgaatataataaaagcaaagagaaatgtcaacaataatgataccagaatgcatcctgtatttccattaatgaggaaactgttctggaattaatacatggaattgattgtatggtatattgcctatttgcagtgtcatcccatgccattatctaactatttacagaaaaaaaaaagaaaaaacttctatgtaaaagcaaggaaaatgagagaaagaataatttcaaagggggatctaatttcagatgatgaatgccagctgtcaatgaacctataccgactgtgtttttgataaaactaatagtccaagcacctagaactgttacccctttaattgttgatccctcattttttaaatcataaatatgagtggctacctgcctccttcacaaggtcgtggtgagaagcaaattgatgccagtgccattttttccacctcaattccttgggttgcacaattttgtgggaatttcctgggaaaacttcaaagcaatttaaatagatctgtcccaaccatgcaattacaggagctgatgacgtttcagaaacagtgacaaagttcagaatcccattcttccatcctagatgggaaacatcaactttcctgatggtgagtttgtcagagtccattcccaagagtgggggtggggaggtgggggtggaggctgttgacaggcaatgatttctgtggagtagaagagaggaaaagagaaaaagaatttgttagttgtaacagacacttcggttaattggtcttcatccaccttttccttgcctgcctctcaatatagatgctgaaaaagcaagatactcattttttccagccacccttgcagagccagaaagcccatgagattcaatagatgtaagactgagagagattttcattcctggatgaaaggagacaggcctgggagaagagttttctcttgccatctttgcagtctctccactcctgacgtgtacagggtcaggtaaagacttgctgtctagaagtgtggcaatgattgggtggccatgaatcatgaaacttaaagacaaaaactaaacatgctgcagatttggagtggaaggaaagaaagagcatgggacccatgaccagtctgggaaaatctacctctgaacatcttattaagtacacattgaatgtccttccttagcaagtaggttgttcctgccaggtctcgtatccctcagtcttgaagaacatacactgacacagatgagtgggatgcacaaaatcatagggattcaagaaaggtaaccccaaagaaactcaaagacaatacaactcttaacagttatattatgaataaccagtctcaaacttagcatgttagttcttggaaatatttacctggcagagtaagaacccgctgggacaattacagggttcttcagccactgaatcgattttaaatcagtttctgtctgggagaaatttggaatatctccttcattgagaaggggcacaataagcacagctataaaaatcaaggaaaccatgaaaatagtttcttatattaatacagcaaacatattcctgaagggattgataatttcattttgtttttaataataattaatctttgcaatatcctggtggagagatggagagataaaggatgattactaccactttagagggggaaagatagaaaggacatgacattaaatgattacctgtaagccatagttaaaatgtagccccatgtagacagccagtaagacagcagaggtaagattccagatagcttaagttgcagtctggcctctgtccctcaggcactctctctaatgactcagcaggtcccaatgagtcactcagtgccttgcacctcccagaaactaggctaggatataaagagaacacagatttaaaaagaaaaccaaactaactcattcaaaccattgtaattaaggcaatctagtcattttttgactcttaaacctttagaataaaaaggcagcaaaggagaaaaaacgaaataaggaaatcaccaatataaagaaatatacaagaatacttaaatgtcagcaatattgtcaaacaacttctacaaagtaagcaaaaatggagtaactagaagtagcagaggagagaaatatcataaatatgttaagcattgagagttagctagggttgtcagcaaataaaactttttgtttgttaatatggcatgctataactctttcaaaataacgtaagtggcttgaaataaagtctacataagccacatggcctttagaatataaataacactgcctgagtgtaaacccttgccttgccacttactagcagtgccatttagcttctcactgccttaactttactgattaagtttattgcggtagtagtaacagctccagcctcagagggctctcacttaagagttaatttatctaaaatttctgaaacggcacctggcccagagtgaatactatgcaagtgtttattattacaagaattgaataatgtaattaacaggtattttaaaacatattcatatatatatttaatataaacatttggaagacgtaaagaactgatcatatcttaggactttaagaatatctcaggccgggtgcggtggctcatgcctgtaatcctagcattttgggaggctgaggtgggcggatcacctgaagtcgggagtttgagaccagcctgttcaacatggagaaactccatctctactaaaaatacaaaaaaattagccgggcgtggtggcaggtgcgtgtaatcccagctactcaggaggctgaggcaggagaatcacttgaacctggga

SEQ ID NO: 66539 - DNA, 1392 bp, Homo sapiens
tgggggttttcacacaatcctagtgtctttagtactttctcccttagaacgtgttgtcaaggtggtccttattgtcttactgtctttctgagtaaatgctgcaaagccctcacagagagtgcggtgcgtgtggccacctctccaacaatcatctcttcattctttcttctcacagagagccatgatggtgggattggccccacccagtacccaaggatggaccctcactggtttagaacaatatgtgtttatcattgtaaaaaaagaaaactgctaagccctaagcttgcacatggtaaagtgccacatgagccaaacagagcctgaaatatctcacctgagatctctttgaaaaccagtctctttgatgtggcactttgtcacatcagttttaaaaatggatcacatcaaaaagaggaattttcaatgttctcctctacccttccaaaaaatgatcggtacttaaagcctagaatcctttctaatgtagaataaataccctcttggttctgtagatccattcttttttcttttagccatgcttgaatgagggactctcttttgcctggcaaggaaataaatttagctttgctccttaacttttttttttttttttttttttacattctcctcctggattcagtgattcattttattatggtgaaataccaaagtcagcacagtaaaggtcatcggttatcacttcctggactttgagtaggctaccagggacttaaatgaggaagtttgtagctctagaaattactggaaatcatcttaggaacaagaagaaatcaagtcatgggtcaaagttttataagaagaacagaattgaggcatgaaaagaaattgggtccttgcagaccgatctttacctgaagtaaaatctgcactttttcagtcaaatggaccaataattcctttattagttaggtgagtctgagtctcatttttcttaattgataatatgaaccttcctaacagaagcagtatatgggctaggaagcataataattactgttcttacaaggatgaataacacataatccatgccctcaaaatctaggagttcataatttaagaactttcttttccccatccaatgcttcctccatagcatgggcaggcaggagtttttctttttttatcatgctattaaaattttttaatgtatgtatttaattgagatgttcacatgccataatatttaccctttcaaggtgtataatttagtggttttagtatatcgtaagattgtacaaacatatgcactaattttaaagcctttttatcaccccaaaaagaaaccccatagctatgagcagccattacccattctgtcttccccacaacccctagtaaccactaatctcctttctttctaatggattt

SEQ ID NO: 66540 - DNA, 2702 bp, Homo sapiens
cccagatcattttttaataaagagcagcctatgaagtcgagctcagggtatagaccccagacaacgtagccacttcactagggaggtgaccagttcatgggactgctgactttaccatttggcccagagggacaggcaagtgaatgcctgcaggaactagggagtagacatgttcaagatggcggcgccatcctcccttccctttgtcagtcacatgtgcagtaaagaccagataagatggcacccatcaactggaaagcccatttgcataataaaattatcgtggcgcgaccagccttccccacacactatctaaacgtcatacctgatcaaaccaatctgtgaaccctatgtaaatcagacacggcttcctcaaacctgactggtcctttccactgggagacccccttgtctatggagagatctgtttttctttctcttctgcctattaaacatttgctcctaaactccttgtgtgtgtccatgtcctacattttcctgtcgtgcaatgacgaacctcggggtatagaccccagacaacgtagccgcttcactagggaggtgaccagttcatgggactggtgactttaccattgggcccagagggacagtaactgaaagggctcttttattcagtgtcagctggtggatacatctgcctacaaaaaatgtgaagtcaaactgaatctctttgaggtgactagagcagagctgggaacagagaagtagagcatgaaacgttttgaaataatttgaaattttgccactatgttttttaataaaactattttaataaagactgtttttaagtaaaaaacccaacaatcaaataggcttaaaaatatcaattcattctctaaaggcaaattaattcgatacttaaggaaatgcaaaggaaagggcacttcagactacacagatatccaagcatataggtggctgcatgttacgttatagcttaatggcctggtttaaacagtcctggataatgattaaccaagaaaatggactttgggcctgaacctaactctcctaaggttgtgggcatttgtaccgatgtaacagtgttgctagatcaacgggaaaaacatttccaacgagacagaaaaacacatttactgctgtctccaccctctcactccagggtccatctgtgtgtttggagaatggaaacacttagattggttgctacggtcttgaacatgtcatttagatttccttgataaaagaaaactcattcctcttttattttctcttcccaaagtgcatgatccatgtgcttgctcttcctccctccccaccacacctactccttttgatttgttcatttatttttatttattaatttttttaacttccatacttggtatctgggacagctcatgcaactacactgcaacatagctgcacggtgtggctgacacatcttcccagtgaagccccttctacggcttcagtcctgatcttttaagtgtttggtaaatgaggcagcctggcataaggtcctaatgtcgaaagagttcaaaaggaaagttattcgtgcaaacatcctccctctcgcagaggattctccatagcccgccagagccctggcatgtagggatgatgaatgtgatgtcaacaggcctcagggccggaagaacccctgtgccactttgtggactgtgtatcgccttttgcttgtctcctgccagattccttccctggtcctctgagactccagagagtgtgtgggaagcaatttttgtacacagacccagattaatgtgtctgtctgataaaagcatgaggcttaaggtgactctagcattttccttccccaaagttagcagttttgttagtggaaatacatctatacctatcaattaagttatagcctggaagatacgtgatgaaatgcttctgagtgagaatagcctcaaatttgactggagaaaaccagagatcccattcatgattaggaagcaccaagccaggtcagcttggaggtgaattgatttcaccacgtctattagtttactaggctgctgtaacaaagtaccatgaactggaaggcttacaacaacaaaaactttttttcacattgctggaagctgggaagtccaagatcaaggcagatctggcgcctggtgagggcctgcttcctgtttcatagacggtgccttctgattataacctcatgtggtgctagcaaggagctctccgtgggctctgttataataagggcactaagcccattcacaaaggcttcacccccatgacctaattacctcccaaaggcccacctcgtaataccatcaccttgaggggttaggatttcagtatgggaagaactaaacattcagacattcaggccacagcaataagatgtctatagcaatccacgccttcattctccaacccccactgctccctgagtgcatgtacgtctgggcatcagtgctctttggaagtgtttagctgaatgtaaaggttaatggcaccttatccagggaacagctgttgtagtccctgtcagcccgattctggagagaacagataacagatagtgtttaagaagtaggatggtctctaagttaaatgactgtccctgtcccacagcatccgtgtgtgaccagggctcacaccctttttttttttttgaaacggagtttcactctttttgcccaggctggagtgcaatggcacggtcttgactcact

SEQ ID NO: 66541 - DNA, 1865 bp, Homo sapiens
tgcagtatttgcacataacaacctacgcacatcctcctgtatactttaaatcatctttagattatttacaatgcctaatacaatataattgctatgtaaatagttgttatactgtattgttacggaataatgattaaggaaaaaaagtctgtacatgttcagtactgtcacaaccatgcattttctttcgcaaatatttttgatctgtggttgtttgaatctgtggatgcagaacccaagaatatggagggctaactgtatttacagccaaaagtatctcaatggattgatcatcacaggaatcagtcaggagggctgattaatgtcgtcaaatctttgagggatttgtgaacaccagaatcaccatttcagatctgcaataggcgatctgtgagtgaattatgaccttttgggcttggaggaatgagaggtcatcaagcctagtgtttaccaaatctttttttttttttttttttttttaatgacctagactcagaagtcatagagcctccattgagccatgctttattggtaaagacagtcataaagctctattcaggctgaacgcaaagaacacagaccctgccactctatgggaggagagttcatgtcacactgtaaaagagtgtctgccacagtgaacaaatttttaccaatttatggttggatgacaacaatcaaatcaaattatttctattcggaggacaatttagaggacagtccattattctgagctgaagttctggtgctaaaatatctatatttagtgaaatggtgataattgtatatcattttgtgattcattttgtaaatgtacttactgtgcaaacataaaatgctggtgacttaaggtcagtccccagggttttgtgaaattcagaatttgccaatttgattgcatccacttttctactgagtgttgtgaggacatttgcagcattccccgtagtgatcatttattctctggacactcctggtgacctcagtctctccctcattgaaagatttatcactctcattgccaacaatccttaccagtgtaaagttcttactgtctgccctgctgatctgaaatctttcctctattcatttaacaggctttctactttcagcaccccaccattaggtcttccttttttaggttgaacaatcttaattcctatacatattctttatgtgacccagtcagtatattgggttccaggtaagcttgtgtataatggtgattatatagcttgaatgttcgtcccctcaaaagctcgtgttaaaatgtcatccccagtgttggaggtggggcctggtgggaagtgtttggttagaggggtgggtccctcacagatggcttggtgtcttccccctggtaataagtgagttcttactctgttagttcacgggagagctggtggtttaaaagagcctggcatctctctttggctcctctctcaccatgtgacatacatgctcccccattgcctgctgccatgtttggaagcttcctgaggcctcaccagaagcaaatgccggcaccacatttcttgtacagtgtgaagaaccatgagccaaataaacctcttttttaaataaattacccagtcccacgtattcctttttagcaacaaacgccaataaatacaggtagtattactccagtcttataggatctcaatagtctcaatttgtttatcctggaattatgatcttcaaggtatctgttggctgtaaatctgtgtttttcaatgctgtcgatgcacttctagagacactacagtttggtagtgttcttccttaacaggtgattacaacagaaaacatgttctgaggaatactgaacataatgactctatactacctttaacaaatatacc

SEQ ID NO: 66542 - DNA, 2204 bp, Homo sapiens
taatctgagttggaagtgtgggtgtttcttctctgtggtctgtgggtttcagtattagttatattctgcagttgaagatgacagtgatttagagcagggttgaccctaagtctcccctgccacctcccacaccagagccatattgtcactgctatgaccccgaccataggaggggcagaaagacttcgcagggtctcagctgaaggaggttttgggtggaagcggccagaaggcacctgtgttagagcagttaatcattaaaaacacacactaatgctcccttagaatataaatggtgtatgttagtgtgaacagctaggagggcagagggtgagttacctgaagaagaggaggacacagaggaaagagctgtgaccccagtgactgagaaaaaaggtgccgagacagctgcggccggcagagcccgcgggttctaagattcctctccactcagttgctaactcctgccccactccccacctcccacaacaagaaaacattcttcaagagtagctggtgcctgtgatttctttcataagaagcagagtctttaattctgcattggagattagaggtttactctaaaaggtcagctcaggagactcttgaaaacagctccaatctaaatgcaaccagttcataaattcctgtcctatggagataagttatcgcagcaaatccaaccacaggcagtacagctcctgaatcatcagggagaattaaaaggagatgatgaaatgggtagcttttagattaatacaacggtataaaacccagggaatgagagaatcttgagactgttattttctgtatctgccatgacaaacgttccttaattctttaaacactcattaaagaaatgaaaattactttctcattctctaaaaacaattaacaaacttgtagaggggagagagtctgggggaatgggaattgaagatgaagggatgggggaaacgtccgctggagaaaagcgagagacacacgttttaccagaaattgagcgcttaggatttttggcattgctgttatgaagacaggaagttctgatggacatttattaggattgccagatagaacacaggacgctcagttaaatttgaatttcaattaaacaaccaatagtacatgagacagttgcattccatatatttcttgggactaaaaacatcattcccttccaggagagagtgatgttgcaccatagcaggggttagcaaactatgacctgtgggccaaatccaatcctcttcctgtttttgtaaataaagttatattgcaacacggcctgctcattcatttaaatattgttcatggctattttcacagcataacagcaaaattgaatagttgtgagtcagaccgcatagtcttcaaagcctgaaataattactttctattctagtggaaatcaggagttttctaggtatagaagtttaggaaaaaactgtttctggtcctgaggtttcagaaaacatgacaaataggaggatgcaggaagtttggtgagtggggagaattataagcaggaaatttaagtggggatcagctttttttgtgtgtctgagacagattcttgttctgccacccaggctgaagtacagtggtgagattatggctcactgtagcctcgacctcccaggctcaagcagtcctcccaccttagcctcccaaagtgctgggattacagacaatgaggcactgtgagtggtggggtcaactttggaagggttttgtaaaccattttaaggaatacctttgctctttctgtttaatcttcctagaatagttttcctctcaacatgcctgttaaaatcttatccgttctttgaagcaagctttaatctcaccttgagcataagatttttggtaagaatatttttgctcattgttctttttatttatcagtgcaatagtacttatagtgggttatcattagctgttgcccttacgtaacagaaaagttcttttttttttcttttgagacagagtctcactctttcacccaggctggagtgcagtggcatgacctcggctcactgcaacctctgcctcccatgttcaagcaattcttctgccttagcctcccgagtagctgggattacaggtgcccgccaccacgcccagttaatttttgtatttttcgtagagacggggtttctccatgttggccaggctggtcttgaactcctgacctcaggcga

SEQ ID NO: 66543 - DNA, 2635 bp, Homo sapiens
tagccagaaaagttcttaaatgcagaaattattcgtctccataggtactaaagtgattaaggtagttatatataagtagatgttcaataaataaatattgaataaatatatatagtgatgggcctacaagagtgtaagaataattacaacattgtttgactacaacagttgaatgcttccgcagggacaatttctccggcatggtccacatcttccaatgttcagtgctatcatttacacctgcttctttacactgctgactaatggggcaaatcttttctactttattattgtttttgcctttctttattatgactaataacccactggccaacctaaatgtcagtcgtcatcttctttgctcatttccttctccttcaaattgtgctgtcaagcattctaattttggctggcttaggtgggattaatgctcctgactgtaaggctattttccccgctttgcacaaatatttctttaagcaatgatcatacttctttggtagctttgttacaatccggtaatacctgggcatctatcttctgtattgaaaaaagagcatggtcaaaggattcagtatcgagctccacatttaatgactaaagaagacatttaatttgaaataccatttgtctccaaactgacattttatatatgagaaacctgagatccacacagagatcaaatgacagacagctggttttcatggaagtccagagaagcaccttccagcaggttgcaaacttctccctttagaagataacagctaaaatctttctgtctcccactcttggctctaatttgtttatcagacaaccagcagttttgtcattgtttcttcatttggagacagagctagtaagtcttggtcaagcccagtgattcatttccttattttttttcactgcagttcccattcagggttctgccaagtgctcttttgcatgggggaggagggggggccgcagcctgtgccctcttgacctaaaagagctctggttgggcggtgagtcattaattccctgatgtcttttccaactgtagataaaaatcacagttgattaaatgatggggcaaggtgtggaatgaaggttggcatgggtgtaggaaaaaaagtacatttccttttccaaagtacagtatttattttaattggctcacaataaatagtaggggtaattgtaactcacaaaagagaagtgccctttggagaactggcatcacatagaaaagaacaaaaggacatagaaaagttttacagcaatcctgatatttgtgacttagagtgatttttataggattataaaatttgctggaattagtagctctgtagagaaaataggaatcacagaatttcagagccagaaggtattttacaaagtgagtcaacctcaacctccttagattgctgataagaaaaatgaggcaatgaagtgctcagaggtaggatttgtcttgcaagtccttggggtacctccatttgcaaagctgcaggtgaatcacaagttctgatgacctctgacctctagaatcacctaaacacagtggagaaactacagctggctacagggtatccaaggtgggttaacgggacagccctctttcagacatgctgtactcccaaagtctcatcacatttagcaggacttctcccatatatgtgggggttcaggcttcccagacccctctgtgtctctccattaacatttcagtttggtattgggcttcctggggctctaacaatgctctgagaattcaaaatgtagtatagagaggatgtgtgagatgaatatttctaaaacataatgatgttactcttttgcttaaacgtctttgaaagtcctttcttgccaacaccagtattttaaattgtagttttattgttactgagctatggtaaggccaacaggttgggagatgattggtatggaaaagacagtttgttactaacagttcccaagaggagggggcaagtgtcctgctgggccccacgaggaagcaccagggtgtgtcgggaggcaggagagaggtggggcagagtgtgggcaggaagttttattgtggcttccacaggaaaggcaaggctaggcaggcttaggattggtaagcctgaataatttcagtgggttctgggctagagaggctgtccctagttgtccggtacctggctcttggatgatgagcgcagatgaacattgtctccggggtatgtgtgccaggtggaagatgtggtgggtgttggctctggattgttagtttccatatgaaggatgggctcccaggtgagttgtttgctatctctaagaattgtcaagcccccagagaggcagtctgtcccctgtcagcaaggccccagatgccagagcatcaagaatgcagaaaatatagataatacaagcttcatttgcaggagtgtgcacctcggaacagttttcctgggagatgctctgaagccagaggattctgtcctctattttgggaactgctgcctgtgggtcccctctggcagtgtgttagcagattaaggtcattgggggaaatcctgcttgaaagaaacctgttagtctttatttaaccctgttttccaaacttgtttaaccataaaatccttttgaaaaacatgaactgtcattttta

SEQ ID NO: 66544 - DNA, 1532 bp, Homo sapiens
ccatcaaggaatctgagatcattggctttttcctgggggcctctctcaaggacgaggttttgaagattatgccggtgcagaagcagacccgcgccggccagcgcaccaggttcaaggcatttgttgccatcggggactataattgccacgtcggtctgcgtgttaagtgctccaaagaggtggccactgccatccgcggggccattatcctggccaagctctccattgtccccgtgcgcagaggctactgggggaacaagatcggcaagccccacaccgtcccttgcaaggtgacaggccactgcggctctgtgctggtcggcttcatccccacgcccaggggcactggcaccgtctcggcgcctgtgcccaagaagctgctcatgatggctggtatggatgtctgctacacctcagccaggggctgcactgccaccctgggcaactgcgccaaggccatctttgaccttacagctctaagacctacagctacctgaccccccgacctttggaaggagcctgtattcaccaagtcttcctatcaggaattcactgaccacacctggtcaaggccgacccagagtctccgtgcagaggacccaggctccagctgtggctacaacacagggttttatacacaaaaaataaagtgaattaagcctgtgggggaaaaaaagaaaaaagaacagcttctaaaataaagattgattataataggctgggtgagacttctgacaaatccagacatgaggcaataggaattctccctgagttgagaaatacagtcctaactgtttattcagtcaaggaggattacacagcaacacgctagaagaagatttaaggatgaaaagtccacatgatgaaagaggaagtgtcaccttggagggtctggcattcaacattggattaaactgaagcccaggaattcctacaaaacatccccccacctagtactaagtaatcttcactatctgcctgacaatggaatgtaggaattgtgtcacacccagagggtgcaggtggagttttctcaggatgccgcagtgcagggtcagtgtgggatttaataatattttgagaataagaagaatcaagttgggaggttttaggaatagtgaagttacctcccataaagtccctttcccaagattgcagatatcatcatgtacttaacaaaaccctactaatcagagatatgtattgtacaaatgaaaccttgggtggacaacaagaagtgtgaaaaaagttgaactcaggtcaggcacggtggtttacgcctgttatcccagcactctgggaggccaaggcaggcagatcatgaggacaagagatcaagaccatcttggccaacatggtgaaaccctgtctctactaaaaatacaaaaattagccagacttggtggcgggtgcctgtagacccggctacttgggaagttgaggcaggagaattgcttgaacccgggaggtggaggttgcagtgagccgagatcgtgccactgcactgcagtctggcaacagagcaagactcc

SEQ ID NO: 66545 - DNA, 630 bp, Homo sapiens
ttatctggaacatttttacagtactgcgagcctatgaaaaaagtaaaatagtaaaaaaaaaaaaaaaattagagactggtaaagttttattttatctgcaagtctgtcataaaaagtgtactttggcttccggtactcccttctcccaggaatgagcaatttacgtgcattcagtttttgtggaggtgaccattttcctttgaaaacggcccagtctatttattttagcacttggtttggggacgggtattaaattccgttgctggcatcgcgccaagacagtaggccagcagaggccgctgggctgaagcctgcaggggtgcctcctctgccggatctggccaagcctcctgccagtcgaggccctttaccttccagtcacaccaagaactaaaacaggatcagccaaaggtacaatgttttcccaaagcgttaaaaatcgatgcttggcttgaaatacagtctggtctttgatatggtgtgtgtgtatgtgtgtatgtggtgtgtgggtgtgtatgtgtaggctgtgtgtggggtgtgtggtgtgtgtgtatgtgtgtttgtggtgtgtatgtggtgtgtggctgtgtgtgtgtgtacatggggtgtgtgtgtgtgtgtgtgtgagag

SEQ ID NO: 66546 - DNA, 1589 bp, Homo sapiens
attaggttgttagcattaactttcttactggtttgtataaatactttttaaatagtaaggactgtagcctttccatatgtgttgcagatacttttcccagtttgttacttgtattttgacatttaggtaatgctgttttgcagagtaaaggcttgttatttattgtagtcaaattgcacaattttatctttataattactaggttttgtttatcacctgaaaggcttcctggtatattgcttaaatattcattgacaaagatttagttaagctttctgtcttcccagtgctcttacagcacctggaaagatgtgaatttcaaggatttattaaaatgactgcttttgttttactccggataaaaccgaatcagtttgaaccctacagaggagcccagaatgatttctctttgtctcagaggcctgcctttctctctctgtctcagaggtttgcctccacctcccctgaaccttggcccagaagtttgccttctctctcttccttcccccttcttagtggcctctgaacccaagaatctgtcctggaagccaaatggaaattctacacagaagcccgtctaagtcttagcagcaatgttgtactcgttttcttctttaaaattaatgaatacacagccagaggtttattatgccacacacattgtgttcaccactcttcatgattaaaagtctcacttctggggtccaggacaacttcctaaattcatcaccgggaactgcattgcaacattgctgattctggccctatgattaattctacagcttttgaagaaacccaaactggacagacagttactgaatttttgtaatgtccgaggcttccaggaggagtgacacatatctctgctggatgagctcacagttccaatgagaagatacaagctgaaagattgcagcagaactgggaagtgaaagcacggagaggctgtgggacatggaggaggggcggtaagattgagaaagaggtaacagttggggtgactttggacctgagacctgggcaggcataagaagtctcactctctattccattcttggcaggggatgtttctttgtaccaggtagctttgcgcttgttttgttccataaaagtaaatctctgttcactaaggaattatggtagtgaatggtgactctccggaattatagggctaattccaaaataatcttagttttattcccccacattgtaatattaacacttgggaattttgtttatcgcgatgtttaataatttggccagcagagggcactgcatactgacagtctctccacaccagtcgctcaaatcctcaagagttcccgaagtgttaggcttaactcaggggtgtttgcaagtgctttgctcttctgtttcagacataaacatatgtcagaaattaaaagagggttgtgaagcaggaaattagattaacagtagcatataatttccctctatttgttaataaagagaaaaaatattggtatgtacacccatgtctacagggttttaaatgtagctgtattaattaatgtattaataatatgataacactacttcttgcataaatcaacataacttctaaattc

SEQ ID NO: 66547 - DNA, 746 bp, Homo sapiens
actgcttagagtaataaaatggagtgatttggggactataaatatttgagatttttttaaaagtggatttctagtttagagggacattttcatcatttccttttgaatatacagaagcaagaatagttttatgttatcaaatgcttatgaaccttatagcctcattctttttggatatcatagaagaaaatcaataaaaagatagatacaaagtcaaactatcctgccatcaagatgaagcattgccctctttaagtgcatttgtaagttgtggcataaaatggatcataaaagttttggtgtattatttatatggagacagctttcctgtctcataaactcttactttgctttcagtgcactgggaaacaaggaagcctagaagaggcactaagaggtattgtgtaagagtgtttattgattcagacaaactttctaaagtccattctcagtcatgctgcaggattgcacgtttttcatcggattggttggagggtgactctcaaggctatgacctggcctcctgatcgtcagcttgtcagtgaggttcggcattacctgaaaaagctacagtgcattgatggtgccacatagaaacagtgctccagcaatgtgttgttaaatagcactgaggtttagctatcctgtgcctgctcaatgcattaaccattcagctcaatgcttttacaccaaatactaaatcatttcaaaagccatccttgtcattacaaattagcatgtcagaa

SEQ ID NO: 66548 - DNA, 898 bp, Homo sapiens
gccagtcttagtatgttgcagaggaaaatccagagactcatgaagattggattgctagactagacttactgtgtaagatttattcatccacaccctaaattcatccctcaggctgttcatatgacatttcccccatgaaggctgagagaggtatactcctggcaagaggcccggtatccctgaggaattctaaggtgactcaagtgtaaataagaactggtattgggaactgctgccatcaaagtaggttctttaaattctgtggggttgattgattctggggttgcaagggccaagaagtgacactttgtcacctatggcaaggttggcacagctactccaatgggaattgggcccacagccatgaaaagccagttcactctggctggttggaactccctagtatcccagtcctatgtgatctctggactctgttcaactgcgagcaacctggttattattcacttgctttataaaatgttcacatgatgcctgcatggcttcatatttacacaaacagaatccaagtggccctatgtggatttctttccaaattctagccacagcagcttcttgaactctgatctctgtctctttactctggaaaaaggcagcgctccttttgcaataaccctccctgaactatgaccgagacagccactccaaggcacagatgcaaggcaacccaagatattaccttatttgtttgccttccttcagggactatggtgctacactgataactatccagtgtcttaagcagttgacacatatatctgtccagtgtttgaattgtttatggaaggcaatatatgacccaattattccaccatggccataagccgtactgtccatttggccctggactttcttttttccttccttcctttctttcttc

SEQ ID NO: 66549 - DNA, 1181 bp, Homo sapiens
gagagaaaagtaatgggttaagggagaaaaaaattctggcagaacattaaaatagaaaatatttagtactgaaagtgtggccattttaattgtctttttttaagttatattttagcaaacatgcattaaattcgaaataagaaaagaataatctaaaaactgtatttccctttctaaaaatacacctcccagatatataatccttcattactaagtagctgtgaatagaattcagtattccttcttcattcctggcattcaagttcctagaagcgatttgctctatgatatggcacagagatacgttataaatgagtacacagttgagatcatgaatccaaacatgtcattgtactttttggcaagggacagataaatgttaatcatcacatccagtttgccaagcaaagagaccaaaatagaaagaatgtaattacgtatttgtgagttagataacaccacagcagtcccctctaggatggtggaggcaaacgtggccaatccctgtttatctctgccaatgtttatttatttgtcagttggttccctggcagtcagtaaggtaatgggcatacaatcaggaaatggagataaatatttcaaatttcaagtcccttgaatgcttagtgaaattaaaacacctgaagaaaaaaaaaggaaaaactttgacatgaataattgggaaaaacagactggctgagttccatgagaggaatgcttgccataggtatgtccccggttgcctacctgtcccgtaaactgcctcttttgatcccactgcctgattggtcagcttggcacccataacagcacctaccttccatagaatggattgatcttacatgttaggtcaaggccatctagaaaaaaatcaacaagagggtacttaattatccctagatattggtgagtgtggactttataagcctggatgcccatgttgaagataaaataactctaagataatgaatggagaattctcaaaacctgtaataaattagtcatttgaaagtaaaaagagggatgaagagagggcaatttcttgccaatacctcaacaggataacattaaggcagagatctccttctgaagctacatgaatggttaaagcaaaaatgccttttaatcactgcacgtgtcctctaatggggaaaaaacaaaattattttgggaatacataa

SEQ ID NO: 66550 - DNA, 1841 bp, Homo sapiens
gattaaaagtaatcataattttttactgttacttaacatttaaatattttacaataacaaatatcaaaaaatagtttaaagtagaattcatgctataatattacaccggaatagtatttgtgccatactagtacttctggagtaccaaaatcaagtatcaaaataatatcaaatgcaaaggacattttattgcaacttctgagggatgacattagttgaattttaagaatgatgtgttaggttcaacttataaatcactgttagacacataatccttaatccacctctatgtagcaatctagaaaataacatcagatataaagccaataggtagaattattgtcaaagtctctttgtttatggggtgattgaaaatttcttgggaaacctgtccaagggtattttattgttttttaaaaaattatctcattatgtctccatgcactaataaaagagcaagtgtgtttccttcaggtccacagtgaatgaacatgaagcgtggaaggactgaggtagattctgtggtagaataagtggtgaactgcacaaactgaaaccaagaagcaaaatgtttcatcaagatcctggccagaaataagggctgcataattcttaagagcaccaagcactcaaataacgattcatccttgaggcaggtagaagaataaattccatttgtgtgtatacacccagaaaagtgccccgtgagaaccacgtgaagtaggtttcacggcaatacaacttctgttagcagggccctcggagttagtcaataatttatcattacatgaactgagcttgggaaaatcaaattaagcctgagcaaataaggaacatagttttatctgactcttgtcactcattaatccggaattgatttttgggtcagacaccaaattttaagtggttgtatgtgtcattactcagatatgttgttttccttttggtattgcaatgaatcatagagacatgaaccttggcttagaatatttgcatttgttaagatgaaagtcaaaccattcaactttacagagaaaaggaaagttaagggcaaaaacaagagtattgggagtttgtttcttgcatgagacactgcttgagtattgcactggaggatatgcaaatgttccttaatcatgtgcctcaaacagcaagtctgaacttcttcattaacgtcagaggacagaaaagttacccttatcttagcctgctatcttgatataagaaattcacacacagaattttccaaatttgatagattttttaattatgaggcatttgaattcttattttaaatttacatatgccaatgaaattacctatgattataagcatgatttcaaactaactctaacaggaataaaaccccacattacattttaataaggtagtatcaatcttgagttattaagaaatgtatatgctgcacactgctcagaaatatgttagcatggtattgttggccacccacggattatcacacagataagggcatgctagggaccttcagaagcaaatgttcatttcatgttatgctcacagagttttgagactgtaaaatgtatggcacaatttgaagtatttggccactgtcagtgacacgaataggttatataaactgcatttacttccagtggaaaaagtaaactaccacgctgatgatgatagctgagcagaccttagaacactaccctagaagtaaatttatgatcctgtggcatgctagtggatcccctgaacacactaaacctttgattgaagatttgtaagaaaaaaaactaatttccagaactatatatatatatttacactggaaagaaaatgaagtggaaaataaagta

SEQ ID NO: 66551 - DNA, 2244 bp, Homo sapiens
cctgcctgcccgaggtatctgcttgggggatgagggtgtcaactgataaggttttgatgaacagactctacttccctaagttgtaaggtcatgaaaaacacgaagggagattcttggttacagaagagcgaaaatacgaaggcaggggcggagcacacgtgaatttagggcacgcatcccggagaaacgacctcttggacctgcacctgtcctggcaggtgcgcgcatccccggccacaggcgccgcaagaaaaaatatttccccgagaggctactctatttgtgtcataacttagggtaccccacgttgcagggtagaaaggatttcctccggtcgttcttccatacccttctcacgttgaagacggccacgggccttgcgccaagctggacgaataaaatacacggtgaagagagcggggccgcgcagtgacgggcttcccgccaggggaccccacccgcaggccctacagtcacctgcacccaaaggccctggcgcgcccccgggccgcgccaccgcccctgctgggcccgcgcagcgtctggaggccgagccagtgctgctgcaagatccgaccgcgtccagtcgccatagagacaaggagttcaccacaggaccgcgccagggctgaaacgaagagtgcacgcaccgcccccacgcccgcacgtcgccacaccccttatgcgcatgcgcgcgtgagcaaaagtaacggtatgcccacccttgcgcagacggcaccgcgccagacacccgctcacagagcgggcttctagaaacttccgggcctcggcttccttacccacccctaacattctgccgcctagggcgccaagccaagttcgcggcttaaccatttaggaaaccggtgcctgctttgcagcggcctcgttcatccccacttgctgactctttattgtccagtttttctgaaaacacagtaaaacgcaaaaactaaatcatttgcccacgcggaattggcaagaccacagtccaagggggtatttcccactgtgcacagtcctctctataaggatcaggaaaacacgtagattgtaactgctaatttggcttttgcaagtcccgcctgaaccacgtagggtgggtggtaccaattcccccaccaacaccccactttccgccgctccagggacgcgcagcgtctgcgccgacgctgggcgcggaggcgtctgggggcgcgggaaggacctgcgccgtgctctggccgccttgaattgtgggagatgtagtctcttttgcgcgcctctttgccgtatcccagttaagagcgaggttttcaaactactattcccaggaagacgggggtttcccaggtgactttgcgaaggcatggcggggacactgtgaatgtcagcccagaaggtgatcagagcctgttaattaaaatggaaagaagacagaagggaaggtagacatcaggttctccctggagacttttcgttttcatttacgctgcggaaactgacgtttttgcctaacaccccatgtaatgtaaacgtataggcttgagtacgtgtccggccgcatgtgtagtgaaccctaaagctttcctaattgtagttagcatcgtccctaagcggaacgattttccgtgaacatgatttgtacttttctacgagccgtacagtatacggagaagctgcacaggtcctcggcaaagcgattgcttttgccatacatcgtgcttaacaaagcgtgcttgaagactgagcccagtttgagatgtgggcttcaatatcaaaagaaaacgctgcgacctagatgtattcttggagtcacccagaaaaccatctggacgcagggaccgagcccccgaaaagcaaaggaggatggcagcaaacaagtgtctgtgcacaggagtcagagagggggaaccgccgtcccaacatcacaaaaaggtaaaaaggagtactttaatgattgggctttcaacagacatgacaagagctgccaatgcccttttataccaagttcactgctaaaggtgaaaaagcaattcacatgaatttttaaaaaccgtttaaacataatttagaactagaacatatagatctacagttttcttcacagattggaactcagatgtgaaagttgatcttgaatttgatataactttttttcattatgtttgggaaatttttctcaagttatattggctctgttacatataataaagagtaattggataggataaaaagagagagagagagattattgactcataa

SEQ ID NO: 66552 - DNA, 1576 bp, Homo sapiens
tgtgtataatttatcttgatgactgagtttttgtcacttcctttaaattgggtgcccaaagtgagtcctcctcttgcctccccgagtgccagagccctgagagaaaataaaccattgctgaggaatccaggtatacaactttcccaaatccagatttatatgctgcttagaatagcaaaatcattccaccataccaaaaatgggcaatggaaccaaaaacgttcatagtattctgaaacatacagagttctacatcttgtctttgcgtcttccattgatccaaaggagagaggagtaatgaagataaagaagacagaactgattctattccttcctgccatgcgtttaacttttcagtacacggcagcaaacatgctcagaatggtagattaatgcgtttcatcaaaagagggagccctaaccttcatttgctcatacctgaggctttggctctttgtttgtctttgtaaatagaggaagaatgttaagtattccatatgaaagaaccaggtatcgttgagttgattctactgtttgccttttgtcgttttgttctgtctccaaaccaattccctctgctgggtgggtgagaaggcttcctggttctcagccatcgtaacagaaattcagggtcttcagagcctaaatgacgccttaccccttcatggccactagagggcaaccgacaccaccataatgaattgatccacccaggtttatgatattaactaagttgataattatttacactataaaggcattcttttgagaccattcttcctttagaatatccttttaaaggtatttgtctctttaagatatattttatatagcatttatttacatttcgatatcccctagtaagtccaattaaattttaaaaaatttggacacagcctccatgtattcaacaaatatttaaatattacagtttgcattccataagcctttgtgctagacaatgaggccacaaatttgaaaaaagactcaatccttgtcctcaagaatagatgaatgggaagcacaaataactacaagtaccagagccaacatttgcacagggacaggcagcatgggtaagggagtaattcactctttgggggagggagagaattcagctaaacttgtgttgtattttgcacaaaagggatatggccagtatgtaaagtaacatgcatttaatgggaaaagtgaagcaattgatatactcttaaagtgtttattacttgaaatgttggaagtttgaaatcattcccactctctcccaaagggaatattttgttcatcactggatttatcagagaaaaaagcaaaaagaaagtgagtacaaaatccccaagacctaagtgcattagaaatctcaaagggactatgaaacattcccctgatgtttttcccccataagaagcttaatttgctaaaaccctttcactcctgtaatcccagcactctgggaggccgaggtaggcggatcatgaggtcaggagatcaagaccatcctggctaacacggtgaaaccctgtctctactaaaaaaaaaaaaaaatacaaaaagttagccaggagcagtggcgggc

SEQ ID NO: 66553 - DNA, 843 bp, Homo sapiens
tgacagagggagactctgtctaaaaaaaaagaaaaaacactttaaaagatatattttaatttgagaaagagttttttaaatgtattttctccaaaagccacattgtatatagcctggtcccggaaatgctcctcccctcccacttggagaagccagtagggcaggaagctctcctggtgcatgcctgtgggcctcctgtttctgtgaagtggggtatggctcctctgttttgcataactggagagctgaaagggacattaaacaaagggcagaacatgaacccggaaatccctaccaggccaacgatccagaggctgctctctgtgccacttccccatgccctgggcatggagctcaccggagattaacccagcttccctgagcccaggggaacctaggctcggcaccaccacccccaggagtttcccgggattgtaagccagtggcataagtcagctggatgcagagaatgacctgtaaaccctgggcaacatgcatcctagctttgcctgcagcagtcagagccagggggctgaggaggctcggccggggcgggggcagtggttcagtccccctggtccctgcccagggttgaggcagagggaaagagagcaatcaggttgtgggtgggggcaagcccatgctcagccactggggccatgccaggtggggacgtccagctcccggacacagtgcgctgggacaatgccagagcctgcaggtcaggccatggtggggcctggctccactgctcaggcttcaggcagaagggcacgaggttggaacaggagctgttgatgggactcagagctagaagaggatgagcaggaagagagggcaaac

SEQ ID NO: 66554 - DNA, 1738 bp, Homo sapiens
ccccatctctccaacctcctgccattgtctcaatggccaaaccaactgttctgagagtctaaaaaattaagcctgcattgaaggctgcaaagaagcccgggtgatacagagctgagcaggggacaagtgaggaatagatctgattgcagaaaattccaaggaccagcagcccgtagggtggggttaggataaccagagtcaacatgcataaaggaagtttcactcaaaaaaattagctatggcctgtgtggattcttttgactttgaatgatggttggaataaactcttgtgacttgtaaatagaagtactgaatgtgagtcaacaacaggcagaaagaaaactgtgatgtcggaaaaatcaaacaagcaaatatttatgtcagataagaagttcatcaaccccaatgtgatgatctggacagagtgggtccctttaatatacaaaatagatggatgtggactggctgggtataaacttgaaatgggggctgggagtctcaccaccaccctcacactcaccatccctgagaaccctctgagtgccagcaggtgtactgagaaccacacaaaggtaagcacggatcacagatttaacacaactctgcaaccttgtatcattttcaagacacatgtggcatcccaagagatgtcaaattcaaccctcagtactgcacgaggctaaaatagtgcaaaccaaaattataaagctgtaaggggtcttagagataaacttgcctataaatgagccgtctgactccaacccactatctaatttcaggaggcagaggtcacaaatgtccctgatttcaagttactatttctttcctttttttaagggatatctgtcaaccttggttctcttaaaactggctcttgtgcaacaaaatgttgcttgttaccggttcaatattttactgttgaatacatcggggcctaaagaagttatgtgacttgtccaaggtcacacagtaacttaaaggcaaaatcgaaatttaaaacctgcccaccaacttctaatcaagcagcaacccttctgtttcagcaaacggtgggtgtggagaagcagagctgtgctgccacccgcaaccctcagagttatgaggcaacagcctgtcgctttccaaaatgtcccatgaggtcagctctgctgagggttgtaccagtcaaacctgtgttgcaagatggcttcaaatatcaattaagattgtaacatgctggactacaaatgaaaaattcatgtgagaagagatctgagtttggataactctgggtctcgttcagaaagaaagtatgttgtgtttcaaatatgacattttaagtgcatttacttcttttttggatcagcctctgattctgggctattctagaatttagtgcaaacctctgccatagcacacggcccacttgattgccttttcttcatgcaactgccttccacctggccttggtgcttgcaactctgtatctctagtgattagcatagatttcaacccatagtagtacctcatcaatatttactcgacaaatgagtatataaatgagtaaatgatcaatcatcacaccttctagagattgacagctccaaaatttgtcaatatgatgtgtcatgtgtacattttttcctgatgtattccttcaaccaggtgatacatgtaaagcagtaacaaattagattaacagtccttaataaagattgctagaaaactaagagccaagaaataaattcataatttcaaa

SEQ ID NO: 66555 - DNA, 1352 bp, Homo sapiens
tagagacggggtttccccgtgttagtcaggatggtcttgatctcctgacctcgtgatctgcctgcctcggcctcccaaactgctgggattacaggcgtgagccaccgcgcccagcgtttatcaccatattatatccgccttatctgtggttttagttaaccgcattcaatcatggtctgaaaatattaaatgaaaatgtccagaaatcaataattcacaagtgttaaattgtgcgccattctgagtagtgtgatgaaatctctcaccatcccgctctgtcctgcccgggatgtgaatcaccctttgtccagcacatccgtgctgtatacactccctgcccccatttgtcattttgtagctgccttggttatgagactgaagaaaacatggtatagataggattcagccaaggtttcaagcatctgctgtgggtcttggaacatataccctggtgataggggggctactgtattaactccatataaagtgataatatgaaaatgactaattttaattcagaaatctgtcttaagtgttttaacattgcctttgatattctgtttttaatttattaaggcttcattgagcgattcatttagaaaattatttttaaatagaacaatgaaaagatgaactccaatgagagcattagcactaataccaatttgatggagtctaaattaatgaggttgcattgttgccagacaaatacaagcctttcaaactcagcaccccctgaaagtagaccctgggacaagtctgcaagtgcaaatcctttatttgggaggtgaccccagagtggggacgtgaaacaggggagggaagagaggcaatgaagcctgggacagtgccacagacagctggtgctcaccctagcaggggctccagagagggcatggagcccgggcattgtccctggtggaagggaggaagccagggtatttacccaccaactcttgcccttgttgactgagatcactcctgggggcatcacctccctggccctctgcgcctgccagtgatcatttcatggcagagccagagagtgccctccctcagggagagagatgcaggaagccaacagccccaaagggaatgccccaaggtgatttcctggtagggagaggacctggttggggtactgagccaggcttgggaacactggagcagctacacatacttaggtaccatcatcccttctagttattttctagaacccccataccacagagttattctcccctagaacttgaaagggccccagcttccctgaatggctctggccacccaaggtgcagtgaggtgcatggtctcatgatgacagtgttttctgctatattataattaatgaa

SEQ ID NO: 66556 - DNA, 2405 bp, Homo sapiens
tttagaaaaggagaaattttattttattttttattaaagggtttcagcctgcaaggtggccattcttctggctgggaagatgcctccagccaagaccagagacaggcacttccaggagggtttgggataggagctttatgtttaaggttaactagacatacatattcagcaggatataggaagagctatgaatactcatgaaggcggtcctgacacgtgcatatgtaacatgtatcaacatatgacccgtgttcactttgggctggagattaacgttcacatttattgcaattaggccgtatgtgtgaaaagggctgttcaggaccaaaggttctcaggtgtgcagcctctgtaaacttatcaggagaaagttattgaaatcagtctcttgtccaatcagagctgtagctgtgactggtggaacaggggtcaattagtcagcatctggtgcaattgatttaacagtgcttatctcaaggccagtgcttgtttggctgctagagaaagagaaaaccttgtggcagtgagaacatagcttattctttcagcataaggagcgcgacttaacccttgcctggcagggccctaggtcctgtttctaatttgttatcttactgcgtgctgtcctatcagtctttctgatctccattttagcattaatgctgattggctgttgtgtctaaactgcaaagaaaggggttataaccaagcatgtctgccttgtcctgtagtcatggctgggcatgttttaaagttttttctggggtccccttggccaagagggggtccattcatataggtgagttaggatgttatttttagtttgtagtgtccagcccatgcttcacattcttcaattatctcataaaatgtctttttacactttgtttaaattgggatctaaacaaacaagacgtatacataacactggatggatacacagcttgagtatttcaacccataatagtttcccttttatgtagagccatttatttgttgaagagactgtgggggaccttatcaaatttcccacagccttgacatggctggttgtcaagtagctcctcatatataagggatgtttaggtcaggaaaaattgtccagaggcgaacccgaataaatgaatggtgaacctggtgggtgatgcggcgacaagaagcatggtgataaaaatccatgggaatgggaagaaaggaaggggagaggcagactgcatttctgaccaaggaaaagcctctaggaaccatgacaccagggtctgctgaaagaaagctggtagctgatggccaggcaccagtgagctggcgcacattgattacaagaaaatcaaagtcctaaaaaaaaaaaagagagaaaaagaaaatcgaagtccttcctgtaaaggttgtggaaggaggtcaggctttctacaggcttccatggtggaccttggccagcattcagtctggtcatcgttctctccaacgtggctcatgttaccaggaagtatctgtgttggaattattcttaccatggaaagaaaactcctcagcttacctttacagcctttcaaacaaataaaacccatcttaaaaccacttgtctttttgtgttcatttttatttaatttacacctttaccttaatcttgttttcagtatctggatatggtatgaggccaagatccacgagaacaggcacaatgtggctaaagacccagtgaccatgcaggacgataaggacaattctgaccctcccagaccgggcgtcccaaagaggacacacccatctcttttctggattcatgtcctagggctgccattagaaaacaccacaaatggggtggcttgaaaccatagacatgggttctctcatagttcaacggcccgaagtctgaaatccaggtgtcgtggggccgcgctccctctgaggcctgtaggggagaatccttcttgcctcccggcttctggcatttgcagtcaatccttggcattccttagcttgcaggtcactccaatttctgccttgtcatttggaatgctctgtatgtctctgtcttcttataagggcaccagtcatattggatgaggggcccaccctaccctagtataacctcaacttatgaatttcaccagcggcgaccctagttccaagtaaggtcacattgccaggtactaggggttaggacttcaatgtagacataattccacccatatcatccccctttcataagcgagcttaatatgacttaagcatgcagctgtagctccaaataaaatgtagaccatcaaactccctctccccttacagtaatgtatctgccttgtccagactcacatatgcaattctacaggctaccaatgttttgaggtattgtacgatgccaccctcgtggaaagcagcatgtcaacgttaagccatccacc

SEQ ID NO: 66557 - DNA, 4664 bp, Homo sapiens
ggcaagataatgagatcctgtctccaaaagaaaaaagaagtagcagcagcagcagcagcagaaaggtgacaagagtgaagaggtaagaattagagatacctgggccaacatgctaacatgtcctgctgagtaaccttcaccgagttacttaactcttcggaggttccatttcctcatctgtaacaatgaggcaaccacaggagcctggcagggctgctgtcaggattaagtgacgtgatgaatgaatgatgcttacttagcacgtagtgctctggaaatggcagggcttgttacccaccttgggtccatcccagacaggcacacagggatggttggaacccgatccacaggggatgcattccctgggtgaatgtctactcccctacttcctgccaggctttttggggtgcactgaggtggtgagtgcacactagagacaagcttagcagagatgctgttcctgttcatgggcagagcagatgaacaggagagcagcctcattcagcccagctgcaggtgggtcacaggtagcacagagaagcaatcatcatgtggtttgtgtgaactgaagaccagcatatgagagccttggtggacctaatcgcctccatcctgtggatgtaaactctgcctccgtcacgggcccatggagccaactgtggatgtaaactctgctctgctggatagctatgggagcaacgaccagaggacatacgtgtggcattcacagccagggtgagatcatcagccagtgtgtgtgtaagatgtctgtgaaaggtgaagtgcctcatcacctgaaataagaaagtctggaagactctactaatacttcctgtgtatgaggacatagagacaaggtggttggccatgagtgcaacataaaggatgttagaaaggggagacctttctgaatatattggggcacaaaagcatattaacccatacagcaattgccctaaatgcatgcaaaaatgagcaagctggatgcggtggctcacgcctgtaatcccagcattttgagaggctgaggcaggcggatcacctgagttcaggagttcgagacgagcctggccaacacggtgaaaccctgcctctactaaaaatacaaaaattagctgcgtgtgctgccgggcacctgtaatcccagccactcaggaggctgaggcaggagaatcacttgaacccaggaggcggaggttgcactgagccaagatcatgccactgcactccaacctgggagacaagagtgacagactccactgcaaaaaaaaaaaaaaaaaagagcatgcatgcaaatgtttcacagtctatttccccacccaaaatattggactcactctgaactagagtttgtgacaaagtgttaccaaccattgtatcaaaggtctaaattacagtgcaagaatcaagagcaaataaataaccaggacacagataagaaataacaagaaaacagtcatggccagatgccttccgccagccatgcctgactcactccaacacacacttagacacatgcgacttccctagctaggttttgctcagcggcttaatgggtttcaccttgcattcagcacctgtgacttataggcttctcatagattctagtggaatagtctcctccaaatgttgtacatttttaaaaagttaggggctggctgggcgcagtggctcacgcctataatcccagcactttgggaggccgaggcaggtggatcacctgaggtcaggagttagagaccagcttgaccaacatggtgaaaccccatctctactaaaaatacaaaaaattagctgagcatggtggcgcatgcctgtaatcccagctactcgggaggctgaggcaggagaatcacttgagcccgggaggtggaggttgcagtgagctgagactgtgctgtcacactccagcctgggcaacaagagcaaaattccatctcaaaaaaaaaaaaaagaaaaaaaagaaaaacctaggggttactacattccagccaggcaacagaatgaaaccctgtctcaaaaaaagactaatataataccatcttaatcagaaataaggttcatagatgatatagattatcaaaagaattgtcagaacgactaaacctaatataaggagaaaataaagtgaaagcaatttataattaactaacactatttgtttcaatctgtaaatgcttgggtagaattacgccagaagacaaaaggttgccacacatttccaaatcagccctgtttttggaagacagtgtcaccctcactgggctggctctgtgacaggcccactgactgcacctgagagattacccgaccaggacggcacatcttggaggcacgaagtctccagcagctaattcgccaagccaaagagaccagctccgccagcacctatgctggacaatgccaagcctactggccggtcagaaggaaggaggggaaaagccacctcactgaggaagtacgggaggcagagcacggtagagaaatagggagacccagtgcctggagacggctctgctcctgccggcttccagcttcaaccccatgcactgtccgcttctctgctttttctttaagatgtactgagtccagttctgtgccttaaaatcaacatggtcaaaattttggagtgaggttgggcacaatgactcacacttgtaatcccagcaatttggaaggccaaatcgggaggatcccttgagcccaggagtttaagaccagcctgggaaatgtagtgagatcccggctctttaaaaacgtaaaaataggccgggtgcagtggctcacacctgtaatcctagcactttgggaggctaaggcaggaggatcacaaggtcaggagttcaagaccagcctgaccaacatggtgaaaccctgtccctactaaaaatacaaaaattagccaggcatggtggcgcacgcctataatcccagctactcaggaggctgagggaggagaatcgcttgaactcgggaggcataggttgcagtgagctgagattgcgccactgcactccagcctgggtgacaaagtgagactccaactcaaaaaaaaaaaaaaaaaaaacccataaatataaaaatattggagtgaaaaggaatttttgaagagtttctctttaaactgttagaaagctcaccccatcactgtcttgggggaagtgagcactagttgtggagagttgtaattttctttttctttttttagagacagggtcttgctctattgcccaggctggagtacagtggtgcaatcatggctcactgcagccttgaactcctggactcgagcaattctcccacctcagcctcctttctgggactacagtcatgcaccaccacatagggctaatttttaactcttttgtagagatggggtcttgctctgttgcccaggctagtctcgaactcctggactcaagtgatcctcccaccttggcctcccaaaacgctgggattacaggtgtgagccaccacaaccatcccagagctgtcatttttaattctttgcctgtcacaaactcaatacaggtaaacgtatgtaacattccatccattgcaaatgtcccttcccccagttaaagactgaaagtctgaattcaagtgacaactagtgaccccagggataggagctacttaatcccaacctacatgcccacctgcacagagagagtgcctcccacaggcctggcttgctttttgcctgttagacacatggtacatttctggcaatgctctgctcccagctaactgctgagtcacctgcatgggactgccaagtaggtacggggttttcaatttagaaatggcagagccaggtgaagccacctctggcccgaaccatggtgcaaggtttaacaatgtggaggaatggggtcctgttctgggcatcattctgccaagttctagcgctcttcaacctgtggaacaggcacccactcttgcaatgctgctgaggttgcctttcactcgcttcacctttatacctggtccctctctgttttcctgggtttttgtttgtttgtttgtttttgtttcttgtgaggacaacactgtagggccagacagaactcaaggagctggtgggctccagagtgccctgcccttgagcagctccatcctgcatcctccagggcaaccaggatgtgggtgccactcgggccgcaccctctgaccctctgcagcgagcagatccaaactgtcgtcaagatgcaactttgccagaacagaagccacagtctggatttgggcatgtttccttctcactgttttgcttcccccactatgagtggtagaacccatttctggtacagcacctttctgctttaaacaattaattaatttaaaaatgggcccaggacacattgcccctgaatatctggtccaacattaggtttacttattgttatggcttgaactgtgcccaaccaattcatatgttgaagtcttaacccttagtatctcagaaggtgacctgatttagaaatagggtcctcagccaggcacaggtgcttatgcctataatcccagcactttgggaggctgaggtggaaggatcacataagccctggagttcaagaccagcctgggcaacatcatgagacccaatttctacaaaaaatacaaaaattagccaggtgttagctaggtgtgatggtgcatga

SEQ ID NO: 66558 - DNA, 3566 bp, Homo sapiens
ctattaaaaaaaggggtgaccaggcgtggtggctcatgcctgtaatcccaacattttgggaggccgaggctggcagatcatttgaggtaaggagttccagaccagcctggccaacatggtgaaaccctgtatctactaaaaatacaaaaattagctgggcatggtggtgtgtgcctgtaatcccagctacttgggaggctgaggcagaaaaactgcctgagcccgggaggcagaggttgcagtgagctgagatggcgccactgaactctggcctgggcggcaagagtgaaactctatctcaaaataaataaataaataaaaattaaaaaggggcatttggacacaggaacaccctgtgtagacgaaggcagagatcagggtgctgctacaagctacagaacaccacagatcaccagcaacccccagacgctgggagtgaggcctgggacgctactcccttactgccctcaggaggaaacaaccccgactgtaccttgatcccagccagctctctccagaattgtgagaaaataaatctctgttgtttaagccacccagtttgtgctaccttattacggcagtcctaacaaactaatacattcatttgaatagagcttttaatttaaacattgaccatgtaataaactgtaacaaactattagtatttaatacataaaattcataatgggggtcctttctcgtcacaatgcttatagtttgtatttaagaggaagaggaaagtattgtctatcagaaacgccaccgcatgactgctcatcacaacctgatttttttctagtcatttccctggcaccccaaatatgcccattcagtgggttttaaacagatataatggaaaggccacccagctgcacttctgctgtaagaaataacccctcgattctggcccaatataaacagtagactacaataattgccatttaactccatggtgtccaaatcaatgaatatgatatcagaagatttcttctcttgtcctctgctcctggactttccagagaaggttgacgatgacatgggtctgtctcacatcagttccccaaatatcttactgaatccatttggcatatagcctttgtcgtttattagctattttagtattgtatgttttattttactgatgactggtggttgttaaagcattagttctaggttgccattccagctcgcatgattttgaggaatggtttccagaagggctttctagcacatttcccccacagaaaaagcttagtcgattctttcctgatagcaacagatgaaagctttatgtcataggaaatcatagtgatattctggtggcaacatgtacaaaattattatataaatcttgcttattatataatcctttggctatacttaaggacagctcttgaggcaggcacactgggagccacgtggcattaaacagatcatctttctttcacacccacgcaagaatcaaaagcaatgctaaacaaagtgttcatccagcccttaatctccaaggggaagaggttacaataaaaataatttcttcacctgagtatcaaacagtcacaattctggggaacccaatttccacttcagaaaggcaaatgctaaggaattctcaccatctgactctcacggtaaaatcccgtgcaattctttatgtttcacacttgagaaaaagaaagggcatcaactttaacagctccttgaacttcggcccttgcaaggaaagtgattgcataacagggtacatatcaacaagtgaggctgttctttatatgttttggctcaggaaagagcatgtgaacttttttctggggtcagcatttggaacagacataccagtgggaggaacagagggtgataatgtttaaccaataaactgagctgaactcaatctcctgccttgacaggggaactatgcaaggtcctttgctttgaaaggcttgggctctgagcattcgtcagcaatgggttgagtcatatcattgtgttgaagttattattcgatgattgggaaaatgagaaatgcttggaggcctccactgacttttgacagactgagaaaagccagagtttcttctttgaaggcttatgaagcaagtccttcttctgcctgggggttagtgcctgttccagcaagggctggcgaggggtacagggaggtaaagacacaagcataggggaagtcatctgactggggaagtcacactggctatgcagtgacacgtcggagactctcagtcaatatgaatgaataaatagatacattacacacaggaagagtttgtatgcaaactctggtatgactcctccaaaaaaaagcaaaagcctattacctgatgagacatgatgtgttaatactacttaattatgacttcaaggccgggcgcagtggttcatgcctgtaagccaagggaggccaaggcagatggatcacttgaggtcaggagttctagaccagcctggccaacatggtgaaaccctgtctcgactaaaaatacaaaactgagctcagtgtcgtggcacagctacgtaatcccagctactcaggaggctgaggtaggagaatctcttggactggggaggcagaggttgcagtgagctgagattgtgccaatgcactccagtctgagcgacagagtgagactccatctcaaaaaaaaaaaaaaaaaaaaaaaaagatatggcttcaagttcaggctgtagttgctttacagaaaaagaaacctgttgaacaacatgagcagaaaaatcaactgtttacatcttgtgcattctaacctagaaaacctcccttcagcctatgaaattggcactggtctgacttacctcaccatgtccaaatccttgctggcggtttccaaatactggcttgaggtttttaaaaaattcaaatatctctttgcaacttgaagtcccttcaatctattctctaacaaatgtatgggaaggcatcaattttaggccatgccgatgtttgaggtgagagaatgtccaccttggatgcagctgacagctgaggctgctgtcataccccacatgaagtggggctctgagggctaacccacttccatttgctgaactcagctggattttgctcagaattatagtttattcaggctggggcagaatccccagggactgtcaggaccagttctgttggaaacctgaggccagttggtctgacccctcgggcagggccataggagccagcagtggtctcggcagcagcaaacttttacatctctgtgcatcacctgagctttgcagcaggaggagtgaggggcggcagcagctgcgcagagacaggttctggagcaaccagttcccgggacatagggatacacacactccttcctcagggacaggattctaagttctgtgttatatttgttagaagtctttgagttgtagaaaaacccacccacctaaaattgtcttagaaaatcaaggaaatttataagtttcaacatttaagttgaaagagatttccattcttgtaggtcagcacttgccaaattatcagcaatatcatatgcttccaaccttcttattagaagtccacaata

SEQ ID NO: 66559 - DNA, 3505 bp, Homo sapiens
tctttccataacactttttcactgactggtgttccatgcatgtctctttacttacctgtggtctgcagatgtccccgtggaatgcagcttccaaagggccgggacggtgggcacttgtttagggctgtacccccaggctgagaacggctctcggcacatggtactgcttaatgcatgggtgggggatgaattttaggaacagttgtgtaaactacacagggattatttttttccttcattcttaataaactcttctcaagggcttctgccagttggaaaaagcagcttagcagttaaagacatctttcgctgagatcaccaagtacttttcttcccctgagtggacaaagtcacgtgtaagtagtgattcttgatctttaggggatcacagaccccttaaggattctggaaaagtcatttcttctcagaaagatgcacgtatgaacagaatgcttcatgtaatttctggaggtctaaggactccctggagctgctttttgaagtagagatcggccactctgaatttcaggtgccactcatttaagcctaattgttattcggctgggccagaagctactagaaagaactttgcttgggtttctttcactgagagacaggtaactcctactcatacaatggcagttgtttctgagagaatacacagagaaccaagaattataaatggaaatttataatgtgagctcgagataggggagaacaaagcgatagtctagattcagcagtataaacttcagaggaagttccatcagttcagctcagcttactcgccagcttacctgtctctctccacgtcctctgaaatgcaaataatcaatgcccacggggtactgacctgcacagttgcctgccttcttgactgcctgcacactcctgctccaactcgcttatcagtgtacttgttcccactctgcttattttagctttatttcttattttatttttttagagatggagtctcactctgtcacccaggctggagtgcagtggcacgatcttggctcactgcaacctctacctcctgagttcaagcaattctcctgccttagcctcccacgtagctgggattataggcacccgccaccatggccagctaatttttgtatttttagtagagatggggttttgccacgttggccaggctgatctcgaactcctgacctcaggtgatccgcccacctcagcctcccaaagtgctgggattacaggtgtgagccaccatgcccggcattatattagctttaaatgtatttacaattacactaattgaatatgatgtaacctgaggaaaaatacaagttcaaaaggagagatgtccccataaaaactatgttggatgctgttaaaagctttgataaagggattgttaaaatgactcattaggcatgtgcaaggcagctgtaaaagaccaggaagaaaaattctaaaactctaagacttctatggtatggagatagctttggaagcttctttacgttctcattccacattaaagtaagagaaagggacatttcggatgcatcgtggttacagaactcctatcagaggatccagacccaaaagataaatcaaaaaagctcttggcaaatgaacttaaaatgagttaaaatataatcgttttccactttacctgactttgagtaatcaaccatccacccatatagttaagggcattctatctactacattctaaaaatagggagaggagacagccaacccgaaatcatgaaagaaattaaggcaatctatgagcaccgttaaattaattttttatgaagttgtaatgccatcaggcctgtattgttttttctttgcaaagtcatggctcaggaaactgacaaatactagatactttgtaatcccaaagagaagagagctttaaagctgtagaggaacacagggagagaggcacgtgctacaggtttgcttgggtgagaagggtttcatgaggacagaagtgaaagttatggaatccagtttgaactcgaaacatacagggaagcagccacaaatgggtatgattctcaggagagataactctgaaaaaatattaaaggaaacatgaagaaccattggagaaaaagggcaaaaatctactccatggtttccctaaaaggattttgttttctctaacacatgaaaactccaaccagaaacattttagctgctctaaatcacatctgtgaattctgcaagtttctgcaagttactgcgagtctaggagtaaatcagtaacgaagccggcgcaaagaggagagagaaaagtgcttagttattgctaggtctcagtagtaagtcttggatgctgaaataatcagtattttccaggaggagggtgtcacttgggggcgcctaaagccaatagattcttagttaaaaggaaaggctgttaggcactggccatagtgccaagaacgtgaacttcatcaacaccgaagtctacagactcagggtagtggcgagcatgctgaagttatgagataccgcagatcagcagagataaagaggaactgagtttatcaaactcaggtccaagagcacagaactcccctgacctccgagaacgagccggccctgccctcctacatgtttgctgttgataatcttccgcccgccctcgccctcagtcttttgggctgacactaagatctaggcactagcttgaccttccagagtgtttcacaagcttccaggatctggtgtactaagaatatgacaaactttgtcagataacatctgtctctgcctcttgccacgctgacaaactgttggagtctgaaagttcccgtgctccagtatgcacagcctggacatcctgcagttctcaaaaccccctgcctctaaaggctgagtttgtagggtgcttcagagctgcctggggctggggggcaagagtgatatcaaagtggtgttttagtgagaataatctcatcatgatgggcacaagagattgaaaatagagactggaagtgggagaccagttaggggacttcagttaacaatcacctcctttgtctcaggaactggatgaggctcagagaatacactgcaggacagaaataatggcctgggcagatccagatgcgagtaggaagtgagcttttgcagcagtaactcagagcagccgagctgcagcctagatgagggccgtggcactggaggtggagaggagggatgggcactagcaagagagtagacagagcagccactgaggctatctagaaacaaacagtacacatcagcgatcagtttatcttcagctgcaaaagtcatatatttaattccaaccatatgtaagtgaacaaagtatggagtgaaacagtaaaagcccctcctctggcttcacatctcaccctttacaagaagccactcttaaccgagtggtgattgtaggaagcaatgccgaaggtgaggggtgtgaagaagaaaccctgtttctggcatgacctgggtggatgctcctgagataagaaacactgaggctggg

SEQ ID NO: 66560 - DNA, 3120 bp, Homo sapiens
agccactgacaagtcttaaaatataccccatccacctgccttgacaaatggccagaaaggtcacttttgaagttaggattttcagattcatcaaagttctgtgccagatggtggtggcattggaagagtcagctcccagctccccgcttcccttctcagcgccagtccactcacatgcagggtccaagtgcactcaggaagaccctacctgcagaccccacctgctcatccagggtgtccaactctctgaagaccaccagccctcgtctactctttcggccctgatgtgcaccccccagagcctggtgaccctcaggaggatgagctggggagacccagacctacaggcaggattgggctgtgtgtggggggtactagggtttggaggggtacaggctccaggtgggcacatccttggcccatggggaagcccacagccagtggaccagacggggtcctccgagtgggcaggacctctagtcgaggcctaagggaagcgttgctcatgaattatatcaataggaaagtaagattccgcaaggataagtaatttactcaaaacgatgcagctagcaagcaggagggccaggtttccaaccgcggtctccaagcctcccaagccttcctttctgcccaagagtgacttcagattttcagtacaacagatgtcttccggaaagagaaggtgtttttcattctgtccctgctttatagtatcaaagatgccttacctttattttaaaacaatactttcagatttagtcattccaacttacagttaggagtacagagtcttaaaaaatcaaatcaaagacttagaagccacggaaaatatgaaaacaattcacaatttagtttcaactcaaaaccttgaatgtttctgtgagccaggctatgtgctgaggccttggactgatgagctaacaaataaaaagcaattttttaaatattttgcaagaaaaacattcaggcaggctgatgtcaaaattaagtgtgtagtgcataacctcactcaatatacactatcaatgcttgaaacttatgttgtgatttcacagtgtggccaggccatggagaaaggatgtggggacaggtgtgtgaggcggtggcgggcagaggcagccagtcagaacaagctcctgccacgagctagtgctcttcacatattctacttaaattacccttacaagaatgttgaaaaacaccttcagttgccctttaaaattttcataatgagtttaaatatttacaaagggcatcgttatgcaacatttgaaatattgacattttaaaataaagctgaaatatcactctttaaaatttgctaagtggaatttaaatatcaatgcaatttgccattacccttttgtaatagatgcagaaacactcttagtagaaagaaattgtacattgttcctttttctccttgacctcataggtctatttcttctccccagttttatcctaatgaaaaatattatgacagtcttttgcctcccaatcacattgtctataatggaaatgtacacataccagtgaaattaaacatttgattttgattttctgtggacccatatcacaagatgatttcatgtatctgaccagtctcccagggcactcctgagggagggaggccttcatcaaagacagtgaaagcatggtagaacagatattgctcaatgcaatgtcatcacccctgctgctgactgtccatgtgaactccaaccaccctccagaaggctaaatcgccccgttcctactctatgattcaccgtcagcagagcacacgccagacaaggaaagcacaaagcctgacttggggtggggtaccttgattaaagaagtgtctctattacagagactcacgaccccactatgtaccatgtttgacagtagctttcacatccaatattaaaattcaggatgggtgagaaataggtctctgtcacagatggaatgtctcccccaaattcccatatggaaaccctgtcccctaatgtgcaggtatgaggaggtggggtagtatcgtgtcatcataagagtcccgagacagcttgcttcctctccctaccatgtgagtacgccgaatctgctggcaccttaatcttggacttccagcctctagaactgtgagaagcaaatgtttgctttttaagccacccagtccaaggtattttgttggagtggcctgagctaagatcgcctctttcctgaaaagtgggagaagaggaattgagttgaaagagagtaaaggaagaagcgcaggcataaacatcaggtcactttgagaaaagaatgtgctgtgggttgacctacgtcccccaaaaacatatgttgaagtcctaaccccagcacctcagtgtgactatttggaaacaggatcatgaagatgtaattagttaagatgaagtcatgctggggtaggtaatccaatgtgtccttatgacagagacacaaagggagaaaaatgtcagtgacaatagaggcagagccctgggtgacgcagccggaagccaaggactgcgaggtgaggactacaaggtggggaccgccaggtgaggaccacatcgaggaccaccaggcgaggactatgaggtgaggactgtgaagtgaggaccaccaggtgaggactgtcaggtgaggaccgccaggtgaggactgtcaggtgaggaccgccaggtgaggactgctggccaccagtggcagctggaagaggtgaggaaggattccacccagagtgtcggagggcgagtggcccagctgaaaccttcatttacaacgtctggcctctaaattatgagaacacatttctgtcgttctaagccacccagttgtggtgtacttggttacagcagcctagggaaactcccacaatctaggtagaagctgaggatccggacgccatctgtgtctgcacacctctcagaaaggctacgctgcaaaggagaatctgcttccagaacttccacttgccttcatctagacacctccagaggaagggagatgcctgttccaaccagagccctaatcatcaactcaaacccaggaggtgagcaactgacacacgtgcacccaatacagtccctgtgttacaggaaaggggtcccaatccagacccca

SEQ ID NO: 66561 - DNA, 1784 bp, Homo sapiens
gagtgagactctgtctcaaaaacaaaaaaaaaaaaaaaagaaagtttactttgccaaggttgaggacatgcccgtgacaaagcatcaggaggtcctaatgacatgtacccaaggtggtcagggcacagcttggttttatgcattttagggagacatgagacattgatcaatatatgtaagaagtacattggttctgtttggaaaggcgggacaccttgaagcaaaggcaggaagactcaaagcaggagggagcttccaggtcacagagaggtgagacacaaagggttgcattcttctgagtttctgattagcctttccaaaggaagcaatcagatatgcctctctctcagtgagcagaggcttgactgagtagaatgggaggcaggttggccctaagcagtttccagcttgagttttccttagtgattctgggggcccaagatgttttcctttcacaagcagcagatgaaaagaaagggcagcctctgaagtctctcacctctctgaagggaaagcaatagagaaaaaagtgtcaaatatctttccttgagagtctggctgcacaaactgtaaatgttaaaattaggaagtaaactctcctttactccacatgttgttcccaaaacacatgaagaaacattgccagccacagcagcaaattgctgagtcactgataaaaatgtcaaagttcaactgttatgtttcttaacgatatacagatgctattactcaacatcttaaaaatgatttacaagttaaccctttaatgtcatctaaggtacgactgacccacttcgattcacttcatagttgatttaggagcaatgttttaaaaactactaaaatgtgaagctttatagctaaaaatcacaaccaaaaatattgaaatatttacataggtcccttaacaagtgttgtaatttattttgaaatagaaactacttgtcaactttcagtgactaaagaaggcaaaggcggtgcatcctatttgattataaaggttgtactctgtaagaacaacacaattcctttccactgcacgcggtcacttctgaagaacctcgtggtttgtcagctcatgccagtgcaaatgcagtcacagccaatgacacatgtactgggttctaacaaattcagctttcaagtttccacatttaaaagaataacacataaggcagagaataataaatgggaagtaagatgactgaatcagccccttagagcccccaggaggagacagagccacaccagaactcttcagagcttgacactagccgctaaatttcttcaaagatcagattccaatgtcccacaatctccttacaaattagaaaaccagcctttccttagaagagtttacaaacaattctactctctgaatgaggaattcttaaaactttagaacctatgaagctgtgagtgcctttgcaatgatacgtgtaagctgagagaatggacagttgcgatgccctctcatggttcatgtgtttttaagttgctgatgtttttcaatcagtgaagataagaagtctctcttataggccctgtaggctactttcttttttttttgagacagagtttcactcttgttgcccagctggagttcaacggcgcgatctcagctcactacaacctctgcctcctgggttcaagcaattctcctgcctcagcctcccaagtagccgggattacaggcatgcgccactacgccctgctaattttgtatttttagtagagacagggtttcaccatgttggtcaggctggtcttgaactcctgacctc

SEQ ID NO: 66562 - DNA, 3856 bp, Homo sapiens
aaactgtttctcttcctacttggtctaaacatacctagtgctaaggacatccactctttttttttctttttataacatttatccatctatgctgcagaaaaactgggaagcacaaagaaaaaaattaaaatcacccatcatcttgcctccagagagccagacatacacacacacgtatgtgtatgtaatgttggatagaaactgtgatggttatcctatgcattgttttagaaaataaaaaggaggtgatacatggtacagaggcagaggtgcctagtggttaccactcactctgtgaacttgggaaaacacgcatgtagtttttgaggatgaaatctatgaacatatgtgtctggcacatcgtttatgctcagtaactattacccagcatttttattaaacactttccagtgtctctatgttagtctgttttgtactgctatgaagaaatacctgagactggatcatttacaaagaaaacaggggttactttggctctcagttctgcagcctgtacaagcacggcaccatcatctgctcggcctctggtgaggcctcgggaagcttttacgcacagtggaaggcccgggggagcccacacatctcatggcgagagaggaggtggtcccaggctctttaaacaaccaactctgcctgaactaacaaagtgagaagtcactcactactgtgaggacgacacaaagccattcataagggatctgcccccatgacctaaacattcctgctaggcccacctccaaccctggaggccacatttcaacatgaggtttggagggaacaggtgcaaaccatgtcagtcactaagtattcttcctcaacgggactttgacatggctacatgctgttacattgtataggcattccccaatttactgaaatgtcttctactggggccatttagattattaaaagtccaccttaaacaggcatgggaatgcacgttagatgtgcagacaacagaatggctacctcaaagccaacccgaaacttctggattcctcgccaaggctgcagcaataaaaacatggttttgttgattccagaaaagtctgcttaaggttggacacttccactcacctactgagtagagagaagccacatggtgagatataaaatgactcagccaggacccacaactatgtaaactcacagactgctgttactcgcgtagggaccgctgaactcaggagctgccgtaacttttgattcctgttaaggatatgtcagtggagacaaatcgcccagagtcaatcattatttgccagggacagccgatgttcaaaggacgacttcgagtgaggttaaaaacatggacttggccctttataaagaattgcagacttagacaagtttttagatacagaattctgatctttacagtgctaaaatggagaaaatacacattcaatttcatggggtaattccacagtcttaatctgaaacagaagtacaacagggcaactcctcaccttaatttttgaccaagaacagcaacaagggataggtatgtatgaatctacctatcgacctctggtttttaccttgcctaaaccatttgtggggcaattttctaacaaaaaaaaaaaagagagagagagaaacatcttggattatattggtttcactgataactcatgtaaaattttaaagatttaaaaaactaaaaaaaaaaaaaacatagcttagaataaactaactgatactaaaatattttcactccatcctaaaggtctatcttaataattggtaggaaaatcaaatcctaaaaattgatattttggaaaaaataactcatcttgataagacagtaaaagatgagggtggctttttgtaatatctaatattttccttgaaatatatgtattacggagagagagagagagacacttggccaagtaaactgaatctaaatcatgttttgaaacttgtcaatcttctcactcttgttagtaaatacatgcagcaattttaataagcacacatcactttttttttttttgagacggagtctcgctgtgtcacccaggctggagtgcagtgacgcaatttcagctcactgcaacctccgcctcccaggttcaagcaattctcctgtctcagcctctggagtagctgggactacaggctcctgccaccacacccggctaatttttgtatttttagtagagacgggatttcaccagattggtcaggctggtcttgaactcctgacctcaggtaatccacctgcctcggcctcacaaagtgttgggattacaggcgtgagccacacatttggagactaaagaaaatgctcttctttgcctgtcagcattccgaagagacaaagaaaaattgggaatgctggtgtttatgccatcgtggttatgcccagagataaacgtgtggcagcggtgttatgtcctaacctttgggcaggttatagcacttgggggtggcctgaagaaaaggcaaggcagaaagtagtagaataacaggtaagtaaacttatctgatgattatctaaaagatttaagaaaaagaccaaaatgtgtggttacacataggtaagattagaggtaacaaaagaagtgaaattctcccaaagagcctgagccaaatggaagctgtggatccacttcggcgaagtcagtagcagaaatctgtcctccataacgcactccttgctaagcctctactcatgcgaccatgtgtgggaagtgaccagctgtagtgcccagagagagggagaaaggtggggagaggatgtcgcgggtcagtaaggaggacccagaagtggggatgggcatggagatgcaaagctgtttccacgtgagctgaccctaacggtcttccgtctttccagaggaagatttccatttgtttttgttattatgcacttgagttaattcacccaacaaacacacatgaacgtctccacgtggcagccacagtcggagccaagatagcgacggctcccgcctcggggagttcacagccggagagatgaaacatgaataactatgaccatgccactgcaagtgaaaggaaatgtcctcaggtgaaagagtttagtgccatgaagaatatgacacaggaatgtcacccacacaaaggggtcaggacgggccctgctgagctgtaccacaaggtgggagctgcagtcaacaagggccaagaggtgtctggggaaggtgttgcaggggcggggaacagcgaattcaggacctgggagagaaggcctcacagggccccagggtaggagaaagggccaggccgtgtgctgcttttgcgcctctccaaggattctgatctttgtcctgtgagcaatgagagaggccatggtaaggatctaagtgggggaggtaacgcgatcagatttaattttaaaatataacccaggcttcagagtggacagcagacaaaagggcaagagagggtgagggaaggctgttctctgcagccactccagagggtagggtgggggcagctgcaggtgcaagggtgtgcatggtgtgaggcagagtggacgagagggcttccggacggtaaggatggtgggagagacaggaagtgccactggagccaatgtttggtttgcacaactgaatggaagatggggccaaatgctgagaacaggtgtcaggcagagagaccaggtttagggctaaaccacttactggaactcactcatcgtgcccacatatcttgtagctcctaatgcctcccacaggcttttgcgaaatctccactttgtaagttacccaaatataccttgttctcgacagcatatgagaatccccagatacaacccagggaataccaatacaataactggaaatggcttttgcttttt

SEQ ID NO: 66563 - DNA, 819 bp, Homo sapiens
cctggagtttctgccgaagatctctgcatttcacagcctgaacaaatgccttcaatttctctcctttccactctagcagccagggaaaaagtctagggacaaataatgatgaatatcagtgggtaacatctaataaatgctcactgtgtatagggaagtattctgagcacttgtgtggacccttctaaagctcataagcccaagaggcaggcattaccattactatccccactttacagacagaggtgacggagccagttaggggaggccctggggaatgaacgcaggccgcctgactccacgccaagtctcctgaccactgtgtgtactgagaggagagccacttcgctgagatctgctaacaggggtctaagtccagatgattcctgagtccctcaggcacagtctatctggcagctacccatctgcaggattaagtgaattaattagcagactccgtggcaagtaagagatgttcgagaaagatcagttcacttttccttcttcctcatccccattttatattgccacagagactatgtatagtccctggcacagttcctggcctttgtaaattgctgaaggccaattccagcaccaaacccaagggacccccttctcaccacctctccttcatcttcaaaagttatctctggatttaatcaactggctggattctcctgaatcacagaaccaaatggcacacattcacagaaacatcctatgataaaaataatagacatttctacatgagatggttcttaaaggttagttaggccaagggcagacaggtcttatgcacagcctgtgagctggcaa

SEQ ID NO: 66564 - DNA, 2688 bp, Homo sapiens
tgggaaaaggagacaggaggtggagggaggagggaaccaggagaggatggcaacccaggagggtgagcatctatgtcagagtctgctgagccactgtgttggagaactgagagctgacacaaggcaccctgggagaccttggcaagagaagctgtggtgaacaggtgtggtttaaaagggaatggaggaggtggattggagaccaggcttaacaaccctttcagaggcttctactattcaggggagcagaaaaatgaggaaatcctggagggggcagaagagtcaagggaggctgtgtgtgtgtgtgtgtgtgtgtgtatgtgtgtgtttcaggggagaagggaatatgtgtgtttttgcaggagaggagggtgtgtgtgtgtgtgtgtgtgttttgcaggaaaggagaaaacagcaggaacactgatgagaataacccagcagggtgtggcctggaggggcctggtttatactggggaacatcgggtggcttagggaatgtctgtgagtgggaaggggaacaggatctcaggcacaggtggaggcccgggctctgggcaggaagagactggaaaatgcagaccaaagtgctcccctcacctttaattctcctcttcccttctactgactgcctgggagcctccctcgatgccattcttgtgttccatgctctgagactatgtcacaatccagactttcacaatacagtcccactagtttctaactgtgcaatcctcagggacaaaatcccaggccaaggcctacagagtaagaagagatcacactagcatgtgccgtgtgtggaaaaagggggtaaaataagatagtcacagagcagggacttgtgtctgtttctccaccaggctctcctcttccatcctgggaagttactttctggcaccggacaagggccacagagtaagaagggatcacactagtatgcactgtgtatggaaaaagggggaaaaaaataagatagtcacagagcaggggctcgtatctgttcctccaccaggctctcctcttccatccccggaagagtgacttcctggcaccggacatgggccaggtgcacagcaggcgggcaggcaggagccctcatcgcgtggaaaaagcagcatatcacagccgggagggtctaactgctagcagaggcacaaaacgggatgggacaccatgctgagacctgaacagggccaagcctgacacaggggaaaccagggcaaaggtttcaaggtaaaaacaagtttggcttgtttgagaaacaaagagaaagggtcaatgtgatcaggtgtgggcattagcagggaggacacagtgttatttgctgaggtgggggaggtaggtaaggaccagatcattcagagctttccaaaccagggcaaagagatacaattttattctaaatgcaacaggaagccattgaaaggaactgaacagaaaaaggacaatctgtttccaaaagatcaagttttttttgtgtgcttctcctagaaatcacacttttcaatgccataaatagcatttattactcaagctgaaaactcataaaaccaccacccatttgatggaaccaatgaaatcctgagaactgactgcccagtggccaccatgagaggtggcaaagatacaagagaggccacaccagggcatctgctctcagcttggaggagaaagatattctaaccaccctgcaaccaacctcgtggcacatgcagaggggatatggacccggaaggggagggcgagagatgagcgggacccactgagggatttatcagagcaggaacctcctcggatttccatttaaacaatccttcccagggcagtcatttaagatgcctttcaccaaacaacacatgcctcctcacacatacccactacacgtgcaaacaatctctttccgaaccaaaaccacaccgatgattcagcccctgccaggtgagagcagcatctgggtcacaaacaaactgaggccgtgaagactccaccccgactccctctatttaaaaattcctctacaagaaacaggaatggctgtttccttcacctcctagaaggcaacatagtaaactgacaacagatggaaagaaaggcatatttttgtccattaactttccaagggttttggctttgttcagatatttgcatcacaaattccctttgctttctccctggttcctccagagaactctccagtgatcaaggtctccagcaaatgacagcaactctgtatcagtgggatgcacttttgcttttaaagctacgctaggttctcatcaatactccttggatctcaagcctcagcaacagactcagcactgaagacactgggtcgcagcgcccgcagcctggactgaagccctggctttgctccttatcgtctgtgggacttgctgagcaagctgcaaaatctccctaagacataccgtcttacctttaaaagggaggacacaatcaccactgaccccatagggttgttttgaagattaaaagcacaggccgggcgcagtggctcacacctgtaatcttagcactttgggaggccgaggcgagtggatcacttgaggtcaggggtttgagaccaacctgaccaacatggtgaaacctcatctctaatgaaaatacaaaattagtcagcctggtggtgcatgcctgtaatcccagctacttgggaggctgaggcaa

SEQ ID NO: 66565 - DNA, 6794 bp, Homo sapiens
gcatgcagagcacatttccatggatgtaaagcacatccacgagcaaggtgttgtagtagtgagtgtgcaaactgctcaagctggccaccttcggggagcagagctccaggcagctttgagtttcttctttgcagttttccacactgtccacttccttaacatgatcatgtattattttccccttacacaataaagttgtatgtttaaaagctcctgaaatgggatgatttccaatcttgcaaagcacacattcctgaacaattatatttcatgtgaatatttgtattttgagtcattttgtttactagttaacactataattcctgagatatgttcctactaaatggaccttccacataaaaacaatttattttaaaattttaattcaatcaaaatatagtcacttaaatgccttctctacatattttttccagtgttctcacatatatcatttctcccaatgcagatggcagtgacagaatagttcccacttcagaacaaggaaagtgactgaaagaaatacctgacttgcccaaggtcacctccatgatatgtctaagaccaggtctagttttcctaaccccagcccagtgctttcccatgaatgcccagcgggacagggttgttcagactccactcaactacaaaggcacttatcagccatcttcaccaggaggacttttcagaataccagacattcacattcagtaaaattgtgcatgttatttattccttgattgaccaaagccggcttgcatgtgttttcccttccttatttacaattttcatcaacctttaagataatcaaaaagcaaaagttaatttgctgtttctttactgttttctttactgtttcaaaacaaagttgcctcttggaacctcttttcaaaagtagcaacaggttaccaaaaaatatagagatatatatagaaatatacaaaagcctcacgggttcacattccccaggtggccttctaagatgtggttttactaccactttacccaagatgcctaagccaccaacactaccaacaataactttatatttcccttctacagactctgtaatttctaagttttatttacctaacggtatatattaaataataataatgttcccattttacatgcatcaaaggcatatttgccaactgcagcctttagtagcatgagattcagaatactatcaaattttcttgcaaaaagcaaaggcatttagtattttagccctaaatatggtagctttaacaagggtaaagatacgtgttctatgtttttcaaaattaagggcaatgaatttcagcacccatactctcttcctcgattcccaagccttagaaccactggtctacgcaacataggcagccatgttcaatggaaaataacaaagagcaagtccctacaataaaacctgctagaaaggacacttttaagactccaaaaatcaaagtgagtcaggagccaatagcttctatgaggcagaatgctgtaaagaacatttaaggctcaggtccaagactatcagaatcccaggaacactagaaaatgttctacagaagcaagtttccatttttatgatgtaaagggagaggagacaacttcacaaaaagacattctgctttataaaattttccaggacagtatctatttcacgaatcaaacacccactgacttgaaccaaaagcaacagctaatggaagtgttgttaattacaggatacctttctctctcccctccacagctcttttaaaaactgaatagatgctgctgcccaaatcacagaaagggaaatgcaaacatttctccccctggtcctaaatgcctaagttttcatttcaaataactgtcccttaaagttctatgatcaagcaaagactcaatttcacaaatataaactcaaaaactagaactcaggattgaaaaaaaaatctagttcaaaatatgtaggcaataaagctcaaaatcttttaagtatcagacagtaactaagcacctgctgctatgtcgactgccattaataataagccagtcttccctcttaggtttctacccctccgcctaaacaacaaaaacagctttagtggccattatttcaggaggtcggagcacatgctgcacctgtgagcttcaacctgtgttcttggcttgtacctgccagcagagcaggatccctccaccatctcaccacacaccttctcaacatgaacacggacatgcacataaatctaggacattctgaaagaaggggaaatactcagccatgagaaatcctgtccatacggatgggggatctcacagtaaacaaaggtctagcccataatgactgaaagttcatttgagagttagaaggagaagataaatctttcctatttaggtaaattaggtgagataaaatatttgttagttaacacacaaaggcttcatgaaattctggagcctttcaacaatagaagacaggaaagaggatcgggcaagcggggaagagagacagagacattctgcactcatttctgttttaaaagtacgtttcagacaaacagactagcctcataacaaactacctggcagggcagtgtgctgaagagctctgagcgagtgagcttattggagatataaccccaggagcacaggaagtcacctgcaaggaatcctggctagagtctcagatagaacccagagagaggctcccagaggctttgccgggggctgggaagccaatgaccaggacatgcaataagcaagagatggtcacagaaagtcaaagcaaataataaagacggcaaatggaaaaacacgtccataagaggtcgaatcgggaggtgcccagaggtcagacacaatccagtgaaaggctaagtggccttgcttgttcccagaaccacatgttggcagacagtggaggcagaaacgcatgcagttctcgcaatgcctgaagatccctccaacctcttaaagtcaacaggaccaaaaccaaactaactccttgtgtttctcccagaccccagcctcctcactcacgccatcctcctagccgttccaggggtcagccaccctcttgttcattttatttgagatgcattctccacaaaaactttgagtaagaaaaaataaagaaatttgttttcagctaatttacccactcaagagcttgctctcatctctcagtttttctcggaaaattttttgcacaatccctcctttcctgactcacaggaatgaaatgtgaaagtaaatagttttgagtacattttaacaataatcttcacttccctattatcgtctctgaaaatctacccctaaagtcatgcacagtaaccttagtaattctcaagttggagagattatgtgccctaggggacctctggcaatatctggagacattttgggttgctataaataggggaggtagggctgggagcagtggctcacgcctgtaatcccagcactttgggaggctaaggtgggtggatcacctgagatcagcagttcgagaccaacttggccaacatgttgaaaccctgtctctattaaaaatacaaaaattagctgggcgtgatggtgtgcgcctgtaatcccagctacttgggaggctgaggcaggagaattggttgaacccaggaggcagaggttgcagtgagtcgagatcacaccattgcactccagcctgggccacaagagcaaaactctgtctcaaaaaaaaaaaaaaaaaaaaataggggaggtggtggtaccggtcatctagtgggtagaactcagggaggtggctcaatatcctacaatgcccaggacagacgccacaacaaagatcggctggcccaaaatgtcaacagtgccagggttgaaaaaactcgctttaggagaagacaagaaaagaagaaaatgcttcataatataaaatatcctaatattctcttatgctacttcttctataagcacaaatagacaaagcacacactgtatcttaaaattccacatttagagttaatgagaattgatgttatatgacaagatctgcagccgggcaggagggagaggacaggtcagctctgatttcccaacataaacccctccttactaaatggtaacatgactttatcttcgggcactgctccagagtgaaataccttaccaataaacatcaactccagccttattatttaattttatttatttatttagagacagagtctcactctgtcccccaggctggagcaaagtggtgcgatttcggctcactgcaacctctgcctcccaggtttaagggattctcctgtctcagcctcccgagtagctgggactacaggcgtgccccgccaggcctggctaattttggtattttggttagagatggggtttcgccatgttggtcaagctggtctcgaactcctagactcaagtgatccacccgcctcagcctcccaaagtgctgggattacatgtgtgagccaccgtgcttggcccagcctcattttttaaaacaggccttttgattttaacattttctgcaaaaacaaagtcctctgatataaactgtgatccagctcagaccaggcatctatttttgtcccctgctccccgactatgtaaaaaattcccatcactaaaccttctcattattgggagggggcgtgagcatgcgttaagatttatgattgagactcccccaaaagtagtaaaacacttccagaggatctaagacaatcaccaaaagcgccccttagcgtgtgcggcaaaaattataaccgaatgcaaagaatcttatcaaaggaatgtcttcaagttaaccaacgtttcctattacaccttccaaagctgttaggggcgagtcccacgcagaacgtccgctgctctgcctggcctctgtgttcttgctccagccacacaccgcggtctcaggagtcaagcacggcacctggctgccaaggcgtgactggaaaaggttaattaacaccgagcctcttccaggtgaacgcgaacgcgagtgggtgtggaccgcaaggtcggccagtggctgccgcgggaagcgcaggcccggaccacacccgacctccgcacttggggtcccctccggcgggatccgcagctctcggggtgggtggtctccagccggccactgcgggaatgccgccggtcctggaaggacacccttctattcaaactcaagggagaaagggatcatttaaatcccccgcatggctgcgcgctatccccggaaggctgctccagcaccacctagcgaggatgccgccgcgcagggcgctcccaggtgtgcacgcgcaggtgtacggattcggggagcgctcccaggtgtacacgcgcaggtgtgcggactcagggagcgctccccaggtgtgcacgcgcaggtgtgcggactcgaggagagcgcccaggtgtacactagcaggtgtgcggactcggggagcgctcccaggtgtgagcgcgcaggtgtgcggacttggggcggtggggggcgcccaggcttgcacgcgcaggtgtgcggactcggaagcgcgcccaggcgtacacgcgcaggtgagcgaactcggggggcgcgcctaggcgtaggtatgcggactccgggccgcgaaagacaggtcatgccagtgaacccccaaacccggcccacgctccctgcgccccaagccgctcatccccaactcacctcttccagaaatttggtcaaatcgtacaccttgtggtgcaggatcagccaggtgctcttgctgtggttgtgcttctgaatctcctctagggtgtagtacttcacggcctcgtccgactgctctgccatctcggttcgccgcgagccaggcccagcacacacagccccgtcgggtggagcagagcgcgcgactcagccagctccacccgggacattccccgcgccgggaaccccactgggggctgggcggccggctcaggggcggggcgcagtagaagggcctccgacggttggccatcatccttgtcactcaaaagtccccgccttcggtcgaccccctccgcctgcccaagcgtggtcccgcccagtatgcgggtgttaattggctgccggaggtgcccttcacaatctcccggctgccgcagcgcgcggagagcgtgacaggactccacggagtctgcgcggaagggcgggactaactgtggcgagggctgaggtgggaggtcgggggcgtccccgcgggttaagcgtgcgagagagcgaggtgcaccagcgggcatggatggcctgtgcagagtccagtcttgtgagggcggcgaactaggcagcgaatcgcgggagtttcctattggcagcagtccgagtcccagacgttaatttgtaacaaaagtagcgatggccaagcccataaagggggcatctcggaaagccgttcgcatgcacggaagagatgaaagccccgtgcgcgctagaaaacggtttcgcaactcacttcgggaagcaaatgcgctgccccccaaaacataaagttggcgaactgtgcctgaccccgctggggttttggaatgcctcgtcctcacaggaaaaaaatccagggaaatcatcttttccttaaaaagcaaaagtgtccaaattatttctgtgactgaagtagtttgtctgcggttggccagtgacatggcaaggccttgtttgtgcatttaaggtaaatcagattctcttctaggagtctggaagagaacttccccaaagggcaccctctttcccttctgacacagaggaaataccacatataaagagctacaaatgtttgaaggagaaaaaaaataaagaaaaattccagcatgttaaa

SEQ ID NO: 66566 - DNA, 818 bp, Homo sapiens
gttaacttaaaaccagttttatctaatagctattgaaacaacctgcttctactataagactttttacccaccaccaacactcaccaatcagaacttgccaggtccccaaaactttacaagtgctaatgaactttcagaacaatacatgtgactcctttttataaaacctcaaactttccctttgttcgttggacataccaaagaccactcgtgtatgcttggacttgcagttcttgcttcccaaataaaacgttttagattcacctctgtattgtatttgacttggacatacttggtatctgaagtgggattccaaagctgactcatcttggctttgaggtttggatgagggaattttcctcttcatttggagaagactgtcatctttcttggtaaatatgtactttattttctatcagttcttgcatttacttggcctttgtttattagcacttgcatctaattggcaagtgcttaatcacctagataaatttagttacaaatgggctctcaaagttcagaggcatggcaaaatttttttttaactccacctggtaacatgtttaaacattacagagatcattcaaacagactattgttcttaaaactaaactaaaaaaccacagctataaaatcatacactgcaaataagaattagatttcaattgatactttgaggcaaaaaaaaaaaatcagcactcaaagactgtctaactacaaaatactgtctcaaaggtagctgggaggctttcctctctggatcttcccctccccttcttacaattcctcctcttcacccttttgtaacctaaactttc

SEQ ID NO: 66567 - DNA, 1240 bp, Homo sapiens
aggtgcctgttgcctgctcctagcacttgttccttgccctgctggggattgggaataaagatgaaatcctgggacagaaacgtagtggagcgactccctggacaggatgttaatagcgcatccgtagatcataataaggcttggcccacgttttgagcttcacaatatagttctacagcctagccaaagaaaacaacattctttttgaatctgcaagttttgccaactaggaactcacaaaattaaacaatagtaataattctaataaattcatgcttatccctgaacagatcactcttgtttacatacagtgttgcaatccgtgagtatttgaagattggcaaaacgggaggacttgcacccaggaattttttggtgacctggaatttacattcctactgtattacattcctgctggcattgccagcattcctcagatgacaccacaaactcatttcagtactgtgatcagaaggctggtcacactgcacattcccgggccagtatattattctttcttaaaaagaaaaagcatgttgatgttgaaaagttgaaagtactagagtccagcttacttttccctaatgtatttgtgcatgttagtgtactgaagcttcactgggttgctttacttttatattccagtttttgttactgtagtaaaatgtaatgtagacttcaaaggtataccttatgaattatcaactgtaaactgtgcctccaatagaatttgaaagctggataatttagtggaaacaaaaactaggtaacaatttagagaccagtaaacattttctgtcgtgtacaatgaaaaataatatattcctcaaccttgaagtgctttacagaaaaatctgaaacaacaaaagactttgctatacattttgacttttaaaaaatagttattgttatagaaaaaggagtgatgaaaatattctaaaaattattgcaatgatggttgcacaactctgaatacagtaaaaaacagtgaattgtacacattaaatgggtgaattttatgttatgtgaactatatcttagtaaaacttgtaccaaaaatcctagaaaatcattagaagaccttaaaggtaaatggcagggatacttaactgctgaagtttgcaaactaacttgtttgtatcatcccattctaaaacaatatcaaatattgtgtgctgacttggtattggaactctattggtaagataatttactacctttttttgctgtttatttttaa

SEQ ID NO: 66568 - DNA, 745 bp, Homo sapiens
aaaatgtctggcaaattagactgtgcaaattagactgggctcactctcacctcactttgcataggaggagaacaaagctctgaagccttactacccaaaacagattcctcagaaactctggggaaacctgtgttcttaccaagtccacccactccatgggaaacactgatctaactgttatctcaagattgggaaatgacaaaatgccagggcttctttccccagttaactccccccagtgttgctaacatacaagagcctggtcaacctgagtcagggttaggtgcccccttcccagtaccctgtcttttccctttcacgggactttcttggttttgtaattgcccttttacttctctctgggccgtgctggcctcctgagccagtcctgggtggcaggagccatgtggtattgccatgcctggcagcctggaaagaaagccaaggctgtgagaggcaaggtgacctctgcctgaggtcagttcagcaggccggtgacacacagagcaagaatcggatctttcaatgcttagcgcggtattctccctgctaagccacacagtatgtcgctactttcaagaagtgtttaaaaacacgtgatctaggccgggcatggtggctcacgcctgtaatcccagcactttgggaggccaaggtgggcagatcacctgaggtcaggagtcaggagttcaagaccagcctggctgccatcgtgaaaccccatctttactaaaaatacaaacat

SEQ ID NO: 66569 - DNA, 1316 bp, Homo sapiens
gagaatcacttgaacacaggaggcagaggttgcagtgagcggagatcacgccactgcactccagcctgggtgacagagcgagactccatctcaaaaaataaaaaattaaaaaaaaaatttttttaatgtaaaaattggctgggcatagtgatgtgtgcctgtaatccctgctacttgagaggctgaggcaggaaaattgcttgaagccgggagatggaggtttcagtgagcggtgatcgtgccgctgcactccaggctgggtgacaagggtgaaactccgtctcaaaaaacgaaacaaacagaaaaatgtgatttaaaggaaggacctagaaggcacgttcacatggtcattttcatgggtgtcagcagtctccgctgtatgtacatacaactcctttgaaaacctttcttcagattagtagctctccgtcttttctgtccttccttgttcccatgtaaactcacttctcacttcactcaggggtgaccgaggctttgagggcagtgcctggagctgatctatttgaaaagccgctcctgaagttagctgtatagtcagggagtgccttccccacttctcctctgttgtcctcgggaatcactcttaatcggcttgggccagtgccctgaaatcttcctagtttacagcactgagaactttttgagaaacaagcgtaaacactcctcagttatcagcagagatgattggccctcagagattgtgatcaaggatccaaagtccatcgagcagtaacacattttcctgccaatccccagtccccagccaggcagttgttttgcaggcggggaagccgggggactgacagagcccccgacgcacgtggccatgtgatccaccgcctcagaaggtccccaggaaatgtggtaaacttgctacggctcccagtgtaaatgacagctaatggttacaactgagatttttatggcttatctataaaacaaagaacttttatatattgtaaaattgagtaagcttggtatttcccagagcaataaattcagccattttcctcccaagaactttaggactttgtaaaccaaagtaaaccacactatgtacaaggctgtggagatgaaacaaaggaaagtatttttagttaaatttctctttaaccagatttaccacatttcattactttgctgcctactattgctctgtggtccctaaggaaataagtagatgaaattgagaataaaaacaacataaaggaggatattcaataccccaggttgcatatagtcaatcgggtcacacaatgattaaatttagctctagttaacctgatttcaagtgc

SEQ ID NO: 66570 - DNA, 1942 bp, Homo sapiens
actagcatttctatactacagttccatgcagtgaaattactggaagacccggtcttgggcatcatttcgctcatgcttttgtgcttcacatgagttgcttaaagcaactcacccgcgatactgtgggtggctggggtattcatttctcaccctggcccaggggaggctgctgtgccctgacagtcagcccctcggctaggggttcgcactgtcatctcctggctacaatttctggtctccgctaagcattcttttcttcccatttcccaccaatttttcttcctctttttatttctcttcttccttttagaactaccagtaaccctcagctgccctagacattgctcatgagcgggtttgtttggctgactctgcagcgtgagacatggttgggcataggagctgtatgagtctgtttccacgctgctgataaagacatacctgagactgggcaatttacaaaggaaagaggtttaagggacttacagttccacatggctgggaggcctcacaatcatggctgaaggtgaaaggcatgtctcacgtggcagcagacaagagaagagggtttgtgcagcgaaactctcctttttaaaaccatcagatcccatgagacgtattcactatcacgagaacaacacaggtaagacctgcccccatgattcaattacctcccatagggtccctcccacaacatgtgggaattcaagataagatttggctggggatacagccaaaccataataggagccattggaggattgagtcaaagtggtttcaggaggccaggaacacagaatctgctttgtaaccctatgtaaataatacgtgactcaggatagcatgccccaaaattcacgtccacctggatttcagaacaggactttatttggaaatagggcctttactgatgtaattcattaaaatgaggtcgtactgaattagggcaggccctaaacccaatgactgatgtccttataagaagaggaggggcacacagagacacacagggacaaaggccatgtgaagacagagccgaggttggagtgacgtgacccaggagccctgaggtttgctggggaggaagggttctccctcatggctgcagagatggcgtgtccctgacagtgacttgacctcagacttctggtctctggatctgtgagaccatgcatttctgggttttgtgagccatccagtttgtgcaatttgttaccacagccccaggcacccaaaatacatggaaataaattactttgataaaccaagtctccagtgtgtggctgactgtaaggtactgagagagaaaaacactgcaacttgcctgtttatgcctggatttttcagcgtggctttcatttcctaattaaatgcaagaccttaaagcaaatgggtccaggaaaggtaatacattgatttgactcagacttaatggtaagtgatgtttctgagccaaacattgttttgaaaaccttacttgggcactgacagtgccaagtatttgaatgcaaacagaaaatgcagtcacataagtgaacatttcttcatgcatttggttattttgctatgtccgaagaaggaatgaaaatctccggtctctgcttgcggactctgtgtggtaacacatgaggcacagggcgtgggctggcgtttggcctgcctcctgctttcttccattcctctggccctgggtagactgctatcacctaaagcacacagaactttggatatttgcaggaacttttgatggtttcaatttccctttgcttatcaagggttttttttttttttttttttttttagacggagtcttgctccgtcgcccaggctggagtgcagtgacgcaatcttggctcactgcaagctccaactcccgggttcacaccattctcctgtctcagcctcctgagtagctgggactacaggtgcccgccaccacgcc

SEQ ID NO: 66571 - DNA, 2260 bp, Homo sapiens
tccagcatggcaacagagcaagactctgtctctaaataaataaataaataaataaataaataaatataaaaagaggaaacaaaccatgtaaattttaagggaggagacaattttaacattttactttatgtgggaacgtatacatctcttacaactattaaattcatttttaaaaaataataactcccgagccatcactccttaaagaatgtggtagtggtacaagtttaaagaaagtcttttgagaacactctattggaaaagtgagcagactagggaataacaattttacccccaagaattgttgttaagattaaaaaggaaagcgctgtcgcagacgctcaaacacggtgctggctctgcttccttcatcagttcctagggtcatgggacacaaatactaaaatatttccactactggtaacgatgctggcgaacgctttcctaatccagttcagaccgacctctcattggagcttgtgtgacccgcaggagtccgtgccccgactccgccgggactgaaacgcaacggaaagtgcagtgctggatgcgcaagggaatgggagcgtcgtgggacctccggagcctgggagatcagagggtggagtcagggccccctagttttggactccattgccgcactgcaggcgacttctcggaccccaccgttgaagcaccaggccccccgcccacccaagagcaaccgggaagcacagcacaagcccacagctccggacacgcgctcccgtgtgccctgcctcccctgaatcccaacccacgaaatctccgccccctcgccacgcccacatccccgtctaccgtcggggaggggcgacgaggcgaaagccttgtggaccaggccgggattggtgggcgggacggaaatggagctgggagaggtgacgtcaccttccgcacctggctcagggcggaaatggggcggggagagagtgacaccacccctctgcctgtggctggattggtgggcgtggcgggggcgtggcgatgcctgccctccggacaaggcggggttggtggccagggcgaccgcggggcgggccagcgccgggggtcgtggccgggacacgtggtacggaaccggcgccgcgcttgctgctggtaacagggccttgcctagtgggccttccttcccaggtgggtcttcctgatggaccttccttcccgggtgggcgccctgagctgggaacgggctgggcggggaggacccgggtcagcggcgagagtcacgcctcattcgtgggggagcgtggggcgcccggccgcagccaggcgggaacaatggtgtccgggctgttcccgagcgcgcggtcgggggcggaggcccgtgacggccatggccccggggcctctcgcacctccgggccactcgtgtcccagcagcgccgagcgcgtccccggtacgcagggacaagctgggcggcgcacttggcctgagcctgcgtggccctccctggtggagtcgagtggaacgacccgggttggagatggggttgcggggagccgagcgctggtcaggccacacccctccccaggggcctgctgagaactccagcctttctccaacggatccctttcccggagacctggggtggggagtgtggcgggacagaagcctcccaggttcaaagggccctggacagcgtccctagctcccgccagcatttgaggcagcgtttaaggctataggaggaagcgtctgaggggagacaaaattcccatgccagcttgatggtctggggcaggtgtcttattcaattggcttcagtttcctcatctgtgaaatagagacaatatttggtcctcacagacagggccaccaaaccaaactccccaccgcctgccaaggtcagattccgtagatcatccaagcatagactgcaggaagaggcggagaacccggggcctgctaccaataccttccttgtccctaatgtttgcaggcaggagtggaggaagagaagtccacattatgcttagggatcaagttctagcttgggcagattggagattcttttattggttcttaatcagacatgaaggtgtgattcagttatttgtgttatatatgccttcaattatcaagggacagggactgagattctcagaactagaagactcatttgtgtgtactactgacggttccaggtgccacagcaatttctcctgccctccactagtctcaacatttaaatcatgttactcccttgccaggcatggtggctcatgtgtgtaacctcgg

SEQ ID NO: 66572 - DNA, 2121 bp, Homo sapiens
aattttttagctccattataatcttttgggaccaccgctgttgttgatggaaatgttatgtggcacgtgactatatttttgagtgactttagctacaatgccactggttaatttgactacaagagaataatattaatgagaatgtaccacagtgagcttgggatttgtggcatttaataaccaggaacccagatgaaaatcaccacatgtagcatattgtcctgctaaataggatttcctttaatgtgaacaggtagcttccctgcgtacatttttggcaacaggtggatgacagtgttatttattaacactgataaacgcctctccagcgtgctcatgggctccatcttacttgaggctcctccaaatgagtgcctcagcagaaagatccgagctggctgggaggtatataaccattccatgctctgtggctagtgtttgaagaggaggaagagggcacttgagaaggcagtggttggatgtcccacccacatagaaatcacatttgcaacttgcagtgccctgcgatttcatcaccctgcacagcaacagccacttttgaacagttgccacgcttggtgtcgtggtggataaagtcacctctctgttgagaaatcactttgaaagcctataccaaggaaacaatgctctttacctgcagcatgtcaatgcacaggcgtttgtctggcatgtagacacgaggctgtagtagggtcctgtcactccacagctgtgactctgaggcacttcatgtccccgcagttttgaatttgctccgtacagctgtgtgctttctgctgcggaaagccaattataaaagtcccaataccagaatcaattttccattgtattcattgtgactaacaaaaagagtctgaggatgtgttttcacctctatctgtgagtggggcggaagttgctgggtgtcacacatggaagtggggtgagagcatgcgcgctggagcctgtgtggcctcttggtcaggtgcttgtggaggtttagctgatgccctttggctgtttctggactaagatcatcaactttcttaaactgaatctggttttccttgggctctgtcgtctgtgttgtgggtttgtggtggtggacacaggatgtgacattcttgctgggatccctgaagtgactatatcctctgcaataacagaaagtgaaacttatctttgtgctttaagagtgtaaaaatttttattaaagtaccagtaaaactaaaagtgcctacttttagttttcactgtattttcttcaactcaggccctccctctgttgttacctgccatctgacacggaattttgtgtaattttccttccaagtaaagaagggaagtttagccccagcctctaactggttcccaaagtttttgtctctgaagccgcagtcacttcctggagcgtctctggctgggtgttgcagtgctggctgggagggtggggcaacaatttacaattctgaacacgtgctttctgggcaggtcgcccctcagtctccactagagacaggactgaccagttgctcttccttccaagaaccttcgagatctgcggtctggggtctggttgaaagatggcggccctcactaccctgtttaagtacatagatgaaaatcaggatcgctacattaaggtaagggaatattcattttaggaaacagtaaaatctgatttaatcccatggggcccagagaagttgtcaagagctaatatgaattatgccatttaaatccagggttagaagatctgcctagagatctgttcattagcttcttattatggcataggttacacttttggtttttgacaaagtgttaatgtatgtttctaagaatagcaaatctaattgaaatttttgtttcatctccatcaacaatttcttgtgatagttacagattaaatagtttgcattaagtatgttctaagtaattcaatagttatatattaatctgtttcttgatgttaacttagagcattatgttttaaagttattcttcgtacatacattacagatgaaatctttagaattctcatgctaaaattatactttagaaaatttggccattgtcgggatgataaataagctaatttggactgtggcaacattgggt

SEQ ID NO: 66573 - DNA, 513 bp, Homo sapiens
cctgatccccggcattaacgaggccgtggccgccgtcacggaagaggagcacaagctgtacgacgacatcgactttgacatagaggagtttgccaaggatgtgggggcgcagatcctcctgcacagccacaaggtctggttcagggctcgactctgccacctgcccaggccacgctgtgacacaggtgtcccccaggccctgtcaccttccctgggtccagggggtctctgagggaagagctggaatgtccgatgcacatgagtcactcagaaagcagactgtgaccaggttgctggtcgttggaattttttagtttcaaaatctacttttgattccatcagacctggagaagcatgcagaggggacatgggctggctcctgctggcagcggctctgctgtgtttgtgtttatagagtaacctccttaccgctgggcccagggctcatttaagccacatcagagccaagtgctaggtggaaactgtgccgaacgtttacctaacttaggggaa

SEQ ID NO: 66574 - DNA, 1846 bp, Homo sapiens
tggacctgagccacccacgctgcagcgacgggcagtgaaatgcctcacctgagggtgtgcagcctgtcaggggcctcctttgtgctgagtcactcactgcagtcgcacctgcacctggacctcctgcctgtggttgtcaggctcctgggccaggccctgtttcataccgctcatttcccagacaacattcccagctcctcggtgagcagacagggctggcactgaatgcctgaggtgtccctgaccctctgatttttctgcagaaagacatcctcatgcaccgatggcggtacccgtctctgtccctccatggcatcgaaggcgccttctctgggtctggggccaagaccgtgattcccaggaaggtggttggcaagttctccatcaggctcgtgccgaacatgactcctgaagtcgtcggcgagcaggcatgtggggctgggacacggggtgggggccaagagctactgtgtccgggcagagacttgggtaatataggctgttactcgacagacacccgggccatgcatgcccccgcttcctggctctggccaagtcagtaattatgacagtcacggttcagaagctaatcaaagataatgcatcacatgtaagtgacctttgttactgatgaggcaggccaaaatctggcctttgacctcactcacctcaaggctccaggccaaacaccaactttggaccaagcgtgttctggtcagagtcccagagccgccccttaccatggtgccttgtggaggggactctggtggctggaggtcagcccagcttctgactgtccccctcagctgggattcctggggagatggagtcttcccactgggaatgggagcctggggctcacccttcatgctgaatactgaggtcttgtcacgaggaggtgtccccgggtcagcgcctggctctatcctgggtctggatgcagtgtagcctgtggtcattgattttatgaagtacctcggtctgctcaggctgccacaataaagaccacagacgcggtagcttacgtggcagacgcgatagcttacgtggcagaaacggattcctcactgtttcggaggcggatgagtccaggaccaaggtgccggcagctgtggcatctgacgagggttcctcctggccgtggccgctggcctcgcttgtcctcacatggcagagggcaggctctcggtatcttctcacccaggcccacccttctggcctcatttaacctttgtctaaataaggtttagaaagagaaaaaaaaactactaaagaaaaaaagctaggcttttaaagaattcaagttagttttattcaggcgcctcactgaggaatgcggactgcggcccggggcccaggagcagccttggagaggtttggctgggctgctctgagagagcggctcagcccgcagctcatctgcaggtggaggagcttcggtgcgtgctgaatcacatcgcacctgctcagatgttacattccagccaagccacactgagcctcggtgtaagagcacatgtggtcaaaggtcacagaggcgcaaccactaatgcggtcaggtgctatcttatgtgtgggaaaaggtaaggacagggtcatttatctcctaaggaatgcagcgactcgggcaagaggcaggggtggtgtgtgctcccccgttttgtcttcaaagcatctttcctgagagctacaggtagtggcagggtggagcctgtgaaaggccggcaagcagaatggcgcaaacgcagcttctcacatttgtgactttgtctcacaccttagttacttctgttaagtccccaagtgtagtcataatggagtttagggcttaaatatatgaattctg

SEQ ID NO: 66575 - DNA, 1965 bp, Homo sapiens
agctgccaggaaaggcacagtgatcggatcctcccctgagcgtgcactgtctagggcagctgtcctagcttctcagcaggttgtcatctgcggctcaccagagagagatgctgccctggtgactgccactctgctggctcgggaccctggcaggttcaggagctgatggtatctggagggtgggtggcatttgttggctggagctgagagccagctcctggaggagtcacagaaggagaaggggtgggtgggtccagccaccatcctactgatcccagtgcagagctcctgcccaggaggaaatatgcacatgcggttggtttatgggagggagcctgggtggtctgttgcattgttggtctcaccatcacagggcaggcagcagcaaggctggagcaggggacctgagccctgaggtcctccccagccccttcgtcccagccctaatcaggaggtaggggctttctgtccccagagcacctctcctcaggccccacaatgccccagtgttccaattctcaattgctctttcaagcggttacaatcccccacttcttcagaagcactgtggttgggacaaaggtacctttcatggtacacgtggctcagcttccggcgccacaggacataaagttggggtgctgtcccctgctgacctcagaaggaatggggcgcattgtgaaagggagagaaacagtgctaagacaaggcacgcacagatggaactccccaaagactgcagatgaggaggggtcccctgtgccttctaggactagctccagtgccctgggatcccagagtgcatggcgctcagggagaaacgcgtttgcatgtttcagtttcacagtttgcctggggcggtcttgttacccaactctgtaccttgtactgcaggccagaggtgtgcgcaggagcactgccctggggccatcccagaagccttgtccctgctgacagggtgaggtttgcttgttgagctcctggtgtcaaggcctaatttattagtcattattagccaattcctggaggttgaggttatccaggatacaaacatttatgccttttaaggtgcactgaacagagcttgtgggcttttaagtggaccctttttatcttcacccgaatcttgctctcctccagtttgggaaagtttgcaccaggtagcgttcccagcactgagcctggcactgggccaggctgtagggacattacgtcccaggaagtgaaatcattgtagggcagtcccgatcaagacacagtatgagttcacccttaaaactccccatccacttcaagcaaagcaattgcatatacttcaggattttgtttgtttttttgtttttgagacaagatctcactctgtgatcctcccacctcaaacctcctgagttgctgggactataggtatgcaccacctggcctggctaagttttaaaatctgatttcgcttatgtagagacagagtttctgtgttgcccaggctggtcttgaactcctgggctcaagtgggcctcctaccttggcttcccaaaatgctgggattacaggtgtgtgccactagaacactgtttgagaactgtaagccaccagtttaagacctcgacctggaatgggcatcttaaagcaccaggtggaggcaaccattgcattttaggcagaactcataacagagaaggagaataaaatgactgtcattcaagttgaggctgcaagccaaagttctgaagtatgtaagaaagacatgccttaagaaaaatagcttttgcaatgtgttaggaaatgggtttaccaagactgacatacaaagagtagaacatgtttaaaatggatgcaaacgaagtatgtttaaattcttcaagagacaaatgaaagactaacacccatattaaagaatgagaaaatacaaaacgtaagcaggtatctatgaatcaggagcagacaggggccgggtgtggtggctcatgc

SEQ ID NO: 66576 - DNA, 2935 bp, Homo sapiens
taaaaaggtaaggaattatcactcgaatgtattctgatttaaactgaattgtgttcgaattggccttgagtgacgatttggcctagaaagcctatcttcagaacatcacacacacacaaaaatccaattacttacaatgatttttttgagacggaatctcgctctgtcgcccaggctggagtgcagtggcgcaatctcggctcactgcagcctccgccactgggttcaagctattctcccgcctcagcctccaagtagctggaattacaggctcgcaccaccatgcctggctaatttcaaatttttagtagagacgcggtttccccaggctggtctcaaaatcctagcctcaagcaatccaccgactcggcctcccaaagtattgggattacaggcgtaagccaccccgcctggccagtgatcttcctaaacagaaatctgatcacataacttcccattacagagtctaaccctaaccctgtgcctacaacatagtcaaacctctttagcaaggcagatgacctcaagcaggatttcactgcctctttgtcacagcacttaacaagctgtgatgtatttatttttattcgtctacacaggtcttccctactagattctgagtttcagaagaaaggcctctaactcgaggttcatgaatggacctgcacaagggggcggacgggctgaagtcctgcctttttttttttccaaaaaacccgtatgctgtgccgttaacgttcataaaaaagtccttgtcgaacgttttaaacagccaaggtgtttcagctttaataaaagctgaaaatttggcaataccaaacaggtcaccaagccacagtccgcttcttggcctcctctttggtatcagagttcggctagcggcttcctgtggcctcttaaacaaggacctcattttgggagccattcgagagattttttctcatcatctaaagtagcattctcgccttgcacagctgaaagtcatttctcgaaatcggagcgccagaagcgacaggagccactccaggcccgggggaagcgagcaaaggggcagcgggctgcgtttgccaacgtaggcctctcgggtcccgcgccgttctgggccttctccgtgtttccggcgccgccctcggggtcccttacagagggcgggaggcgggtggagagacggggcaggaagcaggcgggatcggcctgggaagaacccgttctgggaccctctagaaatcccagacagccctcccgggctgacagcgcctgccttggagcccgacgcgctcatcgaatttagattgactccttcggctctccgttttccttctctaagggaagggtgggacttcctattttatctcttagcggcttccggcaagagctgatgtgttaaaaacaagacagcacatgggcctgccggccactcggataaaaaacaaggaactcgacctggattgtactaaaccagttccaagattctgtttttcggctgtggcgtccggcgctgcatccactacggagtcgccttggaagccaccggaagtccttcgacggagaaacaggatgtcccgcctcttcctcccaaagggaagacggtgagccggaggagtcagtcagaggggcgagcaggagcgattccgtcgccaaacaggtaagttattctctggccggggcggggggtttggaggcggggaccgtccagcgtcagcgcggggcctgggggcggtggcttgagggctcgaagccgggcggctgggcgcccagagccccgtctgggcccttcgctctttctcctcccccctccccccgcctccgcccctccctgtcgccttccttcccgacacccgcccagactcacgcccggacacacaccctcgctcgttcgctcacgctgcctcgccgccctcctcccccaggccccagctgccgccctgccctctcacccgctcgctccgcaggccggtcccgcgggcagcctcgctccgcgcccttgcgcgagcggagctcttgtggacacctcggggctgcggacctagcgtggcctcggtttcccctgccgggttcgcctgtccgcgcagaaacagtcccccgttccttcgggacgcacccctgcaccgaaatcgggccgttctcgcgtgcccgggttgctctcaagtggaaaacagatgctcccctagctgcacagctgcaagctttagcgtctggtttccagcaggggctccctggaccgcccgcccactctcgtgtcacccccaggtgccctggctgcgccgctgctactcgcgccttcttccgttaagcgacgctggtgtgggcgggcggagggcacacaagtgcggtggccgaaagcaccgcggtggcagcgaagggtcctagccattcccgacttcagctcgctttgcgccactgcggggagacccgcggctgcctgacaccgctgcgggcagcagtgggtttctcagtagatgctcacctctttccagccagctagcacgccctgggtgcttggcctccttctggagtttaagctggtggaggcggggtgcagtggccgctgacctctgtcggttgcgctgggttttgagtagccatttatttcattggggagttttggaataggacatcccacatccgtggacacacatgtagaatacttttataagtaattacagtcttaatagtgatttgagttacagctttgcagtctatgcctggtgacatcctagtcgtagtatgtatctgttttgtggtgaagtgctggtccatttagaacactgtagacaggggccctaacatatactcatcagaaccttattaagaagagcttatatgtcatttggcatactcactgtgcttcatttagtacagcaatcttgtgtagtaggaattattccctttttacaaactgagactcactttgctatatacaaaattactgcta

SEQ ID NO: 66577 - DNA, 911 bp, Homo sapiens
acaatgtgagagaatgtcaggatgtgatgaatgctttgaagaaaaataaagcaaagggattgagagtgattggggatagggatggttcttattttgggtagggtacttgtagaatttgaccttcataaggcctatagaggcaggtgagagctcaccttggaaagatcttcctgcctcattctccgtgatggacacaacgcttcaagtgctcatcagctcttcccatgtcctgtttcttcttatgcactttatggcttttccctcagctgcactgttcattccacaggggcaaagacagcagctttttttttttttttttttttttttttgagatggagtctcacgcattgtcgcccaggctggagtgccgtggtgccatctcagctcactgcagtctctgcctaccaggttccatgattctcctgccttagtctccagagtagcttggattacagttatacgataccatgcctggctaatttttatatttttagtagagacaaggttttaccatgttggtcaggcagttcttgtactctggacttcaagtgatccgcccacgtcggcatctgaaagtgctgggattacaggagtgagtcaccgtacccagctagcagttgtttcatttacccaatacactctgtgtacatgtcaaagtgggttatcaataagtagttcctaataagtgaattaattctttagttaccttcagttgtaagtacaggctgagcatcccttatccaaatgcttggaacagaactgtttcagacttcaaattttttttggattttgaggttttttttgaatttttgattatttgcattatgcttcctggttgaacatggcaaatctgaaaactcgagatccttatgctccagtgagcatattctttgagtgttacgttgatgctc

SEQ ID NO: 66578 - DNA, 1210 bp, Homo sapiens
acccatacaacattttttaaaaaaaattaattatttcacatgagaatctttgacaaattaactttgtagttttctgtttttggaacttccatacaagatgatttgaaattttcttgatgactcaggattatcattttgtatatgttatcatgccaagctctaaaaaaatcaatgttcttagcatattttgacctggagaaggctgttttcaaatacctgcttgctccctgattactttacattttcgtaatcctgtctgcctcttgtttcttgtctcttttcccattttacactattgttgatcttgtctgtagtcatgcaattgctgtccattatttcccatccgtaagaagccagtgaaccagctttagcagtatagatcaggaaagggtgctgggtttgagtagagtagggaacttagagactctcccttattcagagtactgaagtgcaaacatagttttttcaaatagatattttgctgctccaagcccttttggcaggtttttaatttttagttgtatcttgagaggtgatgctgctacattcgtgaggttttgatagctgagaagttaatgtttctctcagttcatattgtttcagttgctctcatgacatgatgtgacctgttttgccttattgtgggaatgtttttaggtggtttatgttttaacagtacacaaggcttattttattcatttgttcttatattcctcttatttctagtatcacagcagacattttgtgtgtgtgtgattgactttgaatacattaaggtacatcagttttatttattaatggaggcgggttcacaaatgctgaggttaggagtcagtgacaccctgtgaactaattgctctgtttatctagcagtaaggcaactctaggacagcctcagcagtcaatatttaacttatccgtggagttttacatgtaaaacttaaaataacagtaaaaataacttttggaccctacccttatgaaactgaaaacctgcttggtgaagtaaacaacacaaatttctgaagttaaaatatactatggtaaaaattaataaaatatgagaagtggttcgaaataatcaacaataaattacctctaatttatgacataaagaaagcaatgtatcggtaatgtttgtttgtagttcagcctacttatgttgatatgttaatttcaagtatgttgaaatagatcgcattttaaaatg

SEQ ID NO: 66579 - DNA, 2114 bp, Homo sapiens
catcattttctgacagtccttgagacggaatttatctcatcattaattaaccatcatatttcttacatagctgctgttaattagagtaaggtcatttgggagggcttattaagtggaacaaattcagcaaatgttaagaaagtacggctgccagcagttcagcaagtttgacaagacctgctaggtgattgataactgcaccagtttgaaatctagacctcaaggaatggaatggtaactggggacgagaagaagcaattgcaaacatatgcctgcttgtaggcagggaagagatagattacagtgcatgtagtgtcaggaggcttttttatcatgaattccacctctcttactcacctgttatttttagaacgttggatctgtttgtcaaaaagaaatgaaggctgaatagattcagtctgcgtggccttcaaggggctccagaactgaaagctctctgatatgtgaagtgacactgttttatattaacataatttaaaaggacagaattggtttgcttgtcgttaaaataacagctgtttgctctggctgacattgttgccaaatttcaatttagtggcaacatagatctaagtctatttgtctgtgacctgcctcgctttggcaaccaatgaatggtaccagtgggtagatgataaactccaacagatgacaggctgtcgacagagagaatgaaactgaatctgaaaatcttataatgtgacacatctggtacagaattgtgtgcaggctagcctgctgcagaattgtattgtgggagtacaggaatgcactctgggtcatatcaacacgttcataaagggaaagttttcttttcagattgagaggggtgaccttatattaattgacagtaattttgagcaattttaaggatttttaaaaaggtctttcgtattattaaaggttcaggtttcacaaaatgagccagtggctagctgaaaagcccaggctgctattggtgcctttagtgtgtgaagtgcttatgagttaattagctgcaaggcattttttttttttttttacattttaagggaaaagttagccatatttcattaattaaggttacaactatcatattaatgggaaaacaattaagtgaaataatgatgcactagtaatccattttagcgcatccgtaaagaccagcaggagggatcaaggtgagagttctggaatagtgtacatggggaagggaaagcatgactcactaatgctggggaaaggcgcaaacgcatttaaatttttttaacctttaagtttcattacagcaatctgtgttcttatttttcatgtctgaatcataaaatacaaaccagtacataaatttctggccagagacattgcatggaacagtaaaaatgaaaggttttacaggtattctttctttcttcctttacacaaacacacacacacacacacacacacacacagagtctctgaagctttaccttttctaatgacacaaaattgttgatttttttaattttttttctttatgaggaaaacattgtaaagcagactgcatgattcagagttggtttattaaaattgagaaacagtgaaaaaaaggaaggcaaggaagaatatatttaatataatttaagtaggaagaacataaccaattctatttttttaccagttagtcttttcacagtgtatttatgcaatgatgagggattattttcatttcagtggtgtggcaagaggttgaattacagagggatatatatgatggtgaatcttaaaattataaaactcttaacaaacgctgctttaaatcaaccttttcagtgtaactgtggagtcttttactgatgcagaactcagtttttctttcagttttgttttagggatttattaatttatgacaaactttagtgataggttgagtagtaaggatattatctttgttggaggaaaaacagtctttattattttaggcctatgggctcattttgtaactagggaaagatgatcaaggatttttttcttgctttcaaacttaattttatttttgcaaaagaaattgttttctctttgaactcccagaagactgacagaatctttggattttatgtttagatttataatag

SEQ ID NO: 66580 - DNA, 2137 bp, Homo sapiens
caaaagttataaatttggagtggttataatgttacctttctttttttaaataattatattgagactcattctgactgttccagggtggtagctaatgagagctaagtccagcgttaccacccccttagccagttttgttacctgtcagagtcaaaagaaagccctgtaacagccttgtatttcagtgcttcactcaatcctgagctaactggagtgaggggaagacctgtttgctcccgtgctcttggggagatggatttggggctgacatcagcactgtggtggttgtgggtttgttcttcctggcacttcgtccctaatggggataccccgttggtccagccctctggttcattgcagtgctagtgctggtgctggtcctgtcatcgatagggagaccctggaaacttcctgttttctgagaagaaggacctggttatcaatgggcatctagaatgtgtctgtgggatttttctctataaagtactgaaagtgacaaaattcattttgcattgttgagaatgcatagtgtttatttttaggagaggaatattttcttcctatattttagcaattttaagttgattttctgcaatgcattatgttatttctctgatatcttactaaattttattaaagaattcgaaaaggcagattttaaagaatgggtcagtcttaccagaaaacatacaagcttattctgattgcgcatgaaagagaaagtttagtatttctagtttggtcacatttatatgttttacaaaccagggaagctgtgttgtgttaccttgggtctgtgtgtcagctgtgaatgacagagataatgtggtttttatcaatattaatactttctggagcatggtttcaaaaaggtcaggaatgacggagcgaaaaatgttcacgagaatgctttacaacgtgccttgaaaacatgaagcaatttaacaaacttgattgtccttggcttcagagtaaaggttgcatatcgaaagatcgggacgttgccaggaatacagaacaacaggaacgcgtcgagtgcctctgaagcccaaagtctttgtgagcacttttcataactgatgggacctgcagtgggaggattggctgaggacttattttggttgaagttagacatatttcattgtctttttttttttccttttatctgtgtacttctttgcatacttgaattcatttgtgtgatgtaaatcatcacacaaatgtaggctagtctagtgattttctggaaggaactgttattttaaaaattgagtactcagttttataaaattgtcatcatcaatgagttaaaaaaaaaaaaacccttaatgattcagggtttatttaaagctgactgtccaatcaaagtttttgtaagcatgccatgtgacaaatgcctggcatattcagtaaggaacatattaattattctaattaacacatgacttcagagaagtctttcgttaatcagcacatggatcttggttatttgtacccttttgggaaaatttcacactcagatgcaaaaataccaggctaaatacattgctttgtttgtatgtggagaggatattcatcacaatggtactatacatctaagaaaacagaaagtaattaaaatgctgattactatagccagtctctaaaacgtctgattatttgtatttcatatgtgctcacatttctgagaagttagcttttgtaccacaacctaccatgattatctgatattctccggaaggttagccgagttgtttcctatattacttaggaaaaaatttcttttcacaattgaaaatgtcagcatcaatttaaagtaacactaagcatgtgcttgctttctgaatattatcctcctccacctccttccaaccaccctgccgaggatctggctgtgacagtttgattagatcatcaatcctcactgttaacagcacttttcctgaacacctgggctgccaggtcacatctgaattcagctaccgttgtttcagtgacccgacgtgcattcaccatagcaattgacattatgtgcacaaattaaaagttaccttataacaacagtttactttaaaaaatgacctcttttttccccccatgttgaagttctgctgtgttataggaggtgcatttttgt

SEQ ID NO: 66581 - DNA, 1903 bp, Homo sapiens
ttgtttaatggaagagcttatggatgtatattctacagactttactatttccaatacatttttttcctagtgatgtaactctttttgttaaaaattttcttgagtttttaaatgatttatccttatacactagaacttgggaaaatatcttaaaataatactaaacgagtaagattatactttgtagaactccaagccatcacgtgtgcacttaggtttcctgccaaatctggagcagtggctggatggcgcagggcctgctgtgactgcaggcccacaccttggctaggccgcgccccttacttaggattacttaggttttccttagtatggctaatgttgattgtctttatcttatctcagaaagtctgtggcagttgtaaactctcaagcttttgacagtggcacagtgtgatatgttgggaagttgattcacctgtcaacctggttgtaattcaccaatctctgctttagcctatgccaatggggggttgtaggaggaaggcgagagccaggggtggaggacctgagttccagttggtccctaagtagctttatttccatggacatagctttttgactctcagagccttagtttcattttctggaaagcagatatgataagatgtggactgttgtgaggatcaaacaagatgataaatgaaaatactgtaagggaaataaaatgacaacatgtcatagtggataaagctctagcagaggatgattaagatccagtacctgagtttaaatcctgtcacctccattttattaactgatgcaatttgtccgagttacttaacctctgaaactccgtttattcaactaaaaatataaggaataatactccctttagaaaattctcataaggagtaaatagagtgagactgagtaagtgtcccagcagagtgcttgacatgtagaagctattctaggactatgagtcacctttacctcacacctatgattaatttagcaaaaattttctcaggcatggcatggttttaggttctaagaatggagtggtgagcaaaataaacacttcttacccatagagcttacattgttatggcagaactggaaagtaagtgaagaagcacataaataatttcagaaagcagtagatgccatggagataataacgggaagcaacaggtgattgtagatagattgtttacagtaggcacctctgaagcctttttaaggcttttcgggcaaattagcctgcattatttgcaagaagtaatgcaaagagagtccctgtattctgaggctgagtaggaacgtgaatgatgagaaaggcagcattaaagagtattctaggtggagggaacagaaagtacagtgaaactgaattaggaactgaaagtgttgggctgcatgtgctgaaggagggtcctgtggctgtaacacacatacaggccagcttgtaaagagacatgagcagggtcccgagagtcatggaggtagtcttcgttgtgcatggatattcatgggaaggttttcacagggcaagcaagactttgaacagtcacactagttatgctatagtatggtgctcaagttcccctatgatagtatttcaaacttctgtatcccctgccccagttgttggcaactgagtattttcatcctaagtacagaagttggacaggatataatttcaagtgtagaataaaaattgacatagtaaagtaatatttgtaccactttaaaatgtatccaatagaatgttaacaccatgatgatttgattcccaccgtccattcatttaaaagtacatgaataagttctttaactgtcagaaaatttgtttttcttcttgaactcacatcccttatttcccccacagattttattgtatttgtatgtggacatattttaatgatcatcttatcatttc

SEQ ID NO: 66582 - DNA, 1770 bp, Homo sapiens
gacatcagtcatagtgatatttacttatggataccaggaagagtcaaaaaacagaaaacaccgttagactctataaagcacggaagaggacctaaggaagcaagtgaagaatttcttctttttcaaattgagttttgtggggaaatttaatgtccccttgaacatcatcagccctggcatattagattaggcagagatctgagattctagaccaatactcttactttagaactgtacagttggaagttggaaacatgaagactttggaaagattctgtcctcttcaatatacacatggctttcgggaaaccacactttcttggtctttcccgtaccttactagtaactccttctctagtctcttttgttggttcatcctcttctgcacacaccattcatgctggaagatgcaggacttagtctttggcctgtcccaggtttgcctcattttcttaggggtcttacccagtgctgtggctgtcagtggtctctgtgggccaagaactctcaagttggtgatctcgagccagacctttctcccaatcctccaggtcatatttccatctgctgatttagtctctccatgttgatgtctaataggcatctcaaatttaatttgtccaagtggaaaaactcgtttattcttcaccacctcaccatccctcccaccccaatccacaagtgcttgcctctcttacagattttattttattttttgaacattgagatagatcttgcttgttgcccatgctggccttgaacttctgggctcaggcactcctcccacctcagctccccgagttgctggcactacaggcatgccccaccacacccggctgtagactttcctgtcccagctgatgagatcaccatcttcctgtttacataggccatagcctttgtagtcatcctggacttctgcctctcatagctcacatcctatctatcatgttcaaaatagattctgaattttatagcttctcatcactacaatcatctgtttgaattatgccagtggtctcctaattagtcctcccaactaactccgtcttccctcatgggatctcttctcagtttggtaaacacattgatgctgaaagtgagaacacatgactcatttgcgcagagctcctccctggtgcctcagttctcttagagaaaacccagtgatgaggtctctgttgtcacctctcaggcccacctttcacctgctgtctctctcctgcactgctccggtgtgctgggctcttcgcaaggcgtgccccctcttcagtgccctttactatctggattattgctttgccagattttctcatgtagtaatgagctgaaaccagctcttataaggtgggccaattgttaaactttaaggaattttgtgaactggttgccattcttttcgtaggctgaaatgggccacggtggaggcttttcaccataggaatgagcaagccctgcatattagttcctcactccacccccagcctcaggggggctgctaactgtttaccaccaggtcaccctcacggctgatcattacccttcatccctttgctcaccgcttcccttctcagtgaggcccgtccttactgttgaatttaaagttggcggtactcccaaacctcctcaccctgctctgttgtttccagcagcacttgttatttttaaacatgctatgtgagtgtgtgatttatgaacttttgtttgctatttatcacctgtgttcacccaggtgcccaccacagtgactgctacgtaaaaggcccttag

SEQ ID NO: 66583 - DNA, 643 bp, Homo sapiens
tattaaatattacaatgaagaataatagtcttagttcccttcatgtggtagcagggcagcacacaagagtctaaataacttctctattatgaccactactactgtgatacccccagtgcctccaaatgttcaaatgtactgaacttttcttttttctctatgatacagacattttaaatagacgtaagcagaacatgttcactgcaccaattacttgtaaacagtggaaatccccacaaggcaatgagaagggaaggcaggagtaacaaaggcttgcccttggtgtggggccaagcccttcactttctctcctccctgttcttggtttcttgactcattaagtcaacattgtccctctgttgatttgcctaaactgttttgcacagagatcttgtagaaaattggcaaactgcagaacactgagcgtgagttctcagtacgttcatgttgacccttctgcctctcactgcctcgtcttctcattgattgcatgcctttgacacactgctttgctgctgcttccttgatcatcatcatagcatccctagattgcttaactaccagaaaataaccttaaacatggcatttttatttcaaaattattttatttcctctgttgttgagcttcatatttgcagattta

SEQ ID NO: 66584 - DNA, 2668 bp, Homo sapiens
gtccttcagtccgtgcaagggactttacggtactttctagtacacaatttacaacatagttacagtcagaacttactcctccctttcgatattattattcaacttgacacatgcagcaccgtaaacatttcgatgggactttgcaggcctctgcagagggcatagaggagcgccttgccagtcaagtcgggcagccagggacccacggagcaaagacctaagcgggcatggctccgataaagagtgaggtccgtttcctccctgttgcttcgccagttactaaagatgagtgaggcggaaacacgacggtggggagcgcggggaatggaaaagccagaaggtctcgcaacaacccggtgtcacctgaatgtctgcaaaacgtgccggcaaaggcagccatgcccccaccccgaccctggcccagctgcccgggacacgcgccacgcggcggtcgttaacactcaggggacagacaacagtcacactgcactgacagcacgcagacaacaccggcgaggtgcacacccacacatccaacgacaggctccgccactgcgaggcggctgccaacctggagggaacagggaaagccagccgggtcccagcctccttcctccgaagcacgtttacctaaacgtcgcagtttgcgtccaggctgctcccgctccaccctaaagattatgtcaacgcaggaactgtgggtgcgcgcgggcggcccggcggggagcctccccttctgggtcccgtcggttttatttcgggagcgggagggggaggagggagggctggaggaggggaggggaatcccaaattaaaataaccctcagttatgaggacgttcggtggcatcggatattcacaccagcaacagtcacatcacattcgccttcgccagatggcggcgggttcaacttcccgggatctcgcaaactcaggctgtgcgcccgagcgcgcgccggagtgtgggcacgcgggcgggctggggactgcgggagcggcgcggcgcggcgcgagcccggggcgagaacgggggcgtggggttggggggcgccgggctcaccggttccggacgaggaggtctccgtccccggggagcggcaccgggcagtcccggctcagggtgacggcctcgcggaagttggggctcagccgggtcaccaccagcttctgcatggcttggggaatggcggagccctggaagtccaggaagtggcgggcgtacgacatgtccacgatggcccgggccccggtgggcaccagccgcagcatggcctgcgcctccgcccgctctctgcgccgacgctggccggggtcggcccccgcccgggccgctcggctcggctgtgctctgctcggctagggcgggcgggtccgcccctcctccggccggcgccctccccctggctccccccttccccgcgtcgcccgctcccgctccccccgcctccccggcgccggcgcagcccccgcgaacccgggcgcaccaccccgggtgtcccggcctggggaccgctgccgccccggccgctgctcctttaatctttttgttttggtttgaatctgctcggcgcagactggccaaggatcctctccgccctcccccttcctcctggcgcgggagaggcaccggatatccccaccctccccgagctctaaaagccggatttgactcctctcgggcaagggtggcgggggggacggcgggcaaggggggacgggggactcgcgcgtcccgcggtcgtctgcggccccgagccggcggcagccccgggcgtccccggagctgcgcggcggccggcgcaggcgcctccccttcccgtgcgaagcgttcacttccttgcaaggtggtacgaatcaaccccgagcgcggcccgggcggcggggcacgaccggggaccccgggcagggcggggagcccctgccgccgctgccgcacgcgcacccgtaccgaccgcggggcggggaaatgtccagtgcctcccgctccccaggctggtggcttcctgtccccggaaccccttgcgcgtgctttctgtccacggtctgtcccatgcaagttgcaggaactaagccattttatttattttggcctagatttcatgtttttccatgaatgttttaagtagatctacaagactgttacaggtttcccattgggagagaacacacatatagaaaaccagaaggccaaattcccagagcacagacacattttaaagttctacgtggggatgccgagggacttaactgaattggagacgttgcactgctgtgtgaggacctcattttcgaacccagctagaaagatctgtcgttccatcgtgtccgttttctccctactggcgtgcatggaccaaatgtcaattcactttttatagaggggccaaattaaatatttccacacttttctgtgatgaactaagtccatctttacatttttatttaaattgtaaaatttaattttaaaaatatcttgcttttcagttacccacgaattaccaaaatataaaagctactctgggctcctccccagccaaatctaaccccccaacctgagattgcaaaagcgacacagatatttttccccccaaatgtaggacatgcttcacccaagggtagtttggatgcacgtggttgcgtgtgtatgaatgtgcaagtgtgtgtatgt

SEQ ID NO: 66585 - DNA, 378 bp, Homo sapiens
ccagcacaaggcagtgatagtgcagactctgattgaacagaaaagttatttttctctggaggaggaactggcaggagctggttttccttgttttctgttttattagaggattgccatccttgatttgatgtgtgattgatcgcctgtcatctggcagcctttgatctattcattcctgataaacatcaataaatcactcaccatggaaacacacatgctcctgacagctccgccactatcagggcaacttttctctctcgctcccccttttgctgctccattttaattttgtctcagaagttttacagctgcagcatcccttaactcagctcacctactaatccattgctaaacctggggtgggtcagctgccgtgcg

SEQ ID NO: 66586 - DNA, 537 bp, Homo sapiens
ttaaaattgcggtgaatatttccaaggacaaacaaaatgctgagggaatgaggtactgcaactttaaataccacattttttttttttttaaataaaaggtttgaaagttgacaagggcatgatggtgcatggtaatccatcctggcagctcttacataaaaacaagccgtcaaggcgacttttttccaatattgatttaattgtctgtcttttgacaggcacatatatcattggctttaatggtcaatcaaaagttggcaggcttagtgtttccattctttcctctacacgacatttggcatacttaatcaaaatgctgcaaagtgatggctatgaagagttgatgactgagtcatctgctgtacaggaacttgagagggaaaaaaccctaaaaaatggagccaaaatatattttagttgagaggaaattgagacagcacatgttccaagtgtcctgtgttttgaagtgagatttcaaaaatagattccatactagaaggttctgtgtaagtttaattacagggtttattatctcta

SEQ ID NO: 66587 - DNA, 1772 bp, Homo sapiens
ggtagcaaatattatttgttcattttctggaaaagaaagagggcaatgatatacatatgtgagtcaagcgattttccaaagtgtttttattataacatcctgactgtttttttcttaaagctgcatgttggcctgcctcactgttccatccgtaactgatgagtttttcttgagagtatcttagtgtcaaataattgattgtttggtagccaggaagttggtggatgacagatgtagaatagcaatacttcacagtgatgagagaggaagggaaaattatccaaatgaatcctccttatgtaaaaaaaataaagaaatactgctcagaggaaatggtcccttcgtaatgaagcggcttcttaattatcaaaaaaggtaaggttgtttagccagcttcattaacaggcccctaattatctgtaaacctgatggatttgtgacaggcgtaacgattaatgcggacaaattcagtgagctgtcaagtttgcatcccgcttgatgtaatcacgttgatattatacagtccccatagcctgtagtgcagtattaactcaatttgctggtgcaggtgacaaatggactttgctacctgactaatcatgtcaccgagacaatgctgcttaatgacctccgtaatcctggctttgaactgtgcaatcaagccaagacagaaaaccaaccactcagctgttatgtatttttatttcttcaatgctgaagaccctcatggttatagttgctgtgacttagacatgctgttttaagtgaaagggagggacaggcctgaaataaaaagttattaaaaatcagtcttttcaggtgtatgcagaatagatctgtaccagagaatgtcgctggctgggagcacaccgggccgtctccagtgattctcatgccatctgtaaatatgtggactagggcagggcaagtctgtgtctgggtaagaattatacctgtgaaatcacaggagtgtgcctctctcaagatggtgaacatctcaggccctggtaggcctgaaattccaccctggcacacacacacaaagaaaactgatattgagaaaaagcttaaacggtggatatctcaaattttgtcaagctgtagaaatggatgtttagattcaacaccccagttgtagctctcagttgaacagaggagggaaaatgcttgatcctaaaatggcaccttttcctcccaggaaggctaaatgatgaacttccaactgcaatatcattgcaaaatattaaatgatgttgattggatgagtaagtagatttcagaggtaaactgcttttataaataagatgaacaggaaatattctgtgaaaacatgtagtgtctggataaacaatttgtcttagtggtgccactgtaatggccgccctcctaccaccctgcacacacaggttgtaatcccacggggaggggccgtagcatgtatttacatgtgttcctttgttagtattttgtcagctacttaaggctgccctgttctgctgggagtgtgtgtgctggagtctctgtgcttatactctgtgtatgtgtgtctgtgtgtttgtgtttgtgggtgtgtggtgggggagggttggaaggggaggggggctggtcagttttattcattcattcattcactaagagatttaggcgccgcctgcgtatgctttctgaatatttaagtttaattttgttaattattatttattcatacagggggatgaaaatagtaagaaacagttttgaatgaagaccgaaatatcttttttttaattgta

SEQ ID NO: 66588 - DNA, 1198 bp, Homo sapiens
ctagaaccttctattaattcccattggtgagcccatgaaatctttgattccttcttgattgctctctgaagacgcctatcaggcactgtcttatctgtttgtaaagcagctcaggccccagatttaagtcatgggtctggctacaagttagagtgtgattaataattgactaatgtagcttttatttatcacaggctagcacatttcgccattactgagttaatttatgttaagtgtaagctgtcgttcaatctgtttttcaactttttttttttttttttaaatcctaagtctatctttcacttttggagaaacaaaatcctcatacagggcacagacacactcgatgccaaaaagttgatttccttttccctggagccatgcatcaccagccctcccagccgcagtgtcagcccctgacagaatgacatgtgtcatttatcaaaggggccaggccgggccttgggaaacgccgccgacaaagcctgagagagttcattttgcagtccctcctaccctctgtgagccccttgccaggaaagcctgtgatgtttctgtcttcagagcattactgtaagtccttcaaccttcacagaattaaccctccccacctcagcccgctgcaacagctccgaggtcctgcctgggaaggttctgagacccaaaggagtgattgttccaagcccaggaacacacaagcccccggctctgtagggacaccccatggagtcccggctttccgtgcagaaagcatgacccaggtgcccctgcatctccccactttctagcaggctttaaggattcaagccctgagtaatactcagtgagacaaggtcagaggcataaagaaccagcagcaaagcatttccctggtatccaaattcataggtcccccactcctgcggcagaagtttggtcttctattttttttttttttagagtctgcctaataagtgttttactccaggctatttttgaaaccacctactaaacccgatagatgtttcttctttttctctgttgcctagaatttgtaaccccattcccgcctgcataaagacagtgatgaggttcgagtctaaaagttgctaaaaaaggatattttggaggaggaagagaaagggccatttttgcccccagattgtttactttttatataagttcccaaaccactagaaaaccaccagaaagtgcaaag

SEQ ID NO: 66589 - DNA, 805 bp, Homo sapiens
cataaacaaaccaatagttaaaacaacatacatttattctctcccagtgctggaggccagaaccctgagatcaaggtgttggcaaggccagcctccctctgaaggctccagaggagaatccttcctcccctcttccagctcctggtagctcctggcagtcctgggtgtccttggcttgtggtgcatcacaccagtctctgccttctccgtgtgtcctctcctctgttgtaaggtcaccagtctttggacttaggacccatcctgatctagtatgacctcaccccagcttaactaattatatctgcaaacaccctatttccaaacaaagtcacattgtgaggttctgggaggatatgaattttagaggacactattcaacccatgagagataccaaaggacaaaattacattatgtcctgtcatttgtgcagcagcctttattgaggactggaggtagagaagtaacccactctgaatcacagatgtgctcaggatactttgtcaagaaaacagccattaatttggtttgataaccaatagttgtggataacccatagttatcattgataataagcaactcacagagtgtcctcttgaccatgtggtgttttgactttggccattgctggccccacagtgacacacgagctggctggtcccagcagggagtcatcgcatctacaggcacttactcagcagctgcaaggaacctatcactttaccaggtggggagggtggcacaaaagaaaggtccccaattgcttatcctcaagaaacttgcactgttttgattccatggtacatg

SEQ ID NO: 66590 - DNA, 2445 bp, Homo sapiens
ctctgttcaacctctgatggggtgtttttggtttctggtgtgtgtgtgtgtgtgtgtgtgtgtgtgtgtgtgtgtgtgtcagagagaaagagagaggtaggtcatatccctgtatcaggtccatcaaaacacaccccagtgcagaactcttgatcccttgattgcctgcaagctcacagcacacagtgataagtgaaatctctgagagtagatttaattttatgagctgtattatccaagaatactaagccgtggagatcatgctcaagtcatggggtttaaaggggtgatggcttcagttctctgtgtgggggaagaaagcctgtggcctttttttgtttttaggcacaaagctagtttaattgaaagaataatttgatttgctgctgctacagcagaagagcttgagatgtggcaaattttctctcctttcacccaaactcaagaatttaatgctagcaggtgaacttctgaaggctgctatcaagtagacagagacaataactgtcttaaaagcagaattttgtcaatattttttgctgtgggccaaagaacattcacaataatggagtactaaagccctgcttgaaaatgctgtagagggagcgggagtggaggatttattccaagtttgagcctgcagtgttttggtggtatatatgatttctgaataatctttttgctcgagcaaatggaggcacccagatataattttctgttcaggaagagcatttggtaggcattgctacccagggttgctgaactggaagtgccctaggctgtagtttcttttcagttgccgcatcgacccaccaccgaccgtacaccttcaccaaatgccagtgttttctgacagataaaacaggaggtggaatggccaggagcaggccatgcggtcagggctgaggcggtgggcctgctgctgggagaggtaccccagagggccacactgctcctgccagggggggctgtgcctcttctctcagtgagtggagtccctttgcccttggttttaaatatgccatttcaccatgcttttgtagaaagttggttaaacagcaaattgcacaacccacaaaatgtaatggcctttatgacttaaaacagatgctagattcagttgcgtgaattgccttgccccttaagttatcttactttgaaaagaacgattccctgaaatttcactttggaaaacactgtttccctcattctgcttatgagaactggtgcctacatttttaatgctattgcagtaaagcgattttctgatatagatagaggtgaagccatttttgtaatttttccagtgttctccgtatttggtataattagaagggagagacggaggagcagtcacacactcatatgtgagcacacacacactcacccacagcagagaagcacagctttgtccttcttttgaagtgtgaaaaatatcagtgaccttatcattaaatatacttgttgctgtatttatttgaaatgttcagaccttactttttttttttttttacttcctgttcattttagtgggaaagggtgatagcaaaagattttatttattcagagccacagtgcaggcaaagtgaaagtaaatcctaggcttccggtgcattcagaaaccacagtaagaaagcactgttttctcaaatataaagataagcgcactagccaaataatttttttgaggaggttggaacaatagaagccatctagaactattatttgaggctatatatgaaaaatatatgtgagcttacaaaaatgtttctcatactggaaactgtatccatcaggcagacaagactttcatcatgtttatagacagtgatagcaatgtagctctgtcataatatcagtggcctcagtaattgtattctacttcaagtataaggttctgattctggcgcaagttaataattctgtttttactgaagactttttcccttcagaaatatcatatgatgaagttgcctgtggaaggtgatcgaagtgtattcaccctcaggttcatctggaaagtcctagactgtggcccacatgtttccttcacgctcaccttcgtgtgtatttcaggcattaccttgtgattgtttagatactcttatcattatacataatccaagggttatttatcgtaagatagactgagtaatgctgaactcacaaatatggggctgaaaatgtaaacacatttttgtaaatccaattgacagttaattggcccacattaatggagagttgaagtgaaagaaaatagaaaaccacaaatttctaaaagaaatttttcccctcatttggaatccattttatacgtttattggaagctaatgtttcagttaactatgacatatagatatacgtttacttgcctaattatacttgctgttaacaatacatcatgtgtttgcctgtgcgtccagctttgcgagtgtgatggtttaa

SEQ ID NO: 66591 - DNA, 1329 bp, Homo sapiens
atcacaccacttcacacaccccgaggcccaggcacccaggcctgaggctgctccaggtctgaggctgctcagtcaggcccaggaggccagggggcatccacccagaacccttctcttgtccagccatgcaggtcctgtaagccccacagctcccgcccacctgctccagcctcctccagggcctgtgaacaacggctttcagcttttgtgtccactaccaaagtacattccacacaggcagggagatccattctgccaactgccaacagccaagagccaatttatgtttgtctttgacaaacacaaatcagattatgtcacccaccgggcaacacgccttagcagggtctgcgcggccgggagaatgcagccacgcgccctgctctctggcctgccctccctcctgctcctgtgcggagctccggtgtggaaggtctcccttccttgggcgcatgcagcggtctccctccagtccttgtcctctcctgcgccctgagtgctgttgactgctcggcctgcatgcagaggccctgggatgagaccaagttctccgcctccagaccccctgccaggctctgcctgtcgcacttgtctctttctgagatgtctgcatgtatctgcttgtctgattactgcttgcaaccctaggagaacacaaaaccccatgagagatgggccctcgacttctgagctgctgaatctccagtgcctggaagtcagcgcgaatgtggcaggggttccgtcaagatccgcgggcaaacagcgcataccctcatcaccgtgggcctgtgtcaccctgccaagcaccgtgtggccccgggggccaagcatgtcatcttcatcttggtagccccttccgcatgcagcgggtgcttaatttatgctggctgaagacaacgaggtgaatgaatttgcattcggcgttgctttacattcatgtgtgacgtccgcctgccatctagtggtggaagagggcaacttcaggaaaacgggcttttgagaagaaattagagaagcccttcaaaaacggataaaggaagatcgggcgcggagagatggtccctttgactgttggtttgcaatcacttccatccctgcttactagagaagcgctgagaactcccctgagaactgattctggcacattctgcgggaggcgaaagtacgaaggcgaaggcggggaagccccaaggctaaatgagtacctgtcctgctggcctgcacgccaagggaggacaggcccttttgttcccgggggcactgcacggggcaaacccaggaaaaatgtcagaacacaggaaggccgtctttcccgcttcttagtaagca

SEQ ID NO: 66592 - DNA, 1914 bp, Homo sapiens
ctgcagcagtaacggggcgccgggcccacctgctgcccctctcctgtgcatagggcgctctctccctgccccgagcttcggcttctcctccatgcacggtcactgctggaggcacactggacccagtgccagctcgggaaatcctgggccggtgacagccctgacccgtggccaccatccactcaacatcattgagccctcccacaggcacccaagctctctgaggacagccgtcctagcttccttcgtgggagaaaactctggccctccactgccggccagggaggcctcgcgtgccaagctggccctgagctcagcccaggatttgtgccattcaggacgtggcggccgtgtgcaccccatcgggcaccgcgtcgcctccctcggaatgtattccagcactgtctgccatgatgccaacagcaacacttctcaacaccaagcctttaaatgtccagcagctccacagcccgagtcagagtggcccagcctcccctggacctgatgcggggcttcaggaagtggcagggcaggaggtagaaccggaagcctcacgctacaccaggcactgctcctggagcacagtgggtatcccatcacaacgcgggaggattcagggccaactgcaggcccccggagacgaggttagacggtggcaggcaggctaagaacaggcgatccggcaggcacaagaaggaacatactgatgataaggaaacgccgggtggggtctttacgtaggcagcctccttggcatcgggcaggtctgtctcaccagtcccaaataatgaatcatgtccactgcactagaatgcagtcttttaaccactatcaacatacgccaaggaatgcttccactaacaaatgggaagaatgcccagaaaacaccgcactgcatttctggaccaggactcgttctgttggaatgtgcctaccaaacacagcaaggggcgacactcacccgaaggttgaaacatgcggaactccgatgactcctagtgctgttagcaatcataaatcctcatcctggcacagagcacaggaggcacctctgcctgcactcaccgtccagggccctcctccgtctctgcgatgccaccctcatttcacagacgaggacgctgagggtcaaagctgtgagccacatccctcgacaaggctgtgagcccattccctgtcttcctgcctccctgttaccaccttccaggcccccgctctctggtgcctggaatgagcattctggagttgtcagaacattccttgaccttccaataaaaggggtacaatctaaatacaaagtaacatccggggctacaaaagcgaccactgtggccatcacctatgaacctctaagaccccaaatcaacacaaagcaagaggccacaccatcctgagcagctggcaagtcggccactgaccagtaaaaaaactgggaggaaggtggctgatcgatcctgttttcctccctttttcaacgagcccagttgctcatgaaagacaagtagacagctctactctgcttctgttcagggctagagaggttctggaattgtgcaagtcatgtcagagcacaccccgagagagagatcacttgcaaaaagctacagtgaaaataagaatcaaaactcccaaaccggagaagccatgccacatgatcgcctcgcttgttcatggcgggtaattacttaaccctttgtttttccagaagtaatagaagggcctttttaaacaacatactgcccgccacggtggctcacgcctgtaatcccaggactttaggaacccgaggcaagtggatcaattgaggtcagggagaccagcctggccaacacggtgaaacctcatctctactaaaactacaaaaaaaaattagccgggcgtggtggcgcatgcctgtaatcccagctacttggg

SEQ ID NO: 66593 - DNA, 2797 bp, Homo sapiens
gtgtacacacaacagcaccctacacatgccttaaagcaaatacactgaaatgttacgcaaaattaaaaaaaaattagttgcagaaaaactcacagaacattgtaccattttaaattctttaaaatgtatatatttaaagatcttactacattcaccaagcgaatgtatttaaatgcctaatacagtgactggcatagagcaggcgctcaatagtagcttccataaaataaacttactctcatgttgtgaaacgtctcacacactttttcctcaaaatgcaatttcctctttcgactgtaaatatctcgatggccaagatgatgaagactttgtcgtgtataaactatgcactttgtactattatctgaaaagaaatggtttaatttgggcaaggagaatgttgccctaagtatttggctctaactaaattacccacacaaatttgtggctggaaaaccaagtaatgagttatctgcagtgagttccacaaccatcatctccttttatagtatgaaaagaaaggtgctaaatgttcacaccattttgtgaaaaatcaccgtatatgtcttaaaagcaaagtgtctctgtctatcttgatccccttatacaagataaacaaagagtaaagccttcagtgccagttgtcaatgttttattctggttcagtaattaaaatgggtagcttcatattaattccctggaagaatgacattcagatcaattcacttcccagcaaaaaaagtgtccacatccaggagttgcaggacagggaataggattggtcttagctactggaattcctctcatttaaaagtaggacacagtgtacattctaagctccaacttcagacatcttaaagcatattaaacagtggtcaaatgaatatgaaagaaattctgccaagcgattaaacgtaagcttgtagttttgtgtcagttttccactaacctccaaaaccagtcatggtttgtctaagaaagggatgttttaatcagaacaccttcatttattgtaatactgaggtcccacctgactaggtgaaccgtaggcaactgaacaactataaatttcacatgactggatagaaacagcctaagctcttgagccccccagatgtatgccggtgcggggtgacttgctacggaggcttaaatcactttcaagagaagaacccacagatgaaattgcacttgtggagactcaggtggatttgcaaaactctgaaaagaattttgggctggtccactaacaaacagtcgtcctaaaagtaaaggtctacattttccctttatgcagaaatattcgtttgcctacatttccgtatgtccaaagcactgtttttgctgagtcactggaacagaaaaaagataaaacagcactttttatcccagctgagtcatatcgtttggactttgtaattctacttgaatgctagtcgatcttacgttcaaaagtctggtaagttttctgaacactgatactgcaattccacaagtcagacaggaaacagaattctagtttgtttcaatatcatctgacctatcaaaagaagcatttcagtgactaatatagcaagcacgaaaactgaccctccgtgaaagtaataaacttgctgctctgaacatcagatccataagcaggagtaacaggtaacctgaagtgtcacctccaagaacgggacccagccccacaatgaggaagcaatttaactctgccttagccttgaaaatgtgacaaaactgagttggacagcagtcttgagacacatgggacaaaaggcgagattcgttctgtccggggaaaaacaaggtcaggtttttgtgctttctttgtggcacttttaaatacaccaacaaaatgtgattctcttgcaattttatactttaaatcccctacattttcccttccacttggcttccaaaccaccccacacattctcaagcactcacaaaatgacccactgtaaagggttcctttttatctcactgtaattcccaatagcatgggaataagacacaaacaacacaaaaaaacctgctgaaacgaaggaatgcaaactcattacactgcatttaattctcatctcctttaagaagatgctttaagaagcatcttcttaaaggagtttggtttgctttgagttacttcactcttccttctgagaaacagcttttctgaaccagtattgttatccattttttaattattatatgtaaatgacctacttaaaaacagctgatgaaatacactttgttccagatctattctgaagggaaaaggaggttatctttcccacgaatggatctcctaagtgaaaagcccctaacttaaagtgtttttgtaaactctggtggagagcagaaagtgtactaacttctactccaacaactatatttcagattttcaggacaaatgagagagtgacagattcataaagagagtgacaaattcatcgatgaagactgcggagaggagaggtatgtaaaaccatcatctcaataaaatattcattcttcaacaggaagggcatttgttgctattctaccagtacaataatgatgtatgaaataaatcaactttgtctggggttttcactccaggtattcctcaaccctaagcaaagttaagagtttctaggttttgtaaacttgtttatattgagaggttggcaaaactaaaatgcagcaaattatgaaaaaaaaggtttaaggtttaatatacaatacaaataacatctacctaaatgaattatatcacaattatctcttttctaaaataaacaattttttaatctac

SEQ ID NO: 66594 - DNA, 6088 bp, Homo sapiens
taggatccccactaaagttccttttgtgacttgctggttaagtcacacgacgagcggaccggagggtccgagggctccgtcctttgttacgcaggggacacccctggaaggccagcccaacgcccacgggcacatctgggcttttccaggcagtccacagagccatccccggcctctttaccgcggagacactgtgaggtcacacacgcagaacacaaaacccccacgcagcagcccctcgcgaggcgccccaagcccgggtgcccaccgccaactcccaccccaaatccgctcgcgggcgcaggaccggttcaggtgtgaacacttatgtaatcgtcctcggggccacgcctttcccaccgccccacctccgccagaacaaagtgaagtttaaaatagaaaccaattacctgggctccgccgcgcctcggcccccggagcccggtccacgccgccgcgcggacccccgcctgccccggcccggagccccgcgcagaccccagttccggaccggacccgcccccctccccggccccggccccggccccggccctccacagccccatccgctcgctccccccaaccccgcggcctgcccttccccccgcagccccctctctcctcctccgggcctcgctcccgcccccgccggctccccccgcccgccccgcccgcccccgccccccggcccgcacagacccccgcctttgttatggtgcgaagttgggctgtgggtccgtctctttcacttcttgggttacagtgcaggcgtgtgacgtccgctccacatgacgggggcggggggcggggggcgggcgccggggggcgggggcggcgggccaggccctccccgtgcttctccgccccttcccgccccgcccacggccctcctcctggcagcccagcaacaagcggccaccgcccccaccccggggcgggcaggtgagtccccccccgacccgcccccagcccagagggccgccctgcgctctcgcccccggcccctggccgcgcgtgccccaggtcccccagtagcgccccagcgccgctgctgctcagacacaccgaaataggaatgatttaatccaacgacacctcccagggctgcccagtcccggttccgccggctcctgagattggggaggggcagaattgggtggaactcgggctggggggcggaaatggcccgagtgggagggaaggcgcggagtcggacgctaccttgtaaccgagttagatttctgcagaagaggaggacgaaggtcgcccacggaccctcgggtgacctcggtgcggcctggtggccgggcacacccgcgcatggacgaggtccctcccaggggtctccctgcaggggtctccggggaggtagtgggcacgtgggtccttaacctctccattgcatcatccccatcccggtgggtacagaagcgcagcaaccccgcggtgctcccggaagacaccgcgtctccaacatttacacggagatgctgctcggctcaggtcgggtccgtacgcttcccgaggtgcgtactacgcgagccacacacatcactaccgatattcctgagaaagtcggtgccacagtaagtcagctgcaagcgtggggtggccggtgacgcgctgtgcccgtgaatacgcccattgtgcgggtcagacgcagccagggcgcagcgttcaggaggcgggtgggcagccgaactttcactggccacgagcgcttcaccttctagaatttgccagggactaggcatcaactcccagtgagaaaatcacatgtgaagttggaagacacatgctgcccttcacttttctacggagttcacatcagtttcagcaatccgcgttctcagttcgctttgcccgggcgagtgggttccatcatcacctgaaccaaaaacgcaccagggcgcgcgtgcccaggcaccaaggccagagaaaccgcacgtttcgagtccccagttgctgagaaacaatcacagccctcctcttttctcccccttctgcaggttccgacctgaatctgaaagtgcttctaaaccccatgcttcacagaacgttcggagggggaggcgctccgtgggggctgctgcgtgcccatgtagccgaactgactcgaataaaagcgtgtccacgtctacatcacacatctgtgtaaatgcagaagcctgcggatgcgcggggctggccagacttcacagtgtgcagacacatgggctcatgcacgcgcacgcgcgcgctcacacacacaccccaaattacctccgggatggagaaagccgctgcggattggccagcagagccgtcactcacgcccagggggcagggagacttcgcaaagctgtttccttttttttttttcctcctctcctccctaccgtttcatttaatggtaaaacaacagcagagctctgaaagttagccatctgcgcagagtttgccttctttaaggagggaggcgtcagacgatatccatttaaatatattttgtacttccacaaaggatggaaagggaaattcacgaagggagtggaggcggaaagggagctccgagaaagaaggaggggtcattccgcggggggcgggggggggggcgggggccgacgcaggggaaagagttgctctctacaccgaaaagggactttgaccttccattgatctcgaaattcaaaaacgtttcttcacaggtcagattgtaacaaacactcgttcctaatttatgaactcgccgttttgattttattatttaagcatgcgccagcaatcgtgtttccttaagaaagaactgacctatttttggctggagataaacgatcatgttaacagatgttaatcttgtaatctgtttttcctgtaagcactttacctagccgggtttcagaccttaaaaataacatcttttccaaaaagacctgacgtcacaattcactccctgaaaaatcacactccccctccagtttcttcccctgcaatgatttcaaagacattaaatcttttccactttataaatgctgatctgttctgcctctactcccacaggctcttatttgcatttcaaattccacaggttacaccagtcgccttttcaaaaaatgtaaaccaacaatgcagcagcaaatggctttttgtgcatctggattaaataaagcacagaatgaatatatttaaaaagagggctgcgcaagttgatctttgcacacccggagacccggtgactctttatcagcggaatgagtaagacacacacacagcccccagagctcccggtctgctgcgggaagcttattaacgctgataatagatgaggctgacttacagacccacatttttcgggtaaaaggctggttccctctggtccctaattgcgggggtccactggctttcctcaccacacacataaactgctgcttttaaataccccactcggctgccatttaacaaacttattcatacaaagtttcgttaaaacttgaggcggtttaatctaaatactgatcgtaactattcagtctgttagttctccctggaaatggcagcggaggcgcctccccccacctcccgcccaaccacacacaccccaccgcattcttccttcatacacccgggttcatctcgccaccgaggcctcccccacccgcacccggcggggcgcagctccgaggagtccctgcccacccctctccgagtcggtgccagaccctcgcccccacccccacccccgcccgaacttcccttccaggacctctcacttctttaacgttagggtcacttagaagctcccagcagactggcaagcagccggggagggggccgtaaaaaacaaggccacccccacctccacgcaaacacgtcccctaggcagcagcgcgcggtgcccacaggcatcgatcccatccgccaaacccttaataattgaagcggctcctcgggcccgcagccccatcacccaccttcattagccggagcgttttactttaaagtaaggcaatttgctctttgtctcctaatggatggagagcgcatccgagctcccctcctcccgcgtcgcctttgacaaagtgtacaaagccagagcctcttccgcgctcccaccccggcccccaccccgcccctccactgcggtaaaaaccacctcccgggcgctcgccccgccgcccgaagttgcatcttcccctatcctggaattgacgagcagagcaactacccaccgggaaagccaagtagccctccccgcgcccggggggcccctccccggcgcacccccctccccagcgcctccccccctacccccagcggcgcacaccagagtacggggcacgtcggggctccgggccccgcgcccaccgcccgcccgcggcccctgcggcgcagccctccccccgcccgcggcccctaccttggcagggaggcggcgggcctggggaggaggacgcgcacgccccgcgcatctgaaggtgaagccgagcgcccgcggcgcggagccgagcgctgcactagaccgaccgcgccagctgcgcccgggcgcgggggacgcgcgagggcgcgcggggcccgccacgcgcccggccccctcctcgcgccgcccgcgcgcgccccggacgcgtccgccccgcgggggccccggcgcgagccgggctcggggggctgcgcggcacggggagggggccgggcgctcacggcccggcgcaggccggaggcttcccccagcctggaaatggtctgccctgtaggaaacgcacactccactattgtctcatcagcacaaagttctgccacactgaggggacagtctggaggcttgcagtgactcagacacagccaattcctcccctaatagcactgaatcacggttccagcggccagtggtcgcccctcgtcaaggtctaaggctgctgcagccccggctcccggaggccgtttccgcgcgcacacgcgcatccatacgtacagacgtgctcgggatgcgggtcccgccggcgggtacctgggcactgcgccccatctggactgaaatggggacaccccttcgggggtcccaggtgcgtgtgcattacacacggcgtagcgtgtgcgtgtcactcaacttcctggtaaatgcctctgggggtgttcagatgcaggatcaatacattaagtcctgaatcaagggtcacagaggtcccgctggaaagacttcaaacagcggctctgccacccggccatttaaaaatgaaggggttgtttaccggtagcctcgaaagttcaactcttatttttctgttcttaaaacttcatttcttcacctcacctactccccacgagcagtagttagttgtaataagttgagtctgggactagaaatcctaatttgactccaaaacgctctcctgttacagggcagggatggccggggtgggggaggggagggcgggcgcgcgggggcgggggaggggcgggtcggagctagcgagggcgagcgccccttcacggccggtgacgtagacccggggagctgcggcctgcggaggggtaacactatcttctcccaccaggctcctggccgtattgttctccttctcctcgtgataactccgcagtggaggtggattccgtccaagacgcccaacgtggctccgcgtagcaatcagcgctgcaatcctggcggttacctcagcggcggcgtctctctctgcgcctcacactcgcagcccgcggccctccccaacttagggcgtttacaaaagaaactactccagacgcgctgcaaagggaggcgcatgtgcccgaaagctggcgatcagacgggggggggcattctgcatgtgtgatgtttctgggggcggtggggagtgtgtgtcggggtcggggggcgggggggagtcaggcagaaggacagggacaacctccgctatgaaggatccgcgagtcctcaaatgtaagctccgtgtgactaacgacctgcactgatttggagagcgggcatgttaaaggtcacggacaattgttgctggcttcagcatgaatgcctaagtgggatgtattcttcagcaatcatgtttaagtctgattcaccgaaaagtattgacgtgcccaccattcatttcagtac

SEQ ID NO: 66595 - DNA, 2346 bp, Homo sapiens
atcctggccaacatggtgaaaccctgtctctattaaaaatacaaaaattagctgaccgtagtggtgcgtgcctgtggtcccaactacttcggaggctgaggcaggagaatcacttgaacctgggaagaggaggttgcagtgggccaagatcgcaccactgcactccagcctggcaacagagtgagactgcatctcaaaaaaaaaaaaaaatcattaaatgcttatcaaacgagcatgagtcacgttggtcttgtgaaggcagttgaaccatctttgtctggatcccctgtgtttgtaataaaaggctggttttccttacatgtgagtgaggaacctcttctgggatgacagtaatggcaggacacagcagagacgagagcagtctggccatgaggacctggctttctgttgagggtgactctcattaggcccttcacatcttcagtccatctataggaccaatgatttcccttctagaggatgaatggctacataaaaataatacttttagaggctacagaatccgatgatagttttctccagatgactttccaaaagtcctcagaaaacgtgaatttctgaatagactttagaacaggtgtcactgagaagactggatgtagcctcctccaggtttaatttttttttaatcgtggaatttcaagtaaggtgatctgggttcagaattccaacggcatgatcttagatgagtcatctgacttgtctaaacctgagttccctcttttgcaaaatgagaaagtgactcatatctgctatatgcaatttgaaaggattcgtacaatgatcaatgctaaaatgtgccagcaaaatgctctgaacagcattacatcggtgaattctctaagaaaacaacagtggccgatttctagggcatgaggtccctcaacttctctcatttacgtattgggtccctcatccttcgatatatgtagtcagaattcgtggctgttgtccttaattctttcttaaaggcagaaacaataatgtcaattcacttcatgaataatgtaaaagcaatttgccatttatatggcgttacttaatggttcacagactatagtggtggatgcagttgatgttaaagagacttgggtcagaattccatctcagctgcttcctagctctgttaccttgggcatatcccttggcctcttcaccttccatttctgcatccgtaaaatggacatattcataccgatttggcaagattcctgctgggggttggtgatcgagatcatctgtgtgcaacctcctaacaggatctccagggcgtctggtcctgtgcagagctcacatctctgtgggcttcttgtcttgcctctcaaagctagatgttaggtgtcaggaggtgttggcctcctgggagctagaatattgccttccaaattttccaaagctttttaacatattaggaagcctaagatatgttagccagagtgataggtcaattcactaaccttgaaggcttgaaaaaaaaattgctgattcattttgtttgctgagtacagactttcagtatttttgtgctaaagaagatttatttaacattttatcatttaattaaagaaagcatgtttataatcagtttgtgcctgtcccaaattgtccctttgtcttcccagactttgtcagaaattccctttctcggagcaaaaatgcttttgtgcaggcaacatttcttagatgtttttgtacttagagtttgacttgaggatatttgtggatgggactcagatttcagagtgtgggaggagaagaggtctggccaatgaggaggcggctttgctcgggtcatttgcatctggccgcccaggttccagcagctccatcgcgttggtgaaatatatcctttaggggatgtcacggctttggttaagttttcctttttactccttagctgctagcgcagttttaatgatagctgtttcacatgtgcatgcggcactcatgtgggcagagctgtcagaagactgtaaagtctcaaccatcctgcgattgcttgcacctgaggaagacggaatgacgatgttctgcgccatggtattcctttgctcattcatacactgatttatggctcgttgttttcctttggctcaaggtgacatcagtacctacaaaaaggcaaatatacgtgagaatgcttttatagcaaaatccttgtttgcaaaggtaatgatgttctaaaactggaaaaaatgcaactcaggcaaaaggaagaaaccctagcgtgactttttcttcctagcttttgtgggtagtgaagtttttctcaacatgctatcagattggttccattatttaaaagtatttttaacacaggaaaaa

SEQ ID NO: 66596 - DNA, 2327 bp, Homo sapiens
ttctgagagtgagcaggtacagctccagaagctggtcccatcagtgcctctgacccaggagtcagggcgtggccaccgggaacttcatgatggctgacttctgaggacttgagggttagagtcatttttatgtgaactgcaagaacaccatctgcaggctagagtttccagggcaggtggagctccagagctaggcatacacagggccctgctaaaggggaccagagcagggtcaggtccaacaccggctgtgtttgcctgcagttgacaagataagctatagaactgagctgtaaccatgaaggtggaagatgaatcccagaaatggggtgaccatggagaggcgtttccatcacttcctactctctctgttggggaggcagggattccctccctggggctacaggaatgtccaaacaaatagcaactgacactgagcagatgaaatggacaacagtttattcttcacagcccagggaggaggacgccgcatgccacacggggccacacagggttgcgtacgagagcagagtgaatcagcagggctgggggaggtggctttgtagtatcaacggttggggggtggcccctagttcctatgggggtgtgttgacttgtttgaataattccatggctggcccctgctcaaggactagcgggaactgtgcctggtccccacgggaaggagggctgtttggtcagcggacgttattcacaggagtggggtggggatgggaacttgtgtctaggtcattcgaggccctcccagttttaccagatgtcaagggagcatatcatattgggtcttaattttagatctgccacaggcaggtgcagggagtgtgttgctcctcactacccagatgcctgaggccactgtgcagaagtggcctggacaggatagctgaagcaccatgaaacctggtggccctggcaaaggcatcccagcgacaacagtttatgagtcacatgtctgggaatatgacctgattcccaggccagttggccaggtgcgtggaagggagtaaataaaagcaggttgaagcaataatgcctctgacttttgttgggctggattgtgctcaggcttctgtagggaggccttcggtgaataaggaccaacaaactgggattgagggaagcagaagaaaggccctagaagaaaatttggattcctggtggaagaactggatcaggaattagaacatttgtgttcagccttcactctaccttagggaagacagtcattgctgagtcactgtttcctggtcagcaaatggaatcatgataccaccagcacacttgtgaaaaaatgagagaagtgagatattatgaaatactcttcagatgtaagacattgctgttaatgaggcattatcatgtgcacttggcttcaactgattttactacgaatgtgaaaatgtattttaagcaactagttctgaacaataagctaaagggtactttttggttttattttgcttttaaagatagcttgtgtctcctgagtgttctctaaaaaaatgaaaatagaaataatatacttttttagttgggctgttttgtaggaggcagctatgtcttaaaaaatgagtaccaccagacaaagacattacaaaaaaagaaaactacaaaacagtatctctcatgaacatataaatgcaaaaatcctcaacaaaatatcgtaaattgcataaaaagaatcaaatgtataaaaatgtgtaaaaaatataaaaagaattatataccatgaacaggtgggatttaccccaggtatgtaagcctgaatcgacttccaaaaatcaattcatgtaacccatcacattgacaggctaaagaagagaaatcacatgatcataacaatagctgcagaaaaatatttgacaaaatcaaacacccattcattataactgctagcaaactaggaatgaaggggagcatccttaacttcctttacaaatactctaacagctaatatcacacataatggtgaggaactcaaagctttcctgctaagatcaggaacaaggcaaagatatcccctctcaccactgcttttcaatgttacaagtcttagttaatacattaagacaggaaaaggaaataaaaggcatacagattgggagggaagaaataaaactgtctttctcacagatgacatgatcatctatgtagaaaatctgaaagaatcaacaaaaaaattcctggaactaataagtgattatagcaaggttgcaggatacaaggttaatatatgaaagtaaattgctgtcccatatatcagcaatgaacaatgagatttgaaattaaaaacacaatactattta

SEQ ID NO: 66597 - DNA, 387 bp, Homo sapiens
ccatgtcaattcaagtgcctaactgttaaagaagtgcctagtatcccattgtctggcagtcctatcgcttacttaagcagccctttatcaatggacacttaaatgtttccaaaattttgccatgagactctgaactgaatatgcttgtgccggcatctctgtaaactgatgcaagcatctgcgttgcatgaattcctggaagtaaaactgatgggccaaaggacatgtgtgttttagatcttgataaatattgccaaatggctttccaaaaactgttcctaatggacagggtcccagcggtcaagcaggccccgtttcctcctaccctgcgggctgaagtcttcgtcctctgaagaagtctccaagaccacttgactgggggtgatg

SEQ ID NO: 66598 - DNA, 1406 bp, Homo sapiens
cagagtccccacaaatccctgccttgttcacaacagttggggctttgtgcttctctctgaaataaaacttttatcttaaaaaaagaaaagagaatgtatccaatatagtatatcataatcacagtattgggaactttcccaaccctggtgggaaggaggaggaagtcgtgggttcactggggcacaggaaaaaaatgccagagatgtccacccctaatttttttcctctcctcttctgggtttctgttgtaatggattgaaaatacacaggagatgtaatgcaaaacttggctttgatttttttttcccacctaactctttaaaggtttggaaagatttgattacatggcagggaaagtaaaaatgtggatgagatatcctgacgctcaggccacatgaccaggtgataaggcgttcagagactgccagcggcagctgctggctcaggtgcggcctgtgtgggaggactcgtgtctcggtggttacagagaagctggcttccacggtgtgaacccgactgaatcacaggccgcttttttgttctccctcggccttggagggcctgggacgttcctgttgcccaacatcctggtgagctgagaacattctgtagattaattaggttctctcctctggctcagcaggtctgttctagccatttgaccaaaggctctctgatattttctaccagccttagaacgacagtctgcagatgtgtgcacataaatgtctgggaggagcacacagatactgtgggaggagtgggtccggcgtagctattgggagatctcgctcgtacacatggcgctacatagaaagaatgccctgaggtgaaggtgacagctcggcagtttcttaataccctgaacttgagcgtggcctgcgctagagaaaatacacggtgcttcttaaaaacaaaagccagcagcctgcaagagggctgtgcctgcgagttcctgggagcaggagggggctgttcctccgcccctggctccagtttcacccaagtcacttcacagcagttggaaggaggtcaccaattgttgagtgtaggcggggggcggggagggagaggaagagggatgaaaagggaaggcccgggtcagctgggagaggagctcgcgggctttccggcgggctggcctgaagtggaagggcccagggctgcctgccaccctcagatgccacgcaggtgttgggagggcacccgtctgtgggctcagggacgtgttcccaccgacaggcacagaacggaaagcaccttgggggagacgcccttctccccatctcaggagggaggccgggcctgcagacctccagcccttccccagcgctcgctgtgagctccccccccccacccgccccccacgtgctggggagcaggtccgtttccccaccagtttgcc

SEQ ID NO: 66599 - DNA, 1651 bp, Homo sapiens
tcacagaaaagcgaacaccctcccagttgaaggtggccccaaagatgcgggcctgggacccaggacttctgcaggagagtggacgcctgggtgccccccgccttgccctgcacatggtaggtgctcaataattacacaataaatattcacacaaagcagtgattctgccgaagagatccactgcaatgcacctggcttcctagaagcaataaatgaaaagcttttctatttttttaagaaaagaaaagattaatgaagccctgacgtagaggcagagagctcaacagaatccagtgactcaaggcgtgcgcagaagcaatttgcttctgaaactctaaacaccgttctttagtacttcctgacactcctcagcagcaagcaaataaatatttacatgtggaaggagactgtcctttgaaatgtaggttgttccattcagaagagaaatacggcaaggtgccactactttagtggcaacacgcgttattatttatgttttccagtttgaaaatcgtgcactttctatcaggacccttaaatggtaaacactgattcccacgtgaagcgaattagtccagcagccaccccccccttggtggttcagggacaacagcataagctttgacaaatcaccctttgttttatgctttgattacctggtgagctaaaaacaatgatagtaaaagcctggacctgccatgtattcagtctgcatttgttactctcccctttcttccatttatgagtttgttcccaaaagatttttttaaaaaaattctgacttgagtaacttttcctctgatctgatctgttgtcaaattagtgggtggcaggagaaagccagtcacatgatatcatcgtttcctattcaaacagacggctttttttttttcagtaaaaatactcgactgcaagactatgagtgtgcagataattctgctgcttactccgattggaggtgtctccagggagtttccaagcacaggaagcattcctgctctgaggtttcggaagaacactttcagcaggattttgggtcactgaaatgaaagtgaactatgctctgtacaaatgtatcatgtttaattcaggagaaattcatgcatttctttgttctataaatatttactggcagctcgttttgtataggaggctgccacctcccaaaagccccctgctcctcgagtgggttgagcctgaaaccccacatccacagacgtgcccagcggccttgggtgctcaacacaggctcgttcaggtacgaccagataacggggcatacctggtcccagagttcaagggcttgtcttattttattttaaacatcagactctaactgcttgtttaatctaaatgttagcaatcaacctacagccacctgaaatatgtgagtggtgtttaacagatgataaagatcatatattacttgcatggaaagaatgtagaaatataggtgtcccttttagtctttagtgtgtccccataatcaatgtccccagctcattaatgaaaaggtcccctcctcctcccccatcgctgccctcattcctataatgtaaacagccaccaatggctcctatttctttgttcaaacaaacaatagccttataacgaagaagaaaattagtatcaggtgaaagcctcacttcag

SEQ ID NO: 66600 - DNA, 2687 bp, Homo sapiens
catagagagaagactcgcatggctgtagacaaaactgattggaggatgaccaggtactaggctgtatctgtaatctaggtgagagagcatggctcaggggtaatatacgtgggaatggcttggatttggtttatatattggagctagatctttgatgagattgagtgaaggctgcagtgggaaagggtaagcaagaatgactcctagacaccgctcagcaataaaaagcacttaaaatatttatcaatatatagatgaattccaacataattatgctcaatgaacagcccccacttccctaaagattacgtgcgatacaattccatttatataaaacaccaagaaaaacaggttgggcacagtggctcacatctgcaatcccaacactttgggaggctgaggcagagggtcaattgaagctaggagttccagagcaggctgggcaacacagagagaccccatatgtttaaaaaaaaacaaaaagctagacatggcggtcctcacctgcagtctcagctactcgggaggctgaagcagttggattgcttaagggcaggagtttgaggctacagtgggtcccgatcgtgtcactgcactcccgcctgggtgacagagcaagcgagacccagtctgtataaaaagatatttaaaaactccaggaaattcaaactatagtgacaaaaagcagatgggtgggagggggaggagggaaggagggagagaggaaagggttacagagagacgggaggaacatcttcactgttgattgtgatgatggtttcacagtgtatacatgtgtcaagatgtatcaaactgcacactttaatttgcgccactgcactccagcccaggtgacagagtaaggtcgctttccccgggctcggccggcctctccacccggcgctcgggtgctgcgctgcctgttcctgttgccacttcgtgtaagttagcgcaggcaacaacacacaagaccagcacacgtgaaatggtccattttaatgcactgcccccagggaaaggaacattaccggcttctggccatgtcgtcttcccagtcccagatggcggttccgggtttgggctccgaggcccttcgcagcactagggcggcgcgagtagggccgccctccgagccatgctgcggtccgaggtgacgcgcgcacgcgagttcgcggacacgcacgagacgcccgggccacggaggcgcggggctggcccagggtccccgccaggccgagctctagggctgccggcccggcccggtgacccccgcgctcccctccgtccgctaaggccccgcggcgccgcgcatgcgccccgccgccgcccccgcccccaccgcgcccgcgcccgcgcccaacgcccccaccgcggcccgcgggccatggaacctgccaaggccggcgcggttcgagcgctccggtgcgcgcgttcaggcgcctttcccccgtgagcccggcggcgctcggaccgggccgcccgccgccgggcagctccgcccgcctctagcgccggctgggcgcgcccccgccccggtgcccgcgcgtgcgcgcccccgccgccgcgtgtgagtgtgagtgtgagtgtgagtgggtgtgggtgcgagccgggccgccgacgatgccgcggggccgccccccgaagcccagggagagcaaggcgcgcggcgactccggtaaggcccgcggccgcgccctcgcgccccgccggcggccggtgcggggcccgcgccctgccagtccccggatgcggcgcggggggcgccgggagcggcggggcgggggcgggggccgcgcagacccgggccgccgccgccgccgactggccgggcgggccgcagcgcgggcggaatgatacgggcgagtcgccgcccggcccctccgcgcgctgggcctactttcctgggccgggcggcggctgaggcgggaggcgggaggcgggtgagggagcaggcggccgcctcctgcgcgcgccctgcccccgctggccctgccgcggcccgcgctgaacttgagggaaagtggccgccccgtgttccgtcccggggccggagggccgcggggcgcgctggggaggcggcctggccagagcccgggcctgcggataccgcgccccgggctcctcccggacggcgcccccgcccgaccctgcgcggcgccggctgccccggggacgttgggctcggcccacagggaggccgtggagcgcggggtcgtgcacacagtaggcgccagcgttgtccgggaagcgcagggtcgtgcacacagtgtgctccagtgttatctggggcgcgctgtggggcgtgcatacagtaggcgccattgtgatccgggaacttgaaccctgagcctctgcagacgctgtgggtagtgcatacagtaggcgccattgtgatccggggggctggaaccctgggcatctggagagcgctgtgggtcgtgcaaacagtaggcaccattgtgatccgggtagcttgaacctggagcttctggagagcgctgtgggtcgtgcatacagtaggcatcagtgttatgtggggagcgctagatcgtgcacacagtaggcgtcaggaagtgttttccccagtaatttattctccatggtactttgctaaagtcatgaaataactcagattttgttttccaaggaaggagaaaggcccagaatttaagagcaggcagacacac

SEQ ID NO: 66601 - DNA, 1855 bp, Homo sapiens
caccagtgaactctagcctgagtgacagagtgagactccatctcaaaaaaaaaaaaaaaggaaaagtagagaaagggtggtagagatgacctaaagcggtagcaatttggagtggcctgatgcctgtcaggtgttccaggcatacttctaacgacagcatctggtctcaggatgagagggtgggagcagtgtgggtgcctggccagggggctgttgtcttagaggaatagggggtgacggagtagggttctgagggtggtgcacactgacagcagagtgaggaagatcaaccatatgttagaacgatttttattcaaaatgtaaaaacaaaaacataaaaagcttgggggttaggtcagttattttagaaagtactcagaagctgaaactgttatatctctcattttaatatgaaatacatcattaagatttatggataactgagattttaaatgcacactgcttacgagtttgtcataagaggccaatttgagttaaatccatggaatgctataaatgcaataagttttgttggaactcggcatccagtagacattttgtataaatcaatgtagggtctctaggtggggaataaaagacctttgccattaagatttagctggttagcctgattgctgggcctgatcggggaagaagagccatttttaagatagcttatctggtgccaagtcatgacagaccaggcctgaatacagtcatggaatagcaggattatggagtgatgggtagggcattgaataaagagatggccgtggtcctaagttattggcaggcccttgtcctagtagctacaggaaacattgtcttatttattccgcacaactgtgagataggctttcttatttttggggtggtaaacagctattattctatttagaatatttatgtaaagccttaaactgattttgaaactagtctctacttaaggcaaacaaagctgctcattttctgatcattgtgcaatcagtttttgtttaattttgatagtttaaagttcttggtagcagaaagggtgaataattaaagcaaacagtggtcatatttttatgtgtgaggtggctgtgtgggtaaactgccttggaattctacatatgcaccccctgtgtatagtgaactcttacagtgacctaccctctgtcttcttagggggcagaaacaggtagctgaaaagtactgttctagatcttagatttgataacagttaaacgcaggcagctttgtgcatattttggtatgtgtgtttgtgcatgagtggcagagaatacctattctgacttgggaggcattaggaatgtctgctgctaaaaacctcaagtccttcttttagctgtctttaaaaaaaatgcagctggggctgggcacggtggctcatgcctgtaatcccagcactttgggaggcagagatgggtggatcacgaggtcaggagctcgagaccagcctgaccaacatggtgaaaccctgtctctactaaaaatacaaaaattagccaggcgtggtggcgcacacctgtaatcccatctacttgggaggctgaggcaggagaatcaattgaacccgggaggtgaaggttgcagtgagcagagatcgcaccattgcactacagcctgtgcaacagagtgagactccatcttaaaaaaaaaaaaaaattagctatcccccagaaggccatcccatgaagaggcggtcattcatttgatcacatgtttctttgatcactggtcccctaatggatttgatgacctctgtggctgcagagacccctgcacaatggaggtgtgtggagacgtgtgcatatgtgcaggtgtgggtatgctgttccagcagggtccacag

SEQ ID NO: 66602 - DNA, 495 bp, Homo sapiens
gggagggtctgacctagctatctgtggagccccggcggctgcttcagcgctcgagcctcccagcctgctaatggttctactgcttttgaaggttccaggtctgtgcagcacagtgtgggaccccaggagtgtggatctgtggaggcattgtatttggagaactccagcgacaagtaagtaacctagttttcctgttggcccctgactcctaggagagcgctggactgatgtgacccaagtcacagcaaagtgctgacaggcgcgtgtttcttttgttttgaaacctggttaggcaatagctttttgaactttcctttggtcgtcatcttggcatccttagcaactggcacagtggctggcacaagtggatgaggaatacatgtttcaaatgaatggatggctcgactgtgggataaagtgagtgtgcgtgtgtgtgcccatgtgtttatactttcaacgttgtgttcactggtgcccactacaggactttgataa

SEQ ID NO: 66603 - DNA, 474 bp, Homo sapiens
gagacagagctggcatttgaatccagatctgtcttatctcactcttcatgtctgaatagaagaatatcgttctgagcatttacacctggatttcctgttacttgagatcagctggtctcagctgggaactttttagtaaggggcaggtttttagagggaggtttggggtcagaagggtgatcatgtgcccaggtgtgtgttgtgggcagcatttctttgaaatattgaccttgtttcagttcagcaaacatttaagttcctgccagtgccggccgctggacgcagaggatgttggatccgcgcccgttctttccgggctcattaggaggtggatggagaggccgctttcctccttctgctttccaacagccacactcctcatgcttgggagggggtggacatacacgctcctaccctcccacccccatgcagaataacctgctgtgggaagcacattatttctagctgtggcca

SEQ ID NO: 66604 - DNA, 747 bp, Homo sapiens
ccttggtaggcaggtgttctcccatgaggacgcgaccacggactggttaagtacttagcccagagtagcccggatagtcacattggagctggaatttgcacctggtcagtgcggcgccagagctcattccttagctgctgttgtgtggtctcaatcttgcaggacacagtgtgcattctggtctcatattgtgtggaaggcgcctctggctaaattatcctgatgataggacatgcagtgtgggcttggcgtgtccgtgctaggaatgtccctcttatcaccacggtgtgtgtcagttcacaaactgcacaaatcaagccaagtgagtggaaagtcacaatttctggctctttccaggtagctggcgtctctgggaacctggccccgggcaaccagccagagaaggagggccgggcgcaccagtgcctggagtgtgaccgcgccttctcatcggcggcggtgctcatgcaccacagcaaggaggtgcatggccgggagcgcatccacggctgccccgtgtgcaggaaggccttcaagcgcgccacgcacctcaaggtaggcccactgtgccagggcacagctgtgtgccccccaggcggctagagatgcggagtccaagatttaacactggccgggaatctggcatgtgtttttgaggaaaaggccggtttttgaggaaaaggtcactagatgtagatgtattgttccggttgtaagaggtctgcttgctgtacagatgaattgcat

SEQ ID NO: 66605 - DNA, 557 bp, Homo sapiens
gagatttccctcccaagacaggcagctttctcacataccgtggaggcctcctgccggcctggggactgacaggtgcagggccctgcccctcgagggccagcctctccctcgggagcgtgggtttttcctgtttgatcctggcttaacttgaacatctctggcattggagctgccctctggagtagcccagaagttggcactcacctcaccttttgctgcatttccaagagatcagcctttggacttcctggaaagtggtagaaccactgtcctatgaaacaaagtgcttctgtgctgaaatggagtaagttccctgcagcctctggcaaggtaacctaccgaggtacaatcttaactttcttgatgcccccttttgacattgaaaatggtgggtgtattggttttactttttatcattgaaactacaatttgttgagcactgaccatgcaggaaacccgtttttccccgttttctcttttgtgctcacagcacctcctggagtaggtgttcctatcatcctctctttatagctcaggagccaaagctcagccagccc

SEQ ID NO: 66606 - DNA, 1836 bp, Homo sapiens
gtgatgggagaggtgcttgctaagtatcagagcttccctgggtccttggcacaatcagccatcagtgctctcagcaaagacatagaaatagtgctcctcattttgtacctggataaggggagagctcaagttccaatccctgttagcggcgggtgacacaaccatgcacacatctcaaattccaattcctgttagcggcgggtgacgtcaccatgcacacatctcaagttccagttcctgttagcggtgggtaatgtcaccatgcacacatcctgttttctcctgctctgccactgtgatctccagatgatcaatttcatattatcaggaaaatgacctttggcacagaaagcccagaggagaaggtgagggacttgcatgcacgcacacatttaaatgtcaacattctatggaattcagtatcataaaggtatgcaaaccatgggaagtaatcatgagtttgctctgggaggccccgcagttagaagggaaccttctgggcacgcacatcgtggatggagacagaggaacggcagcgccgcctgctgctgctgggccctgcgtgtctgtaccaccttctgtggtagagaaaacagcaggcggctttgctgcaaactccagcacagcctctgtgtgggaggagcagggtcagcagaaacccagaggcaggaaggagctgagctgagctggtgcaagagtgtcctgccctgggaggaagtggctttgtaccaactgataaaatgcccagagtagggggcacataactgtaaacttctagaacccacatcctcaaagcccaacccctgacccaggaggtgcatgggtggctgttccctcccagcccagtgccacctctgccatcctccctggctgggaaagatgaactgcgcttaaaatgggctcagttttctttttcctttctttccttcctttccttccattccttccctttctttccctttcttttcatccttccttccttttctttctctttctttctctctctctctctctttctttctctttttttaacctagtaattgcttttcacatctgctggtgggctgctatctttcataggataacttccattattgctttaaataaggtggtgtttggcctctgttttgttttcaggtaaagcaaactgcaatcaggaagccctcattacagacagtgaggtcatgacaagaaaagttcattcacactggagagttcaaccccattggaaatgtctttccaaacacagctggtgactttgcaaacccagacattcccagaaactcagtggttctagaaacttgcttggaataattaaggttttagagcagctgttggaatttttagaaaggaaaaaaagaaaaaacgaagtgaggctccccctccccgactcctcttacacatccctgtggctctgtggtgtcacggctgagcgtgctgcgctccactgaccgtgtggatgaagggcaggcagcacctgggtgcatttgtgccagcgcatggcagtgaggccgctggcagtgcatttcctgttatccgtgaccccgtgcgcccggggctgggtctgcagaggctttggggaacacactgttgctgtctcctgtgcctggcccggtgtccatgtggctcacaggacccatagggaccaggtgctgctctaaactggaggcatgaactgaccattggcccagacagccttgccattcccgtccgggggattaaaccttgaacaggttttgtaggactctcagccccaacttccttgtctctagaaaacttgccactatgaattatttctccgtccctttgagacatcggccctttcctggcctcttg

SEQ ID NO: 66607 - DNA, 1315 bp, Homo sapiens
aacccataaacgctcagtttatgggtagttaaaaatgaaacattgtagcattattgaaagggcatttggaaccacatgttggagggaactcaggaagccattttcccacagacaacattacttagattagtaaatggccctttcagtttaaagccacactctttgtgagatcattttgtagtgtaattaagatggcagtgtgtaaataatgagtactgtgaagcttgtcagaatcaaaatggagtcacttaggttaaaatgctgaaaaatgaagccagggaaggccacgaagggaggattttcatgcataaataaatgcctgatgacaagagctgctacaaaagactgcgaaaaccacaaccctgcaaaaagaccatcacaacaccgccccccccgccacaccacaccacacacacacacacacacacacacacacacacacacacacttccgtgaggacagttgcccagcaactgcctgtccggcctccagctggcaccgcccttgctattgatccttgtagccaaggatcattatgtcagaacaatgtataatcctccttatttttccttaaaaaagctttgtcttctctcacctcccggaatgcacacatagcttaccatggcacatgtattcccattgcaatgcaattcctagataaacatggttttttagagtctttctgtttgttatctaggttgacaatacaaagaaatgtgctcagaatattatttaaacactgtcttctagaaattacagccaagcaaacattaaccagtgtcaccatcagactgtttatcaaggtctgttatgtaactggacatacttctattttaggaacacaaaatactctgccatttattcctggaagccaccgctccatcagctggttaagtaaaataagaaggatgatcacattaagaagggggaggggggagagagagagagagagagagagattgattcagtgtggctcttttactacaagagtttgatagttgagtgaatttcaagtttgaataaaatgcacttaaagctaattcatgtaaggttaagggccgttattcagttcaaaagaatattgcacattattaaaaacagaggaatgcaatggaatactccaatcttcttaatttgatggtgaatacccttcctttagtttcatataattaaaaaaaaaacagtcctacttaattccccagaacatattcccctgtgcctacatgtgtttctgtattgaactgtgtcctataatgcagatgtggtagaagggcaataggtcaaatatacaaagaaagatctttgctcaaaagac

SEQ ID NO: 66608 - DNA, 1284 bp, Homo sapiens
gtatttttgcatcagagcaaaggaatttcataatctcttccctctccgagaacctcctgatacttctgggaacaatcacacagcatggaccaagagcaagggccgcccccatacaaattagggtgggtccactgttctgtgcacactggcaggcttactcctcacagtctgaaacaattctctagtgtagagacaggggtaggcagagagacagacagctaggacccctgggcatttgtggtccttgtcaacatcattggatcatctgtcctgagcgtctcagtgggaaaagggtccagaaccccgattcagggcactacaggggaaccgaaggcaacgtagagaatccagatcagacagaggaagctgatgccttcaaataaggcggacaatggcaaatgccgtgctagaaatacaaagaagatgaattcttactagccggaaggattcgaatgacttttaatttgcagtttcccgtttaactgtattttccaaatgttccctgacaagggttacgaatgggctgtagaggagccgccactggaaagtccagtgacagtgagactgaagaagggctggagccagaggctgaggaccttggactttagtctgcgctaaggacttcctggaagttctaggggcagaagggtgatgatccagtcaatagaggaaaatcctggcagccaaagtacaagacacatgggagcaggaggaacgtggaaccttggctgtagagcccggagagctttgaaaaatgcccacgtctgcattgggatctaaggagggcaaagaccctggcaggtctgaagtctctgggagattccaatatgcaggcaggccagagcatgaccccaaaggaaggagaactggtgaggagccaagtagccgcacgcaggagaaaggaggttatcgatctaggagagggccaaggaaacagctcaagtatttcctgtcctttcgccagacctctgggattcagtgtgagttcttccagaaccagaccagagtgcaaagtcagagcaaactccatggtgggtgagaagaaaggagtgggaccttcgtagatggaattaggtttttgagctaaaagaaagtctgatgtgtttcactgtttatgaattggtgtaaattttcatgctctatcaaaccagcagctagttagagagaatgcagtttggaaatacctttttctaaaaaataaaaatgttaaaaaaaatcaaaagtatttttgcatcagaacaaaggaatttacaatctctttcctctctgagagcctcctgatac

SEQ ID NO: 66609 - DNA, 2580 bp, Homo sapiens
cagggtaacatgcagggaagtgggaagtaagtggagacttgcaggatgcagaaggtgcaggtgaaggtgctgaggagggaaacagcgttctgggcagagggcacggctgtgcaaaggccctgttgcacagacactgtgagtggagtttgagtgtggcatgaagtgacctaatagaacagaatctgcgaatgcacggggtgcactcatggggggattgggggagtgacttagaccacgcacacagacaatgttcttcacccgttttgaacagtgagtcaattctgcccatgagcaagtcttccagactgttgggccctagacgaagaacgacctgcaagccgggaattctctgcaaaggacaatgtcaaaactcatctgaggcatccatgtctgtcctacagcaagcttccccgtgacactggagggacctaggctcccggcagttttcaggagccagccctgggctaggggctccacagtacttgcaaacaaagagttccaaaaacccaatttgcattcacccatgtaagaagtgcctgataaggaagtagcgtctctatttcctgggatggggatttttgctctggggtatcagataatattatttgtaagctagtcatcaccatccttcgttttcttctgccttagcagattcaggtagatttatggcactgactatcactgctttaaagttatcaaaaatcactttaaaagaaaatgacgagattgcagaaaagtggagtttattgaaaatctgactgtggtcccttgaagttactgcttacaggatcagctgactttggagagaaagccattatcagaatcaagcagcaaattactggccccagagttcctagcttgctacaatatcagctgtctaaaccaaaacaaagcattttgttgaagcggggaaaaaaaggcagatcaaagagtagctcatccacgtgtcagttagattagcatttgaaattccttgtgaatgtatccacatgtttatgacaggcatggtgttcagctttagcagcattatggggagttacgaaattctctgtgtaaaaatagcgaggtcatgaggaaaccactcttgctgtgtaagtcctgacaagccatgccaacaccgtcacgctgggactggccttcggatggcacggggagggcagagtcacgcaggcacacgtgacacgcccttgctctgcggccggtgggatccctggtagcttcgcagtcatgtggggcttagtcacaggagcataggtcaggtcctgctgagccccctttccaagtgtgcggtgcgcaagccgcccaacccaggggccggcagctgggacagggcgagcagtgggctgcagggaggaagtggggaaggcctgggggcagacgtgcctgggcgagggccttcctattcctgctctccctgtctgctctgaggatgtgggccctgacctccttatctgtaaagccctgatggtggatgcagcttcctggagctgctgtggaaaccactggttaatattttacaggtcgctgggttacaaactgtcaagtcagaggaacactacacgctggcaccagctgctcctctgtagccacccgtatgtccctcctgagccgtggcagggagtgacacctttgccaataccaccatccacagggtcaacatgaccccgggccctggtcttagtaactagaggaaacacaccgacttcaggcattgctcacagccagagctggtgttaactgaagaatgttttaattcacctgccgaggaactcacacattccttgccagcaggcacaatggctcttgatagcctgtgtgcagggaacaaatgtgttggccccatgctcaggccatgcgtacacataagagctgtcgtctgggtcttggctaaaataaactgaatcttcccgaaaacacaggttcctattacggagtccatgataggaaagatgttcagctctgctgctatcatggggaagtagagtggttgatctgaaatctccagattctaatcaaggagaagaatgctgtgctgtggccacagaccccaccgtggtctcaaagaaaacctggatcagagcccatcttctgatcagtgccacaccttcacatgggtgtgcagcattttactgggtgactgcctttcagaaccttctggaattttccagatccttccagattgcaataaagaaaaagaatgcaatgtgtggtcattaatctcagcatggtcctgcagaagaactggctctgagctgatctcctaaggggccccacgtcttcacatgggtgtgtagtattttactgggcaactgcctttcagaaccttctggaattttccagagccttccaggttctaatcaaggaaaagaaggcaatgtgtggtcattaacctcactgtggtccctcagaagacctggctctgagctgtctcctgaggggccccacatcttcacatgagtgtgcagcactttactgggcaactgcctttcagaaccttctggaactttccagagtcttccaggttctaatcaaggaaaataaggcaatgtgtggtcattaacctcactgtggtccctcaga

SEQ ID NO: 66610 - DNA, 2197 bp, Homo sapiens
ttcagaatctgtgcactgaaatttataaaacattgatgaaagaagttaaagaagacctaattacccatagagagacaacctgtgatcatggattggaaaactcaacacagtagaactattaattctccctaatctatacatttgaagaaattcctatcaaaatcccagcaaggtttttgcacccataaacgcgctattctaaaattcatatggaaaggcccagaacctacaatagctaacataagttttataaagaataataaagtggaaggaagtcactccacctgattaaagttgactatgcaactacagtaatcaagacagtgtgctcttggcagagagactgacatatagactaatggaacagaatagagaacccagaaatagacccacagcaataagtggaaacggtttttagcaaaggtgcaaaagcaatttaatggaagaaggatcaccttttcaactaatagtcccggagctattggacattcgttggcaaaacccaaaccaaaccaaaacaaataagcctcaacctaaacctcacacctcatacaaaaattaactcaaaatggaaaataggcttaagtataaaatgtgaaactataaaatttgtagggaaaaaaggagaaaatcttcgggaacctcaggctaggtgaagacttagacttcacaccaaaaatcaaaatccaaaaaaggtaaaattaataaacttgaattcaacaaaatgtaaaactttctgcaaaggactctgtgaagagggtgaaaaaacaagataaagtggtagaaaataatcaccgagtggtaaggccagcatctagaaaatataaagaattaggaaaactcagttgttaaaaccaaacaatccaattaaaaagtaggcaaaagacatgaacagacttttcactgaggaggatacacagatggccataagtacataaaaaggtcttgatgtcattagccatcaggacaatgcaaattaaaccatcaggagatatcactacacacttattagaagagctaaaataataaaaaaaaaaaatagtggcaataccaaatgctgcccaggctgggaaggtcctgaatcactcacacaccgccggtgggaatgcaaaatggtgtagccattctggaaaagagttagcagtttctcataaaattagacatgtgctaaccatatgactcagcaattgcactcctgggcatttatcccagagaaatgaaaactatgttcacacaaaaacctgtacaagaatgttcacagcagctctatttgcaataaccaaaacctggaaataatccaagtgcccttcctgggtgaacggttgaacacaccttggttcatccagatgacggaacaccactaagtaattaaaaagaaacacctatggacatgcttgccaacccggatgggtctcaagggaattgcgtttagcggaaaaagccagtctcgaaaggttgcatagtgtatgattccatttatagagcattcttaaagcgacaaaattatagaaaataggaaccatactgtggttgccagcctcagggagggggaaggaggaagtcagcttggctataaagagtagcatcaaggatcctgtgatgaaactctcctgtcctctgatgtgttggtggtcacatggttctacatgggtgataaaattacagagaactaagcgcacgtgcataccacacacacacacacacacacacacacacagagcagtctataaaatgagtacatgtaaactggtggaatctgaaatctgaacaaagttaatgggttgtatcaatgctcattttctagttgtggcattgtactatggttttgtaagatgttattgttgggagaaactggtgaagggaattgcatgtgaatctacatgatctcaaaacagggttttactacattgcttcagtgaatatccactgtgtgtgtcttatgcacacagaccaggttttccctagaggagatacctagaagtggaattgttagatcttaggatacacccaccttcactttttctagattattctctaacatctttgttcctatttacattctagtcgaactcatgtgaggtctaagttttctacaccttctctaatatttggtatagtcacaatttaaatttttttccagtaccgtaaaggtaaaaaaaaatctttttgccatcttagttttgaattccctgattcc

SEQ ID NO: 66611 - DNA, 2736 bp, Homo sapiens
gaactgtgatacttctggaggattttcaaagaggatttgaacaaaatagctttgtttaacccggagttagtagaagtggttgtttcagaacagttaactccctgggagttactccagcatttacagcaatttttaactgtgttcttttccctcagatttctgtttttcccacaaaaaaaaaaaaaaaacaaaacctcaaaaaacaaaacacacacacgcgcgcacgcacgcgcacacacacacacacacacacacacacacacacaccccctctgccgcggtacccttcccctggccttcctccactgaagggcggctgggttccaggctctcagccgtgaccacagccccggccccaaccgctaaggaggtgctcatcactggaggtggccgccagggagctcagtgcgggacctgctcaatccatacggtcccctgacttgagggtgaccgtccttaaactgtcccccggagcttcgccagataaaatgtccaaaacacacactggagttccctgacgtttccttcctctgaaaaactctctttccaggcggggcgttctgtggtcagacgaggcagaggcctccccggaacgaagtccacgccccctccccaccccagcacccagcgagcccacgcgcccctcacccacgcgcagagaaaccgagcacttgttgattctcacgttgttgcaattggaaaacggaacaaggaaccagagctcgcctgtttccagccagagtcgcacgggggtccccaaagacgcttgaaccttttcccaagccccactccaccttccaaaacgggggggctcaggtggacgcgaaaggacacaaggcgctgcccccagcaccccggaaaatctagtgtggcggcaaatgaccgcaggtcacacaccccggcctcgggggccacggaaaacggacgcacccggcccaggacaggcagtggggcccaggaggggactgccgggaagacccgggcgggccggcgggcggctgcgggcggcgcacgtgggcccaggtgggcgcagcgacgggcccggccgaagagcccgagacaggccctgcgaaggcggaagcccggacccgggctctcctggccgcccctggagctcagagggagactgcgcttcgccccgggggcaggggcaggagcgcgatcgcgcgcggggcccccggggtgtgattagcaggcgccgcgagccgggaggaccccccagcccgccctggcagccagcaccctctccacacccgcccagagtggccgcttttgaccgccgtcccctcccaccctagactcctcccctcagccccacggcccgaggccgagcggtttcagcgaccctgggaccgccgggcctggctggagtccacccctggacacctgtcagggtcgggccccggcgctgtaaacccgcgtctacacccgcgcccagcccccgcgcaatggggatcgggggcggcgacttgggttcgggtcagggaggccgccggctgctacctgctcggccacctgctccgctgcctaggttctccctgcgcgtccccagccaagaaagggacccggagtccgggcgtcgggatagctcctgtccccgatcttgcgcccccggctcccgcggggctccggtccggggtcccgcccaggtctccgcggtccccactcggaggggcacagagacaaaggcggcagagcagcccgcccgtccccgagggtcacccaccggcgctgcgctcgttgctccgaggccgaggggcgccgcggggtccaaggccctgctccgcctgcccaggcccgggcaggctggtctcggcttcaagcgcccacgcgcggggtccccgggcagcctgcttcgccttccggggtcgggagacaggggccgccggggccggaggctgcttctctctggcgcgcggcggcggtgactgacggcggcggctccgagggacgggcgcgcacccagctccccggccccgcctccccgggcttcctgcgagccaggtaaacacaggccgatcccgccgggcccgccccacctggacgcggccgccggcgccgccccgggagctcggaggaccccgggcccgctctgcccacgcggaacttggggggcgcacggggcccacgcgcagggtcagacctcggaggggcggcctggagcctcgcccgctgccgaactgggctccgaactgcggcccgtcgacccttcccgttcggaggcttggcctccgaacccaccccgaccccgacctcgacctcgcgggaggggtgccaggccgcatctccccgcgtcctcaggggctggaaaccccagaaactgccgatagacttggcgcagccccggccctgcaggaggagagtcagcccggcctggaggcgaaaggagccggcaggtcctcccaaggcactccctccctcccctggagcccaggccaggcccatgtccggctggcaggtgctcctctgggagctgggagctgggagctgggagctaggggcgcaccttctcctgcaggaccggcgcaggaagcgtgcgcggaaaagacagcaaaacacgcgcaggtgcgaggaagcagcctggtcctgcagcccagagacatcgtggtcttcgtcgctgtcttgttaaaaagaaaaagcctgctgtttagccgtgactcacctgcacacagatttagtggtcagagatctttctctggattctcagcctcctgatggtggaagaggaggaggttg

SEQ ID NO: 66612 - DNA, 566 bp, Homo sapiens
aaacgagaaaccctaggcttattttcagtcctgccctggaaaccctgtaataattaagatttttctagaaaactcttgagaggtgaaaagccctgggtggaaggacacgccctgctgtatgctacatgacctcggaagatactcgtgattctcttgatccttctctgtaaaatggggcacaccacacatctccaccaggggcactacacagggctcaggatgaagccctcacacggcaggaatttcagaaatctcagctggcagcaaatttagaagccctgaattattgatagcatattttctctcctgcctgaatccaaaggctttgtgaggtcaggaccacgctggctgagtgcccagggtgctccagggtcggggcacgtgctcagacacatgcagagaacgactgaaagttgaaaggggttcagttaactccaagtccacgcattcagcagattatgtcccacgagaaacacaccagagagatgccgaccaaagacagcccttgcttctgcagtcactagtgtttattattattattatttttagaaagagacggggtttca

SEQ ID NO: 66613 - DNA, 1169 bp, Homo sapiens
tactaaatatatttaatgtgtgtatatatatctttatatatgtatacacacataagcatacatgatatacatgtaggtatatgtatacacacagatgcatatgtatggtgtattcatacacacagaattttctggctcctgttccgtgttctgcggcttcctccttctgagagatccaccccctcactttctggtacctctgccagccctgccctccatcctctgacctctggagtctgaaggtcagtcgactcctgagtcctagctgccctgcacgtgcacgcgcacacgtgtgctggggaggaggagctccttttttcagggagtgactcacctcccacatctgcctgtcccttatctctctccagtgccttccatggttgttttctgtatttcattctgagtttatcgttgttacctgcagaagggttagtcctgtacaaatgacacagccgttatcagaagtgaacagctgtgtttattccaaataaaagagtgaggaaagactagaacatttatctgtgcgacgcaagtccttttaaatgatcaggcccagagaggcattaaaataagctggtaatcgcgtcctgctcccccgactttgagctgtgcgttctcctgaaactgcttgcactgcgagcagttataaattaactgaataatgctgcactggacactggacactctaatccatactctgaagcttaacaatgtctagccaatcaacagcttatgttattttaaggtaaattcttggtaaacaactcagaaactgcctcttctttccctttaaaaatccacttgttactgctgctaatgagagtgtacgttcagggcaccttgaatctgtgctcccaggctgcagtactaaggtttggctcaaatcagctctctacttacgcaatttgggccaagccttagtactgcagcctgggagtgtagattcagcttttcctgttaggtcaacaagagatcaaacgttcagagatgtagaggtacagatttgctggatcagacggactcgaagcaaccatgcagcacttccctcatcgccaaggagcaggagaggcaagccccgtggtcaggcctggtcctgatgtggcaggaaggccgatgggatctgcacccagggagtcagggctcactccgcagggctgtcacggggagtc

SEQ ID NO: 66614 - DNA, 1906 bp, Homo sapiens
gaaaaacattgtttaaaaaaacacaaagtgagtaaaccattaatacgtgaggtgagcggtgcatcagcttgccggcttccagctgcagcgggtgatggaggtggaagggagctgtcctcgggacaggaaatgaaacaaacccaaccaaagccgtgtattcgtttattcaatatcgttttgctttcttgtgtagactgagggtgtaaacctcgtttctgacagtcgcctataggacttttcagcaggctgtgggcctagaggtgggggatgtggaatcaagctaaagacccagaaccagagaaagaaggaagcagcagtgaggaagcaggacaagaacatctcggaaattcagcccggcgcggtgggcgcgcctgcagtcgcggcgctttgggggcccgggccacgtagcacgaccctgcctgtgaacgcacagacaccagcggttccaagggcgcgggcaggaagcgggcaccgaaggcaggctggagaagcgcggggcggaagcaagaagccgcgcggcgaggagggcgcgtggggccccacacagccatggggcgcgcgtactactggcagcgcaggctctggaccgctaaggaggccgcgcgcgcccacgcgtgtccccggcagagcttccaggagacggctgcgaggcccttccacccgcggaccagagcgcgccgggtcgaaccacgacccacgtgcaggccctcgcgcgctaccggaaggccagcctgtggcgcacgcgcgccccgccccgccgatcggtgacgtcatcgggcccgtcacgaggcgggggcggggcctcggaacgcgacgccccccgtcccagctttagccactcgtgacgtcattgcccggactccactgcctcctgcgccgcgcttttgccaccctgggcacgtcatcgtgcgccgacgccaaacgagggcggggcctagggacgccacaccttccgcgccgccgctcgttacgtcatcggacctcgccgcttggcggaggcggggaaggcccgcaggcggcgcctcagccggggttggcgctgaggggagagggcggggaaaaggtggcgaattgaggggaaagtgggaggggcgggaaaggggcggtcggaacatggcggaccagatcccgctttacccggtgcgtagcgcagcggcggccgcagccaaccgcaaacgcgcggcctactacagcgccgcggggcccaggccgggagccgaccggcacagcaggtaaccgaggcggcactggccccgttccccgccgacgctccccggggcccccagcccaccgcaggaacccggagccgggcgggtctggggtcgctaccggcgcgccccatctgttcgctgggagccgggagtccttggcgttctgagcgcgccgcagctgtggcgtccgccggtggtgagggccgcgggcagctgccggggcgagcggctgcatccccgggacgcctgggccgagcgtaggagccagaacgggagcagagaaccgcggtccagtgttgaggggtggctgctctcctaaagtaaacggggatcaaaagtgctaacttctcggatacttcagagtctccgaaacttgttcttgtagccctgtgaattgtgaaggtgacggatgtaacttttaattgctttgttaaaaacacacttcttattgaaatgacttctcttcgacatttcgatatctttgctaggcacactttttgtttaaacatatatatacaaagtgctttttgtcgacaagtaattttgcttttacgaaagggaaatggggtattgagaacggttaacttgtttagtggggtcacaggttagcagtagaattagtgtacagacctttcatactcgagattgcatttagctcatatttaacatttctcattcaaagaaaagaaaatttt

SEQ ID NO: 66615 - DNA, 1295 bp, Homo sapiens
ctcgatctcctgaccttgtgatccacccacctcggcctcccaaagtgctgggattacagacgtgagtcactgcacccggccaaatgttttctctttctaccagttgtagttacatggttacttacattgtgagatgaattctgccattaacgggagatcagctctacccaataatcaagtgacttctgtatacttgatacgtttattatgtgttgtttcatgtgagcttttattttcccaactgtggcagggactggctggctacttccagcccatttctctttcctcttggaaacacagctggactccctttcctgcctagttagctggtcccatgtcactgaactctggccaaagagggagagccaaaagtctgtatgccacatctagccctgcgcctaacctctcctgcaggcacctgctcatctcttccgccttgctggttagatggccatgactagggcagtcttggaaactgcttgttaaagatgccaaagcttccgtcagcctggtgtcctgaatgaatgtatggaacagagcccctccccttccattatcaaatggactctatataaactattgttaagcagttccgtttgcaaggttaatcttttatgatagctggtgtttccttaactgatttctcatcctaattgctcttcattctggaagccttcttactaattctctttgcaagtggcattatttgcttttgaagtgttactgcttatattttgaagccatcatttgccaatattggagtataatgtgatcttttttcaagtaattctgctcttcttaacaataatgtaatgagaccatttaggtgcttttgcagtccagtgggtaggctgccttcatagtttgtcacatgtgaatgactcatctcatagtgcattgcttcacagcacagactgctgcgtgggagaagtctgcaggccctccagtccccggaaaggctcatctcctcaaccacagacagaggccagaatacataacctttgatcatgggcgtgtagtccttctgtgtgttgctgggtttgatttgcgactgttttgttaaggctttttttgcatctgtttttaaaggatgtattggactgggcgtggtggctcacacctgtagtcccagcactttgggaggctgaggtgggtggatcacttgaggtcaggagtttgagactagccttgccaacatggcaaaaccccgtctctactaaaaaaaatacacacacacacacacacacacacacacacacacacacactagccagtcatggtggcacaggcctata

SEQ ID NO: 66616 - DNA, 856 bp, Homo sapiens
acttgtgcctactgagatcatattgtagatgacgtaaccaaggtactgtttatttaaatgccagtgtatatttttgaaatgattttttttttcaaagaaacagcactccagctgtgttgtaaacaattcccagcatcatagccttcattctcccaaaggctcagacgctaaggtcagtcttcaggtcaggcggtcgccttcttgtgaagggacgtggtggaaggttcatgatccccagggccctgagagtctgaccctgagctgcacctgcattgcaggacacttcctaactactgggcttgctattttgggcatacaaggcaactggaggccaaacgccttcctcaaattgaatgtaattgaaaatactttagttactaaataattgccatattaggggaaatattttggaaactgttaggattggtttagattctgtgcttcacaaataaacaaatcaagtatatgagagaatcagatatctagcaaatatcttccaagtaatgagcaaaacggccaaaattacatcatctgaaagtggtttgataagtaactagaaggaaaacaccagttacataaacgtattttgtacatgcagattattttggaaaatatgttttcaatttctttccttttcaaatttgatttctttttttttttcttaaggtatatcctgatagcaaattatcatttcataacaaaatacagtttgtggagggggcattattttacgggagacgcccaacagtcaggacagtgtgtggcttttaccctatccagatgtcgaggtcactgcctcccacacgggacgtcttccctgtgttacttctagatgcagggctgtggatgcattcct

SEQ ID NO: 66617 - DNA, 980 bp, Homo sapiens
atacatactgtcctgttcttgggaactctccatcttgagtagaatcctcatgggggaggtgcagaggcacccacacggataacagaggcatggtcatggcgtagcacatgcaaggaagacccgcctgcgccctcagaagtctctgttcccgggctgggccctcagaactctgtgttcccctgctgcgcgccgagcaagcttccagtgcccttctctaggcttgcgtttcactttgcctgagccggtgaccagcgcgccaccctccagaggccgtgtctgagttcactgcggctgtgtgctctggcccgtgttttgtcagtagaccctttctggaaatgctctggggatcatgattcatttctagaaattctgcctgaattttcatatttcattataataaaggctaataccaataaattttaaagttttttttttatgtcatcactaccatgcattctgatttataatattagggacattgtggttagcttgttcatgtattatgtgtttttctttcaggttggtttgttggaccttgaactcaatcggctgacgaaagcgctatttttggctttagttgctctttccattgttatggtaaccttacaaggatttgtgggtccatggtaccgcaatctttttcggttccttctcctcttttcttacatcattcccataaggtaagtttaaaaatgaaaataaaacaaatgtctggtttcattgagtatgattttattgaatttatctttctcagtatgaaagaaattacccaaacaaagctagagaagtaggagccagaagttctgaggaatcttgaggaattcttctgtggaaatgttgttgggggagacgtcatcagtgccggtagaatgatctagaggtgccatactttcctgatagtgaatgtgttgatggtgtcttcttcaacaatcagaagatatttcctgatgaaacataaaccagaatttcacaaaattagt

SEQ ID NO: 66618 - DNA, 2121 bp, Homo sapiens
ctccgaagacgggacgggatggagcgttgagcttcggggcagctccggcccggcccgcgctggagacgcccgcatctgccaggatggcgtctcatagccctggtgctcacacatgacgccaggaagccccagcaacagtgaccgcccaggctctagaaaatattggacggggtggatgaacacccaagtgcgctccaggagaagggatttggcaccccaaggggcttttaaaacggtaagcttctaggggtgtctttgcccccaataatccatagaaacaacagtcatctaaaaatagtcttgttttctgtcctaagctccttttaactttgttagtcatcaccaatcctaaaataaaacccgtgtaacgtctcccctagtagcggctataaacaaacctacgaggaggcaggaggaagaggaaaggggcgcagggcgctcggggagcagagccgggggcccgcggtggccgcagaggccgggccggggcgcagaggccgggcgagctggccgcgctctgggccgccgcctccggaactccctgcgcctggcgcgcggccaccgtggtcccggcaacggcattaaacagagggaaacagacccgggattccgtcacccgggcggggggataaggacggctttgagagcagacaggaaaagggagcttttctgcatggggtgaaaaaattatttattgaaggaggaggaggcggcagcggaggaaggggaggggcgggaggaggaggaagagccggccgcccccgccccggccccggctcctcaggagccaagggcagcctcgccaggtcggtcccgggctcgaggaccgcggctggggtcgaggggctcagtctcccacgtgaccggctgggcgcgccccgccagacccggcctcgggattccctcctcccggcgagtctccgcccgccccgtcctggaggtggggagaaggagggcggggcgggggggacggaaactctccccgccaaatcctggccccaggcctggggacactcgcggcgggaagatttggaggggaggggagggggaggggcgtgggggcgcggcctcgctggagtccccctgaccccccgacccccgcccaccggcctgggcgtcctcccgcggcccctcctcccctcccggcgcccggtgctctggggcgcgtgccacgcctggctcggcgccgtaggggcccccgcaggtagagacccctggaaatggcctcgacgccgcaggagcgaggcggccaccaccccgctaatccgggcacgtctctccaggccgaggcctgcggtggaaaagccggggttccatttgtgctgagtcggggcggccgaatggagccaggcctcgggacgcgggacggacgggctctggccgcgcaccttcgcgggctctgcagcgcccgaccgcctcccccggcagggaggaggcgcttgtggggggcacccacggggcacagtgatccctgggggtctgcggacctcctgggccccgcagcagacacgagtttagcctttgggtttagtttaaatcacataagggtgtcgtgcaatcgatttatggtttctacacaccagacactttaacctccaaccccccccatccaaagccaacaagaaaatgcggtgccgtgttggcagctgagctgcgcccgaagagacgcagggagacgtaagagaggaaagtgtgagtggccggggggcctccccccgtcagaagtcgcgcagtcgcgcccataaaacgccccctccgggcggctagggcaggtgagcgcgtccccgggcctccccacgccggcccctgccacaggccgtctaggtcgagcagatatttacagaataaaaatgacaataactcgacgtcccgggacggccacgcaatctgttagtaatttagcgggatgggaatttcctttctagggcctgccagtgaagcgcttttccaaatttccacagcgggggaagcctgcgattttacataatgacttcagcatgccgggctttctcgacacccctccccggcccccggcccccgccccccgccccttttccagcagggccgggctccctccggacacccgcgtggactcaggcgtcccgtctggcccgttcgccc

SEQ ID NO: 66619 - DNA, 992 bp, Homo sapiens
gaacccagcgggaatccctgcgcttcccggcaccgtcgggctgaaatcggggttcctagcgttggcggcctcgggctgggacctccccactcccggggctccgcagggcgcgcacgtggcgctcgggggtcaccgttgcagccgctttcccgaggaggcccggattgaaaacttctttaaaaaaaaaacttaaaaaaaaaattccgtcgccctgggcgcagccttaggtacctggtgccgctcgtggggtcccgacgcccctacccccgggtccggaggagcctgcgccgggccgggacccccagggcacaagaggccgggggacccctgcggtcgcgcgcgcgcgagggggcgggggcgggggggacacgagtttatttaaaaactcgtgtccggggagtttatttaaaactcggaagccggcggccgcgagccggttgtttatgtaaacccggaaacgccccggggggcgggggcggggcggggacggggggaggggcgggggtcacgttacgcggaggacgcgcgggcagcgccgggagaaccgaacccctggcggccgcgaccccggctcccgccccggccccggcccgacccgccatgacggggctggaggaccaggagttcgacttcgagttcctcttcgagtttaaccagcgcgacgagggcgccgccgcggccgccccaggtgggtcagtcccggagggcgcggggggcgcggggccaggtcggggtttgggggcgcccaggccccctccgcgtcctcgtcgctccccggggaccccaggagtccccggcgcgcccgggaccgaggggctacggcgggggacgctgcagtgcggggcgtcctgggctcggatgcggttcctccgagcgctcgcggcggggtcctgggggaagagcgcagcccggacacgggcgtggacgaagtggtcccggacagagggctggtggcgctgccagaggcggagaagccccagctcccccagaca

SEQ ID NO: 66620 - DNA, 1020 bp, Homo sapiens
cggtggagccatgcgagcggccgcgtaaatcaggcaggcgtggccggcaggctgtggctccccacagacatggggctgacggtgtgcagcgctggctggcgcagcctctgccaagggagcccctgccctccggggcagcaccatgaagacctcacccctcaagtggatgggtttgcagttcagcccagtgtctgttcagctggcaccgatgggcccagatgtcctccctggcagtgtctcagcaggcgcacagacgagccctgggccaggggacaaatgtgtgggttcctgacgcacgtcccccggagccctagaaaggacaccaggcttctgcacccccacccgtgatgtgttgcaagaagcctcacgagtcagtaaagaaaaaccttctccctcgccctctgaaatagtaaacgttagtgagcgcattcgcatccgcagtgcttttacgtgagaagttaggttttgggagctttcggaggagctggctgtggagggaaacacgtccgtcacgtggccaccgtcccgcgggaagctgggggccgtcgctctggccgggctccccgcagccgcagtcgccgcgtcaggcggaggatccctgttatgtactttcccttttccacagtagctgctgccagcgggctgtaaactaccgtatatcactcagatttaagaacccaaactttaaaacaaattaaactcttgttgacattgtaataaaaatcagaatggaactgaacagctcagtaaaagtgaacttcaattatttttgtggatttcagattgttttctgggattcccagactcccagtgcagctgagttatttcctcttggcagaaggctggagaaaaaaggtggagggagggagggacggacggacggagggcgcctggtgggaggaagcctggtcacctggctggagggagggatggacggacagagggtgccgggcaggaggaagcgtcgtcacctggcagttcgctcggcctgaccagcagccacagggcagcggcgtgcgt

SEQ ID NO: 66621 - DNA, 2749 bp, Homo sapiens
aatccccattttttaaaaatcccataaaggctctctcgtgagcaccgcacgttttcccttgtagtcacgagggtaggggctggagaaagcagcagagatagtcaaaaacccacagctacaaaaaatgcactcctaagagcaagtaatggcgagggctaaaaggcactgtgccccttctgggccattctaattaccacatttaaatggttttgagaaaagagaatttttatctgaggaacgcgagttcttttaattatcaggccgagagagacattcaaatgaggcgacaatcgcgccctactaccccttgacctgtgttcacctctttaaactgctactggtggcaacagcgccacaaacagctataaattaacctaatgacgccacaatggacactatacccacactcaatagctgaacaacatatagtcagtcactaatcaatgttatttctgtaaaccagtgagaattcctcacaaacaagttcctattagtccactccctggcccccttttttgcctttaaaatccactgttaactgctaatcggagtacacattcagggcgccttgaatttgtgctcaagtgtggcccaaataaactctctacttagagaaactgtgtctccgctcgttttcaggccgacagtttccaaaatgttagtattcagcctaacatgagaaaagtcaccatataaaagtgaggggggaaaagcaaatacaggataatctcaattgtatataaaatttatatacgtaaggacaaagatacatagtaaaaaaaaaattctggcaggtattaaggctgaaaaaattaaaacagtccagagcggtctggctcaggccagcctgggcctgccgagtagctgggacctcagccaccgcgcctggctaagtattaatgaatctgttttagagatagggtcttgctacgttgcgcaggctggtctccaactcccaggctcaggtgatccgcccgccacagcctcccgaagtgctgagcctcccaaagtgctgagactacaggcctggccgcccgcccgccagcttaattcacgtaaattccagacaaacgtagaaagtggctcctttagtaagccacttgcggctgctgctcatcagggttcgcctggggccactgagaccacgcgccggtgcccgccctcccgctgcggtccgattttctgaaccaaccaggcgcttccgggcgccttgccccagacgggcccaccgcctgcgcgggccgagggcggcgcacctgcccctgcgcttccgcatcgaaggtgaggtcggaggaagagaagaccgcaacccccaagctcccgcggcgtggggtccggggggggacacgaggcggggccaccaggacgccgacagcctcacgtctctgggcccgcggcgcgcaaggcatgccgggacccgtagtcccgcgacgttgcgactcacagtgcgcgatgggagtggaggagagcggctcgcggtgcatgccggaactcgtagtctcgggatgctgggtctcagcgcgtgatggggtaatggcacgcaggcctgcgttgaacgctgggactcgtagtcccgccatgctctgtccgcggtgcacgccgggatacgtagttccgagcgcgccaagaccgtcactgggactgggcgacagcggcccgcgttgcatgccgctgctccacggtgccggcgctccgaggaaaagtaggtagggctcaggaacgcagttcttcacggccggcacgcagggttggtcccaggacggagccggctccggccccgcgcggcgctcgtatttacacgcgcacgtacgcacgtacgcggcgcccttgcgtgacgtcacgcgccctccaggaagtcggcgcgggctaggcgacgggtggaagccggtaccgagaggaactacagcgtcgccgcctgggttgtgtcgccgcggtaggcgctgcgctctgagcgcagcgcaggccccgtaccgaccgcccgcccgccctctgtccgcgatggaggtgccggccgcgggtcgcgttcctgccgagggcgccccgacggcggctgtggccgaggtgcgctgcccggggcccgcgccgctgcgcctgctggagtggagggtggcggcgggcgcggccgtgcgcatcggctcggtgctggccgtgttcgaggccgccgcctccgcgcagtcctccggggcctctcagtcccgtgtagcctccgggggctgcgtgcgccccgcgcggccggaacgcaggctgaggtcggagcgcgcgggcgtggtgcgggagctgtgcgcgcagccgggccaggtggtcgccccagggtgagtgtgctgagccgggcggggccgagggcgggcggctccggggagggatcctggaggacccccgggctgctgcgtccgcggtgggcaggggcgcccctggtgagggagcgataaagcgggacgcaggcactgcgcttctcccctaaaactggatagtcaccacctgtggttttaccaacggggagcattttgagataaaaggaaagggtcctgcgtagcgacacgaagttactgtttggaaaagctatgtttgtttctttctttctgcagtgatagtccccgccccttcctttagctccacctttgtgacttaggaaaactcatgggtggctgtgagcacaagagtcatcaggcaggctccagacctgttattgaaatataaactgttgggtgtgtgcacatctttaaatttttgtaaactttgtgaaacgcag

SEQ ID NO: 66622 - DNA, 1801 bp, Homo sapiens
tcctgcttccccttcccgcccccatctccccacacacagaagagcatggacaggcttctagtaactacttcatgcttgaaaacagcagagctaggagttgattagtttgctgtagactcggccacgcttggtaaagatgacgcacgcacatgcacagatggaagcaacaacaggaggaagtacagctgcaggaatgaagcaaaaggaacgtgctgcggacagtgcacgcgcagggtacatacccaggaaggaccgcctgggggcaaccttgacttcttcatccttgctatctgcagctacacgttaaaaagggagacagaaacagaaaggggaaaaagacagaaacatactggttttaacatgggtaaacagctgtgttcccagaactttttgcatttctttaaaaaaaaaaaaacaaaccagaatagaaagatcacaagattttggtttttgtgcattagaaaacccactttctgaactatttttctgcaaacctaacctcttccaatatcataaaaaagtgaatggggagaatgggagaaaaattgagccaaaaattgaaagttaccacatttccatttaatctctcgggagaaaggcagcatgggagcccgtcacaagcgtgctgtgctgatggaaagcagccaggcagatcctgcttcccttttcctagaaactcatctgtatgcaagctgcggctgcaatatagctgccccaggtcaaaactcttcagaaggctgcctgataaagctgttttcagagtacactctgctgtaaaaggacagctggttccgcacatgcacttgacaagcacctctgcacagacacagacacagggacaatgtgacagggacccagcaccctccagggcccagcactggcaatgacaggttataagtcaaccttcctatctgcgcagccccaggacaagacagcagccaaggtcctggaaaacagtgtggcctctaggtggctcctgggaagccccatggggtttgggattgaagacagttgataaacaagagactcaaataagtcctgggatcagaaagcagaagtaggatcaaaggttgtgtttgcctgccccaggcaatgtagacttaaaatggaaattttgcaagtgaacagctaaaagcaaatacgaggtgacctctgacctctgccctctgctacttggacttagggtgttgttccactcacaaggcaggaactgcaatatctctaccaaatttgagggttttataaaccaatgcagcatacaaagtgcagtcttctctcctccctcagcctcccccagcactgcctcttggattctatgggtccctcagctcgtcctctctgttgctttgatttagacaacatccctctccacgggcgcctcttctaaagaccaagatcctcaaggggtgggagggagggaccacccaaggcaggactgctcagtccacactgtttcccttctcacatccaggtgtgactgtgaacaggcaatggtgggaggcagccagccggcaggctggggaagaagacatggttcaggctgcagagtcacatcccacaccaggctgtgtcctaggcacagcctcaagctacctgaggctccttgcctggaaagcagtgtgatcagatccacgtttgtgtaggatggaatgcagagttctgatgctgagagagctgccaggaacattttcaacagtcacacacttccacagatctgtgctgaacacgtcctccagaccaggcactcaggatccaaaaagggcccagcaacattttccttttcctccacactcggcatcag

SEQ ID NO: 66623 - DNA, 1099 bp, Homo sapiens
tttcaggacatcttcagcaccccaaaaagaaacccttgactaaccagcagccactccctctccctggcctccagcctggaactgagtgttgagatttgggacaaatttcaagtaaattcaaccacctgactttgagccacagacaattatttctcaaataacccctaagaggaacttaaaaggaaaaaagtacatgataaaacaaagttaaactttataaaagcaatatttaaaatgaaacaaatgaccccgtgtatccagttgctggtgcacccctgacaaggtgcgtttgtttcctggtgacgtatcatgcagcagcgacctgacctccgttcccagcgggaagtgtcctgaggatgtgcaatcctgagcatataaacctccacccccaataaaacaaacgttttcagtaaccgggaggccggcgctggcatggtgaccctcagactgccgtgcacagagagggctaagggaggcatgaggatgccacattccattatttgtggggtccttgagggcagaagggaggcagagctcaggctaagcgacacagccaggcctggaggtttgaagtcaaatggaaagaattggtgtccactcatgaagtatttcacctcaccaaaaaaaactccctagctccatccactgaaaaagccaaaaaatcaacctgtaggccaaccctcacacatgcctaggccgtggtctccaaacactgtgtcccagataccagagctccttggagaaacgacggattctaggtctggggcaggagatgtagccgccacacgagcaccctgttataccaggatcctgtgtagaagcgagacccctcatgctgggtcgaaagggcccagcagcatctgacgcggctccccggccagagggaagaactggagcattaacaagcgtaataatccagtaacacaccaaacgtccaactcacatgttcagaatgactcagaaacatgcactcatcattgcaagatgctagggaaccaactttgaaaactggtaaagagacccgcatttcctttataaattacacctgtggatagctgaacaatgggtacccgcccatttctctgcagaggggctccag

SEQ ID NO: 66624 - DNA, 3137 bp, Homo sapiens
ccaaatgccgcatgttctcacgtgtaagtgggagctaaatgatgagaacacatggacacacagaggggaacaacagccactagagcctgtcggggggtggagagcaggaggagggagaggaccgggaaaaataaccagtgggtactaggcttaatacctgggtgatgaaataatctgcacactggccgggcgcagtgggtcacgcccgtaatgccagcacttcgggaggccaaggtgggtggatcacttgaggtcaggagttcaggagttagagaaataatctgtacactaaacccccgtgacaaacaatttacctatataacaaacctgcacatgtacctgaacttaaaagcttaaaaaaaaaaacagaacatgttcagagccaacaaccttcccttaaaggtgacgccgctgacaggaagacaaggctggccaccttgcttggcatggggctgtgctgcaggagctaccgatcgggcggccagaagccagagctttcagtctgaactccagtgatgttcctgccttgccctcccctctcctggcagatgagaggacatgagcccacacctttcatcaagacgccctgcaggaacaggcctggcccatccaccaaggggacgtggacatgtataaactcaaaccggactccaatattaagagtgctgcagaggtaaatcttgagaattctttaacacacacagctacaccccaggacacagagctcaagagcggatgtcccacttgaggtcatttggggcccaggagtcatgcagcttggttctcagtcctccccgggggagggcaggcacaggtcacccaggctgaccccaggagcccggccccctacccctcgtggcggccctggactgcttcccaaatactccaggcctgaggaaagggtgccccagcttcctatcgcctccataacaaggtaccacaaacgtggcagccacaatgcaggctgattatcttaattctggaggccagaggcccagtggtctcctgaactaaaaccaaggctgtgtctcctacccattcaagtacaggcagaactcagctccccgtggtcgggggctctgctgcctgtaaagcgacggccgacccatggcagagagccaggccctcagctccagcacctgaccatctcctctgcggcccttgttcacgtctgaggacccctgagattaggttacaccacaggataatccaggaccagccccctcaagagtctctctgccatgtacagtggcacgtcacaggttcccaggatcagggcacggacgtctccaggggccattattctgtacacccacagagggtgtttaaaattcagattccaggcctagctctggaaactgggactcacatttttaactcatcctgggtaaccagaagagaagtactcctttggaagaagtgacacagaacgccaggcatccaccatcccactcccttcttatccaacggtcctctgagacaagcctgaacctgcacctgctggtaaaatgaatgcaggtggggagcttacgatgccgcttctaggggtatcccagtgttccaacacacactcacattaaaccccacgctggctgctctgcctggacactcacaacctgccgtctctgggacctcacatcaagccactgcccactgccaacaaggtcacaaggtctggcctcatgtccagagcccgaggacagcagaaacacccagcaacgcactgggcatcttaggcacaaatgtccagagcccgaggacagcagaaactcccagcaacgcactgggcatcttaggcacaaaccgttctctcggccagccggccctcccacagtgagaacattcttgttccaagttaaatactgaggttcaaaggggcagggaacatgccatgaggagctcaggtccagagaaggagcaaagccttgcggggagcaagaccgagtcacctaagcagaaatgtaaaaccgcagctcctcatgcggggaatccggctggttcttaaaagcctgctttctaggcaagatctgtggtatcctcagtaccatctctggtgtaatttcaaacccaaaacacaatagaagggaacagagcagagactcagaggagaggagaatggcgtgaatggggagaaagaacagaacaccgcagaaaagacgctggagctcatctctgtggccccaacgacactaactggcccaggtcacactggctggaggctggtctggtttctacagaggctgaaagcagcacacagtcacctcagtctagaaacagaagcagacaaaaaggcagaggtgggaatcctctccaacaggacgaagtagcggtcaggaatagaaacacagggacacagctccccggcaagagctcaaatccacagaagccccaaacttaacaaactctgggaagatactcttctccaagtgatagctgagatcactctctctctcaaagccaaagtgagtgctgtcttagatttagtaattagaagaaaaacaaaaggaaggatttaaccctcctgcacacaagaagcccgccagcctgcatgttcaaacagagttcagactggaacaaactgtgcaataggcaaaaactggaagaagtattttctattttctaagctgccaaaggttaaggagccatgtgtgctaagcatgtgattggtcctgcccagctgtcaacactgcagtgtgctccgcataaaggggctgcctgaccctgcggggggactctgggtctgtttaacaaggtctgtgaggaagaccctggctaaggtacccctgagtcacagcagaactgaaagggtgtgttttgtgtacaggccacgcacacagacgaaacgcctgacctggtaccgtctgacctgatgggccaggcacagatgagcacttcttgttctgacacagaaagcgtctgggatggcgctcacagccaagaggaaccgtgaagatgtgttgaggcctcacccaacttccagtgaagaaactattatcttgaattgcttcaagtcataaaccgtttaactgaagtcatttaacatactgaaaacactatcagctggagataacagcaccacttggtgaaatgaaagctgcttggatcaggacagattagagtggcttttgtttcaccag

SEQ ID NO: 66625 - DNA, 1368 bp, Homo sapiens
atccccaacggggagctgcccagagggactggagctctgaggaccatgccccaacagctttggaggcgtgaagattcgaactccacctctgctctccccgtctcccgccccttctcaccagagcccagcccagccccacctctgctctctgcccccaccccagccccttctcaccggagcctgcccccgccccacctctgctctcctgctcccaccacccccaacccaaacaccgagtgtgcctgcgcatgcgtggagctggggttgtgtgtgatgcatcccgcgtgtcacttctgctaaagcacaaatcctctgccctacaaaccatgaaatcaaagaggctgtgaacctacaaagcctggagaggggaagccaggagtggggggtcacaagaggctcccaagagagaaacagaaggggtcatcatccccctctgcacagcaggacctggggaccgggtgggcacaagaggatgtgtggtaggtagggaggtgggcttcgctgtgtggagtgcagggatggcgcatcctcaggctggagggacgcccagcaggaacgagcgccctctgctctccccgctttcatcccaccatcttctggaacacactggggccctgcgtgtgcactcagtggtcacagaagccatgcatgaccaggacagcccaggatgttgattctatgaagagacccatggacaaagttcagaattccctggaaggctgccctgtgctccacaaagaaagagctcaagtgtctctccaaggcctgtaagcaagaactcccagttccagcttcaaacctctacgtcagtgccagttaggtcatgaggcaatgacaagatggcaccaggaaactgggttaatctctgacttctccaaaccgatacttagatggacattagatagattcttttctttctttttttgagacagggtctctctctgttggccagactggaggacagctcactgcagcctcgaattcctgggcttaagtgatcctcctttcacagcctcgcaagtagctaggactacaggtaatgcccccacacctaagctaatgtttcaattttttgtagagacggtgtcttgctgtgttgcgttggttggtcttgaactcctggcctcaagtgatcctcccaccccggcctccaaaagtgctggaattacaggagcgggccaccgtgcccaacctaatttattttcttttagcaactttgaactatgagcatactggggagggaaacctctaagcggaacttctttcccgtatggttatccactctcaggcaattttcctccattattttggagagaatttattctataaccctgaagacgagtgcagcgctccttcacaacacacacg

SEQ ID NO: 66626 - DNA, 2159 bp, Homo sapiens
tggaccctgctgctcccccggcctcaaccagaaaccccaaaggagaaaccctcttctccgggtgcagcccaggaaagcaagcccccaacttaccagaagagtatccgcaaaatgttggccaccagcagcaccaggcacacgtaggtggagaagccgtcggcgttctgcgtcctgcgaatgtcccgatactgcgggacgtagggcaccacccctccgaagaccatggccgcggccgcgccccaggacaccagctggtgcagtggcaccaggagccagtccaggccctcggcctccatcgcagcgcccgcctggccgaggctgtcacgggctccgcgccccgcgggccaccggccgcctgctcatcgccgctccgcgcgctcctgcggcctcggggcctgcggggagcggggagctgctcgagttccgcccagggaggctggggcggcgcgcacggacccgacccgacccgcgccagccgcaggacccgaggcagagcgggggcgaccggggcccggggcgcgcgaggagcggcccctgcctgggacgggggggtgtctgggggtcccgagacgctcccggagggggctggggaggggtcccagcgccggggtcgaggacgggcgaagcccctggggtcaccgcccgggtgcgcttagccggcgggggtccacgcgcgccccgggatggggtgggggagggggcgcagggcccaggatcggggcgcactgttcgggggagggtcacagggcctagcatgggggcgcacggctcgggggaagggggcgcaggcccaggatgggggcgcacggctcgcgggaggaggtgccgggccggggaccccacaggaccaagccaggggactgaaggccgcgaccaactgccccggccctgcgtcctcggccgccctaggccgccccccgaggaccccgcgccgcccccgcgctccttacctgcgcccccagccccgcgcccagcgccccgcgtccccgcgccgctgacccgcgcgcgtctcggcgtcagtccgctcaggcgccgggaaaccccgccccgtgacgtcacaatgccgggccccgcccacgccggagctgcgcggaggcgccgcggtgtcctagagcgcgctgggcagggcgggcgcaggcggggccgggagccggggctgtcggggcggtgggggcgcgtggctcctcccgcccggtcgggaaataccagccgggcggggccggtccctcaggcctggcgcccacgttaacccgtctccagctgtcccggcgcgcggccatccaagcggagggcgtcgtcctggagggccgggggcgcggggtccggacgcccctctcacgcgtgtcctgaatgcgggccacccggggacgagtctcgtccagctctgtcctgacccaggagacccggggacccggctcggagtttgcagcgcccagaggcggccggggtctcgggaaacggagcgccccccgcgggtctccgctccgatgcaagtgccccacgagcagatgcgccggggccgtcgccggggggccggctggacgcgcggccgtcaccgtggccattgtcattatcgtggttgcggccacggtcgctgtcgctgcagaaacgcggggcggcctctccccatccccgtgtagttctccgggctgaaccgttgggcgcctatttgcagaaaaggcagctcctgagcctcaagacagactcgggggccaggcgtgcgtgaagcccgggccctgctgccggcctcgcgtgccaagccaactccgagccccacacccgcccgcggggagctgccctcgcccgggaccctcttggcccgcgcgggtgaggactgagggcgaggggcgcgtggatgaggggcgcgcgggtgaagagtgaggggagcgcgggtgaagtgtgaggggagcgcgggtgaggggtgaggggcgcgcgggtgaggggtgaggggagcgcgggtgaggggtgaggggtgaggggagcgtgggtgaggggtgaggggtgagtgatgcgcgagtgaagggtgaggggcgcctgggtgaggggtgaggggtgaggggcgcgccggtgaagggtgaggggagcgtgggtgaggggtgaagggtgcgcgagtgatgggcgggtgtgtgtagggtgagggacgcgtgggtgaggggcgc

SEQ ID NO: 66627 - DNA, 1743 bp, Homo sapiens
cagctactggccaggccgaggcaggaggatcgcttgggcccgggaagtcgaggctgcggggagccatagtcgccactgcaccccagcctgggccacagagcgagcccccgtctctgagaaacgcagcaggggtgaccgaggcccatgcactgcccgtgcggagcgttttgggggtgtaggtggccggtggcgcccacgggccctcttgagtaaggcggctccgcccaggccgtcccggggcctcggctcggctcggctcgggaagccgcagagcctgggggcgcggaccagtcctccgaggcggccgctcggtgacattgcgtccctgcaggtgcagcgcccgcctctccgctccggccccgcctccgccctggaacgcagcgcgctccgcccgaggcctcccggcggcccatacgggaatcgcggagcttagctgtcgccacctcgcgccgggtccgcgcggcccacgggaccccccactgacgcccccggccagcggtccacatggacgtgcggggccctgaagcccccggcgggcgcgcgctgcgggacgcggtgagcccctccccgactcctgcttctctctggatgggggcgcccctgcggttctggggggttttgaggtcctggggggggagcctgcggtgctgggggtgccctgcggtcttcgtggggccctgaggtcctggggggcctgcgatcctgaggactcctgtggtcctgaggagtcctgagtgcctgggaggcctgtggtcctgggggggcccctgaagacctgggggaccctgcggtcctgggggggcctgaggtgcaggggggagccctgctgtcctgggggaccctgcgatcctcggggggcctgaggtcctggggggagccctgcagtactggggggcattgaggtcggggtcagtggggaaacaactgggccaaagggtgcccgaaaggggacccacgagtgtcgcagcgcccagggctccggcctcttccgggaaatcctcccgctccccaggccttcctacttgccaaagagttccaggcccacaagaggactggctatgaggaagagacctggaatctgaaggaatgtgttgggcgttgtgcaaaccctaacgtaaatttcctgacaaaggtagaaagccctggcatggttcagaggtggggcctcctcctatgtcgacgggattctagattcacaccatggtacgtggggctccctgggatcttgaacccccagctgggagaattttgtgcttctcagcctcactgttctcatctcaccctggacacggtcgcagggtgaggagtagattacaccgtgaatggtgtgggacgtcagtctgtaaactacaaagcagtatataaacaggaaacgctttcagtagcaatggtggtatttctgtgtgacctggtaagtaatttcataagaattcttgaggagcgcagggtcacgagattttctcctgcatcctcctctgcatgctttatggccttggctctgggccaaggtgtgtgatctcctgcattcatggtgtgtggtgtgaggagggggatgggtccctgccccgtctgcacgtggccctcatgattcccgcgctgcttgttgaaaagactttcctttccctctgaatccaaaggccttagcacctttgtcagaagtcaacagatttatggatgggtttatcccatgatatttattttttttatttttattttttgagacggagtgtcactctgtcgccc

SEQ ID NO: 66628 - DNA, 2350 bp, Homo sapiens
aaaggagttattttaacccaggcctactttttagcatctgtgaaagaaaagatagcttcaatgttacttttactcttcattaaaaggaataacctctcaaattacttatggaaaattaatatggcaaatattttattaacaccctagtatttgtgccctttgccctattgctacagctgcaaaacctcaataaaagtcatcctaaaattgctatgaggaaccacagaaaaagaatgaaatctggttataaaatagtgtcctacaacttttattgtcagcaagtaaatgccaagaccactcagtgtactaatattagaaattcagagaactaattctaacaaagcatatttctattttctcctgatgtttactgcacctcaatcactgtaagctgtaaaccacatgactcacaaaaagcgtggtgggataaaaaaacacacccacagaaaagcaggatttctcatgctatgaacatgaaagtcctgctttatgcatacaacgaataactcaggtaccaaaaaaagacgtccttttaaattaaggatccgcgctctcaataaaacctgcaagtgcattttgttcactgaactataagtttgggaaaaacgccttatcaacagaaataattaattcatttgagaggagggggatcataaaccctttaaaatatgaaaaactacaagagctccccgcagaaaaaggcgtgaaacgccggcacagtccccgagagcgctcgaccgcagcgaggggaggaatcgcctgaacgacggagccgcggcccctcctcggggaacagctcgcgcccccaggcgacgccggcagggcagaggcgcggggcagatgcggaagcacagcccgcagagcgggagagtccggcgcgctaccttctcggcgatgctgtacaggacctcgtccatcttcatgcacgtaggatcccagtcgtggccgaagcggatgacgaccacgcggtcctcctccgagaggatggcctggtccacctgccagccgttgtgcaggtgcgggagcatgtacgacatggcggcccgcgcgctcgccgccgcccaaggcggggcgccagggagggcccagcgaggtgggctcagccggcccctcactccccggcccccgccgcccccgggcccacggacgaaatccggtcccgcccgcacacgcaaactccgctgggactgccacccggcagaacgtctgggcgcgcacgcaccgacgccgtgcgtgctgacggcatgcgcgcgcgctagcgccgtgcgtgctgacggcatgtgcgtataggcgccgcgcgaacgtgtagttggccgggtggagcggcggcgacctgggcaccgtggagcgccgttggttccgtcatagcagctgtcggagtgggggttcctccccagcgtccaggcggcctggtggtcctgagaagccccgggctcgccgtgccctgcccccacgctcccgccccgaggccgcccgccgccgcccgggctgtcctccagccacggatggggacgtccagaaaggcccggaatgcccggcactgcggctcgttttcttcctttctggtgcttgtttctgtgtgttactaagacagttcatgtgtgtcatttgtgaaacttgatcataaaaatgtgtcgttgttgccatacccaaccacagcagagtcgagcagcggggtagggaggaagcactgggcaggccgtccttgaggaatgtcaccatcaggccggctgctgagctgcctgttgtaacctgaaaccaggttttttaatttgtctttttataaagaaaaaaaatttttttttgagacgtgcagtgacgtgatcttggcccactgcagcctccgcctcccggggtcaagcgcttctcctgcctccgcctccccataagctgggactacaaggcgccagcccggctagtgtttttttgtacttagtagagacggggtttaaccatgttggccaggctggtcttgaactcctgacctcaagtgatctgcccgcctcggcctcccaaagcgctgaaattacaggaagaagccaccgcgcccgacctaaagccagttttattccatagcttcagcataacttccacctccaggactgatctggccccctggcttcgctcaccagtcagagctccccaaacccttactagtgccagtgaactttctcaaagagaaataagttaatatttctctttttaaaataaaacctctaacctctgttcttctgagagagcactttgggttcatgctggagactccctggtttgcaaactgatattgatagtaaaactcttgtctactatctagctatcctggtggtcctttagatgacaaatttaaaac

SEQ ID NO: 66629 - DNA, 969 bp, Homo sapiens
taaccagttattacgcaatgcaccaagatgtaacagtttttgttctttgagataataactggactcttgttttaccttcaagaagattaaggagtacagacacaaaggtgaagttggggcgaaggtttaataagcgaaagaagaaagctctctgccagcagagagggggtcctgaatggggtggccactatgagtcccgttctgggttctctatgaactggaaagaggaagaaaggtgcttagtctgcaggctgtcttcgagaacacgtgactcagcttgtcccgggaccttggcccaggacctactggaaagcttggcccagcaccagttagaagatgaagcgatgattcacagaggctgcttagcctggcccaggacctattaggagctgaagtgacagcttggcctgggaccaaccagaggctgaagtgatgattcacagagggcagacgtacagtccaaacaaaggaaaggagagtgtccacgggaacccactgaagcccactgtgcccatgcccaaaaatgagaagaaacatcttcctgggagcccactgtctatacaaaggacgaaggcatttttatgcccagccttgttcccttatttgagtgagttggaggtttgtgcaagattttatccaagtggaggtttttccatctgtgtagccacgggcatgtctccaggcacaacgccacgtgctagttcccttactggttcctgcagcctgatttccccccaccccaggctgctttctattttatgtggggataaggctctgaccttgggccgggggctctccagggactcttcccttgctgtctacctaaggcaagctaactcctttcagtccccccgtggagtagagacccaactgctgttggggaggttgggcattgctttttttttttctttggctacttcctgctggaaaggggcattgtgtgggggaagagcagctagggttcctcct

SEQ ID NO: 66630 - DNA, 1940 bp, Homo sapiens
gtgaaaactctgcttctcaatactccgccctttcccctttaaatctggggccctcaaaatcatttttggagaaaggcgtagacctgtctcctgggtgcgtccttaactttggcaaataaatctcctaaaatgattagagacttgtctcgtcgttttcttcgattgacaatatatacacacatacatacgcatacacacacacatatatacgcgcacgcacatgcacacatatacatgtccacacacatgcacacacacgtacatatgcacacatacacatgtacacatccacacgcgcccacacacacacacacacacagacgtgtctcacaccacagcagccgcctcgggggagtcacagcccacgcatccccaacactgcggtcgcgctcacttctctttccacgcccggggggagcagcttccccgctgggccacgctgactctggggaggcgggcggggcgagaccacttctggggaggacgcccaatctggggactttctctaggtgcccggggagaaggcggcgcagcagcaaagccctggagggcccagtggcggaaacagacggacccctcgcagcctcccgccgacagcggccctgcccaggtctccaggcttcgatgccttcgttgctttgtgcggcgcacccgcctacgtcagttcccagtatttaaacaaaacgtgttcctagctacgcagcgccaggcaaccaggcggttcccacgcttccccgagtggcacaccctccgcgcagcccacgcggcctccccacgcccagctcccgccggccccgcctcgcgtcgtccttcgccccgcccccgttgccgccccccccgcccgcacactgcccacctggcgttgtcttcaccccgcttacacgccgctcgcttcgctctggtagtcgcccacctcgcgctgcccttctcgcttcagtcttcgccctgcccacccaccgcccacctcgcgccagtcttcgccccgcccattcaccgcccgcctcgcgtcagtcttcgccccgcccaaccaccgcccgcttcgcgtcggtcttcaccccgcccactcgccgttcgcctcgcgccttcgcccctccgccgttgtcgccccgccccttcttgcgtccagtctttgccccgtccctcgccgtcgccccgtccacacgccgtcagcttcgcgtctgtcctcgccccgcccacctaccgcccccctcgggccttcgcccctccgccgtcgttgccccgcccgccttgcaccccgtcttcgtcccgccccgcgccgtggccccgcccacacgccgtcagcttcgcgtctgtcctcgccccgccctgcatcatcgccccgccctgcatcatcgccccgcccacacgccgcctgccaggcgtgagtcttcctcccgctctgcgccgtcgccccgcccacacgccgccaccctcgcgtcagttgtcgctccgcgcctgcgcccgttgtctccctgctcgctccgggtcccggcgccgcgccatgtgggctgcggcgggcgggctgtggcgctcccgcgcgggtctccgggccctgttccgtagccgcgatgctgcgctatttccaggctgcgagcggggacttcactgctctgctgtctcctgcaagaactggctcaagaaatttgcctcgaaaaccaagtaatgcggcgggggcggtgtccctgggcgcggtattccctagggggcggtgtccccgggttgcggtgtccgctcatccgcgttcttgcgcccatgcggcctagctcgccagttcctgcctcctggggtctgcagcagttctagctctcactgtcagcatttgcagcttttgtgttcgtggacgtgtgtcgggttaagaaaacaaagtgacaatgtgtgtttattttgattcttgtcaccagacgtatttttcagaagattagtttcagaaaatgaggaaa

SEQ ID NO: 66631 - DNA, 1560 bp, Homo sapiens
ctttcccacaggaatgatgaagtcaggagaccccagctagtcggttcaccaggatatgccaatcatggcacacttgtcccagttctgggagccaaagttttgtcttccaatggcaaggcagcattatcacagttgggctcccattggctctgagatgtgggcggggtcaccactcctggagctgccactagctccaccccattccatgcaaatgaagtcaaagctgtggtgagtccacgtgattagtcacatggttgatgacacactctccccacccctttagtgacgtcattgcccactcaaactctcacgagagtttgcacagatgtggaaaggagctggcagggcagttccctgggacagaagggagtcagggggtccaacaggggccccccactgccaccccagagcctccagtccagctttaggcaggggccccggggggcctgtgggaagtgccaggggcccccaagcacactctgctctcattggctggctgcgcctacatgcaaatgagggccaacgtcacttcctgaggccaatcgagcgccattttctctttctggctgcgcgggaggaggggaccagtcgcgctgggggtgggcgcgcgctgaggcgggggtcccgccgcgcggggcggaggcgcgggcgggcgcaggcggccccacgggacgcggctgcgctcggcggaagacgcggcagccctgcgagaggcagcagcggagacgcggtgctcctcgggcgccaagcggtaggtacggcccggcccggcgcgggcccgcgcggcgacgccccctgccccggtcctggcccccgccccagtctggtcccctccgagccccgcccccgccggtacccagcccacacccacgcccgccgcctgccctcgcgccgcccgtggccgcctcgggaatcccgggacgttctcagggcgcgggttcgcggcccgaacggcgcccgtcgacccccgacgcgcccgcggcccgccccgcccgccgccggtcacgtgggagcgggggccgccccgggagggcggagaaggggatggggacctgaggggagagtaggaataggggaaagacgaggacggggaccgagggagagaggggggctggtgaagggagcgaggagtagagggagagggaacggggatggagaagaagagagggggcaaggagctgtggcgacccctgtaaggactccagaaacgccccgcccgctggcccgcccgccgcatccccgagaccgggttctcctggaagcttctctctggaggagccttgagtgacggcagatgtaggtcaggagctgacggtgacacctaaatctgcccaggtttttttttccctagaaaggtttgaagaacagctgataacggggccctgtttcttcatcgttgagcttttgatgcgaatatcaataattgatatgcagatgttgactttaacattacttttcatctgccgttgctggttgcattgaaatagattccgtttacaaaatttctactacagttgactttggaatgttaattttaactgcccttttaaatactgtaca

SEQ ID NO: 66632 - DNA, 761 bp, Homo sapiens
tattaggatttggtacatgttatttcgtgtggggaggtataaacaatgcatttaaactttacgtttctagttagaatatgcctattgctaaatatttccatactgattcaactacttcagtgctgtgagacaaatgagctattacaacacgaatgaaagcgctggcgactccgcagcgccggccggtccccagccatcacccgcgccgtcccgatggcgccgctcgcgttgctcctttctcggcgccaggatctctccccaggaaccagcgcagatccggaggccacgctgcgctgcgctgcgctgcgctgcgctgtcaggacgcgcagttcccgccccgctgaagggacaccgttttacaacacgccgcgtagaccgtgacagggaagtaaggcccacggcagcgctccctcctcagcactcgcggccgcggacaggacgccttttcctcctcctctcacctggtgaccgggtgtcccgaaccgcggccgctcccgggcgggtcctgaagagaccgtggctccgtcttcccggtcgacgccccggggcgacgagtgcggatccgccgcggttcccgcgcgtgctccaggttgggcgggagccgggcgccccctcgcggcagtcctggggagtctctgaaaatcagcgttcggatgactgcaggccgtgatttcggaaatgtcaactgaaatcgaggccaccatcccgtgccttgatcggaacggatggagattttaaaaactaaaaaagatggcccgggc

SEQ ID NO: 66633 - DNA, 886 bp, Homo sapiens
ccaccctgcgcccagttcgcgccaggcgggtccgcgtcgggagttcaaatcccgcccggggtctgacccagccccgccggggggctcgcgggcggcggaggcgcggtgggtccaccgggatcccgatggggagcgcggggcgcctggcggccccagcactcggcaaagttggcaaaggcgcgggaggggaggcctgcgcgccgcggggcccgggccggggccgggaaccggagccggaccctggaacggagccgcgcgcccaccggacccccgacaccagccccgccccgcgtccctcccctcccccaccccggcccccgcccgccccgcgccgccgcgcatgcgcactgcagcccgcgatgtggcagccgggggagttggggggtgggggccggccgggggcggccgccgatggagccccgcgcccctccggccccggacgggccaggcgccccggccggcctcagagctccagagcggggctctccgtccctggggcccacgacgaggccgagccacggcggcggggggcgcggacgcgcgggggcggggggccggctcccccggcccgctcactcacctccgccatggccgtgtgtgcgcgggaggcggtggccgcgccgggatccccggatgaggggccgcgcactcattggctgtggagcctggagggcggggcagggggcggagcctggagggggcggagagcgggccgggcgcgtagtaggtgcgcgggcgcgggcgcgggcgcgcagccgagcgtggccggcggcttctggcgagcttgcggtgtctttccggccgtctctgctggaccctgatcttggccttggccttggcggaggagactgcattccataaaaatacgaattcctgataatcacac

SEQ ID NO: 66634 - DNA, 740 bp, Homo sapiens
caggaaagcgtgagggtcggggcgaagagagaaggcacatgcgtgtgattcacggatggagaaacccatagggggcaagaccaggtccaaacccaggcttcctggcagttcctgagaccacagggtccccccctcctgaggccccgacccccctcctgccagctgcttcgtgatctgccagccccggccttcactgcttccttctctccctccctccctgccctccccgcctcagtttcctcttctggaaccgagctgagcagttcccagcctcctcgtgcttggagccagcaagataacatatccccaggaccaacccggagccggcggacgcctggcgctttattgaattattgattgtccaggagcctcctgcattctgggaatgtccccaagtctggatgtggcccaagctgggaggagcggctgctgccacagtggtagaagaggggtccaggagggcgagagagctgggctgaggcctccccactctccacgtacccttgcaataaggggttagagtcctgccgtccagaggggaaagtgaaacccggaggagctgtgaccccatctaagctttgctcacccagcaaacgttgatgagccctcatttttgtgctggggcaaccgcgacgcagccccgaagtctgacaaggaggcagacaccgaggaattctccccttcaccgccgccgcctccaggaagcctgggcaggccccaccacagactagcagggcccc

SEQ ID NO: 66635 - DNA, 2747 bp, Homo sapiens
aatgttcctggccgcagaggccgggaggagctgggagcacccaccggtagtggcgtgcgggagtggctgatcattttcccagacgccgtaatgactgcagctgtaggacagctgctctctcagaagacgggggactatgcacggcgctgtcacccctgcaggtgacttcacacggtttactataaaccacagagaggggcagacccgtcagcagaggggaaggttaccctcctaggtggaggcgtgctgtgtccaggcgcccgacttccccgtgtgtttgaaaaggttcatttatcataagacccaaggtaaataaacaaaggccgcttccttggccgccctggaagtccctgctgcctcccatctggaatcctggggtctgtccgggcgccagcccctttccaaacaccccttcccgcacccccaccgcaggccagcgtctcgggccccgtctgtcattcgtgaacagctgtccggggggctccggtggcagagacgccccggccgctcgccgctctcggcctcgcccgcccagtccgagtggggggcggtgcacctgcgcatgcgcgcccctcccccgccgccctctccccgcccctccccacgtgacgccgtgggaacccggaccccagcgcctccgggtgggggcagccgccggccgccggccggggatgggggtccggggtggcgggagagcaggaaggatggggaggggacacctggctcgcggggtccgggggtcccggaggagagggtgggggaggggaggccgccgcgaacgggctcccggggggggtgggggggactcacccgcacgacgtaggagaccccgggccccaggaccctggcgtcggggtgtagccagccgtgcgcgggtttgtggatgaagctgcccttccggatccactcggcggcggcggcggcgtccccggaccccgccgccccccgcccgccccgcgacccccgcgaccccgcgccccgacagcggctgagcgcgggcaggggacagggcgcggcgcagcggggctcgcaggcgcccaggacggcggccgccagcgccgggacgccccccgggcccgccggctcgggttgggggtccgcgccccccgaggccccagccgcccgcgccgccgccgggccgcggcccaggaagccgcccggggccgcgaacttccactgcggcattcggggcagcaacgcgcagaaggtggtgggcgcctcgggctcggggggcgcggggggcgccgggggcgcgcgcccgcccggaccctgcgtcatggccgcggccgcccgacggagcccgaccgggcgctgcgcctggcgcggaggaagccctcccgctccgcccgctccctcccgccccccggcccggtgatgtcatccgcccggcccagcgcgcagccgcggggggctgcgcccctgggaccccggccctcctcgtcccggagcctggccgcgaggctggggaaactgaggccctccgaggacaccgggcgctggcctggaacccgcagccaaggcgggacggggctttgaacccagaaccccgtcagcgaccctccccgctgcgccccccacccccgcccgccgcccaagttcgcagaaggaccgagctggagaagcttagaaattccacatcccttctttcccctatttcctagtggggaaactgaggccccgggaggcgcggccagggaaaagagaaccccagaccctaaggtcagcccctccctctccgttgttgcagctagaaggtaccttagggtcacccctatttcttagtggggaaactgaggcgcggggaggggaaggggcgcggccgagggctcacagacgaagctcaaacccaggagtgccggctcgggggtggggggggggggcggggctaggagcggagccgggcccctgctctgcggcctgtcccggcctcagtttctccggctgtaactcaggggagcgggctggagggtcgcggcccttcttccctcacttctggggagcccagtcccgcaccagctcatctgagctctgggcctcagcctcccaggccggtcgctccatccccagcctcaacctctccgagaccggccgcaccttccctggcctcaagggtcggttccttctgcaccagaaaacggggtgtcactgtcaccccgggacccagcctcctggcccgacttggctggagctcccctgcacctgccccgccccaagcagggctgattgccgggaacaaagggaggggccgggacgcgctggcaggtggggagggagggaggggcgaggctgcccggagcccgatcgataattcaggggatgagatcacagccggcgccgcccgcggggccggggaggtgggggaggggagcgaggcgcgcggtcgcgatcggccgtctctgccgcggcgcgtgtcggactcagcccctgcgcgtccgcgggaggagcagatcgtgggcgcgattggtcgggctggagccgcggctggacctgcgcgcggtgtgtgtgttgtgcgcagggtgtacgctgtgtctgggtgcgtgtccaggcatatgcaggggatccaggctgctgggtcctggggtgtgttcacctaatgggtaaagggtgggacaggtttggcggccctaggctgagggctgtgggctgaggagagagcagccccaccaccccctctctgcgccctgcatgcctcccaggctgcatccctcagggaggtcccggggcagtgtcgcaccctcccaagctcc

SEQ ID NO: 66636 - DNA, 2057 bp, Homo sapiens
cggctcttcctgctacactatctctactaaaaatacaaaaaaaaaaggccgggcttggtggctgaagcctgtaatcccagctcctcgggaggctgaggcgggcagatcacgaggtcaggagatcgagaccatcctggctaacacggtgaaaccccgtctctactaaaaatacaaacaattagccgggcgtggtggcaggcgcctgtagtcccagctactcgggaggctgaggcaggagaatggcgtgaacccgggaggcggagcttgcggtgagccgagatggcgccactgcactccagcctgggcgacagagcgagactccgtctcaaaaaaataacaagtaaatcagtgtggaactaacgagcgccctcgtccctcgcgctgctgggactgacgtccgggtacccccaacgcaaccacggcctcccggtgaccctgacccgcgaagcgggccggaagccccgcagcccctactccagaatccgcgtcccggaacctggatccccgaccgggccctgcggccccgacccccgcagcgagcccagcgccggggaacaggacccggcttcccagtctccgcccggggacaccaggctccttgggcgaacggccaggcctcccgggaccagcgcgctggaagactcgcggcggggacgccccctcggccgccccgtgccgggccccacgcaagggcagccggggcgccccgcagtgggaacgcgaggagaccgaccacggggcgagacagccgccagggcgtccgcgccgcccgccccaagcccgcatcagcccgccacgaactcggaggaccgcgggctagagcggccccgccagcgcgcaaagccttgtgggccacacgccccggcgccccgcgctccgcggcatggcgggagttgtggttcagctgcgggggccgcgcgggagctgccgggagctgtgggcggggtgggtgcgcgcgcagtggcagggccagtgagctgcacccgcggaaaaggagggggagcggctggtcagctgcgccctgcgggtcgagaatgtcatcagcagggatggcggcgctttgagtgctgagcgcggccccgaccgggaccccctacccttgacccaccctcgcaggccgagccccgactcccgacccgccgtcgcagcccgcggccccgacctctgacccgccctcgcagcccgcggccccgacctctgacccgccctcccagccagaccctctacgcccgacccgccctcgcagcccatggcccatcggcccggcagtggacgcagagcctcggccccgttccctccccggaccccccggacccgctctccgtcctccctgcagagccgagggccttggcccagccccgcatcctccccgaccgtgctcgatccagcccgggtgtgctgcacccgaaacaggctcccgggggccgtcgggcctgtgggtgaccgtgcaggccaggatctcccccttcccagtcgtgacaaccacagatggccccagatgccacgttagggttagtgcctcctgggggcgggattgcggccgggggagaaccaccctcccaacccgttaggaactgcagggacggagagcgcgctcgggatgtccagcactcagcgcgggttgggtggcgaatggagagcgagtcgtcctcagaggccgccggcctgcaggcgagaaccctcccagccaggaggctgcggctctgcctgaaccccgacccagggcgaacacccacatttggcccctgcccggtgctgagagaggccagagcggcgtccccagaagcggagcgggagccccacgtccggcggccacgatagaaagaagaaaagaaatgggtggtagtaagtaaaataaatcgtatgaaacataaaacaaggccgggcgcgttggctcacgcctgtaatcccagcactgtgggaggccgaggcaggtggatcacctgaggtcaggagtttgagaccagcctggccaacatggcaaaacctcgtctctactaaaaatacaaaaattagccgggcgtggtggcgcatgcctgtggtcccacctacttgga

SEQ ID NO: 66637 - DNA, 1974 bp, Homo sapiens
ctgggactacaggcgcccgccaccacgcctggctaattttttgtatttttagtagagacggggtttcaccgtgttagccgggatggtctcgatctcctgacctcgtgatccgcccgcctcggcctcccaaagtgctgggatgacaggcgtgagccaccgcgcccggcctaccacaggcctttgaatacattttgcttctaagagaagttactatttattcctaattagatggggaggaaagtctcatttgaagaggaacctctacttcacgttttacaaagggcatttggtctgcccgccagagattcctgtgctgggaggatggtggaacggtcccccggcaaacagctctcattgccccctgcccggggcaacgcccctgagggacggggacggcacccagcaagctctgcccggggcggggaaacgcgagggcttagtggtttcctcggtgagaagcttaaccaggagtccccgaaagcagtgagggaagatccacagaggtcgcctggggaaacacacccagaggcggcttatggaggagactgcttgtgttttgaggtggctgcgggctgcggagggttgggagggccgggagggcggccggaagcgaggtcaggcgatgaaggcctggaggtgccagcccgggggccctggagagccatggcagagtttacagctctggaggctgcggtgtcagaaagctccctctggcggtcagggggtaacagcgcgggatgctcgcccgtgtggccgccaataggggctcagcgcagctgcagcggagctggggagggggcttctcccacgaggtgagctacgcactcagacgttgactgagttaggcggaaggccaggctgagctcgacccccagcaccaaggctcagagatgaacatgagaaaagggtctgggggccgggcgcggggctgggtccagcagtcctgggcaggtccagccccgcgcatgctccgtcaggcttctctgctaaccagggagactggttgctaggagaccatgctaatgaaggactcgctcactacccaaatggcaagcaatccggctttgtgccagaaacgaagcacttccgaggcagccattttggagtctggcaaaattcaggaccgaggccaaagccaggagagccaatcaatatacacaaagagggaggagaagagagagtgccaataaggacacaaggaaagtggtagcgtacccttgtcacttcccaaagtctcccagcgggataccggtgccctctgcccttaatcaagatggccgccttgggggggctctagcgcacagtggaatatggcggtgcttccggtcccgctgccctcagcgaagatggcggcagtggagaagcggcggcaagcggtaccaccgccggccggtttcacggacagcggccgccagtcggtatcccgggcggcgggggcggccgagagcgaggaggacttcctgcggcaggtcggcgtgacggaaatgctacgtgcggccctgctgaaggtgctggaggcgcggcccgaggagccgatcgccttcctggctcactacttcgagaacatgggcctgcgctcgcctgtaaacggcggcgccggggagcccccgggccagctcctgctgcagcagcagcgcctgggccgcgcgctatggcaccttcgcctggcccaccactcccagaggtgcgcagtgggccggcttgggcgggtggggcagcgatggacttcaactcccagcatgccgcgcgcggctccctacccgcagcgccggcgcaggggcccggggcttgctgggagttgtagtgcgcgatgccttcttgggtgggatggatcggacaaggtgggctggagggtccgggcttcggtccggcgctaggcagcgcgctgcatgcggcgcgagtccttctggccggcttcgccttctgtgatgcctttttgcaggtgctgagtttccccttgcagttcatgatttt

SEQ ID NO: 66638 - DNA, 3976 bp, Homo sapiens
agccaggtcagaagtcaggtggggtcacagtgatgcccggaatcagctggggtcaagactcaggtgggctgggcgcggtggctcatgcctataatcccagcatttgggaggccgacgcagacggatccctttattagtccaaactgcatcctccccttcctttcaaaacctaacaacacacttgaggtcaggggttcgagaccagcctggccaacatggtgaaaccccatctctacttaaaatacaaaattagccggacgtggtggcgggcacctgtaatctcagctactcgggaggctgaggcggacactagcttgaacccgggaggcggaggttgcagtgagattgtgccactgcactccagcctgggccacagaacgagactctgtctcatttaaaaaaaaaaaaaaaaaaaagactcgggtaggacaaaggtcaggctgggaggagggcacagccaggctcgggctcagcttggggtgggggctccgtggggctggcgcctctcccgggtcaggtgctgagccgatgctggccggcgtaggcctctttcccagtttctctggggggcaggagcaccttgccaacctctgatggctccagcgcctgcactcgcctcacaccacatggtgacttcaacggggaccagggaagccctcgcccctcccacccctcagagccctccccgacctcgcccacttctcagagctcccgctgtcgggggaaccgaggcagcgccgcgcctggaagccaggtctgcggatcccgcctcgctcccgccccttcctcccttccgcgtggccagcgcgaccctaggacagacttcgcgcccgtcccctgcacagacggggaaacggagacggggacgcggggtcgcgccggatggaccggccctgcccctccggtcccggtcaggaccccgcgccgcgccccgttcaccgcccgcggccccgccccgcgccggcacgtcacaaaacaaccccaaagccgggggaccgggccggtgacggcgcagagcagccctgcccgcctccttgcgcacagcgtccgcggtgctggtcgagcagggggcgacggcggcggcctcggggatcggaagagcccggggctgcgcgctcgaaccctccctcccggcggaggcgctcggcgccgtaggcgggaccggggccgggactccacctcccggcgtcccctgcggccgggcgcgcaggcgcaagtcggacctggccgcggagcgcaggcgcagtcggggccaggcggtgcgcgcaggcgcagcggggggcggggcgcgcgggcccggccaaggcaagcgccggtggggcggcggcgccagagctgctggagcgctcggggtccccgggcggcggcggcggcgcagaggaggaggcaggcggcggccccggtggctcccccccggacggtgcgcggcccggcccgtctcgcgaactcgcggtggtcgcgcggccccgcgctgctccgaccccgggcccctccgccgccgccatggctcggccgctagtgcccagctcgcagaaggcgctgctgctggagctcaaggggctgcaggaagagccggtcgagggattccgcgtgacactggtggacgagggcgatctatacaactgggaggtggccatcttcgggccccccaacacctactacgagggcggctacttcaaggtgagcgcggcgacccccgcccgggtcccggagcccacgagcgacctcgggcgccgggaaccagctccctgccccgcggtcctagcgctgttgctgggcgggccccgaagcctcctggcttgggctcgtttcccttctatggccacgttcccccacccagctctgcccggccccctcctcggaccgtctcggggaccttcagcctctgctgcagtcctcgaaaatccccagttcccttcaaggcatcgtccggtcccctgttaggctcttggcccccggaggggtggccgggggccctccctgtagcatctgggcgtggggctcttgcccacctcctccttggcgggggctggaccccggctgcctccccctccgcccctgcgagaaagagggagcggagcccaggccgcgccggcctttcagctgccctccccgccctccccggaggagacaaagaggcccccccagaccccgtagctgctattgttggggagctgggcccgtgagcgggggagcgaggccagcctgggggtggctggcgcggccactcgctcagtctccaacaaaggcccggatgagccttggcagccaggacccgcctggaaagcggccacccttgccagtagcagccggccaggcgccctgggctccatcccctgctttatgtaacctgcgccctcgggaaggccgaagtaggggcgtgcctcccacctgctccctgcagctctctccaggcctcccggctcgggcccgcgtcccggaccccgacctcagaagctccgggctcgctcatcccagctggtcttggcctttctcagagtccactgaacaggtggcttcttgggacccaaaccccgagttctgggccgtttcttctgccctctggcggtttaattccaagcagtttctggatgtttttgttgttgttgggagcggggaggctgtttctgtctcatgtgaaaaggactcaggccaaaaccagggcagttttcttgatctcacgatccagacgtgacctttgacttcttttagcgttcagggacctcgttcttggggccagagggacaaagcgaggggccctgtgtgagcggtggggaacgagcaccctgtccaggaatctccccctcccaccgtcacttcctgccaagagcctggacacgacacgacactgcagggcccggcccgctctgccccggccagctgcgggcgtggggccgagggaccgatgcctcccgcacgatatgtgtctgctctccgagctaattagtgtctgaaccgcacccgctcagcggctgtgagggcagcagcctggtctgctgggggcgattcctgagcagagagtgggacgcccgtgggttctgcatctggaatcctgcgtccccacacagggaacagagtttgggtctcgaggttgccaaatggttttagcagctcctccgccagccccttctgtctgcttgggggagcagctggctgaggagccgcagccccacctcgaagccaggcctgtgaggcggctgctgttctggaaggaggggatgggggtttctggctgctgtgcccaccagaccggttgccagggattgtgggcagagcttcctgggccagcattaggggataatccggttttccggatttcccagggagggggcctctagacatctgccacagggtcagtcctcagaagccagtgttgagacgggggtgctgccacccacgaggactctcccttcccgctgtgcctgggagggagttgggggagcgtggaaatacagaacctgctgagtgcccagggccgctgctgcccagccactgcctgcagctgctgttccttcaggagccaaagtgagccctggggcaggggccgccagagagagccctccacagccgacttgctgtctgcccttggcagggcgctttccttttctgagcctgggtttgctccggggaaaagacattcttagaggtgcccaaaataagaggctcattgggacttggtggggtttggtacagatgaggccttggctgttgtcaaggattgccgcctgaaacccagcaccaggcttggggggcctgaagtcttggggaaccgcaggacagttctgagactgaagttccagccttgctctgtggccgcggccaagtcacttgccttacggggcaccagtgagttccctgtcaaacagaggacaccccccaagacaccccgcgtgccctccctgtccaggaggggcccgtccacgatccaagacccccaaagtgccctgcctgtccgggaggggcctcgcccacaatc

SEQ ID NO: 66639 - DNA, 1445 bp, Homo sapiens
agtgccctccctgtccagacctcgcccacgatccaagaccccctgagtgccctccctgtccaggcttccaccacgatcgctctgggggtgctgctctcgtgccttggagtgctgagtgccaccaggacccctgacccagacaacctctgtgtctggcactggggcccagcaggaaaacagtgaggcttccttgtttacctgctgtggcccaggagggccgtgggtggcatcacgccccaggctgcaggccagacagctctgtcacctggcacgtggcttcaggcctccctctgtggccgtccttgccagcagatctggacctccagggcctgggtgaccacagggggcgatgctgacagggaaggagtcctgccaggtttctgtgacctatgggtctgcctgcctgaccccccaagaccggacacctgagggcagacggccatactgactcatcccctcccacggcctgggccagggcaggtgtcacaagtgtttgctaactgagcaatcatctgtgctaaccctccccacaccctggctgccaaggccctggaggtgcagccctggtcctgggcttcagctccatccaaggggagcctggagcccctgccagtccattctgtctgctggtgggtgcccctggcctgggtcccatatgcctgacctgggctgccacgggcctggagccacgcgggcagccagtgcccacgttccccagcagttgtgctgggccgggtcccggccacctggactgtgtaggagctgggatcagctcgggtgactcagaaaaggcttcaggcagccttctggggacttgaccccaggcctgtgagagtccctgccttgggcaggatacggtgtccctcacacacaccctcaggcaccagcactgggagtgggatggccttgggcaccttgtgagctggggcaggtcttggggctgggctggactgagccacctgccttctgcccctgcaggcgcgcctcaagttccccatcgactacccatactctccaccagcctttcggttcctgaccaagatgtggcaccctaacatctacgaggtgagcgcggcccccacgggcctcaagtcctcatcctccgggacccagggtgctgggagcctcacgtcctcatccttccgggacccggggcgctgggagcctcacgtcctcgtcctccgggacccggggcgctgggagcctcacgtcctcgtccttccgggacccgaggcgctgggagcctcatgtcctcgtccttccgggacccggggcgctgggagcctcacgtcctcgtcctccacgtcctcatcctccgggacctggggcactgggagcccgtgctgacctctgacctgttctgacctgtcttcttcttgtgcagacgggggacgtgtgtatctccatcctccacccgccggtggacgacccccagagcggggagc

SEQ ID NO: 66640 - DNA, 558 bp, Homo sapiens
cccgtctctactaaaaatacaatgttagccgggcgtggtggcgcatgcctgtaatcccagctactggggaggctgaggcaggagaatcgcttgaacccgggaggcggaggttgcagtgagccaagattgcgccactgcactccagcctgggcgacaagagcaaaaaactccatctcaaaaaaacaaacaaaaaaatgctcagaggcaagggttgagcttcctctccagcctcctccagaggtcacagggcaccgccccaccccacccaccccacccactgggtcctggggtgactccaactggacagagatcagtggaggccaggccaggctggtgtttggtgagctggagccacgccccggggagagagctaatctctgagcccggacgtgcctcatcagtggttccctcctgctgtgctgagatgtccccaccccagccccggtgagtgactggggacttagagacacagaaccagccaccagcaggaggctgacaccctgtgtgggacacgcagtgccctggaagcctccacccctccgtctgtgttttcgtggt

SEQ ID NO: 66641 - DNA, 3053 bp, Homo sapiens
caacacacacacacacaaaagatatggcgcgtctcattcattcacaagttcctcttcaaaggtttggctcgttcagcgccctcgttcttcgtttcctacttccaaggccaacctgacttcctcaccctctgggcctccccgtctgagtctcagtaaacaagtttcccgccggtcctgatctgcagagatggcacctgccacccactctgcacatccccctcccgtcgccacgggctcttcccgccagtgtagccacattcctgcccctttccagttagcccttcgcgttcggcttagtctgcggtcctcttgcattgcgactccgagtttaacttccaacacacactttcaacctccaagagacgcccccacctgtgtcgccccaatagcgacttttctcaccgtggtcgccgcggaacttcaagggtccttcctacccgcgttgctgagagtctgggtttacgcgtcacctcgggcgggacccgatcctccgctcctgaggcccccacaatgaagcagtcggacgcgtctccccaagaaaggtaaccgccagcctctcctgaaacagaatgggatccaaatgggatatttgggggcggcgagtcggtcccgcaaagagaaaccagcacttagaaaatttctcagcgagaccactttacttgtacggaagggggctgcctgcgtgggatgcaatctccagagcacacgggacaaaggaagggagcttctgttcctctgtcctttccctgttggctggggttggacgcccacaatctaagctgatcccggttggctaaaacttaaaacttttttaaaatagggtaaacgcgccacctgcgaggaaagaagaagggggtaaggttgattgacaactttagacctggaagttgagtttctgaagaggaacttacttgtcccaaccaaatggtgcacaggacgtttatactaagaaattattcattttctgagatccagattcaagtgccctttaagtatttttatttgggcggaggaggtcacttcctcccacctaatttattaatacgttcatatatatatatatatatgtacatttttaaaggcagagatgtgcgtctcgccatgttgccgcgtctggtctcgagctcccgggctcaagcgatcttcccgcctcgacctcccaaggctctgggagtacagacgtgagccacagcggccggcccgtgtttaactcagataaaatctgggtaacacactttcaacgcttcaaccccctcgggcgcaccgctctgcgctcattgcaactttgaaagcaggaaggaagaaatgcgcaggctccagccgcgtccccgcaggccccactcccgtttcctagcaacgccgggtcacgtgcgccgccgcccggattccgtagcgtgagcctgccggagccggcgcgtacatgcgagcgtgtgcgcgcgtgcgcaggcggggcgaccggcgtccccggcgctcgccccgcccccgagatgacgccgtgcgtgcgcgcgcccggtccgcgcctccgccgctttttatagcggccgcgggcggcggcggcagcggttggaggttgtaggaccggcgaggaataggaatcatggcggctgcgctgttcgtgctgctgggattcgcgctgctgggcacccacggagcctccggggctggtgaggagcgggtagggggcgggggtgcggtcctgcaggggccgggaatggaggccgcggtgccgacccgaagccgacgggagcctggggcctcggcgcggggcggcctggggtgcgaaaggccggccccgggggcttcccgcgccagcatggagcttgggggtgaagtcccagggtttgaggggggactagaggttcctcccggcgcggcctgccgggctcccccgggcgctccggcctcgagcccggcctctgtgtgtgggcgtgaagctccctgcttggaggcgggagccagggggtcctggccaggccggtcttggtcaggggaggtgggcgtcttgcttttcggtcacctggggttgggggtgacctgcttcctgggtgagggcgtctgcgaaggcggttggaggtggcccgcccgccggtcccatcggccaggagaagggagacccaaagcctgggtgagcgtcccctttggcctggagccaggggtcaggggctggttggtgcctgcccaacccgtcctgctggggctggactccgcaggacctggggaaagcggcctgggcgtggaatctggagacgggtccaccctgcctgcgagtgttagggtcagagaccctcccctgagactctctggggcccccgcaagggcccgtgcggcctggagcgatcatcttggcgctcccttctggaaaaggggcttttgtcctccaagagcacatggaggctctgagtgggtcagccctccggatcgggaagggattaccgttcttcacgggatttagccctggcgtcttgcctagggcgtgcacctgcccccgggtgttctcccagactcttaagacctcgcaggctccctcgaggggccctgcgtggaagggaaggcggaatctccctctgattctgcctggattcagcacccagaatgaggtggtctctgaacgcccctcctcctttacaggcgaggaaacagccctgtgggaagtcgaggttccaaggtcacagtgagggggccctggccacccgattcagcgcaggaaatagtgagaaagtcgtttttagccgactctgacccgcattcggtttccagtgctgtcttaggagggccgtgtgttgagggtgggcaaacgtggtttggagagcgcatttgggaaatggattgaggtgtgtttttccgggagaaaagcatgacatcctttcttgcttcatagaaaatttcttcctttgttgagacccccatttggttctgggttaaagatttatagtgaggccgggcgtggtggctcacacctgtaatcccagcactttgggaggctgaggcgggtggatcacctgaggtcaggagttcaagaccagcctggccaacatggtgaaaccccatctcta

SEQ ID NO: 66642 - DNA, 753 bp, Homo sapiens
tgggtgggttcccagagaagctaggaatcagatgggaagatgggaaggcagtgtgtttccgtgttgggcaaatccagcgttttcatgccacggaagccaagaaagggctcacggcctccggcctcacagggctacgcaaagggggagttgaataaacacggtgacgggccccgggcggcagctgctcccggcactgatcctgctgggccagcggtggacttgcagggcccacatccggagctgcccactggtcctcgtgctgcacagccttggaggatctgaggctggctcagggtccctggcagcaactgccctgctaggtgggggctgctgggttccacagctgggccctccctgccggctgccaccaggcggcgctgcacgcccacgctgagtggggcaggccctggagcccctctgcccgggcagcctgacggcccctcctcctcggctgagaccgcagagtcccaggcatcacccactgaaagtgtgctcagtgacctgtgaatagggatgccacgtctgcgtgcagacattgattaggcgcctgtggtatacctggagctggagggtgtgcgtggacaacaggcagaaaggtccagtgggatggaggctgccaacaggacgatggggaaggggcgcgttggggacatcgccgggcacgcggcccaggtgggcccctggctcaggtctccccccacctccctgcctgggctctgtccatctttctgccgcaccctcagccccaggtgt

SEQ ID NO: 66643 - DNA, 1593 bp, Homo sapiens
taaaggttctcccgcctctcccttcccggctgcctaatggacgcagacaggatgtgggacagaagcaccggcgggaagcaagcacagggaagctcccacctccctcccacaccaccagccaggccaggacgagggcctgccaccgctggagcctgggctgtccctcccaagtttcgcagtcatccagtctccattaggcgcctaccccccagagccaagccaggacagctgagtcagttcagggttcacatcctggctctgcacatgtggccttggcggcggggccggggggggggtctctccagacataatcttgggcctcacctatgtccctggaaagtgggagcacctggtggggttctggggagggggaattacgagagctccaggaaggagcctgctcagcaaggacagggcccatgagcggtgcaagagatgtttcagcaacgccgtctgggcgtgtcctgggacccgagaggtggagaccgccctcagcctgtctcagaatctgagcctttgccttttctcccggcagcagggagcggactctcctctcccgggccgccgtgggggtcgcgctcaccctccagcagctccacgtggccccagtccttcctgcggtcttggtcttgctcctgggggctggcggacgagctcctcctggggccgcagacgccaccggcggtccctgcgggaaagacgagagcggctgagcggggccgggcgtgtgggcgggggcctccataaaggcagaagccgaagggtcgaagggcaaaggagccctaaacgcagcggaaactctcggagcacgggcttaagttggaaagaaactaagacagcgaaggtggaagggccccgccgcggcgaacacgggcgcggaaccgccgagagagggttcctcgcactcgaggtgcagcaggtcaaaggttaagagccctaaacaccacacctggggtcaggaggctgcataagaaaccacgagtcaaaggtcagactgcacggaggagcctcagtcgaaaagcgggcaagggcgagtggaaagcggggccgggtcggtgggctgcgcacgcccaggtgcaaagaggcaaaggtcaaagcgccaaaggccccggccgcgcggggaggagcccacgccgtggcccccgggctgcctggccgtctccctttgtgttaccttctttgccggggagtcccgggcggccgcaaggccgtagggctcgtttgagccccgccgctccgcggccccagcaaagtgccgacattacgcacgccgctccaggccaccccaccggcccgcgcctgcgcatgcgcccgcgccgcctgccgggagttgtggtttcatggtcgacggaggctgcgaagggaaaccccagccggaagtagactcccaggatgcagcggaggcgcgaaggcatgcgccggtggacgctctgattggttcctcctgctgtttttaaagggagggggcgggacagagctgttgccgtggcaactgggaggcactctcaggctgttttcccgaggacctcaaatccggactttttttctgtttttctttcttttttggttttgttttggacgcgttgtggccca

SEQ ID NO: 66644 - DNA, 5131 bp, Homo sapiens
tattgctggtgcccgatcacaacgccaggctccatgttcacagggtgctgcagggagcccgttccggagaacccagctgtgcagagccgctccagggtgctggccggacgcttgagaggcaggggcaggctgtcactgtcacggtatctggcacaaccgcagacacacagagcaagcagcggccagagacagacccaggccgtcttctgaagactcgggccaggccgccgcagggaccaggagaagacagggtgggccggggggcagctggggagacttcccgcctggccccatcagtgacactggccgtagcagccctcacttcctggtggctccccgcccacgccggctcttccccgccaccgtgggcggcagggcccagcacccccaccgtcctctcaccgccacttggggacactgcggaggttgcaggcgttcgggggtggggggtcggcaggcagagctggaaccaccctaggaaccacccagagacggggaggtcaggggcaaggacggcacgcagggccacctccctgcgcccgcctggttcctgggggctcagtgccctcagcagctctcgcccacaccctacagtcacagctccagtcagtgcctcctcagcaggctcgagtctgggtctgcgcagccgcctgtggcctgagctccagctggcctgtctggttcctgccgccacacgccccactctggctgacgctccctttgctgctcagacacccagacaccctcgtcatcgccttttttttttttttttggaaggagtcttgctctgtcacccaggctggactgcagtggcacaatctcggctcactgcaacctccgccttccaggttcaagcaattctcccgcctcagcctcctaagtcactgggactacaggtgcctgccaccacgcctggccaatcttttgtatttttagtagggatggggttttaccatgttagccaggctggtctcgaactcctgacctcaggtgatccgtccacctcagcctcccaaagcgatgggaccacaggcgtgagccaccgcgctcggcctcatcacagcctttcatgggggcaactgctgcccctgtgccgtcgtcgcctgagcccccgaccgcaagtgtggctccccgctcaggacaccctcacgagtcaccaggagagcggccaggtgccggccactctgcacacacgtgcccaccagatgccacggggagcgaatcgcatcactaaacccacttggcaggtgaggagactgaggccaaggctgcccagcagagaatgacccagctgcgcggggcctcagcctgatcccagagcccaggacagcaaaggaggcccggaacggcccagctgcctgggagaagccctcgtgggcaggcacacagcccatggcagccagtcccccctgcgtcagaggcaggcaggagcttcccgacagccagcccaggtgtctcagcagcagcagtgccgcccctgactcagccgccgggcaagctccccagcggcagagacgccccgtttcgagggcactggttgtggctggggactttccccattgccagatacggagcagccgtccctccccagaacaaacgccaggtgtgcccatttcccagcataaaaaattcgtttttgagacagcgtcttgcttgtcacccaggctggagtgcactggcaccatcacggctcaccgcagcctccacctcccaggctcaagcgctcctcccaccacctcagcccccgccagtagctgggactccaggagtgcaacaacacaccccactaattgttttagtcttctgtagagacagggtcctgccacgtacggagaagttctgacactgccatgctgtctacgggcgccttgttgcgtcctgctccaaaggcacaagcagatgcccttgggatcacccgcggggtggacacgggcaggcccccgcagccctctctgcagttatttgctcttaaggaatctaccaacgtccatgattaaatatttgtcaatcactgttccatgctggctccctggccagcctgtaaattctgtgagggcaaagaccacagcggcctgtcaccacagagttcctttcactacaggaaggccctccccaggcccagtgacagtcggaggaggtcaaggtcctccgtgtccaaggccacggggcgaggaagtggctccaccacaccaggatccagtcctgtgcgggctctaggagcagctaaatgtgcagccgagtcaaggcagtgtcggccccccacagccaccactccaggcttcccaggggcttcccaggcctgtcccagggctcaaggggctgcaaggggctgccctgcaactcacccaggctggcgggctgtcaggcaaccagcctctcctgccacggccagtggggacagaaagctggaagaggcaagagcgagacccctgggagacagaggagtaaggcaaggctcagtctcagctccccaaccttcgccccacacccgagatttcactttatttgttcctcctgctggggaggggaagccctgtggcttcagtagagaggaaaccacacctctctctttccactcctgggcctggccccgctctcccgccatgccccaactctagcactcgctcctcctctgtgacccagagacaggcggcttctcctgactccctccagccccttcctgggtctctactcccggggaactgcactgcttctggggggcttggacttctcttacgggtcaaagcgtagcaacagccgggcggctacgtacacagcacagtaaatcctcaatgcctgcagcctcttcccctgggcacagggtggggagtccagacccctccacctcctgcggctgctcccctcaagctggccaagcggctcccgactgagccggctctgccactttcccgctgagccaccacgcgcctcagtttccccatctataaagcacgggtggctcgactaaatcaccactttgcacgtcagcctggcgaagggcaacacgggttaaaaatgcagaccaccgccgggcacggtggctcacacctgtaatcccagcgttttgggaggctgagccagaagaatcgcttgagcccaggagttcaagaccagcctgggcaacacagggagaccccattcctaaaaataatattagaaatgcagactgctgagcgcattccacacctactgactccgaaaccctggaaaaggggcctggaaatagcaccttcaacgagcgctgctcccacctcccccaaggtgacatcaggtccgcgtgggaaacactgccctaaacgagcaggaagtagcactcggcacgcccaggcccagggtcctcttcggtgaggggcggctgtaaacacctggaggaagggtgggctgcgcagccaagccccgggaggggaggaacgcaggctctgctcacaaagccccgccggcgggccgcggtcggaccccgggacagtgcctggggcgttccgggcctgggcctgcctccaaggcggcggccagggctccacgaggcgagcctgcagcgaggcgccggcgcccccaaccacgcgctcggcgggggtcccctggcgttattctcggggtccgagccccgccaggcccagcccctgccccgcgccgcgccaccgggcaataccctctctctgctcgccgggcctcagtttctccgtttgcaaaaccaggctcaccgggcttagggatcccacctgggatcctcgcggcctctcgggtcgggaacgccgcggatgtggggtcacccggccgcgatcccgctgcgccgctccggccaggccctgcctcccgcccgggcctcagtctcccgcatgtacaggacggggttcgcgcgcgcaccgcccgggctccccgcggattcagcctgggccggcgctgccccgagcctcagttttcccgtcgtggtcagctcgcgcaagaggcgggcgcaagcgacccccaccccggccccggccttgcctcaggcctgcggcgcagaccctgccgcccgccgccccggcccgggcctcaccggcaggcgcgggacgatctccacggagcagcagtggcagaagtaccgtccgggatgcggcgacgcctcggccatggccgccgccacctactccgcgccgcccgccccccgcgcggcacccgccgccggccgtttgctgctccctcgccggccgacgcgcccgcgcacgctcacgcacggcacgcacggcacgcggggcggagcgggggcgcgggagcggcgaaagctgcgtactcggcgggcagcggcccgggcgacggtggccgctgagagacaaactaggcccggccgttgggcggggctccaagcgggggcggggcttccggcgggggcggggccaaagcaggcggcggaagagacgagaagcggggcgtgcgcggggcggggccgaggccctcctcccctcccgaagctgcccaggccttcgtgtccctcagtgcttccctacctcatcgccgtctcccctcacggtacttcagcccactgtccccaccgttcctggggctcgccaggcgccctctcccccgcccgctgcccggtgcagcgctctcccgacgcccgcgtggctttcttccaggtctttgctcaaatgtcagcttacaaggtcttctctgctgccctcctgctccgtggcactgattccctcccgatgcactgtcaggtcagctgcgcagcaaagggatttttggacccgcagcagcgcctgacacacagcaggcattccctcagcgctgcggaatacaggcagacccggggctcagggcgctgtctgggcctcactgggacccgtggggtcagacagaggctgaggtctgtgggttgtggccttgtttccaagatgctccacgggctgacggcccaggcgcctctcgggtgcggagaaggcaggaaacctaacccctgcttccaaatttaatcagtagaaacggtatcatcacccagcacaggccaggatcatttctgaggttagttctggcccaatcatgcatgcatttcttttttctttttttttttgagacggagtctcactctgtcacccaggctggggtgcaatggcccgatctcggctcactgcaacctccgcctgccgagggt

SEQ ID NO: 66645 - DNA, 8088 bp, Homo sapiens
ggccacgaggagccacggtgggtgtctgagccagggagaagtgttatggcagctggggtaggaagtgggccgcaggggccaggctgcgggctggaagtcctaggatgagcctcgggcctggatagggtggggagaggggcagagccgggagaggggaggtcatcactggggtctcaggaggaggcggcgctctggaaagggtcagtgacctgttagaggtcaccctgcacagagcctctgggttagggaagacagagccgggagcaggaggccactggcagctggcctcggtttccccggagagggccggaacccacgccagccagacaatgaccctttgattcgcacagcccaggccggagtggccaagccacggcggggtcaggtcttggccaaggtcacactgtccagcccccgcacatcctcagtgagaacacagggtcccatccctgccccactccccaatcccgggagagtcccgggggaatgccagaggccaaggccaggtcgagacggcggggtgtcccccgtcagtgagaacacagggtcctgtgcctgccccactccccaagccggggagattcccgggggaaatgccagaggccaaggccaggtcgagacggcggggtgtcccccctcagtgagaacacagggtcccgtccctgccctgctccccaagccggggagattcccgggggaaatgccagaggccaaggccaggtcgagacggcggggtgtcccccctcagtgagaatacagggtcccgtccctgccctgctccccaagccggggagattcccgggggaaatgccagaggccaaggccaggtcaagacggcggggtgtcccccctcagtgccactaaggcagaacttggcccctggccactggctgctgggggacacaggctgggcagctaaggtggaggaaagggtacaggtgtgtcttctgtgggcacagatctcactcaggccagagaaggggctgtgccgtggggctgctggacacgtccgtttccacctgcggggtgggcaatgccggcacagcgagtggccagacacaggcatgcccagcagacacccaaccgctctccaccacctcaaccttctgtattttcctgaaagcatttaccactccttgaagttatagattaatttgtctctgcattttgttgtccaaaccaggagctcggtgagggtgtgatggggtctgccttggtcaccgtggcaccccagcaccccgcagggtccctctggccaaaagagatgttcactgatgccctagaagcaggaacagaggggctcccctgcgctcgccaagggcgcctgacaaatctggaggcccccatgacagaatcagctccagagtaggaaatgtgtctggctgcacgaaagccccctcgggcgcagcgcctccaggcccacgcagatgtcgctgtcatacattgttggaaacgcctctgctggaaacagtgtttgctgaatcttggagggagaggaaaaaacctagtaaacattcttgttgaggtgatctgggggaatgtctgcaaaggcttggagggctgatggggcagagctgcccaggggcccaggacaaaggccaggcgtgcgcgcgcacacacacacacacacacacacacacacgcagtggcctccctgggggccgtggctgggcgaggcctgctgttgtccgagatgctggaaggagctgtgtctctgggtctgtcccggccgcaccccgttctgtcccacacccaaccactccccacccacaggccggctccagcggccaggtggacgggtgcgcggcccgcgctgtgagcagggaaccatatccagctgaggttttgggtgtgtggggcgggtcgggaacaaggaggccgggttggggggctcagaccacacttggaccatgaaagtgaccacatgcaaatcacagaaacgggatgcagggatccacagacgtgctcctcttgggtccccgttacctcaccgccacccctgaaactgaagacccccaaacccactttaattcctggagacggcccctcgatccacccaaaaggctgccaccacctcgaacccacacccctgtcccggttccgccctgggtccagccacatctccccaaatgcattctctggctccggaaggggacccgggcgctcgcccccaactgccccccgcagcggccgggcccggcgcctgcccaccccgcgcgggacacggcctcgcccccgccactcccgcgccgcgccccgccccgcgccccgccccgcccgcggcccgcgggacctttatagggagcgccggccgcgcgctgggaagtcggtgccgctgccgtctctgcgttcgccatgcgtcccggggcgccagggccactctggcctctgccctggggggccctggcttgggccgtgggcttcgtgagctccatgggctcggggaaccccgcgcccggtgagtggggcggccagaggggcgggcggggcgggccacccacgtggggctgcgcggaatgcggccggggggacgtcggggggcgcggcggcggcggcgggggcgagggcggtgtccggcgcaagctggagccgggaaggtctgaaggagggtcaccaagaggtcagcagagcagaggtttctaatcacaatgaccgctgacatttattgagcgcttagtgtctacctctcccctccctgaacctgtgccatcccgatagtgccggagctctcttcatctccgtcttccagatggggaaactgaggctcagggtcacacagcctgtagcaggcaaagccagggttctagccgcgaccgtccgggtcggtcctggtgccgagaggtagtgctgggtgtcgggagccaggccctccagctggggctgagagctttcccgggtcctgggtagacggggcatggagtctcacacctgggacttgccgggaggtgccaggcaggagacggccccactcctggcctcagtttcccctcctatgatgggtgccaaggtgctgcgttccacaagctggtccctggcagtgtctgtgaaccagcaagcgctctgggatgggggctgtggccgttcctgcccccagggacgggggaagaaatggggggctctctggctccccaccccccatccctgcagccccaccccaccccagccctgcgccaaagggagagcagagccccctccccgaaggccacgtccctggggagacagtgagctcatgcaaggggaatgttcccaagttggagtgagtaagaggcgggccaggcggtgggggggctgccaggcgcggggctccgcgtgccctcgccctcgggtgctgtctagacagagggcagaggcgggagaagcggctccagggcctgctgaccctgacatgcccagtgcctggtgtttggtggtgtttgaggggttgggcagggtgccagcccctggcctgggggcttggagggtacgggaagggacctcctggggtgggtgggggttggtggtgaggctgtgggggggggcacgtggagctcagaggggaggagacatttccagggttctggagccagggtggggacacccatgtggttttctgccccttcttcctgggtgggggtagatcattccgtgcgtaactactcagcaccacctgcatgcatctgtgggcgggccagaagctgggtgtcaggagtggcccaggagagcaccccgttccccggcccgcaggtggtgtttgctggctccagcagggccaggaggccacctgcagcctggtgctccagactgatgtcacccgggccgagtgctgtgcctccggcaacattgacaccgcctggtccaacctcacccacccggggaacaagatcaacctcctcggcttcttgggccttgtccactgccttccctgcaaaggtgagacctcaggccagaagcagggcagacgtctcagctcaggaccagccacaaacagtcatggtggtcgagggccgaacgtccagggactgagcccgtcacaggggtatgtaggaggctgcagggggatcccagcctcagagagggactggggggacttcccggttcccaggctccagcctcttgcagctcaggactcaggaagagaccacgtggctccagcctttgctggggctgagctctctgcctgggtggctcttcccacctggtcgataaatgtctggcttgcacctagctcctgggaaggtgggtttgccattctggcctgtgaccccaaatgtccacaccagggaccttcactgcagactccagggtctgcggtggggttacagctgcatgtttaacaagcatttgcctcgggaccctgttttgagaggatgcctcccacatcagactaggggctcttggttggcgagtggcacagaacgaatgaataagattctccgcactggaggatgatggttttttttttttttttttttttttttcctgagatggagcctcgctctgtcacccaggctggagtgcagtggtgcgattttggctcactgcaacttcggcctccgaggttcaggtgattctctttcctcggcctccccaggggctgggactgcaggcgcgcgccaccacacctggctaatttttatgtttttggtagagacagggtttcaccacattggccaggctggtctcaaactcctgacctcaagtgatctgccagccttggcctcccaaagtgctgggattacaggcgtgagccaccatgcctggcctgttggggcacatcttgaaggaggtgggcattagagctggggtgttgggggatgtctaggagtttgccagatggggccggtatgggagagtggatcaggagagaacatggcttgaggttaggtcctggtgggtggggtcaggcagaggagccaaggggaggctgaagctgagggctgcagacccgaaggccaggctgaggaactctgctggcctctgagatgtgattaatcccagatcagcctggctgggtggtcctgaactcactgccacatacccctgctccctccagacccccctctggcttctgggagaaggacagtcttcaaaaagtgcctggcctgggcatgagacggcccaggaccccccacccccaacctcatctggccctggggacggaactcaggcccccttccgttctcgctcgcataaaagccaccctggccgagcatttccagatgtgcctgtgagccgctgtgccggggccgcccaggtgcggcccacatgccctgcaagggctgcgtggcgggcgctggccatcccctaaggagtgccgcactgccttggaagtggggctccctcgtcagccccactttacacacagagaaactgaggctggcacataaactcaacagctgtgttcagaggccctaccagacccccagataacagaaagggggttggtcatctgggtcctggctgcagctttcaaactgaggtgcttgggcccctgcactcatagctgcgacccggcctcagtttccccatctgtaaaatgatgacttgggaagatgcgataagcctaggaggcgatgagcattcacattgaaagcgggggcggggaccccagagagagcttccctagcaggacctcaatatccctgtctgagcagcggggctgcggggcagctcctggttcagaggcctagggctgtggggggccccctcccctggaatcgctccccaggccaggagggccgtccagcgccccgccctccccgacgcctcctgggggaaggtcctggcagccccagactcgcgcctggcaagggcggaacaccccaggctgacgcagctggggcccctccggccttcccagaagagcgcgtgcatcgggagcagacgtcagccagctgcaaggaggagcggcccggggctgcgtagctccgctggaccccgattccgggcagagacccccccccgccccggcccgcgcgcaccgagcccagcccccgccccccagcgcaggcgcagcgcggacctcggccccaccggtcccgcgcccggaccctgagccctgcccctgggaacccgagggccccgactccgactgaccctgacctgggacggcgcccccgcctccgccctgcagaaggggcgcagggaggggccccgaggccttcgcgcggccccacgcccgggaccctcccgcgcccggccccacgcgcgtgtcctctgtccgcagattcgtgcgacggcgtggagtgcggcccgggcaaggcgtgccgcatgctggggggccgcccgcgctgcgagtgcgcgcccgactgctcggggctcccggcgcggctgcaggtctgcggctcagacggcgccacctaccgcgacgagtgcgagctgcgcgccgcgcgctgccgcggccacccggacctgagcgtcatgtaccggggccgctgccgcagtacgtgggggcgtggtctgtggaggggcggggcgggacctaccggacctgcgcgtcatgtatcgaggctgctgccgcagtaggcgggggcggggcctggggcgggaccacccggacctgagcgtgacgtatcggggctgctaccgcaatgcgtgagggccaggcctgcgggggcggggcctgctggaggggcggggcctgctggaggggcggggccgctgccgcagtgcgtaggggcggggcctccagcccaggacaggtcacatgggtggcggtggggcctgagtaagggcgtctttatacttccgagggagtatcacggggtagggtcttttgtagggttgggatttggaaaatagtgggcctctgggggctcacactgggcaagaggtatgtggcatggtcagagcgggagcgtgactcagagaggggcttgtgggtgtaaccagaggggcatgatggaaccaggggggtgagactgggtcatgtaaggggcggggctcttggctggggcgtggttcctgggtggagatgggcggggatttgtgggtggagtttgggtgggcggccccgcagtcgcggaggggcggggctttgggtagcataaggggcaggagctcacgaaagaggtgtggctcctgggtacaatgggaagggcagggcttgtgggtggagcctgaggggtggaatggagaggggggctcacggggggcgggggggtgcttgtgtctcctaccagagggttttcgcatcttgggggttaagggtgggtcttggggccaagagccctgcggggttctcagcgagatgtcccctgaacttcccctggcacccggcctgcagagtcctgtgagcacgtggtgtgcccgcggccacagtcgtgcgtcgtggaccagacgggcagcgcccactgcgtggtgtgtcgagcggcgccctgccctgtgccctccagccccggccaggagctttgcggcaacaacaacgtcacctacatctcctcgtgccacatgcgccaggccacctgcttcctgggccgctccatcggcgtgcgccacgcgggcagctgcgcaggtgcagacgcagggcgggggcacaggcctgtcctgggggccggagaaccccctgccctgcgccctcaatgctcttatcgacccttgcaggcacccctgaggagccgccaggtggtgagtctgcagaagaggaagagaacttcgtgtgagcctgcaggacaggcctgggcctggtgcccgaggccccccatcatcccctgttatttattgccacagcagagtctaatttatatgccacggacactccttagagcccggattcggaccacttggggatcccagaacctccctgacgatatcctggaaggactgaggaagggaggcctgggggccggctggtgggtgggatagacctgcgttccggacactgagcgcctgatttagggcccttctctaggatgccccagcccctaccctaagacctattgccggggaggattccacacttccgctcctttggggataaacctattaattattgctactatcaagagggctgggcattctctgctggtaattcctgaagaggcatgactgcttttctcagccccaagcctctagtctgggtgtgtacggagggtctagcctgggtgtgta

SEQ ID NO: 66646 - DNA, 1040 bp, Homo sapiens
cttgtgcctgtaatctcagctacttgggaggctgaggcaggagaagcgcttgaacccaggagccggaggttgcagtgagtcgagattgtgccactgtgctccagcctgggcaacagagcgagagttcgaatcaaaacaaacaaaaaaagccacaggcggccacacatagaccgtcactgacctcctggagcttctcttctcagggaaaggaacttccagactcagaaaactggggcaggaaacatccaggccagtttttccagcccaccggatctcaggcagcttccaggaggattgcctgaactcgctgaaattgcccaattccctcctgggcacatggttttcagatgatgaacacacaccctgcaccggggctgaggcctcaccctggcgtttgaatcctgggccccgggtttagtccacaggaggagaagccacactggctgctgggagggaatgggaagcgggcagccgccgtggaaaacatggatcagtgcttcagaaagccagacagcggcgccgtctaaccccaccgtgcggctccgaggaatccaccccagataaccgaacacagcggctctcaataaacatgttcacagcagcatgagccacgggagccaggggtggacggaaacagtggcacgagccacaggagccaggcgtggaaggaaacagtggcacgagttacgagagccaagcgtggaaggaaacagcagcatgattcacgggagccaggcatggacggagtccacaggagccaggcgtggaaggaaacagtggcacgattcacgggagccaggcgtggatggaaacggagaggagcagagagcaaggctctgacgccagccacagcgcagatgcaccctgaggatgtagggctcagacggatgcccgacacgaaaggccacacagcgtgtgatcccatttccatgaaatgtccagggccaggcgtggtggctcacgcctgtgatcccagcactttgggaggccgagccggcggatcacgaggtcaggagatcgagaccatcctggctaacatg

SEQ ID NO: 66647 - DNA, 1550 bp, Homo sapiens
caaagtcgcacaggagagtcacgtccaccccctgggccaccggacagtcgccacagaccaggcagctgaatccccgctctacagacaaccccatcaaggctggggcagtgagacgctctgaaggccacaggcccccaggatcccaccccgtccgtctctccctccctgctgtccctctgtgagccacaccctgcggctgtcagcggcagtgatgggggctgcaggggctggggacagagggggatgagtttccagccaggcggcctgggagggtagctttaatccccacctcggttttgtcttagaagcagttgcatggctgtgctccaggccgtccagggttcaggctgagccaccgtctaggtctagacgtcagtgtccatcaggacctggcgtgccctgcaagcagacatgtgctccttcgacctccgtcaaccctggagatgaagcagggaaggggccctggctggaggcttggacatccatccggaggggcggagtggcctcgaggcggtgtgtgagtccccggggaagatgcaggggacgctgggtggccggtggcacgagtgaggctcggggtcccgcagccccccgtggtgtgggtgcctgagttggggggtcctcgaggaggacaagggagggaactgaagggggccaggacacccggtagcttggctgccgggggctctgtgatatgctaagtccctcctgctcaccactaaacccaagaggaaaaggaattcctggcagagtccaatttaaagtcaacaaacaaacaatgtgggaaggagagaaggaatcccaggaatgtgggcgaggtcctcctcccgccggggccaccctggacccggcgagaaatcgaaggtcccccaaggacccacgtccaggagccaacagcctctctgtgcaaaccagacaaccctgcaggaactgtgcttgaagaaaccgtggaaactgcccccaaccctcccgtctctatttctttctctgttttattatctcattcttggctgtgaggtaaacaggagaaaatgagaaggtggttctggaggacccgaccgaatttgctttcgtgacagggtcaagcgccctttcctcgccggccgcagccctcaccaaaggggatttgggggcctccggacaggggtcctgaaggttttgaattgttcaatctctgggggtacaggaacccctgcaggaggtttcaaaggcaagagtttcgcagagagaaaaaaaccatgaactttgcaggttggtggcggaatctggtgatttaagaaaacgtgtttaagcctcggccgggccgcgcctgggctgtctgcggtgctcttccggaattctctacaatatctggaagtgaccaagaaaattccagaacccggaggctgcgccgtggagataaacatgggcacctgggtatgtttgtttttattgttaggacctattttatcacaagcaaaaaaaaggaagctgcccagaaatccaggggtgatggatagaaggcgatggggcctgcagtggcccaacggattctagaattttcctctagg

SEQ ID NO: 66648 - DNA, 567 bp, Homo sapiens
acaatcacttgaacccgggaagcagaggttgcagtgaggtgagatcgtgcccctgggcgacagagggagaatccatctcaaaaaaaaaaaaaaaaaatttccggatggggtctcgccacgttgcccaggctggtcttgaactcctgagctcaagtgattctctcacctcgacatcccaggttggtggattacaggcgtgagccacagtgcctggccctggcttttcttcttgtttgtcaggctctgctgttgtgataggaaggcttgaggacttcaaaggggcggctggtgtgcggggttggggacgatggcagggacaggagggaggtgctgttggcatgtgtggaatgtggcattggcgctggatggacgggtctgtgtgcgctgactgcgtgtccgatgccagggcctgtgttccccctgcacgtccccaggaaggaactgctggaccagcagaatgaggggccaacgccaggggcagcactgcccggccacagaggactgtggccccacagatgacaccctcagctaccagctcctgcatctggaagatgaccaggaggagga

SEQ ID NO: 66649 - DNA, 3594 bp, Homo sapiens
aagtccaggcctcagtttccccagctgtaagcgggcggccgcccactgtacaaggtccaggcctcagtttccccagctgtaggtgagaggccgcggactgtacaaggtccaggcctcagtttccccagctgtaggcgggcggccaaggactgcaaggtccaggcctcagtttccccacctgtaggcgggcggccgcggactgtacaaggtccaggcctcagtttccccagctgtaggtgagaggccgcggactgtacaaggtccaggcctcagtttccccagctgtaggcgggcggccgcctactgtataaggtccaggcctcagtttccccagctgtaggcgggcggccgcggactgtacaaggtccaggcctcagttttcccagctgtaggcagccggccgcggactgtgcggggcccggacctcagtttccctatctccgcagtcgggattcgctgttccggggcgaacaaagaacggtcgggggtgaccccggatcatggcgcgcccgcagtatctgtggccactgtggaaacagccctggcgtgtccgggacgcgacgcggcctttccctccccgcgcgatcacccagatgtgagcgctcagtttgaatcggactttttggccatgtgcccacaaccaacatggagccctgagggtttcctgcccgactccaagatggcgatgcgactccctttgccctcacggcccaggcgggcgggtcctgcccacttgcaagatggcggcagcctgggcaaagcacgcttcccgccgcctgactcgccacgtacccactctcaagatggcgtctcccgcaaagccacgcgccagctgactggctcagacgccgtcacgtgatcccattttctccccctcccccgactacacaagccgtttccgccttcggccttgaggaataaccgcctcccccaataggcgcctgcgatttctctgggtcccgcccccgggcggccttctggccagtgggaggtgctggcgggggcccgcggggctctccccgccccctggctgcagcgggagccaatgggcagcgcgcgcgggggacgtgtgcgggcgtctccgccattttgtgagtctataactcggagccgttgggtcggttcctgctattccggcgcctccactccgtcccccgcgggtctgctctgtgtgccatggacgggtgagtcgcacgtcgccccgcgccccaccgccctccccgcgccgcagccctgcccccgccgccgcgccggcctccccggggccgatctcgccccctctcgggcgggagggggcggcgggctctccccttcctctccgcgtggcgggcgcgggtgcggggcgggtcaggggcttcccgggggtctggccgcgtccccatcccccgtccggcccgcttccggcccccgcgcgccccgtccctagcgcacgcggcctcccgcgcccctccccctccgcgcgcgtccccgcacttcgcctttgccccgcctcggcggcgcgcggcccttcccgcttcccgtccggccctcgcgcgcccggatggcccttcccgcctcccgtccgctcccctcgtgcgcctgcgtagcccgtcgcgcgtccccgttggccccagcgcgcgtgcgcggccgccatcgggggcgcgcgcctttcccgccgcccggactctgcccccggcgcagccccggaagcgcaggcggggctggggcggccgccgggagggaaagctggcgccggggcctcgccgcgggcccgagtctctgcgctccccgccctacccctgccccccgtgcgccccgggccgcggccaaggggtttcggtgatctcgggagagaagcggccgccccgagggtctgtcctccgccccggggccggaggggcctctccagggacccccgcgggcgccgtcatggggaggggccttcccggctctcgggccggggcagcctttccgggcggctttgctgggcgggcttcccttgggagaggtgggagccccctccagaaaggccgtgtcccgccgagcgcttcctgcgcgaggccctccctgggaataggaagcgggagaggctggagatgtttcgcattctttccgttttcctgagaagtttttcttgggttcagtcacttttaaaagtctgttaaacgtggtccgtgcagtctgtggtgtcagaagaggcgcagccctagagtgggtctggaccccttagcatgcgtgcgggcaggtgggtcctgcagacggcgagacgagggctccccgctctcggacccagcaccgcgggctcgggggccgcgcactcgcctcccggagtgaggcaggaggcccggaggctgcccttccgacggacgctccgagtcacttagggcctcgccgggagttgcagtggccgggagaagccgtggggagctcactgttgggtcaggacctggccggggctgaagggagggcctcggacagtccggctttctatccaccttccccccggggtgtcccgaggagggagagtcgggtcgggcggggctcgggttgatcagtaactgaggctgtgttctggtcggtctgttaatttttattgacggtttccacggccgcctcctgctctcctcggtggatcgggctccactctgctgagaggcaccctcttgggggcccacccctacccgggtggaagctctggcccaggcctgtgagtttgccagtttcagcctctccgaggcgtttccaacttactggaaagcacacagcagcccttgaaccctctcagcggcatctagcattcctcggggcttccgatgggggtgtctttgtcttggaacgtgtggggcctggtccagaggtggggcctggggtcctgctgggagggaggggcgccaaaggacaatggtggccccttttcaagttgcagtcaagtggacggctcacttccctgcccttctgagctttctctagcggggcctcgtgcagccagagggagccctgcggaggtggcagctgcagggacctacgggctctcctggcccggggacagctgggtgctcctgctgctgagtggccaccaggctaacgttgtctcctttctttctctctacagcattgtcccagatatagccgttggtacaaaggtaggcacttctcactttgcttctccgtgacgctcctctgaccttgtgccgaccccgggggccaccccccagcgctgttgcgttggctagagggcgcttttccattcctaaggggcactacccttggtctggaatctggagttgggcggtagggtttgaaccccgggctccagtgcccgtgagttttgggggcttgggtttgctggccgcccctcaggtctggaatctgagctgctcttcggttcttgctgtcagcagcgagggctctgtgtgccccaggcctgcctttggaacttctgcctctagaggctggaatcgtgccgttcagtgggaaacctcatgttgtggctgcctgggagactcttggttttgataggaaaagagccacctggctgtggaggggacctggatagaatccagcctatttgagtggctaggatgggcatttactggttgattttgacgttaagtt

SEQ ID NO: 66650 - DNA, 1856 bp, Homo sapiens
aggcggggctgagtgtgttggggaacacctgtggccgaggcgggggctgagtgtcacagggaacagagggggcacctcctcgaggctttctaagcgcctggcatccagacgggctgtttcgcttcgcaaaggcaaaagcccagggagcctggaatcacccgcaaccaggttctcctcaaaccctaaccccggctccctacttcttcagggcctgccccagacccccaaggctccgccacaagcctctaaaagtctttcagccccacccctgaccccctttgcttcccacacttcatttcaccccttgagcccacggcctcaccctaaattctcaggcttcaccgtaggggtcccatgtactctccaggtccagcctccaacgcccttagctctccaggcccaacccctaaaactccccagtccccagactccaccccggggaccccacgtactctccaggcccttcccctattgcccccaaatacgaggcttcatcccagggaccccatagcctcttcaggccccgcccctataacccccaatctccagggtccatcccagggaccccctaccctctccagacccctataactccgcagtccccagtctccaccctagggaccctattccctctccaggccccgcaccgataaccccgcagtctccaggccctgcctctacagccccccagtccccaggctccaccccggcgaccccaaacccactccaggccccgcccccgaagtcccaccaagcgccttcagcctcgccccaaactctccttaggccccgccccgaacccagccccgcgggcctcaggcctcccccaggtttccgccgcaaaccctgagccccgagccccgcgccccgcgccccgcgccccgcgccccgcgccccgcgccccgcgccccgcgccccaggccgcctacccagcagcctttgctcccggccacgcccccgaccccgcaggccccgccacggctgcgccgcgttccctcgggtccgtggacacggtcaggggtccgtccgccctcgccgggcccccgcagccccgcactcacctggtcggcccgtgcgccaagctcagcgggcgtccgcggtgcgatcttccctagcgcctcgggtctggcgccgccatcttcctcggtaacaaccagtcgcctgaggcgtggggccgcctcccaaagacttctgggagggcggtgcggctcaggctctgccccgcctccggggctatttgcatacgaccatttccagtaattcccagcagccaccgtagctatatttggtagaacaacgagcactttctcaactccagtcaataactacgttagttgcattacacattgggctaatataaatagaggttaaatctctaggtcatttaagagaagtcggcctatgtgtacagacatttgttccaggggctttaaatagctggtggtggaactcaatattcgtgctcgcttcggcagcacatatactaaaattggaacgatacagagaagattagcatggcccctgcgcaaggatgacacgcaaattcgtgaagcgttccatatttttttttttttttccattttccctcccagaaacggaatcttgctctgttgcccaggctggaatgcaatggcgcgatcttagcttgttgcaacctccgcctcccgggttgaagcgattctcctgcctcagcctcccgagtagctgggattataaacatgcgccaccacgcccggctaatttttgtattttggtagagacggggtttcgccatgttggccagggtggtctctatctactgacctcctgatccgcccgcctcggcctcccagagtactgggattacaggtgtgagc

SEQ ID NO: 66651 - DNA, 1621 bp, Homo sapiens
ggacccgggagtgggggcgaagaccagagagtaggggcacggaccagggagttggggggtggaaccgaggagttggggggctgacccgaggagttgcggggcggacccaggaatgggggcaagaaccaggggagtgggggggtggagcagggagtggggggacggacccaggagtgggggcgtggatcagggcagtgggggggcgcggacccgggagtggggggagtcggacccgggaagtgggggcgcggaccggagagtgggggcacggaccgaggagttggggggcggacccggagagtgagggggtggacccgggaatggaggcgcggaccagtgcagtgggggggcggaccggggagtggggcgcggaccggggattagggggcggaccggggagtagggggcggaacaggtaaatggggacgtggatccgggtcccctcccccagcgagcccccggagcgccaggagggtgtccccgctgagtaacaatgaagaccccccacccagcctgggggtccacagcgggcgagaagggaaggcaggacaggctgaagccccggaagatgagcaacgggagcgaggggaacgaagggaacgaggggagggaagggaaaggaggggaggggaggcggggagaggatctcaggggagggagcccagcccgcccccggcgcccgccgcgccccgcccgcccgcgctcacagcagccgccgcccgcccggggtgccctccgccgcctccgggccgcactcggggttctccagcgcgaccatggctcgcacgctgtcgccgccgccgccgcccggcagggccttcaccgggccgggcaggaagtgacgggcgcccggaggcgggcaggggcggggcctggggctgcgcggcggggcgggggcgcccacctcccggctgccgggaacgaacgcggaaacccaggcgcgcggggaggggatccagcccctggggggacgaacggggaaaccgaggcgcgcggggcggggatccagccaacagggaacgaacggggaaaccgaggcaggcggggccgggatccagccatcagggaacgaacggggaaaccgaggcaggcggggccgggatccagcccctggggggacgaacggggagactgaggcgggaggcggggccggccacgatccctacacccagaaatctagctccgggaaggagggacacctaggcgaggggtcgaaaactcaaccacaaccctgcgtcccgatccgggctgcggactgagccaggaatccagcccagggaggcgaggagacacggacagggaaactaaggcctgagcatcgacgagggaggggacgttcttcttggaggcagaggatggcggaaattaaaactgcccgagccttccttccacctgcccctcccagccctggagcctcggctaggcaaccccttcccctgcttagcctcagtttactcttctctaaaattaggcctggtggccaacgtggtggctcacgcctgtaatcccagcactttgggaagccaaggccagtggatcacttgagtccaggtgtctgagactagcttgggcaacatgatgaaaacccatctctaaaataaaaagaaagggccgggcgcgg

SEQ ID NO: 66652 - DNA, 3125 bp, Homo sapiens
tgatgatccgcccacctccgcctcccaaggtgttaagatgacaggcgtgagccaccgcgccggccccggttgcagttttgtggagggaggaggtgcaactaggtggaaggacagagagaaagttgcaatgccgtgtgctagtctagggaaaggggagggagacgactacaaccccgcccccaacactcaggaccggggacccgagcccgccagagaccctccacaagtgagggtcccccggggtggcccctgcccgccctccaggctcccctggggctcacgtccgggctggagcctgggcctctgcgcttagccccctggggtcgcttcccgcgcacacagctccctgcagagcacgcgtccccctcccgaccgccttccttgcaccccgctcggtgcctcagtttcctgctctgcgcagtggcgacaagaaggttgccaactacagagaggagtgagggctggagacgtgcagggacctccctggagggaggcgcggggcacgtggttgggcaagcgaccgctcagaccgtgtaagtcatcaccaccttcacgggggggtggtgggcagccgagctcccgacgctggtgacagccgggccgggcagggtcgtcctggtttcacaaaggggctccgggtcccagcgcgcacctccccacgcccgcgccgagcccccgtctgcagcccgtccctccccagagggaggccggcgggaccctggttccctccctccgacgccgcccgcccagctctgcaccgggtctttcaagcccatttctcagacttggaaacggcggctccggagagtgaagtcactctctcagggtctctccgtctaaggggcgaaggtgaaactccgagtccacgaggcccagcgtaggtgctccgtaagaagggaagagacttggtcccggatctggctccgatgcctccggccagcccgcccaggcggagccccagtcagtcccctcttcttcccccggggcgctcccgccccagcccctgcccccggcaccctctgcgcttggggccgcgtcgcgcactttgcccaccgtccctaggccgggggcggggcctcccgcggcgctgttccccttcccgtttattatttattatcctttaaaggggccgcgacctgaaaatttccgtccactctgcccggctccccagcgcccccgggctggttgcgcgtcgtcagaccgcgggaggggggcgagggggcgtgcggggaaaagtggggagccctggcgaggccctcccgcgcccgggccgcggcgctgaatcaccggccaggtatttgcatccgagagcgactcgtcccctggtgatttgtctgggggtgggggaggggcggggcgggggccggccgcgcgcggggcgcctcttaccaatcgggcggaggggtgtagacgcggacgcggctggcggctcggtgagtcggcgcgcggcacagccccgtgggtcgggggccgggagccagcggcgcgcaccggcggctggaagccaggcgggcccgggcaggccgaccccaggcgcggggcgcgcgccccactacgagccgccctgcgcggtaaggctggggagcgcgctggccgttcccagcgcgggttccggtgccggggtgggcgcagtgcgtcctggaagccaaagaagggggtccccaaagttgggcggagatgttggtgggggtcccggactgggaaggcggccctggcgggctggggttcggggagttttctctgcaccccgcttggagacttcactccccactggatcaatcgctcaggggcgagcaggggcgatcgggggtcgcgagtgcgcgcccccccctccccagcggaaggaaatggtctctgcgcgcgcgcggggggctgcaccccgatattttatttcatttttattctttctccccgaaatcagggatttattcgggagcccagagaggagggagggtagttcccggcgagcctccccagccgggctggtttatttataaagtgtccgccccagcgcagagaggggcccccgggggagacaccgcggcccccgggcgccggggtgggttgggcccgggcgcccggttcctcggcggggatacccaggaagagccccctgacccgtttcagggccccccagacacaaaagcgggcgcaggaagcgctgggagcgcgcgtttgtcaactccaacgctcggcgccggccccgggcggcgggttcaattatcttccgtttttaggcgctcgggctggaggggttcccccccccatgcaaatcggccgctttccaagaagcctttgaaatccggaccagggtttctgtcttcttatttcttctccttcttgagtttttttctcacttcctccaggcccccccaacccaggactttcttagccccctccccagctttctgccccgcccctccccctcctcttcccttcgtggagtgaggggcccctttcgccacccgcgggcccggggccttgcacaactctttaaataaccatgttttgcaaggcccgcgccgagcgggtgacctctctccggaggcctggggggaggagggtgtggcccaggatccctccgccccccacccctgcctggtccaacgaccacccagcgccccgtcccagcctctcccttggggctgtcataaaatgggggtgggggtcgaggacaaagggctcttggggggaggggtctgaagggggtgggcgtagctagtttagggttatggcggcgatgggggggcacccagccctgacctaggggggaatctgggatccccacctgccccctccaccggccccaacgtggaggtctgtcctgctcccctcccccacccggcgacccggaagggtcattaaacccagcagggctcggagcgggctggtggggggagtggcttcctttggcctcttccttctgtgcccccaaagagggggggctttgcttggagctcttccgtggggggggccttgtcttgaagttgtcccaggtgggggaggggcgacagacccgaccagaccctgagtcagaaatgccccctcagcactttcttgggttgggtgggtggggggtgacctccagcctggggatggggggctgggtgccgccctggtggcct

SEQ ID NO: 66653 - DNA, 1138 bp, Homo sapiens
tggacacacgccccgcccagacagccccggcctccaaggcccaaagccgatgggggagttttggggtgactggcccagaccaggcagggatgaggggccaggcgccctgaccccacagcccgcagcatgtcctgagcgaaggcaggaggcagaagccactgtctaccttgtctgggcgacaccgcgggtcagggttgtaggtgccatgtggggtttttctgcagcgggaagccgagatggggaaactgaggccagtgcagggaggggggtcactgtgtcaccggcagcctcaggtattcctggagatcctgccgccccgcacctgccccctgggtgtaccgggcagtgcagaggccctgaggtggactaaagctcggcttgtgtgtagggaccgggtgccgcctctgggtcttgcgggagacgggattggaactccgagaagatgagggcctagggatggtcgtgggcagcgggggtggggggaggcccccgccctgcagtcctgtgacttttttttctctagagaagggctttcacggtgttgcccaggttggtctcaaactcctgggctcaagtgatctgcctcactcagcttcccaaagtgctgggattacaggcctgagccacggtgcccagccagtcctgggatcttatcctgggctgttcgtggcaggtccagccgccgatgccgccgcccgcccagctggccagacacctgtgttcccagtgtcaacagtggcctgggcccaaccagcccagtcagtgttacctcccgcccggcccctactggggcccctgttgactctggcgcctgccccacccccttcctggcacgtggcaggcctggcccgctggccggccgcttggcaccgtctctgcctcttcctcccaggtcctggcagggctcggggctaacttccgcctgcaaatcctcgacagctgtgaaattctgctgtcggctgcaggtctggtgggtggccaggccgcggcggggggccgggcgcagcaggctcagggccacgggttctttccttggacacctggaaccttgctgcctggggcctggggacgtgcagttttggaggccagcacgtgtcgggcagtgattaggatctcagcctcctgatgtctgacgtag

SEQ ID NO: 66654 - DNA, 1660 bp, Homo sapiens
aagagtttgttagcgagccacagcagggcagggcctgcctctgggatcactgtgactggagcgtaatgtgtggggccagggtggccaactttttggcttccctgggctacattggaagaagaagaattgtcttggaccacatgtaaaatacagtaacactaatgatacctgatgagccaaaaaaaattgcaaaaaaactctcatcgtgcgctaagaaatgtacgcgtttgcactgggccgcatttacagccgtcctgggccgcgggtcagtcaagctctcggtgtagcaggaggggtgggcagagcttgagggcacttggcagggtttggagctgggagaaggaggctgggaggacccttctggagcctgttttggagacagaacggaggcacccttggtccaggcaggagtagaagaggccaacactgcagctgggcttctggggcctgagaagaaggagaaggaggagaattttcccagcacaggcgggtgctctaggcagatggtgcagctggggcctttgcccagaggtcaggcagcaggttccgagcacacagaggcagcggctgtgtttgagacagagtgtgtttgtcaagagagccccgagccaggccctcggccgccagccctggtgccggcgtcttcctgggcctccgggagccccggctgcacgtgagccgccgggagggctgtcgggaagccccctgggcacctggtcctccccaccggggcagcgcccgcctcatcaaagccactgtggctgctggcgccgggccagctgggccctggcgggcgaggggtgggtgggtgcccgccagcccctggcactgtgccccggcccgtgcccgtgccaggagcgtcgctgactcagccggaagagccttatctggcccctgcgccaccgcctggccgtcgggtcaccgccgcggggtcaccgccgccgcggcctggccccacgcccaccgccggcgtcccaccctggtggctgctgccaagcgccggccccgccccatgctttctaataacacacgcggcagcccgagggagcggtgcccgcaggcagagagtgtccccgcgtggtgcctgggcgggggaatgggcgtggtgagccgccgtggcgtgcgtgcgagtgtgcacgctggggctgtggccgggcggctcgtgggtcctgtctcgtgggaccctgcctgggagggaatcttgctccagacacagcatcttcggaccctccaaggcctctgcccaccgggcacctgctggattctgtgggtctcgtgtgtggggctgtgtgcacccagccagcggcacctcacgcgcccgcctgcgtgtccccagccagcaccacggtgttcgtttaggtctctgtgtgccgagtgacgtggcaaacttcccacgtccctgttttgcgtggacctgttggtgagtgtgtccagacgtgtgtctgccctgacgtcctttgtgaatgtctatgttggggtgatgatctcctgtgtgtgcatttttttaactataaagatggggtcttgccatcatgttgcccagcctggtctcaaactcctgggctcaagtgatcctcccgcctcggtctctgaaagtgctgggattacaggcgtgagctgctgtgccggactggtctcttgtgttttgtgtggatgtggc

SEQ ID NO: 66655 - DNA, 583 bp, Homo sapiens
accggggcagccaagccgactggggtctggctgggttcatcagtgcctgcaaactggcggtgctccataaatgtgcaggggatggagaatgagggccttacaccccgaggggaacgttcctgcctctgtgcctcagtttccccttcctggttacccccccttcacaacctccagctggcaccaacgagatccggccgctgggtggtctggagatgcccccaaagtgtggcttctgtcccctgctccaacacgattagtctgtcctcattccaggaaccaggctgggggcggggtgacctctgacctcacactgcagcctggcctggccacgtccccagggaggggaggaggggaggaaggcctggctcgggctgggccgcagcaggaggcctgtgagaaggtggagactgtagtccatcgacttcctgctgcccctgccctctcctgcctgtggcagcagcccacacctgcccggtctgctgggtgtcctggaacccgggaatttaaaaacttccaggctgggccaggcggtggctcatgcctgtaatcccagcaccctgggaggtcgaggaaggaggatggt

SEQ ID NO: 66656 - DNA, 719 bp, Homo sapiens
agagcaagactgtcgcaaaataaagaaagaaaataaaaatgaggttggaggaaactctggaggcacagcaggtccttggattggactccctccctccctcccaggataaaatgaaatccaggcctcgttcacacggccctgcacggcccggccccgctccgtggtcctgccccagggccttcgcacgggcctgccccgcacacggttctctgggggtcgctggctccccgctcaaacggcccctcctgccgaccaggcgggtccccggggccgccctccctctggcctgggctcggggtcggtggctcgcgcctgccacctggcggccagcggggctgcggcgccgcacgctctggcaccagcctcctgccccggccgtgccctccgccgggagccgcggaccaggagtcgcaccgcctccggggaccgcaccccgcatgcagcctccagcccctgcctcttgctgctcgagggcacacgacccaggtcagctgcaacccccgggcggaaatcccgacttttaaatgaatgctccctttttatccctttttaaggggttggcaactaattgcacattttaaatcatactgtttttaggccggacgttgtggctgaagcctgtaatcccagcggtttaagaggccaaggcctaagcccaggtgttggagaccagcctgagcaacacagtgagaccccccatctctactagatatatattt

SEQ ID NO: 66657 - DNA, 1784 bp, Homo sapiens
gcctgagccaaagcgcccggcctttttttttttttgaatgccgttttcagacatggtccgtgacgggcagccgtgacatgaagttagaccctgcttggctcggacagaactggcgacttgtttgacctacaccaagctatccgactaataatttagatgttgaggcccctaaagaggggtcaagggggaggcagatgtcgaccaataaggaaacactgggccgggcgcggtggctcacgcctgtaatcccagcactttggcaggccgagctgggaggatcacttgagctcaggagttcgaggccagcctgggcaggacagtgagaccctggctctacaaaactaaataaataaggaagcagtgaattccaatgtattcatcgccaactagccatgttgctgggtgtgcgctctctcttttaggcgcaatgtgtcatttaggcctgtgacgtcggaactttattatttgaacatttaaaaataaatgaatccaagagcttgagtcacttggccaaaaatgcccaggaggaaaaggccaagtcaggtaccccggctctagagctactaactgatcgccggagaccctgggccttggaagaagtcgcctccccagatctctaagcaggccgcgcgaccctcgagtctcaggtaagcgggaaatcccacttcacaagaaagcccctctctccgaggcacgggcgcatgcgcgggtcggccacccgctggggccgcggggccgccgctctggcccgcgtggggcagtcgtccgcgtctcgctcatgatgacgcacgtccggggcggtggggaaggcaagatggcggcgcccatggaggtggccgtgtgtacggactcggcggccccgatgtggagctgcatcgtgtgggaacttcactcgggcgccaacctgctcacctaccgcggcggccaggcgggaccccgcggcctggcgctgctcaatggcgagtatctgctggcggcgcagctgggcaagaattacatcagcgcctgggagctccagcggaaggtgcggcggtgcggtctcgctgctggggtcatggggcgcccgaggctgaagtcgggggatgggttggtgggggccgcgtgcacccttagtcggaattggcgtggggaggggaggtggtctccgttcgggcgctctgcgcatgcgcgggtctgggggctttggggagatacgtgcgacctgttaggccgctctgcgcacgcgcggggctcaggcctgagctgctatgggggcagtgggggaaaatgggagacgctccggggggtcccttggggcaattgcgcatgcacgagttcttggagcgcgaaatttgattaaaaggggcctatgagctctgtggatgttgtggttctggaggaaaagggagaaggaccaaggtctgggggagtctcccatgaaggggtggcgcaggaaactcatgtttattcctccaataaagcaacagatactcaccgtcgcccacagtttcccctctactcccaagcccaaatgcagccagtccctgaagctactcgcttcccccgtgtgcccgctgagatctcttgggactggctctgtgctccagcattgcctgatggagtctacacacaactcataaatttctcccattttattttagttttgagacagggtctcactctgtcgctgaggctggagtgcagtggtgcgatctcggctcactgcagcctctgcctctagggttcaagcgattctcgggcctcagcctcctgagtagctgcaactacaggcccgcaccaaccac

SEQ ID NO: 66658 - DNA, 2487 bp, Homo sapiens
ggcgaccatgccactctggggggctgcagggaggaaggtgggaaggatgatgggctgagctctggcctggggaggcacggatctggaggctggggggccttccgtgaagtggcagcaggctgggacccacacccaggtccgcaggacggccaaggtccagctccacttgccgagcccaaaaaagcagccagctcctgaccaacctgtgtcaggctgggaacttgcccacgatcgcagcctggcccgccagcatcggacccctctttgcaggctagatccaaaaagctcacggcgcaacttcagcagcccccaagccccggcgcggcggtgttctgatgcagaacgaaaacggccacgtccccatttcgccaggtggcccaggaccccggccagcttgttttctgaggggctgcagctgctactgagcccctcttgtcacccaagcaagactccttctcagagggagtcaggccgatgcctgtcctgcacggctgagacctctgccatctgaggagggcgggagggggacagagcccaagacgcggaggccggtgcctcataggggaggcacgggcgacagacccacaacctgagctcctgaagcaggaagggagtggggacccagcggaggaagaggccggggatggggtggtacgctgctgccggtgactttgccgctaaccctagcgaggtgacctcagctaagtcacattcccctgaggctcaggagcggggaacgcagctgaaaggctacaaggagggagagaggggagtggggagtcgacttccaggacaggggttggtccgagggagacctgcgtcaggctgggttctgggccagcacattgggaggggagagaggcctcggaactgagggtctcaggcggcacagtcaggggtcaaagggcgggaggtgctacctcgcaggccaggaccggactccaagcctgggtaggtggggacctgggaaaggcggtcgccggggacaggatgggccctggagggagctgacagtgaggtttccagagtagagaacagcggcttctagtgcagcgggatccggccttcccgggtggacgtccccgggcgggatggggtcacgagacggtgtccctggccaatcccagggtcagaggtcgcgagggagagccctaatcggtagggccgggtataggcctcagggtgcagggtggcgctcgctgtccccagcggggccaggggtcgcggtcggaggtagcagacttgggggtcgggacagccgctggggtcaagggtcgggggtcggggccgcggtcaccttgagcagcacgaagaactcgaagagacggcggaaggcgggcgggaagagccgcgaataggtgacagccatcttgaagaacagcgcgtggaagagccggtcgcgcacgttgatgagggggttggggttgagattgggggtgcgaggcccgcgcgcgggggccgggccgccgccgccgccgttgggcccgggccccggagctgcgggctccacgtgctccgacatgcctcccagcgtcgcgccctaacgacccgcaagtgtccgagggcgcctcccggccgccatcggccgccctcgcagccgccgctctcctcacggcctcccggccgccgccgccatcttccgctttctcgtccggctgcggcgctgctgacgctagcgagtcgccacgccgggcaagagcggcccccctgcgcccgcagagaacgctgggatgccagcggcgcccgcggaggcctcaccccctacctcggccgctccagggggcgggcctgcatctgggccacctcttttgcatattggcacccacaatccaccgcggctatgaggccagtataaggcggtaaaattacgataagatatgggattttacgtgatcgaagacatcaaagtaagcgtaagcacgaaagttgttctgcaacataccactgtaggaaattatgctaaatatgaaaccgaccataagttatcctaaccaaaagatgatttgattgaagggcttaaaataggtgtgacagtaacccttgagtcgtgctcgcttcggcagcacatatactaaaattggaacgatacagagaagattagcatggcccctgcgcaaggatgacacgcaaattcgtgaagcgttccatatttttgctgtagtctacagctcgtcacctcgtttggcttctcttgcccggatcctgccatgacgtcacagggccagtaacgtcatagtcttcccgtgtccatctcctgtggcgccactaaggttggcggtagaacaatctggcagtctctactcctgcgtggcgctgtgccacctgcccccgtagcttcgcgcagcaatgaataaataagtgctcttcaggggcacttactgagtgccggctgcgtacacaagaggatactatggtttttgggttttttggttgtttgtttgagatggattctcgctctgtcgcccaggctggagcgcagaagcgcga

SEQ ID NO: 66659 - DNA, 1652 bp, Homo sapiens
actcggatttttatttttatttatttatttatttttagagagaggctcttgctctgctgcccaggctggagcgtcatgttgtgatgataactcactgcagcttcgacctcttgggctcaacggatcctcccccttcggcctcagcctcccaagtagctagaactccaggtgcaagctaccgcacccagtaagaatcctattctcttttggactgacaaactcctactcatccaacaaagccccagctccaatggccccttctctgaggaacctgccctggttccctggtccacctcccagctagtagagttccctgggaaggggttagacgcctctaagtggcagagaggggccctcattcctgccccaaaggtagccttctcccctcccctttctggcagaagagaagtctgagatggagaaagagtgagagccgcccacgagctctgagcagagagcccgcaggagtgccacgtcccggcggcctcggcccctccctgcctcagtttcccgtggcatcaaagggggcgaggggcccctccaggcctctggtgacgggggtgctgtgcccaggcgggggtccgggggcgaccgagggggctcaggaagtccgcggccgcaggaattcggcgcctccaggccttataaggacatttgcgctccgggccaatcagcggcgggggcgtggcgcgcggagcccggcgcgtcccaaccccgcgccagcccggcggtcccgtcccgtcccgtcctgtgcggccccgtcccgccgcccgcccgccagccatgagctccacgcagttcaacaagggcccctcgtacgggctgtcggccgaggtcaagaaccgggtgagtgaggggcgccccttgtccccccgacagcgcggccgtcgcacgctccgaccggtgcaggagcccccaggcgcccccggcacctcccgggcagggagcttggagacccggggcggacgggcccttgttctccctgacgcctggtggggggatgtctgcgggcaccccctgaggctcccgcgaatcttggggagcacccaggtctgagatctgggggacgagtgacccattcccccccccaacatctaggggtagttgggtctgacttcgtcccctcgccatggccccaggacccccacgtgtgaagcccctggcgcccactcaaccttcgagaaggtccgttcaaggtccgacaacgctctgggggtctgggggggaccccagcaaccccgtcatctcctggccacacttctgcttttggggcctcttagctttgggaggggaaggggcatggccgagtggtttttgagaagtgttacccccccacaaacaggaatttcctggcctctgggacaccttgggggtgtcttggggggaggggcggtagccgctttgcacggtctttgtctcccatctgactaatttaaacggataacaaagaggttctctgaaggtggccctgagatatgtggggttttgcagcctcgaaagaagagctggggcccggcagggcgcgggggctcacgcccgtaatcccagcactttggggggcggagctgggtggatggcttgagcccagcgagttcgagaccagtctgggcaacatggcgaaaccccatctctataattaaaaacaagccagg

SEQ ID NO: 66660 - DNA, 2331 bp, Homo sapiens
acgctgacaggggagagggggcatggggtgcggaggaatgggctggggcgggcaggggccgcagctcacaaggaggctgcgctgacccagacggggcctcctgggccaggccaagaagctggaagtgcacccaacggccaggatgggggagccaagggacactagggcaaaggacatggggggctgggggtgagtggggaggcccttgtgactctcctcgttggcaggaagagagaaggggactgagagggaaactagaaagaagctgagcatgagaggggtcagagatcaacggcatcacccacagcaaggaaggggaggggagttttcctcccagactgggcagagagacaaatgctgggcaccaggcgagtgggggtgggtgctagcgaccggctcctcggcaggtgctctggtggcttcaccggaactcccccgggacccgctgctcacctggaaagaacacaaacatctggtcggtggggtcatcgttgtgggccaccagcacggtgaggtccgtgcgccgcggccgcccctcactcggcttgtccccagattgggctttgaactcctccagggtctggtcaagctcgtcctgggtcaccagatagccacggtcgtggcacagctgcagagagaaagaaccagctgaccccagggcagagagaggaaggcggccaaagctcgtgacccggaagtcagacctgcggctgctgcagaggacagaggtgaacagcaaacgggatgaacactcactgtgtgctccatgacagccaccccggcccccacagcctcacaccacaggatgggaccagtatgatcctgagaggctcccagagatgtccagccttgaccaagaccgtctgtccacccagcctcacagaaacctggcagggagcaaagccctccaaaccactttgcagagctaccctaaaggcagggacaaaggcggggcgcggaggctcacgcccgtgatcccagtacttagggaggctgaggcaggagggttgctggaggccagttcaaggatgcagtgagctatgattgcaccactgcactgcagcctgggcgacagaatgaaaccctatctcttaaaaaaaaaaaatgacagggaccgaaacagatgtgacttcaggctgacaatgtttgaggatcggagaaagaagaatcaggctgcggggggcttcgctgaggacaagggcaaagggtgggaagcaagacaaagcaaaagctctcaaacggccccaatggctgaggcaataccctgaaccgcaggtcctcaggcctgtgcccggcttccaaaccggactcgacccagtggcctccatctgccccagaccccaaggcacgggttccgagctccacgtccccatcgaaagccccagctcgcccgctgcttcccaaccaccaactctgccagcctcggatgctgaagactccatggggttcaggacgcaaggacaaatagcgacgctgaatcacagagaagggcagagtctgggggcgccccccgtccccattcgcggcttcctcctcctctcgccgccacgcgcgccgcaccagcccaagccgcccacccacccctaagcaccgcacccagacgtctcgaaaccccctcccttccccgctgccggctcaggtcgggtccagcgcctggtatccccggcgacctctgggcctcccgtatcggcccggcccttcatcgctgctgctccgacgagagtacgaggagacgccgtgctcgaccccacctcgggcccctacacccgccgcccgcgcccccgcccccaacaccaggcgcggctcacctgcatgatggtcttgcggattttccagagccggtacgtctcctcctcgtcgtccatggcagcctccgccgccgccgccgctcgcaccccttctccgcgcgagaacccgcgcggactgcgcctgcgccgaatccgaatcaggccccctccgcctaaccccgccccgcgctggtctgtcgtcggcgaatgcctgaatgcagcaacgtctcggatcggcagcgccaagggcagcccgagccttacgagagcggcagttggctgagcgagtctctcgcctccgtagttctcgtgtgtctttggccgcacagcctctcgggagttgtagtttccgttcaactcccaccttggagcaacagtttagaatcccacgaggcgggggcgaagtgtgagcggggaaactgaggcctggatggggtcaaggggcagctcggctcctagggatggtctgggagcctagtgggaactctataaatatttgtgcatcaaactgtacagggtttcctccattggctcctggccaggt

SEQ ID NO: 66661 - DNA, 2907 bp, Homo sapiens
ctcactgcagcctccgcctcctgggtttaaaggattctcctgccttggcctcccgagtagctgggattacaggcgtgagccaccacacctggctaatttttttgtatttttggtagagatggggtttcaccatgttagccaggctggtcttgaacttctgacctcagatcatctgcttgcctcggccttccgaagtgctgagattacaggcgtgagccaccgcacccggccaggaagaccccatttctacaaaaaaatttaaaaattagctgggcgtggtgggcgcacctgtagtcccagttactcgggaggctgaggtgggaagatctaggatcgcctgagcccagcggttgaggctgcagtgagctgtgattgcgccactgcactctagcctgggcgacagagcaagacactgtctccaaacaaacagaaaacaaacaaaaaccagaagaggagagggaggaaacctggggttgcctggggatagctgtatcaggcagacagcacagccaggatagaggctctggggctgtgcctcacctggagtgttcctggcagggaaggggcaggagggggtcagagggcaaggtggggcaggtcccatgaagccttgctggtcagggtaaaatgtctggagctgctgtgttgggaaatgactgttgggagccagggcagaagcaagagaccagggagggagtgggaaggcaaacttgccacaggttggggtggctccaactacggtaggggcaagcacagagcggggagggtgccacagggcgagaaaaagagggagaaagggaacaaagctgtccctgtgagcagtgaaaagaggggtgggagggtggaggcgtgtaggtcgaggtgagctctggagttcagggcaaggtctgggggatggacgtgcaggcagggtggccacgtggtgaagattagagccgggagcctggaccaggtcctgggagcagagcagagtccaggagagtaagtccagccctgctggtgttcagaagcccggagaaggaggggaggcagcagcaggaggggagggaggctcagcacagacactggagcagcccctgagctgcagacctggctgtgtgatctcaggcaggttactcaacctctctgtgcgtcccctctcccctcccttgtaaaacagggacaagaacagcacccacttcgtagggtaattggctaataattgcaatgtacacagagtggcgcctgacaccagcactgcataagtgttccctaaataggataaagggcaggaggttgccaggtctcctggaaacctggtgaggaaggtgtctaggggcagagggaagggagtggctatgtgatgccaccgccaagtcagcctgaggactgagcagggattcgcctagcagacattgcttgtgactcagggaagggggccagtgcctggcaggacggatttgagggaggagaggaattggagatgtggggcagatacatggggcggggagggtcaggagacggacaggcctcaggagtggattttatgacacaagaaagggcatctggagtaaagaccaagcagtgacctgcaaatctgggggcaggggtggactgagaggctgagcccaagccaggggcggcctggatgataacagcaaagccagaggcccggaagtcaggccatgatccacacacagggcaggtgaaaatgtaagatggtgcagccgctatagaaagcagtctggtcggccaggcgcagtggctcacgcctgtaatccaagcgctctgggaggctgaggcaggcggatcaactgaggtcaggggttcgagaccagcctggccaacatagtgaaaccccgtctctactgaaaataccaaaattagccgagcatggtggtgcaggcctgtaatcccagctacttgggaggccgagggaggagaatcgcttgaacctgggaggtggaggttgcagtgagccgagatcgtgccactgcactccagcttgggcaaaaagagtgaaactccatctcaaaaaaaaaaaaacaacaaacagtctggtggatcctcaaactgttacacaaagagtcaccatatgactcagcaattccactcctaggcatacacccaagagaaatgaaaacatacgcccacacaaacacttgtacggctttacaaactcaaaaagagaaaacagcccatagccgggcatggtggcgcatgcctgtaatctcagctattcaggaggctgagaaaggagaattgcttgaacctgggaggcggaggttgcagtgacctgagattgcgccactgcactccagcctgggtaacagagtgagactctgtctcaaaaaaaaaaaccccagatgtccatccacagatgaataaataaacacaatgtgatccctccacacactggaatatttctgagccatgaaaaggaatgatgaggctctgacacaggccacaatgtggatgtagcctgaggacctcatgctcagtgagagaagccaggcacaaaagaacacgcagtgtgtgatcccatttccatgaaatgtccaggacaggccaatccacagagacaggaggggatgtgtgtgtgccaggtcctaggggaggagatggagagtgaaggctgatggggtctgggcttcctttggggacaatgaaaatactctgtgctgggtgcggtggctcacgcctgtaatcccagcactttgggaggcctaggcaggcggatcacctgaggtcgggagtttgagaccagcctgaccaacatggagaaaccctgtctctactaaaaatacaaaactaactgggtgtggtggcgcacgcctgtaatcccagctacttgggaggctgaggcaggagaatcgcttgaacctgggaggtggcagtgcagtgagctgagatcgtgccactgcactc

SEQ ID NO: 66662 - DNA, 4580 bp, Homo sapiens
gcccaggctggagtgcggtggtgcgatctcggctcactgcaagctccgcctaccgggttcacaccattctcctgcctcagcctcccgagtagtagctgggactacaggagccctcgaccacacctggctaattttttgtaattttagtagagacggggtttcaccgtgttagccaggatggtctcgatctcctgacctcgtgatctgcccgtctcagcctcccaaagtgctgggattacaggtgtgagccaccatgcctggccaaaaagatcttaaaaaagaaatgaagccacaggacagcccctccccagtccttcctggagccaggggctgctctagaaagatatgtggcaacacagcttcctgcagggacactcaagaacttccgccctcacagggctggagccttgagaggtccccgagactccatttccccgttcgtgaaatggggacactctgggaaaagctgtgaagcccccagcacaaatctctcccagagcctggggccccgttctcagatccgaggtcgcgaccccgtgttttccccacttctgactttatcacaattggcaggaagtcaggaatgggatcaagtctctccgcggagctgtgggtgctgagctgtttttctggcaaccctgaaataaactcccatttcagtgcacatgtttgcaacaaacttaaggaaaacaacaccggcaaaattgcgaacagctgagccttcgcaagggcaagaacagagtcaccagtgtggccctgtcacccggcactgccagggcgggaggaaatgggggggtttcctgagaagtcagacaatgggagttgactccaagaactcagcctctaggggctgggcgggagcaaagccatgtgaacagacttatgcaagaccaggattcggccagccctgctcagggatccttgcttcactgcctctgccaccaaaccatccatgacgcctctgtgctgcatctggcaggcctgagtcgggggcagtggcgggggcaggctcatagcaccccccaagtcaacccggccctgagtctgtctctgaagaaatactcagtgcagggtcagaaaaggttaagaccttgaggacaacatacaaatcccaagcacctaggcggggtagagtggctcacacctgtaatcccagcactttgggaggccgaggcaggcggatcacctgaggtcgggagttcgagaccagcctgaccaacatggtgaaagcccgtatctactaaaaacacaaaaattagctgggcgtggtagcacatgcctgtaatcccagctactcaggagactgaggcaggagaatcacttgaacccggaaagcggaggttgcagtgagctgcgatggagccactgcactccagcctgggtgacagaccaagactcctcaaaaaaaaaaaaaaaaatccaaacccctgcctgtacaggggtcaaagtccaatcacggtgactcagttcccaagtatgagatgagtgtttctgttgccacatgtccaagccacgaagtgaaaaacagagttggaagccaagatgtggggcagtatgggctcgggtgtgcccataccttgtaatgttagaagtgtaagaaaaccctccagacttgtgtttattttctgagcacataccgcgcgtccctgcgtgggcagctgcccctgggggtgggagcccaggaaactccaggttctcagttaagtggtaactgtcttgatgactctcaggtctcagtgcccacattatacaagcggctcagcaaccagacccaggatggggagtcactgaccccctgcgcccatggcaggggtgagggtagggacacccccataagatggagctgtgatgagaagcaaacccaactcagtttggtttcatttacattaaaaaggcaaatcccttggccggatgcggtggctcacacctgtaatcccagcactctgggaggcctaggcgggcagatcacctgaggtcaggagttcgagatcagcctggccaacatggtgaaaccccgtctctactaaaaatacaaaaaaattagctgggtgtggtggctcgctcgtgtaatcccagctactcaggaggctgagtcaggagaatcgcttgaacccgggggctgggtggaggttgcagtgagctgagatagcgccactgcactccagcctgggcaaaagagcaaaaaaactgtgtctcggaaaaaaaaaaaaaaaaaaggcaaatcccggccgagcctttggctcacgcatgtgatcccagcacttttgggaagctgaggctggaggatcacttgaggtcagaagtttgagaccagcctaggcaacatagcgagacccccatgtctacaaaacaataattagccaggaatggtggatgagcctgttgtcccagctactcgggaagcagagacgggaggttcgcttgagcctgggaggtcgaggctgcagtgtgccctgatcgtgccactgcacgttagcctgggcaacacagcaagaccccgtgtcttaaaaaaaaaaaggtaaataagagttggggacacttttctgcgagttggagaaaccaaaccccctcgacgagtcttaagtagtattctcaggttgtctggcctgcggccgcgctgctgtcaaccagccggataactgcgctgcctcccgacgcgccgccagccaggccacggcctcctagacacaagcgagcatgcgcagtcgccaacaacaagtccgcacgtccggtcccgcccccccttccccgccttcttcccactccggcctcccattggctgacgtcggcgcgagcgctcaacaccgacgcgtctgaccaatgagcgctctggagggcgtggccgtgggaaaggaggcgcggaaagccgacgcgcgtccattggtcggctggacgaggggaggagccgctggctcccagccccgccgcgatgagcctcggccgcctttgccgcctactgaagccggcgctgctctgtggggctctggccgcgcctggcctggccgggaccatggtgagctagcgccgcggccgttgccggcccggtgaccgttggggcgggcgcgcgatccctgcctccgctcgccggcgtggggaaccctcaggctccagtgaccttggtggggggcgtctgggggctccccctccccacccccggccgggcacggacgcgggtgaccgtactgcgacgcgctccgcggccctccaggccgttgtaggcgcgcgggctggggtcggggaaggggaaggggttgttccacgcgcgcgggtcgtggtcggggaaggggccgtccaggccgttgcaggcgcgcgtgccggggccggggtcgggggtccaggcttgcagggggcggggtccgggacggctggggcggagctggaccgttgagggccacggcggggcgtctccgggccgagcggggctgctgcgcccgagcggttgggggcgcggagggctggaaatcccggatcacgcgcccccgggcgccgccccgcccccgcaccttggcctagcgcggtggcgtcacagtcgcgcagtcctgactacggcctccgggccctttgtccccgctagcggcgctcggggtgggggagccaggaggggcgggagacgggcgggtatgggccgcgcgggcgcaggctcccccgggcgccgcaggcagcggtgccagagccggggcaggcggcggccgcgagcccctcggcggcggaaggccccagcgtgcaggcgcaggagggcgcggcgccggcggaagaagccctgtccccgcagcttgcgaccggagatccacgaatgtcccaagtcccaggacccggtgcgcgcggggcccccacaccggctaatgtggcacattttggggttggaaccctctcccggcctccgggtctccggtaaaaccggaccagaagtacaagggggcgtgtgcgtttaaggaggaggagcgttcaggtcttcagggccgcagggcctcggtgtccccgccaccgacccgctcccgatcccttcctgcctcagggtcccgggctcagcctcccgtccacgctccctgctcagcttcctttgccttgcagtgcgcgtcccgggacgactggcgctgtgcgcgctccatgcacgagttttccgccaaggacatcgacgggcacatggttaacctggacaagtaccggtgggcgctcgcctggggtggggcgcggggtcgggccctgggagggggccgtgttcttctgcgctgacgccgccgatcctcgcaggggcttcgtgtgcatcgtcaccaacgtggcctcccagtgaggcaagaccgaagtaaactacactcagctcgtcgacctgcacgcccgatacgctgagtgtggtttgcggatcctggccttcccgtgtaaccagttcgggaagcaggtgggctgctgcgtccccggggcccgcagaggcgggtgggtgggggtcggggtgggctccagcctggagagggcctgggagtgtgcagggggcccggactgagggggtgccagcccccgactcactcacacaccttggccgccacaggagccagggagtaacgaagagatcaaagagttcgccg

SEQ ID NO: 66663 - DNA, 1275 bp, Homo sapiens
ccagctgtgcacgggaggtgggggtgctgggaaagggagggcgggactgctggacccaggcgatgtgtgcctgtccaaggcctggtattatcagccagccggcgccacgaagtgaaaaagtgaagctgggcgggggcagggagtaggaggccgcagaaccaggcccaggggcttgtgtcctggccctgggcaccccaaggggtgcgttcaggcaacgatctaagcagaggcctgcgcaggccaggctgggggatctggggcttagagggatggggcaggccgtccacaggaggtcgtggcctcccgggccgagctggacagcacgctgctgccccagggctccccaaacgccccctcctcgcagggccgcggagacgcagagtgaccagcaggggccaccagagctgcacacagcctgcgtgaagccccacccactgcccatgccccgcccaccacactccagctgccacgtcccacccacctccgccacccgctgggggccgcccagctggtcgatgagctcgtccagggtgttgactggcagttcccggcccagccgccgcactttgtccagcagatcctgcttcagccgctccacccgctccaggaccccggggccatgcgggtctctctgcaggaggcacaggggtcctagggaggaggtggagggtcagggcaggacatgttggctgccttctagggcccacctaactcaaggctggcccctggagggcaaggacaaggggcccggggcaaccctgagggacggcagggtggcggggaagcccggcaccgtggcccaggactgcttttctgcacttgtctccctgagaccagctggggcgagactaagcctcctgtcgcggaccaaacactgtgacctcactgcctccacaggggtagggactgcccagccccaagccccagctctgcctctgaccagtggtataacccctgacctcccctctctgggcctcagtttcccccatctgtaaagtgggcaccatagcagcagctgggctcaggtgggctggactgagggctacaacctggggtgggtggtgaccgccaggaggccgggggagcctcaggctggaatcctgacccagaggtggctgctcagcctggactggaatcctgacccacaggtggctggccagcctgggcaagccctcaccccggtcgtcactggggagcccgactgcatcaacgatgacaacgtcgtcatccaccagggactcgggggaggagttgaagtcgctgtccaggccaggg

SEQ ID NO: 66664 - DNA, 1689 bp, Homo sapiens
aggaggctgcccgccggcgggggttcatgctgcgggtaatccctgtccatggcgggccccactgcaagcatcgggcggcaggcggggtggggtcctcggccgggcagcaggcggcgggactccaggacccggggccgccggggcgtctatctgggcttctcgctccgtggtggcggcggtggcggcagcatcatgatctgcagagggagacggggacgtcctgagagtccaacggtggtggagagtggtgctccccggccgcctctccctcgggcatgaccggtcccagcctgggctgcagctcctgctacctcctgggccggaaccaaaaggcgctccttcccctccccactcacccccacccgccatcagcagtgccacccaactcctttgtgctgcccacagcgcctttcctggcctccccggccccaactacaacgattaaggtgggcccgacagggctgcccaggtcacagggcagccgtaggaccaggcacccagactgtgagcagtggagctgcaggctgactcccccacatctggctttgtcagcagccggtgtgagactgtggagggagagtccaacccgggcccggcacccaggggagcccaggggacactggacccagccctgtccctcagaggcagcaggggctccacagtgaggtctcccaaggaggggggtcaggggccacgcagagctggaagagcacccagacctcgtttcaggctaatcacacaccagcatccccactgagaacgttcctgggctacagagccgagccccacaccatcagacgccagggacagctcccacgtgccccgcggcctctggcacacggccagacgcccgccaggctgagcccccaccaggccctacctggcgagtgcagggacccaggctggcccgtggtggcagggaaagctttccaggcgtccgcccagcatgctcactgccgagggcggcaggaaggggaggcggcggccactcccggccaagccctggagtgaagaaatctccgggacttccagtaattgccgtccagccacacgcaggcacttgtgcaatcccgtgggggagaggcacgtctctgcccggcgctccagagacagtggccgggcaacaggggctgggggtcgggactcctgtcccagagaccagatggaggtggtcaggcacagtgggggtcaccctgccaggccgtcccaactgtccgcggcctctgcctgctccctgcagtcaggacgctacaacccactgccaccagagctgggacccttggcagcccttccagctgcccacggggacctgcgacacccttgccagaacggccctttaggggaagggacaggcccgctgggatctggggtcttggccaatccttgtcaaagattctgggtcaggcaggatcaaagcctggctccaccttctgagttgaataacctcagacacccaagctcctccaagcctcggtatgttcctctgggagacaggttctctgggtagagcctgggaccccccgaccccggccccgtgtgctggtggccacaaacagctctgctgggcccaaggcagctgctgataccggggtccccatccaggggcccaccagtgctagggggtggcccaccccctgccttggggctcagcagcccctcccctgcagggactcccctcagctcctgtca

SEQ ID NO: 66665 - DNA, 1927 bp, Homo sapiens
gtggccagggtttctagatcatctggtttttcaagagaagccacaagtctgcgtttgagggtggcagcccctggtgttccaaagtcggcaagcaattcaagcatccacacccccaccccggggcagcgttgggtgcccagacctcagggccaccccgagagctcctgcatccacctgggggctcgcagctcccccaagctcctggcgggtagcagtcattccaggatctgataaaagcccccgaaaatgccccggtcagcccagccacacccgggcaacaccgacagccattctccaccagggccccagcgcccagctgagtgagacccacccggtagcttccggggctgggcccctgccccaccagtgaaaacattctggtcacagtgatgccgccctgagaagctcctcaccgtcccccgtggccttggaacccccctcacacccatgggttccaggcaccctggcggctgtctgtccccacgaagcctggccctctcacagcgtagggaggctgcggtcaccagcgtgggtcccgcgacccattccacccggcccctgggcaccggaagccaggcggcgagcgcagcagaccccagaggcagctttcctcagtttacctgacatgcaaaggaagacgcctcctcactccaggctggacgggcagccgacggcggtccggggccatggcgggcagggactttctccgtgaccctccctggctgcccctccccagcaagtgagtcagttccagaaacgtttactgcccgccaggcccgaaggctcaccggctccccctccccacgccccagcacccagggccttggccccaggagcccacagcggcagagactcccaggaaacgcgagtgagccgccttccggaacctggcgcacatcactttcaaaacgcagcggggcctggaaccaaggccaaggccgcctctttcggtttcacttggacgcttgttcttgctggggatggaggtcaatcacaaggctccgggaagcacgggcacgagtcacaaagcaggtcactgagacagcggcaccaggcccgccagtccgatctgctgaccccagccagggcccagcactcccatgccctgcactgcacgaggctgcccgggacagtgcctgcaggggagatgactcggcaatgactctctgggcccctcctcccaccccatcactcatggggttgtccagggcaagaggcccaggggaatccgcaggagagccagggcacagggcacgagtgcggccccaggctgaggcctccgtgggactgagcttcagggccacgctgccatgctgagctctcacggggcctccgcctggaccaccaggcaccctcaggctgactggcccctgtgtgccacccatgtggcccaaggcctgtccccctcatgccaagagccccgtagggccccttcgagtagaatgcagcattccctgcccctccgaagcagtgagtggttcaggggcagagctgggcctgggcgaggggcccccggggggtggggtgatgccatcactgttgccgtcctacgggttgagacaggacagctgcccatcaccccttgatgcaagctggctgcaggctgcctgaccagttcccggggacaccgtgctcaaccctgtggtgacaactggggattccgaaggacagggaggtcttactttctgttaaacacttttattttccctgagatacaatccacaccaggaggggcacctgtccggagcatatgactcaacggtttcaacgtattctaaggcagaccaccacagcttctaattccaaaacattccgctcccccaaaacacagccgtgtccccaacagcagtcactcccccgcctctacagcccctgcaaccacacgcccacttctcttctgtggactggcctgctctggacacgtgac

SEQ ID NO: 66666 - DNA, 2210 bp, Homo sapiens
ggctgcccacggggtctgcggccctgggtcctcggcccctcccatgctcttctcttgaacctcggcttcctctgcccctctgtaaaacactcactgcaaccgccccccccgccccggcaaactggcagccagcatcagcacaggccagctccgaggccgggcactctcgctgacagggcgtgcaacagatggcaccaaacctatcccgtcccgtcccagcagtcacaggcaggaaggacgttctgagcaggcgggaacaacaggcattccgggaagaagcagccaggggaggccccggctacacatttaagagattttttttttttttttttaacttttcagaatgttaatcagttcatccagggagacacccaccgtccctgccccagcaccatccgtgcccggcgtccctggaggcgctgggtgggctctccacaacgcctgccccccacgccccaggtcagtctggggattggtccctccaggccccacctgccttattcttcgggactctggggtggtgggaagagtgccctacgggggacaggacccaccaggaggcctgcgcttccccttcaccgacacacgctgctcccgggccccactcgggccatctcagcccgctaccctccctcccgcctgtccctggaagccgggtttgaatgcgacccgcactcccacccccaacacgctctgcagactccgcccagacggccccggggtcacctaatatcagcaagcccccatcccaaaccgggggacctccatgcagaaaccgaaaaaccatctgccccagaagagaagtcggaggccccaggagcgggaggggcggggagcaaggggagggagggagacagggctgcgctgcggggccgagaaggcaagggtcctgggaccggggacaaggaggaggaaggggcacgaacgcccgaggagcctggagtcaggaatcggggcggcgggagagaccgggggtcactcccaggaaggggtcgaggtcacgaggcgcatggagtcgagagtccccaaaagggaaggccaggataccgaggaaaagcgggtgcggggtcaccaaggggctcgggggcaccgatgagtgcggggtcaagggttaccagaaaacgaaaggtcgggggtcaccaagctgcgcggtacagggagtcacccggaagagcgggaaggaaaggttgggagggttgtcgtggaaggtagggttaaggttcacggcagggggtcgccggggggcgggggggcaggtcaaggttcacggcggtggtcgcggggcagcgcggggtcaacgttggcggcgaagggcggggtcggaaggggtcgcggcggagggcgggggtcccgccgcgctcgcccccgccccacggcccccagaacccccagccccgggcgcaggggtccgcggggagcgccggacccacaagcggggtcgggccaggcaggggtcgcggtggagccggggcgggggtcgcaaccagagcctcacctcgggcccgggtccggccgggcgcggagcccgcggcgcctgtttctccgagcctcgcagctgccgccgctcacttccgggtttcgggcgccatcttgggggccccgcgcacttccggtcatgccgcggggcggggcctccacctgcgggggcgtggtctcggttcgggggcggggccaccttccaagccaatcccttgaggtccttccgctattcggaaggggctgggactcctacggctctgggttcgaatcccgccctgcctggttctcttgagaccccagcatgtgctttcacctcctcaagcctcagtttcctcttctgcaccgtgctggtgaaatggaatctgctttgtggtacagcatccccttttttcctccttcctcagaaccccctccaagcctctgcatgtgccacgtcccccactggggctcactcacccgagacttttaaactgagactccctcaaaagctactaagacgatcaccagccgggcgcagtggctcacgcctgtaatcgcagcactttgagaggctgaggcggatggatcacttgaggtcgggagtttgaggccaacctggacaatatgatgaaaccccgtctctactaaatatacaaaaattagctgggcgtgatggcgggcacctgtaatcccagctactcaggaggctgaggcagtagtatcgcttgaacctgggaggtagttattgcagt

SEQ ID NO: 66667 - DNA, 1608 bp, Homo sapiens
tcctgagtagctgggactgcaggcgcccgccaccaccccggctaattttttgtatttttagtagagacggggtttcaccgtgttagccaggatggtctcgatctcctgacctcgtgatccgcccgcctcggccacccaaagtgctgggattacgggcgtgagccaacgcacccggccaaatctccttttttttgagatggagtcttgctgtgtctcccaggccggagtgcaatggcatgacctctgcctcccggttttggcaaactgggtgctcatctcaactttgagactattttctcttttttttgagatggagtttcactcctgttgcccaggctggagtgcattggcgcaatcttggcccactgcaacctcctcctcccctgttcaagtggttatcctgcctcagcctgccaagtagctgggattacaggcatgtgccaccatgcccagctaattttgtattttccgtagaaatagggtttctccatgttggtcaggctggtctcaaactcctgacctcaggtgatctgcctgcctcggcctcccaaagtgctgggattacaggcatgagccaccgtgcctggctgagactcttttcacagcaaattgaacagcagttaaattgagcaataggcactaaagatttggaagggtgaggaagccagcctggggactggagggtggcggctgcatctgctcatttcctcccacactggaccatccacacaacttttgaggatcagtggaaatgaaaacacggtgccccggcacaaaacatatttcatagcttgggttaggcaacagcaaagcatcacgctgagcgccgggaccttctgagtgcaggcggtgggcgaagccccgagtcacacacacccacgacgccggccctgctcccacagcggccctctggggtagcgactggtattacctgcatttcacgagggaggaaactgaggcacgaactgttcagaagctgccctgaggtcaccaagtgagctaggaagaggcgtgggctcgatctctgccacatccacctcgggaaaccacaaggtctcgatgggtgattttgcctaaagtgggggcagtttgcccaggccggggtgggtccagccatctcagcaggcaggaatctgccaagttgggggatgcttagggaattagtcagatgcggggatttccagggaatcacagggggtggctccggaaagcagcagggacacagtactggggctcatggcccagcctggagtacagtgctgtgaatctgctgtgtgacccaaggagagttacttaacctctctgtgccccggttttcccacctataaaatggggagggtgataataatagcaactagtggccgggcacggtggcttatacctgtaatcccagcactttgggaggctgagacgggaagatcacgaggtcaagagattgagaccatcctggataacatggtgaaaccctgtctctactaaaaatacaaaaataagccggacatgatggtacgtacctgtggtcccaaccactccggaggctgaggcaggagaatcgcttgaacccgggaggcggaggttgcaatgagctgagatcgcaccactgcactc

SEQ ID NO: 66668 - DNA, 2253 bp, Homo sapiens
tttctttctttctttctttctttctttctctctttctttctctctctctctctatttccttctttctttctttctctctctctctctttctttctctctctctttctttcttttttttgtagagatggggtcttactgtgtcgcccagcctggtctcaaactcctggcctcaagcaatccacctgcctcggcctcccaaaatgctaggattacaggcatgagccactctgtccagcctgtcttaattatttcaaattgcagaaaacttcagacaaacatgaaggttgtttgtaaggaccttcttgggctgtgcctcagtttccccatctgggagatgccagcctggattcccctcccggcctcagtgtctctcctgggcggcaagaaggaccctgggactgtgcccactctgccgtccagggggccgagggaggtgcccagggagggggaggtgcgtggtggtgacgggcggctcccgcacagagcctcagacctgggcaggtgaggcaggcaggtgggtctggcccggcgcggcccgatgcgggggcagggatgggatggagccacttcctgtttctccacattctggaaagtccctgtgttcccaggcagagggggcacctcctccctgccagccctcctgggcgccgggctcctcaccacttctccttcctccacccacttccccagcggacgggcctgggacccgccccttcccctcctgcctctctcctcttttctttcccaatcaggcccttcctggtgtgcagaagggaaagctgattccacagcagctgggcctgcccgacccaggaggctacatctgtcacccctctgtctgtctctgtctctgtctctatctgtctctctgtctctctctgtctctttctctgtctccttgtctgtctgtctctctgtctccatgtctctctgtctctctgtcttcgtctctctgtttctggctctctttgtctctctgtgtctcagtttatttctgtctctttctgtgtctctttgtctgtgtctctgtgtccctctgtctctgtttctctggctctggctctgtgtccctgtctgtttcttttttttttttttttttttttttttgagagagtctcgctctgtcccccaggctggggtgcaatggcgcgatctcggctcactgcaagctccgcctcccgggttcacgccattctcctgcctcagcctcccaagtagctgggagtacaggtgcccgccaccacgcccggctaatttttttttttgcattttttagtagggacggggtttcaccgtgttagccaggatggtctcgatctcctgacctcgtgatccgcccgcctcagcctcccaaagtgctgggattacaggcgtgagccaccgctcccggcctgtctctctgtttctctgtctctctctttgtctctgtctctctgtctctgtctctgtgtccctctgtctctctgtttgtctctctctgtgtctgtctctgtctccgtgtctctctgtctctgtctttgtctccctgtctctgtctctggatccctctgtctgtttctctagctctctctttgtctctgtctctgtttctctatctctgtctatctctgtctcagtcccttcttttgccaccatccccctcccgtggccgccctcacgtgtcagcaccataccctccctgtggtcagggccacctgctccagggtgtcctcaggtcggtgctggccggcgtgttcccgggccctgcagccacctgcttgaccagggccaggcccagagtgagatcctaccaggccaggtcggggcagcctctgtgccaagacaactttagggaacaacaaacctgtctgacgggtttgagattccacatgggacaggctttctcacctccgcactgacgctaggacagctgggttgaaggggcccagtgacacccctgacatagcacctcaggctgggtacaggctgcagcagcctagtctgggtcagggctgtgtcctgaggttggggcacccagggcaggctgggtgaaggaagatcagcaatctgccggtcgccctgtgcagggaggataaacagggagaaggcactgcacatgcaaagtctcagcggggacaaagactcaggggagagtgtgcggggcctggggtgtgaggatagatggactgggagagagagaggggaccctggagggcctggaagctagacgtggcctgtattctgggggcactagggaaccattgagggttctgg

SEQ ID NO: 66669 - DNA, 2088 bp, Homo sapiens
gaacccttgaactccttgcctggagcaatcctccctcctcagcctccagagtagctgggatgacaggcgcaccactatgcctggttaattttaaattttgttggccaggcgcgatggctcatgcctgtaatcccagcactttgggagaccaaggcgggtgagtcacctgagatcaggagttcgagaccagcctcaccaacgtggtgaaaccctttctctactaaaaaaaaaaaacaaaaacaaaattagccaggcatggtggcacgcacccataatcccagctactcgggaggctgatgcaggagaatcgcttgaacccaggaggcggaggttgcggtgagccgggatcgcaccactgcactccagtctgggcgaaagagcgagactccgtctcgacaaacaaacaaacaaacaaacaataaataaataaataaaccttgtttgtagtgaagaggtctcactgggttacccaggctaatcttgaactcctggcttcaagtgagcttcccacctcggtctcccaaagtgctgagatgacaggtgtgagccgctgcacccggcctgaacttcctatcaggtgctcattatgagccaggattgagctacagaaaatgcgagggaggggagacggcccccaggatgcccccaaaccggtactctgcaccccctgggcccacatctaaggacgacaaggcagaggcctcaaatgccaggtcctgtggctttgtccccggggcggtggggagccacgggcagaagtagggcaccagaggagattgctctgccagggctggggccagagcaaagggccgggggcagggcaggggcgttggatcgttggatggggctgcaaggtggggagggcaggttggggccatgtattcatccgagatgaatttctcagtgccacccagggccaggccccacttgcaggtgccagggccactacagagaacagacacaccctgagggggtccccaggccacgaagaagccggatgctggagcagcctaggacacagacaccttggcccttcccaggcaggcccctgccacgtgagtgcagggcaagggtcccaggagggggaacgggctccaggccccaccatggctgccctgagtgtacgcagtggtcagcccagtgctgatgtcacctgtgtggggacttcctggaccttcacctcggatccgctgcccggccccgagggaaattccagagaagccagggccgctcctggctgactcattctaggtgccagtagcacgggaggggctgggcaatggagggcctgggggcatttggagaactgtgaggagtctgaccacctcctctgagggccagtttctgctgcgtcccacggggacttggggaaaacttggactccccagccccagccctggcatcattttttttttttttttgagacagagtttcactcttgttgcccaggcatgggtgcagtggtgcgatttcggctcactgcaacctcagcttcccgggttcaagtgattctgtcgcctcagcctccccagtagctgggattacaggcgcctgccaccgcgcccggctaaattttgtatttttagtacagacagggtttcgccatgttggccaggctggtcttgaactcctgacctcaggtgatccacccgcctcagcctcccaaagtgctgggatgacaggcgtgagccacagtgctcagcccaggccagcatctacagggcacaagtgggaatctgggttctaggaggtgagaactggggggtggggggttgcaatgggtggagagtgctttcccttccctgcaggccttctcacgtccacagggttgcaagcgggactggcagagttgaaacaaaagtcagggagcagggctgggcgcagtggctcaagcctataatcccagcactttgggaagccgagggaggctgatcacctgaggtcaggagttcgagaccagcctggccaacatggagaaaccccgtctctacaaaaaatacaaaaattagccgggcttggtggcgggtgcctgtaatcccagctactcgggaggctgaggctggagaattgcttgaacctgggaggcgg

SEQ ID NO: 66670 - DNA, 2197 bp, Homo sapiens
cacaggagggttcaatattttcaaccttatcaagccatattttggcaactcttgtttttcacgagaagcccccgctgggcttgtcccagcgctgtcctgaggcttcccccatgagttccgatagggcagaggccgccctgagcgtttctctttcccctggtccaagagtggctcaaaagaaggatttttgactggaattggccactttgtgttactttttgacccttgacctcgccccaaagggggatgcgggggaggggctctggtaggggtggccccgctccttccaggtccgcaagcccaggttcccgcccaccgggctcagcccaccctgcggccgttcagggaggccgttggcacccgtgacctacgacccccttcccgagccccaccgaggtcacagccgtggcctcgtctccccatgcctgcttcccgccccctgcccgtgacgggcgtctccgaggaccaatgagcgcgctgtatccacccctcgggcggggccaagcgccgaccaatcgccgctcgggcgcccggccgggtccaaacgctccaatcgtcagcggcggcggggcgggcagagggccggggatggcaggttcaaccaacgggtgggcacgtcgtcctcgcgaggaggcgtgccctgcggccgggcgtgcggtgtccgcggcggcgcagggagggggagggaggtaaacaagatggcggcggcgtgtcgggcgcggaagggggaggcggcccggggcgcccgcgagtgaggcgcggggcggcgaagggagcgcgggtggcggcacttgctgccgcggccttggatgggctgggcccccctcgccgctccgcctcctccacacgcgcggcggccgcggcgagggggacgcgccgcccggggcccggcaccttcgggaaccccccggcccggagcctgcggcctgcgccgcctcggccgccgggagccccgtggagcccccgccgccgcgccgccccgcggaccggacgctgagggcactcggggcggggcgcgcgctcgggcagacgtttgcggggaggggggcgcctgccgggccccggcgaccaccttgggggtcgcgggccggctcggggggcgcccagtgcgggccctcgcgggcgccgggcagcgaccagccctgagcggagctgttggccgcggcgggaggcctcccggacgcccccagccccccgaacgctcgcccgggccggcgggagtcggcgccccccgggaggtccgctcggtcgtccgcggcggagcgtttgctcctgggacaggcggtgggaccggggcgtcgccggagacgcccccagcgaagttgggctctccaggtgtgggggtcccggggggtagcgacgtcgcggacccggcctgtgggatgggcggcccggagaagactgcgctcggccgtgttcatacttgtccgtgggcctgaggtccccggaggatgacctagcactgaaaagccccggccggcctccccagggtccccgaggacgaagttgaccctgaccgggccgtctcccagttctgaggcccgggtcccactggaactcgcgtctgagccgccgtcccggacccccggtgcccgccggtccgcagaccctgcaccgggcttggactcgcagccgggactgacgtgtagaacaatcgtttctgttggaagaagggtttttcccttccttttggggtttttgttgccttttttttttcttttttctttgtaaaattttggagaagggaagtcggaacacaaggaaggaccgctcacccgcggactcagggctggcggcgggactccaggaccctgggtccagcatggaggtggtggacccgcagcagctgggcatgttcacggagggcgagctgatgtcggtgggtatggacacgttcatccaccgcatcgactccaccgaggtcatctaccagccgcgccgcaagcgggccaagctcatcggcaagtacctgatgggggacctgctgggggaaggctcttacggcaaggtgaaggaggtgctggactcggagacgctgtgcaggagggccgtcaagatcctcaagaagaagaagttgcgaaggatccccaacggggaggccaacgtgaagaagtaagtatggcttgctggggtcggggccgggccgggccagtcacggtgctgatggttctgtcttccttccttctctcctccctcc

SEQ ID NO: 66671 - DNA, 786 bp, Homo sapiens
ctccgtgccagggagagcgtggttgggggcctgcgttacggactttcactcaggcaaggccagttgtcgcagcggggcgtgcgtttgcatgggctcttggactccagttaaaatgccctggtagcgaaaccctcctgagaagggagcggcccccaatcccctaagactagccccttggctcccccagctgtccaaggagcagaggcgcccagtggaatcagcctgtgtttgtttgggccccgagagtttgtgtgcggccgccaacacgttttctgcgcagtgtgtggccgttaccggggccaggcgaaatgtgatttgtttatcctgtcagaggggaaccctgggctgccaaaaataactgtttgcaccggcttatcagtcagcaggagggaaacgtagcctttcctcatttgccagggatgtgacgctggaagcatccctggcccccggggctggaagccctgcccgagggggactgtgcctccctcccgaattgcatccggaagaccttacttttccaactgacttcttcaggcacggggctgccgctgggcatcccggacgcctctgcatctgtgcgcggagaagctcctacctagggcagcactggccggcctgagcctctcccagctggtgggggtggccgggggtgtccctgccttatcgcagccagacacgctgcacctgccgccgcctggcgggccctgcccaggccctgctcctttcccagccttcttaactttcaaaactttgcctcctgtttccaagaaaggaccttatctgctg

SEQ ID NO: 66672 - DNA, 575 bp, Homo sapiens
acagcaggaggcattggatctccctggctgcacccttgtaaagccacagccccagggcctcccctgctccctgcacccctggggtccagcccaccgcgccaggctcaaggccctttccagggagcccgagccccaacccccgccatccccgattccgcattttcccggagcctaaggagcggggctgggggcccggccgggtgccgcagacctgcgtgagcgcgggggcggggcggtgacgtcatagccgcgagcgaggctgcgcgggccgctggctgacggcagcggagccccgagccgcccgcgcacgcgctcctgcgtcagaggcgcacgggggcgacggccaggcaggaggtggggggtcggcgagcgcatctccgggcgcggagcgccctctgccggcgtcgaggagcagcgcgccggggtccgggatccccagcgagccctcccgcgtcgcccgcgctgtgcccctcgccgcggtcgccgtttcctagaacagctgcacctgcagccttccaccctgtcccgtcctgcacactttctcggcttttactgtgatttatttttggcttttg

SEQ ID NO: 66673 - DNA, 1359 bp, Homo sapiens
tacagtcgtgagccaccacgcagccgaatcttgaatttcactgaagttcgttttactccacctcccaggacggtttcaccgcccttatctgaccaccccctggttctgccgcagcccgggccggaacaaaactgcaacccccagaatacctcacgacggggcactgcgtcgtcaacgtcgcgtgcgccctgccgggagtcgtagttcgcgcttgcgctctcgccgggactcctcctcccagacgtccctgcgcgtcgtcctcctcgccctccaggccgcccgcgccgcgccggagtccgctgtccgccagctacccgcttcctgccgcccgccgctgccatgctgcccgccgcgctgctccgccgcccgggacttggccgcctcgtccgccacgcccgtgcctatgccgaggccgccgccgccccggctgccgcctctggccccaaccagatgtccttcaccttcgcctctcccacgcaggttcgggcgctgcgggtcgggaccctccgtggccgccgcccccggagtccagggtccccacccccagggcgcgacccccgcttccgggcccccggacccgcgcgccccggaagccgaggctactcagccctggaccctcggccctgcctctgctgcccgagccctgcgctgccctcgtcccgggcacctccccgagataagcgtctcctgggtgccctccccgatctccctggccaaagcctgggtgtcgccggatcgttgcattcccatttcgcggatcagtagaatgaggcgcaactgttgaggaccaaagctgcaacttcggatccctgcgctgggttgtctcagtgcctcacatcagcgccaggtcctgccctgacccattacttagcaggacaggccgagtgcccggtgggcgcggggccggcctgccccgccatcattccccacgctgttgtctgcaggtgttcttcaacggtgccaacgtccggcaggtggacgtgcccacgctgaccggagccttcggcatcctggcggcccacgtgcccacgctgcaggtcctgcggccggggctggtcgtggtgcatgcagaggacggcaccacctccaaatactttggtgagtccggtggagggctgcagggccaggccaggctggggctccacatcccaggtcagtctccgtctcagttgaggctgcgagaaaaaatagttttaggccgggcacggtggctcaagcctgtaatcccagcactttgggaggccgaggcaggtggatcacctgaggtcagaagttcggagaccagcctggccaacatgatgtaaccccgtctcttctaaaaatacagaaaactggccgggtgcggtggctcccgcctgt

SEQ ID NO: 66674 - DNA, 2748 bp, Homo sapiens
gccccattcccccagtgagcagcggttccatcgcagtgaacgccgactcttcggtgcagttgttggccgaagaggccgtgacgctggacatgttggacctgggggtgagtgtcagaggggacctgaggctcagcaggttggagctgtccaggctgcgggggagggagcgctgggggaccaggagccgggctggggtcgctgctggcccctcaccgcccctcaaccccttgcaggcagccaaggcaaacttggagaaggcccaggcggagctggtggggacagctgacgaggccacgcgggcagagatccagatccgaatcgaggccaacgaggccctggtgaaggccctggagtaggcggtgcgtacccggtgtcccgaggcccggccaggggctgggcagggatgccaggtgggcccagccagctcctggggtcccggccacctggggaagccgcgcctgccaaggaggccaccagagggcagtgcaggcttctgcctgggccccaggccctgcctgtgttgaaagctctggggactgggccagggaagctcctcctcagctttgagctgtggctgccacccatggggctctccttccgcctctcaagatccccccagcctgacgggccgcttaccatcccctctgccctgcagagccagccgccaaggttgacctcagcttcggagccacctctggatgaactgcccccagcccccgccccattaaagacccggaagcctgactgtgtgctcggctcttgttcctccacctggcccggtgaagccgggagcgtcctgggcccctgctcacgtcctccatgtcccttgcaaatagggcctttgagctcccctggactatgtcccttagggcacctggaggtccgtaggaagcaggctcgagggggtgggtggggtgcagccaggcgggcaggctgctgaccttcaccctacaacggtggggagggtgaaggtcaccagtgatggggacatcggtcagggaggggtgtccctgctgctcctggcgcctctgccgagttcctggtctccaggccttgaccctgagccctgctggcccttggccctgcccaccagcctctggaaagaggcgggccccacccgctcccacgctggccccgccctgtgccagccggtcctgtgggtggccctgcctggccgggtgccgaatctgcagtgtttttggcacctccgtgggcacctaggcttctgggttggccccagatggagtggggtgggcccaggagggggcggctccctggcactgccccgttgggcctgcctcttctcctttccataaccctgggggcgggcaacactggctccagctggtgtgtggacggcgggggctggggtctcctgacctcctcccttccttgggacagggccctgtgcagtggggtaggcagggaattccaggggggtgagtggggagggtgggcctgcctgtgtcactggagctgggatggtgacagagaggccgccccgggcctgtcagcacggacgggcagctcactcccacgtcatggcactatgcgggtgacttgccacagcttcacttgaggcgaggtgccgttgggggccttgcgactctgaggccgccggtcagcagatcaggtattctggaacagcccacggtcccctgcctggctccccctccacttgggcctcgggacacgagtgaccaggcccccacttctccaggaatccgcagcccagggaaggttgtgtcagccaccaggccacaggagcagcctctgcccaggccccccctcccccccgcccccagttccagccccaggtcttcaagttcctgccaggccaccaggaccctataaataagaccaagggcacagctgggacttagcaggggcccagcgggaggagctgctcactccggggacctcccctgcccccaccaccagggagggtgtgaaccttggagccaggcctcaggacacccgagacacctgacactcggagggaacagcccgtgctggctggatgcgtcctggagcaggaggcagtcagggtggggccgggaaccaggcggtcaaggcccttcagtgagggcagcccctggcttagtgaggcagaacagagcacagggtttgtccccatcacacccaggaacaacccactcaaccatggggacgccgagtatgggaaatggtggggaagcgttttagcatgtttattcatttagactggctctgggcatctggtccccaaagggccacacagtggcccctgtgaagcccagcaagttccgacaacccgtgtcccattccactcccgaccagactgaggtgatggtgtccattccactcccgaccagactgaggtgacggtgtccattccactcccgaccagactgaggtgacggtgtccattccactcccgaccagactgaggtgacggtgtgcaggtggcagagccacacacgagaggcaagaggcagggagggaggtgggggctgctggccactcacagggggccccagtgtcctgcttgggctgctcatttggcaccagtccacggctccctccgccacctttgttctcactggaagcagaatgagcctggccctgtagttcccacctggggccccagcccttcatccaagccccattcatcgaccctgcccctcctccctccaactgggtccagttcactaagctcccagaactgctcaagccattcccacttcctggaccatcgtcttttttttt

SEQ ID NO: 66675 - DNA, 8133 bp, Homo sapiens
caggctggagtgccctggcacgatctgggtttattgtaacctccgcctcccgcgttcaagcgattctcctgcctcagcctcctgagtagctgggactacagacacatgccaccatgcccagctaatttttgtatttttagtagagacagggtttcaccatgttggccaggctggtctcaatctcttgaccttgtgatccgcccgcctcggcctcccaaagtgctgggattacaggcgtgagccaccgcgcccgaccgcatcatcttttttatgtgacaaactcctagtcattcctcaaaccgcagcccctgtgacccccttccaagggttatcccagcctctccctctctggcctagccctgacccttcggggctgggtgtgcctgtcaaggtgggggccacggctgccgggagcatgggtggcagccggaaggagacctggggaggagcgcagccctgggaggggcgcccatggccagggtgggggtggaggtggtcaggccagataaagggaggggccagatgagtggacaggaggtgctcccgtaggaatggggtccccttctctaaatagaggggcaggacggggcccacctcaaccaggaccatcctcaaaaagccgacggggaagggtgagatgcacaccacattcgtgtctcattggctgtggcctcagtttcttcatctgtaaaatggggtaatgcccaccccaaaggctgggaaccagtgcatgtcctgcattaatggggggtgatggccccaaagtgatcctgccgcatcccctcaccacactcccacccaccctggagaaactgaggcttggagaggccagttacctcccggggtcacagcatagccggctggtgactggctgggcacaaggcaggcctggcactggctaatcgctccataaatgccctctgaggtcaccattgacagatgcaggaggccagggctggccagggcacccccactctacggcaggtgactccagcctgttttcctggacgacagccgctgactcaggcccctcttcccgtcccccccacgcgggcgcccccaggcggaagcaccgggcctggggcgacaggaagggggcggggcagcgagtcgcgctgtacaccccaaaaccctgtcccgctgacgattcggggtgcatctcagcccgcggcgaggcgggccgagacccttggctcggggcattcaaggggagtccccccatgaactgcgccaagcctgggtcccgggtggcccagccgtcaaggcgccccagggccagggccggcaggcaggggcgggggccagtctgcgtcaccgcccgcccggccccccgcccccctgcccgccctaactccaccccgagggaaggcggcgcggataaaggctgagggccgcgcgcttggcccagaccggcccggccagcgcgcattcggccccggacgaaggtactcgcagcacttggagcgcagaaccggccgcgcccggtgagtgtggaggggggggacctgcgggccgaggaagggtgcccactctagatggctcaggatgcccgcacttttctttgttcttgggacaggagggatcggggagcctccggtcctgggaagccccccggggtgcggggtgggaggggctccgcgcagccagcgccgccctggccggacctcagcccccgccccgccccccggggcactcccccttcaccgcgggtgaccttgaactggttgccgttccgccctccgttgcccagccacacggtcccagtctcccgactacagtctttcgttcccgatcggggttcctcccccgcgcgcagcccagtcgtcttcctcccctgccaggggcagcgcggcgccccctccccgggactccgggcggcgctcccaggcgggcccggcagagggcgcgcccgagctgctgactcaccgcatccccgagcgcgcgcgggcgcagccggggacgccgcgtcacgtcacggctcgagcgggcgcgcctcggggaaacgggttctgcccgcggccggcgggtgggcgcgcggggcccccggcggcagccacccggccacgtcaccgaggtgcgggcgccccgccccggccacaactccgcccccacgcaccacgccctccccggggccgcggccctagcctcaccgtcgcccgcccgccccgggaccccggccacgaggcgcggacttcgcgctcccgcttccgctcgcggcttttcccggacgaaggcggcggggtggccccacgacttcctgcccctcccggcgccgggaacaatggcccgcgccccctcccgctcccggccgctcccttgggatcgcgaggggtaccagacccgtctccagacctgggtcccgcgccccccggggcgcgcccgccctttgttgcgggctccgggcgcttatgaatggctgcgggcgcgggcggggcgggggcgggcgcggagaggcgccagccccgcccccgctgcgctccccttggtcgcctgggcgctgggggcggggcgagggggcgggcccggctgccacgtggggcggtgccgcggcggctctcataggcccgggctcgcggccgactgggcgctcggcgcgcggcgattggccggcgcccggccggcggagtaagtagtgaatgggagggggcggcggccccgccccctggaacgttgatacattataacttttttttcttgttactttcacccccagatcctccgagcggcggcgacggctgttgctaagggaggggacgcgcgaggaagcgcgacccgggcggcagacggcacccagcgccaccagccgagcggcgccccctccccaggacccttaaccgcgccgcgtcccggtcgcgcccgccgccctttgaaggagaagcaagtgccgtccccacccccggaaggcgcccccaggagccggagcgacctcggagcgccactcggattttggatttcggtctcgcattccgcggccgggactttctcgaggaggacgcgcgctgctccgcgcccccgagtgcccggaggacccggcatccggggagcctctcgcccctgtcccggaggcgcggcgaggattggcggcgcccgccgcccccagccccccagcgcgcgccggggatggagccgcagcccggcggcgcccggagctgccggcgcggggcccccggcggcgcctgcgagctgggcccggcggccgaggcggcgcccatgagcctcgccatccacagcaccacgggcacccgctacgacctggccgtgccgcccgacgagacggtggaggggctgcgcaagcggttgtcccagcgcctcaaagtgcccaaggagcgcctggctcttctccacaaagacacgtaggtaccgcgcgcccccggccggccgccccctcgggccccggcccccgggcgggaacaaagagcgcgccgcgcggggaaggcagggggcggccagacagggggcgggggcgcgccgcgcgctctcgggcgccctctgctcggcctcgcctgcctcggccccctcccccgcccggggtcgccgcacaaaggcggctgcgagggcgtcccgggccgggcttcggcggccccccttgggggcgggcaggaatcccagggcgttgcgggggtcccggctgcgggtgtgggggccgccaccgccccctcccgcctgcgtccgcgccggcttccgcatctgctcggcggcctcctctgcgtctggctgtctccccccacttgcgtctctctccccccctttgttctcgcctccgagcgctccccgcagcctcccctcccccctggtatttaaatcgcctgcaggcccggagccctccccccgcgggcctccggggacacgcagtgtccatcccagtggaggggcccatcgggggaggggcggagggggagggtctcctttgtctgcgcggcggcggccgcctgcgccggggagggaggaggagggggagcccggcccggcgcaacccccagggcctctcctcgggccgaaacccgtggttcctacaaagaggagccaggactagaattagggaattgggggcaggggctgccctggggtcgtgggggaaggtggcatagagcacactggggcccagaggaggagaaagtgcctggttggggtgcagagggggtgccagagtccagggcgggggttccactggagggaaggggtccgaatcgccaggatggggctcccagcaccagacggagacctctctgcacgcgcttagggccctggatctggaagccgggaaggggtgggggtgggaacttatccgtctctccccacacaagcacagccctcccccgcggcctctgcttccgcgtccctgtgtcgtctccgcggagtctcatgctcttccttcctccccccagccggctcagttcggggaagctgcaggagttcggcgtgggtgatggcagcaagctgaccttggtacccaccgtggaagcgggcctcatggtaaatggccatggggctgcgtgcccccagaggcccccgcacacaggcagtagcccctccctcggtacctgtccgcacacacactacctggggcccccaccccgccagccagcagggccctctccaccccctattccagcccaggattccgaccccacactcaggcccctctcctccctctctttgtagtctcaggcctcaaggccggaacagtccgtgatgcaagctctcgagagtctcacggagacgcaggtaagacctcgccagccccttcctaacagggcagccctgggagcagggtgccttggccaccgacggggcctgggggttgtctgtgctcccaggaggctgggggaggggaggggacgcgccaccccgcctgggtgccagcctggcctggcctccccacctcctctcccccaagattcaccacctgacccggagggctttctctcccacggtggctgccctgggggaagggggcctggctttcacaagactgcctgcaggatgaccttggcctatggggcctcatccccgctcacaccctggcctgcatccccagccccctccgcccccaccgaggagcccccctccagccgctgtggcttccccagagcgagtttctccttttttacatttctgctgagggctgggggtggcggcttgggtgacactccttccgccttccgtgacccccatcgtgagagggtggggatctcgtcaccctcccctcctctctctggcctttgttctctaccccgaaaggggagggggcgggggtgcccagccctggggccagtgaggcctagacaggatgttaggaaaatatttagtaagcggccaggagggaggctggggctggccctcacccggttcccggttttgctgcggacttttttttttttttctccttctttcctcattttcttggctgcggccaagccttcctcagacaagggccctggccacctcccaggagggtgacacaggcctcagcaatccgcccgctgccagggtgggggacgcaggctgccacccgccccagcaaggggtggccggcttcccgggcctccctggccccgaggcccgcacccccttccgctttcccagcggcatgtagagtcctgccctttccctacatcgcgggggcagggcgggggccgggagctgggtggtctgccatgggggtggccacagcagcagcagcagtggcgtgggggcagagccggggtcccgagccagggcgggggctgcaggtgatttcctggggcgagtgtgagcagagctccccgccgctggggggctgcggttggcagggggcccagggcgtgttggcttcacaccctcctccctgggcgcctgcgtcaggaaggagctgggttggggggggctggagggggtgctgggcggagacactgggctccccagggttgcttccctgcctggcaccgagtcatgcccgcccattagccttccccagggaggaagttgcagggcgggtggtggtggggactccagctgctctcgggaagccaccccgggcccttcctgcaaaggctgtcttggggcaggggggtagggggccgggcaggctgggccgcagggtgggggcttcaccctgccctcctccctgcctccctccccatgggccccaagcagagaaggttacgccagctactgccagtggagaggagagccgggagggagagctgggaggcggtcggttctgagtcatcccagcctatgtcacttctcagaaacctccgccacccccccccccatcccggccactggggagagcagggctctggcccatacccagagcagggggcttggcgaggacagggtgagattcaacccacacccaccctgaacgggggcagattgagggtttctgtgcttggagcaggttgtgccctccgggactccagccccagggcggtcagggccccttcctgcagccttgccacagccccctaggcctccgccccgcccaggacagataaatatttatcttgagaaagcaaaggttaggacagaagaattcgtgcaggaattccacccacttgctggccctggtgacttagctgggagggggcctgaggtggagcccctcccgtatccacaggcagagaggatctaggggcccatgagggtgggggaaaggcaaagtgaaggttgtttgaggtcagtgactgccagctgggccccgccccctctggcctcagtttccccttgcaagaccgacctagttggccagggaggggcaggcccccgtctgacccgcctctgtccccacagcccccagcggcgcccgggccgggccgggctggcggaggaggcttccggaaatacagattcattttatttaagcgtccgtggcaccgacagggaccccagagcccagagaggggcggcgagaggccccaggtcacagcgcggggggactgggccgggctgggctgggggcgccgcaagctggggctcccagctgacggaccgctctccttgcaggtcagtgacttcctgtcgggccgttcgccactgacactggccttgcgtgtgggcgaccacatgatgttcgtgcagctgcagctcgcggcccagcacgctccactgcaacaccgccatgtgctggccgctgcggccgccgccgctgctgcgcggggggaccccagcatagcctcccccgtgtcctcgccctgccggccggtgtccagtgccgcccgagtccccccggtgcccaccagcccgtcccctgcatctccctcgcccatcacagccggctccttccggtcccacgcagcctccaccacctgcccggaggtgagcctggggaagggaagggtgacccttggttggaatccaaagggtgggccgtcctggggaggtcttggggaggacaaggactcttagtcccaggtgagtcccttgtattaagggctatcctgtgacctcgggctggtgggtgatcccccagcctagattggtggggtatttctagatcctgagttgacggtcatcgcctgacatgacctggaccagtagatgatctcttgatctttgactcatgggtcatctctgtgtcctgggttggttgtgacctcgtgaccttgggctagtttatctctaaaccctgtgttgacaggtcatctcctgacctgggctggtgggtgatctctggtccctgggttgctggtgatcccctgatcctggaccccgtgctcatgtgccccttcctcccatcagcagatggactgctcccccacggccagcagcagtgccagtcctggtgccagcaccacgtctaccccaggggccagccctgccccccgctcccgaaaacccggcgccgtcatcgagagctttgtgaatcacgccccgggggtcttctcagggaccttctctggtaggtgtcacagcacatgtgtgagctcacgtgtgtcccgtgaccctgtgcatttggggtctacatccacccacaggcgactccacatattctgggcatacacaggctgtgtccgtctgctcacttcacatgtcccccaggaatcccccacacacacgcctggccctgcccggggggccgcgggtcaccaggcgcctgcatactggggacgtgtcccgctcccgccccgtggtccctcgtgcacatca

SEQ ID NO: 66676 - DNA, 4266 bp, Homo sapiens
agggtggaacctccaggcaggaaccggctcgccaccctctgcccggtaagggctgcccaagaaagcattacccgccctcggggggtcgggctgtgggggtcccggcacctggcgtgagtttcatgtatgaaaacataaaattgaaaaaaaaaaaaaaacctacacgagcaccgtgatttcaagtaataaacagaaaatgaaacacacattgactcccgcctgctcgcctagtggggggatctggccttggttgggagggttcctggggtgggatgtcagctcagggagtcagagggactgacctgggtcccaaggccccgaagagggggtggggcaggggtcagggccctgagaatttcccacgctccttccccggctgccgggtgggcaggaagcagccagggtgggagggaggagcccagccacttcctggtacccaaggccggaagtcccttagggtgtggggcgagggcctgcctgcctgcttcgtggcctgggcaggaccctggccccctcaggacctgccagtatgggggagacgcgaccaccagctctccccagccacaggagtcggggactcccactctgccacacccacctgctccccttcctggagtctcacatctgtgtggcttgctgcagggagatcaccaggccgactgggaggacctaggactccgcagggtaccttgggctggcaggtgatacaggcctggcttgacccagccctggggggcctctctggccacacctcctgacattccagcccttcccagacctggccttcagctccaaacctcccggcctttgccccctgtctaggaacacccctggtccggctgtcccttgctgtctgggaacttccccagcctgcgccttccacccctgtccaccccgtcccgcagaccccacccttccctctctctgtccctagcctggagctccccgtgagcctcaccaggactgagtcctctctggggtcccacctccacccatgtccgggctgggcagagatgaggcaataacactatttcatgtctttttttaaattttgtaacctgtatttcctcaggtaacaagagttgcctatgagaagtaattgggctcccattttatagatgggagaacagaggcccaaagaggaacatcacttggcccagaggatttggggtgtttgttcaatgatgtgacctccaccccttatcccatctctaggggccccagtaccgggagcccccaggggaaggggcacaggttcagagagtggcctgggagcaccttcctgagacccctctgcccctcccaacgcccagtcaaccccaaatcatcgcacgcccacggcaggaaggcggatgcccagtcaggcggcacccaccccccgccccgtccctggtgcggatgtcccctcggggctcagggtgggggtgcgggtcaccgacgccaggcctggggtcaaggcgagggccccagggcgccaccgccccctcgctgggcggggtgggaaggaggaaggaggatgttgtctgaagcacctgctgaatcacaggggctgtgtctgtagcctgcagggtggggggcgcgtcccctgcactccaggacccgcccctcgggatgccgacccccaccccagactggggatcccaggggtcaaggctgtgccctgggggcgtggggtggggtatggagctccaggctcagagccctggcctggtagggtcagcccaaccaggggtgcagcgggcggaggggcggcaggcggaggccaagtgtgcgtagggaagcacggagaggtaaactgaggcacaaagagggcagggaccgctgggatctcgcggggcggggtcggccctggatcgctcccttcccccaaccattgaggaaaaagctgaatgggagggggcggcccccggaaacccgccgggatggaaacgcggtttccagggcaacgcgccgcgaaaggagcctgacgtcaccccgggtagggcgccctgcccgcccccgtccgcgcgtcgcgcggcccaggccccgcccaccagcggggaagcctcattggtgatcgcaccgctcgctcatcggcgtgccccagtagcagcgcgacgaagcctccagaaggcgggacttcagcccggcagcgccgagtgcgcaggcgcaagcgcggaggcgctgcagccccgcctctctccccgcgcgtctgcaaagttgggggcgggaggcgcagccgagggtctgacggctgcggcggggcctggacggaagagggggcgagccccggggcgccgcacgtggacccccggcacgggcacgctcacgtgcacccgtcctttcacgccaacgcgtttcctgctgcccccacccctgcaccactgcacgtcccagaccccggcccagcctccccgcggtccctaggctgggggagctcagacaggaggctaggaggagggggactttggggctgaggctttgccaaaggagcaggagtttgccaagtgttgtaggaagcgggaagggtgcgccaggtagggggcacggcgtgtgccaaggcccggaaacgtgaaaccgagtgcttttcgggggcaaccgggaagtcagttggtggagaaaaatcaaagatgggaggaaaggcgaggctgacaaggaccctaaacggtgattccccaagtcggccactggagggatgacttgggggaccagagaggaagagcaggtgagggggagcggcggccaggacatctgggaggtggctagacccgtggcctggactttggggggcggtcgagttggatcgatgatcgatggggaccctggcggcctcaccctgggggaggtagagacgaaaaaggaactacggtgtgcccggaaggtggtggctttaggtccacagggaggtggttggcaaggcgggggtaacagggggaaggagaaaatctgaaatgccggtgtgagctccgggccaagagagttgaggactcaggaggcaggaatcccccgtggccgcccgctgcttggctgtgggctccaacttggtgtgtgctcagagaaggcagtggttggagtgaacagggcctgtgccaggtggggagactagccaaggtgtttgtgcagcctggcctctggagcggcctgggaagagctggagttcgcagggtgggagctgccctgtggctgggagcccgtgctggcgtccctgccaggcggtgatctcacaggtgagcggtgcttggggagacgcggagctgtgggcgggcaggagaaggtcagtggaggtcatggcttttggcttgaggccggagtcctctgggggtggccgaatgcgcccttggagctgccttgggaggtggctagggtggacagcagtggaagccaggcccttggcttagagccactgggttggagggattgagccagtgcccgggcacagccgcccccacagggccttgccccacccgccctcctctcccagcaccatgggaatgggagttaccgggctggaggctggggacgccaccaccccgtggccaagggcgttggggcccaacccaggagcctggtgcagccccacccacgggccgcccagccctggaagggcagagaactggctgcctctggggtcacttgggacaggtgagcagcccagcccagcccagcgggtgggggaggggaggctgtcacctgggccctgcctccaccctctttctggttctcactccctccatttctctttcttttgcctttctctatttctgtcccgatctctggcgctctccccaacccagtaccaccatctccgcccctccgtccctcccctgcttccgccccctctctgggggcccccttcaccccggggcacattccagcttcctcccccgccttgcagtccctccctggagccagctgcctcctcggttgccagagcagagagagtgggcttgggccgaggtcggaggtcgaggagcgggcgggagcctgggagggcacccccaacccctctggaatgtgggtggagcggggcaagggagacagctggtttccacggagggcacatgccccatacccaggacgctacccacactcagccctgggggagagcaagcaaaaccaatgggtgccatcccacgaggggcctgcacagccatcccacacccccgaccagcacgcccgggacagccctccacaggccacgcatttatgggtgcggctggtgtgccaggctcccagatacacaacccccccccccagacacaccccatatacctgtccccaacctca

SEQ ID NO: 66677 - DNA, 2926 bp, Homo sapiens
acgggtgtcccctggcccgtctgtccgtctggatgtgggaaccctccaggcacgctggggcgggcaggtgccaggtgcctctccagcaagatgcaacataggtgtcttcacttgcactccgtaggtcctgagcccctgcagctgcctgggagagtggggaaatactctccacttgtcccactccactgttgccatggagatacctcccaccctaggcagggccaccctgagcctggttggctttgcaggaaatccccactctttgacctctctgttaggcacaggacgtgtagtcccatgagagggaactgggcccaggtggagatccatccgcctaccccagagcgcgcatctgttgctaagcaacatctgaggctgcatggaggtgggggctccggagcccccagaccttttcccagtttcagaaactaggtggctgcatccccagcgtccacgcaggcgagcctaagcctcggtcagctttagggtgtccgtgggccatgcagggtcttgggcctttcacagacacctgatctgcacgtcacagacacgcatgggtgcacgtcactacacgtccgccacatgtgcttggctggtctgcgccccagcagaaggggtcacctatgtctctgcagtatcctgtgtactgaaagagcaaacaggtgtgtgaccccagggcaggtcggggtccgtcctgtccccagcctgtctactgcgtgtgcctgtggcaggcagggtctccggatgccgagtgcatggtgtatgactttgtgtccagtgggtacgaagcaggggtgtgggtgtgcacctgtgtgtggcctgtggcggggtgtgtgtgccggggatgtccctctgtggcccaggcctggcctttgggctgctgggatggcctggccggggcaggagtagacagggcctcccagcctccacattcctgagctgtgactcaggcctgtggggagggggtgagtcacagggaagggaagccgacccaccctgcgaacgcatccgaggaacaggagggaaactgaggctggggagcagctcagtccggctttcctgtgtagcagcccctgaatctcaggcccgggggtggggcggggtggcgggggggggcgcgcggggcctcccaggggacctgagatcccagccctggactcagctgggagctgggggaagaggcaggtttaacccttcctcttctgggcttctggaactctgggctgccctgggaggcgcggctcccgctgacacagcacgcgtgcccaccccagggacatgagtcacagcaccaggcatggacacatatgctctgtgggtcccggcacacccgagtcacgcacacccagccctgtccccggctgcccccacatccacatccggataagcgcacactttggagtccaagcgcccacctccttgggttgcacacacagcgccacgcagacgggttcctgtgtctttgcacacacgcgggtgccgggggctctgtgcacacacctccaagactgcgtgcacgcccctatatgccctgcgcaccgacgcaggccggcctggggtccctgcactcaccacgccgtgtgcactcgcacatagctacacattcgtgtccacacaagcttgtgtctctgtactctgcccacgggcacacatgtgcgccacacctggcaacccgcacgcccggtctctgcatcccccaccctggctctgggccccgcgtagtggggccagctgggtcggctgcagcctctgccaggacggtcctatttctgcgcccccgcggggcggccgccaggtgcacggtcccggcccccgcctggctaggaggaggcggtaattatgcggccccggggtcccccccacgcgcctttcatcctcggccacgcccgtcgcaggcctagacgctctctaccgcctcccgcccggtcattagtcggggtcgggggaggacctggcgtccggcgggcggggccccgtggggagggcggagtgggcggtgcgggagcgagggagctccgccctcgtctccatggcgacgccccgcaggggaggaggcccgggaggagtatcagggtgcaggaggtgcgcgccccttccgagacggcaggctggaaagggggcggatttgtgaatgggcccacggggcccaagacagacgcgcggggagcaggttcggggactctgactgatccccgcgcctcgccgggcaggggcgagccccgcgcgtcgggcccggaatagcagtctcgcccccgcccggcgcggctattttgagctcctccgttggggccgaggcgcgggggcggcgggaggctgggggtcgacacgcaggctgcgtcctcgccccgcgagattggacccctcgaggactgtgcgctgtggccgcgcagggctgggcggcggggccccctctcccacgcgaggcgtctgcgtggagcggcggcaccgggagcccggccgctcgagccaaacgccgcggacggagcgaggccgcagcgccccctggtgtccgcaacgggcagcgcgtcccggtcgggtcccgcatggtcagtggccagcaggggtggatgaaggggtcccagccgcctgagacccccggtggggacacaggatcgcggtgagatacctgggagtcacgggtgctcgcagacgcagctgaccccagaggcacaggtaccgacacaggtccacacctggaagccggtgcacagtgctcggcacagatgcaaagcggcaggtgtgcgcaggtgcgtgtcaacgccaccctgggaacccaggatggctgcggacactcacggagcccgcacccaggaacccgctcgtagtaagcgcttaataactaggcactggctgaatgaatgaatgaatgaatgaacacggcgcttcgcaaaaccaggaaaaggcagaggctcacagaaccagggaa

SEQ ID NO: 66678 - DNA, 1981 bp, Homo sapiens
cctgggaatcggggctagaggcccatttgttccccgccgcaggccagggagcaggcacgcgtaactgggtcagccccgccccgccccgccgcgcgctggtcacgccccctcgagcgcgggtggaggactgcggactgcaaacgtctcggccaatagtcgagcccgacaccagtccgcgggagggggcggaaccgagatagactcggcccccagctcatgaatataagacgcaggcgcgccctctgattggcccaggatgtgtagggggcggggcccggcggaagcgtatataaggccgggctcggggacgcccccccctcactcgcgcgttaggaggctcgggtcgttgtggtgcgctgtcttcccgcttgcgtcagggacctgcccgactcagtggtgagggccctggctgcaccggctccgaggagctcggggcggcgggcggcctgcggcggccaggcgaggcggggccgcagcggcacgcccctgggagggggcgggcccggggtggagtccgccccgccggcggcgagggacagcgggagattgggccgagtagcggccagagggcctctccccgccggtccgggccgccggcgacccggttgccgccgcaaaatggcggccgcgagctcgaggctgtgcccagcgaaatggcgggagcgccgagttcccggatggagtggcgcagggtgcgcgcggggcgcatgcgcacgcggcgggggcggggccacgtggcgcccccggtctccagggccgctttcccggccttggggctggaggtatccacacaccaacgcttttgcttaccgagccttagtttcctccttttcccattgcgattgcatgagggaaaggacggcctcgtaaatcttgggtaggcgtggcccgttctagtgtggttcctcgtctgccacgtcgtgctttgcgcccaaagtttggtccaagttggcacagctcccagtgccagacttccaagtctagttctcagagccactgggtggcggccattcccagccagtgaatgctttgtctgtgtcagcactgaccgcccccttaaatagccagttctcctaaatgccacttcccctgcctggaaatcctgccttatcacttccggggccatcccttcccgattcccggcctaggtcctggctatggaagtcagtacctgccctgaggtgccccccaggacggggcggcctccctgacagccagccccccccccagtctcaggaggcattttacagtgagcagaagcacgttctggtccagcaacaagtagatgtcagttggttagggtaggagttggcacccgttcggaaataggagaacctgagagtgcagtcctgcccagggcacaactggaaggctgtgggggaagggagacacccattgtggaaatgggtgcggcctgccttcagtcttgggggtggatggagtaaattatttgaattaagaagtcctaggtggctgggtgcggtggctcacacctgtaatcccaaaactttgggtggccaaggtgggaggattgcttgagcccaggagtttcagaccagcctgggcaacagagcaagaccccatctctactaaaacaaatttaaaaaaattatccaggcgtggtggtgtacacctacagtcccagtttcttgggaggctgaggtaggaggattgcttgagcccaggaggtggaggctgcagtgacccctgcactccagtctgggtgacagttagacacactgcccccgaccccaaaaaaataagtcctaggtatgagtttgagataatgaaaaataaaaatctgattttctaatatttcccctaaaaaacacatgtcatttacataaaataggaagcggggagaggtggtgagagatgacccctgttgaggatttcattggtgtctgccacaggccgccatggcatcagatgaaggcaaactttttgttggagggctgagttttgacaccaatgagcagtc

SEQ ID NO: 66679 - DNA, 2167 bp, Homo sapiens
tctccctcccttcctcctccttccaggaggcgcttcgccagtgaggtgcgggctcagggcctcgagtctctcctggagcacgggctgcggtgcgccggcagcttacggggcggccagtccttgcccacaacgatgtggagccctgtgaaagtcggattcgaataaagggccacgtgtgcacccagaaagccgagtctgtggttcaggggggtctgtcggcggagcggggccactggaagaaaagcctgcggacctcggttcagcgcacgagtaggacccgacagggaagactgcaagggtcattgtccgagcagtgaccgcggggggctcgccactgagggggttcgcagcgcggagactccagtctcgcgggatctgaggcgcactcggcttcgagggagcggcggccgcgcagccgctgtcaggccccgtcttgggccgagtcccgggttccctgtagcaggcttgggagcggggcgccaccttcctgggccctggacgtggccgacgcgttctcagtgtccgtgaggccggggcaggagtggcgggggtcgccccgaagtgggtgggaatgagcggcccgaggtcctgaagtcggggtccgccccgtctccccgctgccagcccgatttcctcggaagccgcgaccccccacgctgggctggcagttctgggctctgccggctgcgccttgccgggactcccacgggcgggctccgggcctccgtcctgatcccttggagcggttcgacgaagcaagttccgcggcgggcgcgcggggcactgtgggtagcgccggggctcaccaggcggaggcggggcccggcgtcaagctccgcctccgcgccccattggctggcatcacctccgcgcgcctgactgacagcgcgcataggggcggggcgccgccaccgcttccgccgggccatggggccgcgcgtgctgcagccgccgctgctgctgctcctgctggcgctgctgctggcggcgctgccgtgcggtgccgaagaggcctcgccgctgcgccccgcgcaggtcacgttgtcgccgccgccggccgtgacgaacgggagccagccgggcgcgccacacaacagcacgcacacgcgtccgccgggggcgtcgggctcggcgctgacgcgctccttctacgtgatcctgggcttctgcggcctgaccgcgctctacttcctgatccgggcgtttaggtgcgtcaggcgcacgtgggcgccgtctctcagccttggccaattagcgcgcgcctagtgcgtcacgtgccgggccgcggggtcctcccctccctccctccctccctccctctctccctgttggagtgggcgtgggcggtgctgtgcggggtcgtcacgtggtgtgggcggtgcaggggccacgggactcacccgctctccagcctgcgcctggggttggaggtgcccagcgcgccgcctcttaactcgggggtgacgctgcccgtttcccaggtggggccactgaagccggagcatgccgggcaggggtcaggccctggcggggcgagggggcctccttggctccttgtcgccggatgcccgtcctcgttctcatcttcccgcctgccgccaggcctttccgtggggtcccgatattttcctttctgcttctacccactgaagctggttcgtcgccagggtcggccacgtgcccgccttgggtgctcccacagcccgggaggtgcagctgcgtccccagaccctcgcgggggtctccagctgtaggcagcccctgggcaggaggggcttctgcgtgttcaggccaccccggcttccctggcctgtggctccagtctcctctgggctcctgactacccagtgtggctgcttctcccgggtgggagagacacagcgaggaccttatccctccccatcaccaccctggcaaagtcaagccgctttttattttttataagtttttattgtagcgatggggtctcgccatgttacccgcgctggtctgaactcctgggctcaagtgatcctttttcgttggcctcccaaagtgctggcattatagatgtgagcacctgcactccgccatgctgctttttatgggccctgtgcagagcctcccctgtgctccacacctcttcctgtggaagcacctgctgcgcgctctcccctgcctgtatgcc

SEQ ID NO: 66680 - DNA, 2043 bp, Homo sapiens
tccgtgcttcgcaggtggggggcgatggacagcggtggggctcccgccctgagtggagcctgtgacctgcccgggccccagcgccccgtgacccctgccgcctgatccttgcctggctgagatggggcttctgaaggctgccggcaccagggcaggcagcgcattgggtccaatttattctgtaatgagaaattctccccgcatatttttagcttcctcctggcgtcgcggcctttgaaggctgaggggctgcgggacgctgatcccaagccctgtggcctggccatgtgggcagtgggtgctgggcacgggctggacaagtcccttcctgagtctgggtagaccccagtcccagcagtgcagagcagggggcggggccagaccccatcaagccctgtactggctccagaccagggactgagggcgaccctggataacccctgaccttggcggacacctgttcccagagtgagcctgatttctgacccttggctccacaggaagcttactctagagtgacctccggccgcggctgcgtcccaaagccgggacagctcccagccccaggagggaacagggcttcttggacccccacagtggcccccctgccaggcaggggtttgccggggcagcctcgcccagggccaggcctcggagacgccctgccctcccctcccttccccaggtccttcctctaggagcggccagcgggcgcggggaggttgaatgggggacgcaccgcctttgttcccgtccctgcttgggctctgaccttgagagagacaagaacagaaggaaaacggagcttctgctcaaatccgttcagcggtggcggtggtggcggctctcgcctcggtggcccctgcatgcaaatgagtggccctgccatgcctgggtggaggtggtgcccttccagctcccacctgtgcaggtcccagtcctggtttgagaagagaccccctcctcccgaccctggcccacccctcctcacccacgagatcccttgaagcaggagggggcttctggtcccagggtagaaggaagcttccagaactcccacctttgccaggtggcatgctggggccgggcacgccaagaccccaggctcacggccccttgtcctgtgcttgggtgcagccgccacactctgctccgaaagtgctcacctccgggagtggccgtccccctccctaaaagagccccccaccagacggagccgcccgggaagcttctccagcctgtctgggctacagagccttgtgtggctagaacccaaggccctcactccaggggtgctgagagagcctgtccagagggcctgcctcagccaccacctgggacaggttcacgccctccactgaagagacacccggccagccctgggccttcgacctgggacgtctgtagtggggtcaggggatgagacctggagctcagaacagacgggctgagctccctggaggagagagaactgagaaccttgtcctggcagggacgctagagcactgggtgggacagacctttctggaagagcaagattttaacaggaagaaaaagtggaaggacttcccagcaggacccagcctgaacaaaggtcaggtggtgtggcccgcgtggcccgctggggaatcgggggaggagggcacgcaggagacacaggacagagcccaccacgtctcagagctgtgggacggtggtgggtccggtccccaccccaccttgctggggcacaggttagcttgcccatctctgggttcacggtccctgccaggagtttgggtaatgcctcacacagggaccttcgggtccaagggctgttggtgcttgccctgcagttccctctcctgcactgggcctggtgaatgacactaattcagagacgtacaacacgatctgggcatcgccagcaaagtccagccagcgtttgatgacagcctaccctccacaagctcagagtctggtgagggaggctgtggcatgaataagggcaaaaacagagggcaggccaggtgcagtggctcacgcctgtaatcctagcacttt

SEQ ID NO: 66681 - DNA, 889 bp, Homo sapiens
gaagtaatccacctgccttggcctccgaaagtgctgagaatacagacgtgagccactgcgcccagcctaaaaggtgactttgggtaaatacacaaagaatggctgagctcctgcctctgggcctttgcatgcactgtccccccagcccaccccactgccccgatgaacctctcttgcagattgcagccaggctcccccactcagccccttccaactcagctcagatgtcacctgagctcctggccaggaggctgtgggtgccctttgtgactgtttacttacctgactcctccccaggctgcagccgctaagggcagggctgggtctgtcctggttatcgccgggaccagtgctgggcccagagcagggaatctcctgggaccgtgtcattggccacacgcagacacgtgtacacacacacacgcgtagccctgcgcttgcacctccatgcctgtgtacccctgtgtcgccagacacatgtgttttgggcccgagcctctcaggaactgacctccactcccgcgccagaccctgaccagaccctggtgcctgtcccagtggctgcatcaacgtgtcgagtggccactcactccaggggctgtgctgggatgtccccgccgggtgtgggcgctccttggggaacctggttacccccgaccccagccccagtgagaccccaatgccggctcctgccagccctggacggccattggtacgctggtcccgcgcagagtcttttccgcccagaggatcctgagggaagtcatctccctcctgccggccagttactgccgcctcggtgcccgccgcgggcagggggcagcgggaggctgctaggggaaaggaggcctgaggcgcccaaaactcttgagtgcggcttggggtggaa

SEQ ID NO: 66682 - DNA, 603 bp, Homo sapiens
aggggggcttccaggtcagggtcggagaggcttcgggaggacgcggctgccccattggccacgtgcccggtcatcacctctcggaggccaacacgggaaactgaggcgtggaggagccctcctaagccccacagctctgggatgggagccaggcctagccacctgcagggagagagacacggccggcagctgcccctccctgagtcaccaaacaggaattccgggacgtctggctggccctggaaggcacggctagcttacaaacccccagtcttcaggaacctctctgggtacctggcccctgtgttccccggggaggccccaggatccccttgtctggaacagggggaggggcctttctggccaccctctgctgctctacatttacccagtgtcttcaggaggaagaaatgaatgaatgaatgaagtggaaggtgtcctcatgcctgccagctgctgcagtctagcccccgtgccttgtggctacttagaggcctcagctagcagcatccaccgcagattaaaagattctccgtcggaggctgggatgcgctcacacgcttgggcgcccctgcgctccccggtggccgtgtgtctgttcca

SEQ ID NO: 66683 - DNA, 1191 bp, Homo sapiens
tttttctcctgagggcactggggagccacagcagagtttagagcagaagaaggacacaatttgtgccctgtgcccgtggtgagcggcgagcagggagggctgcctggaggcgggtaaggacctcagagcggaattctgccacagtgaagctttggaggaaatctttcttccttttctcttcttttcccatcacgggttgagaaattggagggaggggcattgctggggcttcctgtgcccgcgtgtgcggggggttctggggcctgctgcctgcctgagccagccccttttcccgccagaggcctctcgtcagtccccgggggggcccagtggtgaccttgggcctcggggaacatccagacctgggtcagtggcctcggcaagtgcccgggggatccgccctccggtccccgtgccagtttccacagcgggacaggggggtcccgggggccgggagtccgcagccccgaagacctacgctgccgccagccacacccctgggggtccgaccctcctgggtcccactttacagatggaggaactgaggcggtgactctaatcttcgcccggcctgagtcgcggggctggaacccgcagcgtttgccgattcccagggcccgagcgctccggcgagtgtgtgtgtaacgccctctccctggacgcctcgagtttaggaaacggcggagccgcccggattgaaattctcggcccgtgcacgcccggcggagaaatccatgacgcattgtttagacagacgcctttaaaccgcgccgcggcggggggcggcggccgggggcgcctgcgcggggaaggtcaccctttttttctgcacaaaggtcagccgtagaccgttgccaagacaacggccggcgtaaagatggaggcttaaggagaacagacagttcccctcccgaagatgccccgtgcaaagggcccggccgtgggcttgggaggctcagggggtgtgaggagctgagcgccggagcagagagagcggagagtggggcgctgggatggctctgggaggccaggaaggaatgcgggggcctggggggcagatcttggctcaggccctgccaggctgtcttcaaaccaatgagcctcagggttcctggctgtgaaatgggaacaacgtctgcccttcagggtaggcatctccaggctggtctggtgtgggaaccgctgtgttaa

SEQ ID NO: 66684 - DNA, 2849 bp, Homo sapiens
cctcatgtgatctgcccgcctcggcctcctgctgggattacaggagtgagcctgtatcttttttatagagatggggtctcgccatgttgcccaggctggtctccaatccttgggcttaaaggatctgccaattcggcctcctttgcttttaaagaactgtgggggctggcgaggtggctcaggcctgtaatcccaatactttgggaggccgaggcaggccgatcacctgaggtcaggagcttgagagcagcctgatcaacatttagtattctctactaaaaatacaaaaattagccgggtggggtggcgcgcacctgtaatcccagcaggaggaggctgcagtgagctgagctcgcgccactgcactccagcctgggtgacagagcgagactccgtctgaaaaaaaatcaaaaaccgctcagggaaaggcctgacactgatggagcgaccgctccggggctcccgccacccgcggctgtttccggtgccccccggggtcttgggaccctcccaaggtgggtcctgctctagttcagaagcttatgacgcctttgcggggatgcctggctttgggatcggttgggatctgctggaattgggtccgtggcgcgcagctcccgggctgggaggtgccgtaggacctggaagattctcgaaagttctggaaggttctctcagggatcgccgcgggcgggggagcctgttttcccaccgagacccgcgagggcggtgtccggggtctgactgcaggacaaagggccgggagcgcgggagggcggcgcccgggagcggccacacatgccccgccaaccggtctcctcaggcagcactcccgggaaaaaggggtagacgcgcggcggaaggggcggggccggcgcgcggccgtggacgccggagagggcgaggccggcgctccttgggagcgcgcgcgtcccattgggcagcgggcggaagggggcggagcttggcgccgccgcgaggcaagccccgcccccggccccgcggggagcggcggcggcggcggcggcggcggtggcggaggcggtgagcgcgggcggcgcggacggcagcggttggcgggcgggtcctccgctgttgcggccgctgcggcctccttgcccgggcttggggcgccgcgctggggaaagccgggggcccggtgagcccgcgggatgcgtcccctcggttccgccgggcggggctgaggcgaggaggccgggcctggggggagggggggccccggcctagagactcctccgggagcgcccggtccctaccgccgtgggtcccccactctgcccggacccccttttccgcccctggcgccgtgggcccctcactttgcctggactccttttcccgtccctgccgcccggaccccatctcttgcttggacccgctcccccatccttgctgcctggacccctatctccttccctggatccccctcacgtctgccgtgaaccccatctcttgcctggacccccatctgcttccctggattccccacccccaaccgtgaaatcccccatccctgccacctggaccctccgctccacctcctccgtgagccctcgttcttgctccctgagcccccccgcttctgctgtgacccccttctctgttgcctgaatcccccgttcctgcaagccgcaacccttcctccgccatgaaatcttgtccctgctgcctggacccctacttctgctgctgctgtgatcccctctcttgctggaaacgccacccctacctctgctgggaacctcctcttccctgctgcggggacgcccccctccgttgttgctaaattccacccccacccccaaacctccttttcatttctgtcaacagccaagccagtccttcccattgatgctgtgaacggtctgcagctgtccccgttctttcagggacatggcagccaaaagagcagtcgtttttccgctcttatttttgtgtgtgtgctgtggtcaactgttaactccccaaattggggagggttgtgagctttgattgtgtaaaatgcctctcctgccgaggtcggaggcaggtcttccgcacggagatgatttattcaggagccttttaaaactgatctagatagaacctttgggagggactgtgctgtattttatttatgaaaaaatgcaggcgcctccctggataccgagccccgtcgtttctgtttgtcagtctgctttttggcattgagcatctcaatgcaagattgtggaattaaaccatctacttgaggctaagtcgagctaacctttgcccctgagggctgtgtctgcgttaacatcgccagcaaacagttgtataaaccaccgtgcaaatttcgttccaggacacattggcgtgagacctgggagtacgttgtgccaaatcattgccacttgccacatgagtgtaaatgatggcggatgccaagtatgtcctctgccgatgggaaaagcgattatggcctgcgaaggtgacagccattattctgtaacttcaggacttagaaatgactttcgggtgacaagtaaaatcttgatcaggagatacctaggatttgcttcagtgaaataattgagccagaacacggttggcactgattctcgttccccatttaatggggttttggtctagtgcttccaaggttacacttccagaaatgtcttttttttttcacactaaaaaaaaaaaaagaatcagctgtaaaaaggcatgtaaggctgtaactcaaggaaagatctggcaagcagccctgtgatagtaaattatggtcgtgttcagggaatgctttccagcaattcagtagacagtgctcagctgcaatgcaaaagcccaggtccttgtctttg

SEQ ID NO: 66685 - DNA, 1588 bp, Homo sapiens
ggtggacgaggtggactacaagacggctgaggagaagtacatcaaggggccttcgctgagctaccggtaggccgctcccggcgctatctccagccacttgcgtctctgccttgcagtttctatttccacacccacaggcagtttgactccaggctgccgcagcccctctccctcatgaggtggcccaggtgctgggtggtgagctgatcacatacgctgaactcaccctgtgggtcactcctgccccccaggaaggctgtgcccgggtctcccagctggtcgctgtgggcagcacggggccacgggcacgtgcctgggccgtgtctgttcttaatctctttttgcaggggctgatgtttgctttttgcactttcctcccctctttccacagccccatggctgtgtgagaaatacagcaagattaagcagcagcacggcccggtgctttccagcagccagaagaatgctgtgatcaagatgtttctctcacatccgtgtgcttagctgcccttggatgtttggcccccagagcgcctaatcctgtctctgggcatgcggccaggccttgctgggagccaggcggggcccacggggcagtgacaggctgaagactcaactagagtcaaggacagggtctccggccagggtggcttgcgcagccaccgacgtctcccgggcccacagtcacaggagactcctggtgaagacactgaactccctcaccagccccatgtcctccctgggcagggcaggaggggcccctggagaggccagggaggaggtgtggggcctcggtggcattggcaggccacccccgcagagctgcacaaaggtggaatttggccttgtttagggagtgttggcccagctggcttaccaaaacaggaaaggcctttggatacagaaactgggtgttttcctgctggatcttcatggttcccccgtcatgcttgccgtaagaataagtgaggtccggggagggggtaaggtcggagccaggacacctggacccagcctgctggtttgtcctctccctccgtctcagaagcctcttcaccgctccacgcccatctgtggaaatctttcatcctgatttttttttttgagtctgggttgccgacatcaaaacccgttaggagttcatcacagcttccagttgccatgaaagcctcccgtgacctgtgagaatggtgctggtgctgatggagaagttacttgggctgagcacacaggccgtgatttcatcacgccggggacatgctcaaaataacaagccagtgagcagcatcgcacttgatctttggcctcagtggagccttgggtcacacactgggcgtcctgggacccagtctccccgccgcacggcgtttcccaggccctcttgttcttttagagttgcaccatgagcctctctgcactcttcccaaggctgtcctcctcaggtctgcctttctctggtgctgcggccggtgtgctctcccctatttccaggtctgctggggcgcacatcagagccagcagccgttgttgatctcttttgatccagggcagccctattgctgagaggggttgctagctaagcaattgt

SEQ ID NO: 66686 - DNA, 1960 bp, Homo sapiens
aaacaggcagacaaaacctccagtggaattgtgaaaattaaatgatatgcatgcagaaagcgttctgcaaactctgttttgctagtttgggtgtttagtgttagtttttatatcattagtactggttgtaaacttatcaatttaagcaagatggaaaatcgagggtgtgtcagggaagggggaagtttgagctgaaattatgacctcttaggggtgggaagaggaggctttggggttgtgaggtctgagcccccttactttgggatgagtccacatcgcggcgactcctctgcagaatgcggtgatgttgcggtaaggggtccgggatagctgcgaggcagctggaccaatcctgaacgaaagacatcagtgatcgcaagaggcgctaaaacttctgccgaaacccgggatcgaaccagggacctttagatcttcagtctaacgctctcccaactgagctatttcggctgggcggcagagtcgctctcgccgggactccgtcccgcgctgcgccttccctgcgcaggcgcagtcgtttcgcgtcagcaggccccacatcctttgtaaggtctcccagggcgccggagcgcagtgtcgtctctgtggcgcaatcggttagcgcgttcggctgttaaccgaaaggttggtggttcgagcccacccagggacgcgtggtgacttttgccctcctggaataacaagaaaatgagtgtcgcctctgtttttgtcggtccgccgcagacccgcggcccccacgtgcgcactccgatgacctttccgcctcgggtgatctgggggtgcacggcgcaacacgaccacggaggccgaaagcgcagcggaacctcccggctccaggttccggtttccgcatgcgctccgagccgctttgggcggcggccccgggaacccggagcgctaaggagaacggacctcagaggttgtctgaaggccgaggccaagatggcggtgctgtcaggtgagcgcggcaccggcggcgggtgtggggccgcgcgggtctggggccgtgggagcctcgggtgtcgtggtggcgtcgggggtcggtgccggcgtcgtggccgcggtcctctccgggcttctccgagccggccgctcctcgggctccccgcccggcttgcgatgaacggtcgccgttattgcgtccagagtacagtcggggaaaccgaggcccggtaggtcatgacgcaagcctccagcctcaggaaggcgctcggggtggaggctggaggggccccattcacgtccccgagaccagggcacggcccgcgaggctgctcttgagatgccctggagagagcggggcctgcctgacaggctgggaaactgaggcccattgagggtcttcgaggtcacagggccgggcctgggaaggaacaggacccaggacatccacgccaccctgctggaccctccacctccctccccacccctgggaggtaagggcctctcgcagagcctgtcctgctccagggacttttttgggatcagctgaagcctgcggacctctgctcagataaagttattaaatgcatggaataaaatccatagaattgcaaggaaatcagttacacggagaggcagttattaaaagattgtcttgaaacctgattggcgacttagtaatctaagtgcttcccttatgaacgcgatctagcggcaggtctaattgcgactgtgatttggaaggagtgaggagtggaaatgaggctttgatgatacggaaacgtctgcagcccctgcaccatagctaggaaacatctgtgattccgcttggtgaaaagttacaggtcctgctaatactgccgtattttgttgtctatgctaagaattttttatttatttattaagacagggtctgcctctgtcgctcagactggagtgcagtggtgccatcttggctcatcactgcaacctgtgcctcccaggctcaagcgattctggc

SEQ ID NO: 66687 - DNA, 928 bp, Homo sapiens
accttcagaggccggcccgggaaacccttccaaagccgagccggctgcgctgtgcacgcggtcacgcgggctccggctgcgggaagcgagactgaggcaaggtccctgcaggctgcccacctacggccgaggccctgctctacggcatcctgcagctgcagaggaagatcaagcgggagcggaggctgcagatctggtaccgcaggtagcgccgccgccgccgccgccggagcctgtcgccgtcctgtccccagcctgcttgtgtcccgtgaggttgtcaataaacctgccctcgggctgccgcctcccagtgtggtgtgtgggtgaaaggagccggggacgtggggggatcacagaccccctgcggcgtgccgcccttgggctgggggcggttggagcagagccgggggcagagacgggcactgtgcctgccagcagggtcctttcccgctgctctgcgaagaccctggggtggacatcgtggcccaaagtcccgagcgtggaaggccgcacacccatccttcctgggagggccctgactcagtctccctctatgccctaaggcaggctgagcaaagcccgtctgagcctgccccggggttcagagtgtggcctgtggcctgcgtgtggacttgggcaggtcgccactgccctctggcccatttccaggcggtggcatgggctggttagctgagggctggggccagggagatggggaggtggcacctggtccaaaccaaagggctgcagggcaggactgtgagcctcacaggctgtctgaccccactttggggaccctctccacccagggctttcggggaaccctgactccaccccaccagccccttcatccgtcgaagtccaggcctcatcagggacgtgcattcattcagcaaacgtcccatcttcctgtgttcagcgccagatg

SEQ ID NO: 66688 - DNA, 1946 bp, Homo sapiens
ccaatgctcatcaatgggcgcctcctgcacctttgacgctgcgatggccatgccaaagcccacctccaggacccggccccctgggcagacacagggcgcctggcatcactaggtggggcgggcttaggaggctgcctggaggaggggcacagggcagggcagggctggggagactgcctggaggagggggcgcagggctgggctgggggtctgcctggaggggggcgtgcagagcagggctggagaggctgcctggaggagggggtgtggggcaatgctggggaggctgcctggaggagggggtgcggggcagggctggagaggctgccaggaggaggggatgcagggctggggaggctgtctggaagagggggtgcagagcagggctggggaggcttcctggaggagggggcacagggtagggcagggctgagctgggggtctgcttggaggagggggtgcagggctgaactaggctatgtgagtcacatttgccacaggacgggagggcaccctgggccagcatggacagaggcgggcggaacacagtagtcctgagcgggaacagcgtgggccctggccagcggccagagagaggatgaccagccagggaggccgaagacggccgcttttggggccaggcctgtggggaggcgagagccttggactttgagcccagcccacgctgtttgtcccgggtcccttatctctcgggttagttacttttctctccccctccctctatccgaaagttggatttgcaagagtggccaggcaagacctggacttgagactatctgggaggggaaggactggtccccagtgggccacacatgggccccccgctcaatcctgattggcactggacactggacgtgcccattttcagggtgggaacactgaggcccgacccctggacggggcctgtgtggggccagggagtcctttcttagcagcccttagcgtctgacgccaggcaggccagggccaccccggggacagctgtctccctgagctcagctttccgagtgctattcttagccgggcgagtcggggctgctctcccaggcaggcagaagggcagcctctccctggcacgaccccttcctcccgacctcagacagggagctggggacccggttccacccagtttcacccaggtctcacgtttgaggtccccatctggagagcggggggcctcactccccctggagaggaagtttctggtacttaggcggtgcctaacgtgtgcgggccccacgcctgccgcactccccgtgaacgcctccgtgtgcccccacctgcagccccacttcccaggcgaggagacagaggcgccccggcgggagggtgggctgcagagtccccgggtcggggcagccccggcctcagtttcccctgcgcccccgggggcggtgcaggccgggcgggggctacctttggaggaggcggcggcggccagcgcgtgcatatagggggtctcccagcgctccatcaccggcttgcccaggatgcgcaggtgcgtgtccgctgcgtcgtaggccgcgggcgccgccccccacgcggggctgcagttctcgccgggcgcgaagatgggggtcgcgctgggggcgctcatgctgcaggctggacggcgacccgacctcgatcgcgcgccgcccgggcccgctccctgcaggggcttgtgggccgggggcgggtccaacaggcccggggggcggacccgcgagaggacgcgcgcgcgcggctccgggagcggcctctagcggcggccacgcgagaggtggcgggagtggggtcggggccccggccgccccctccccaaggagcctcggtgccccctctgcggagcgggcaccgcagccccgcgcccggggacgcgaacctgcaggctggggactggaatccccgccttgccgcttacgcgccatagattcctcatctgt

SEQ ID NO: 66689 - DNA, 2864 bp, Homo sapiens
ggctgtcaatgtgctgtgagattaaggagaaaagcagtaggcagcacgtacccggttttacaaaaccctgcgggtcacctgtttactaccgtcagcctagaccggtttttccacctccttctgctgacattggaggacgggtatcattctttttggggggtcgtcgtgtgcactgcagggtgctgagcggcatgtctggtctggacccactcgatgccagcagcaccccgcactcaagttgtgacaaccaaaaccgtgttttcagacattgccaagttatcccctagggggcaaagtcacccagaagaagaaccactgatgtatgcaattaacagatgcaactaaaacagtatttggctattaatagtaatagcacttggggggggggtcaataatatcttttcatagtcattgaatttagttaattgttttgatttgattccagttcagccccgaactgggtgaccttggccaagtgactcagcctctcggaccctcgggatcctcttctgtgaaatgcggacaggggaaggagcctcgcgcgggacgctcacgtgccgttcccgctccgtccgcccgcctggggtgcgggcgggtacactcccactccccgcagcgccccacgcggctccaccgcttccgagtgaagagttaaagaggaagcggcagccgcgcctgcgcccacagtgcctagcccggagcgccggtctcgcaagcgcgcacgcgcacgcaagcccgcacgcgcgcgcacgcacgcacgtggctcggcccgcgcgcatcctccccttgcaggggcggggccagcgcagggactccatttcccagcgtgccccgcggcaacgccaggagcctccgaggagaaaggaaaacgcgcgacggccccgactgcggcggcgcgaaatccgcctcagggacgcacgcacagacggagtacccctggacccgcccccggagaccccgtgcgggagcgcgcccgggcgtgcgcaggggcggcggcgcggcggcgcggggacgcgcggtgaccgttggcgccgaggggaggaggcagccgccgccgccgccgccgccgccgccgccgccgccgccgccgttgcgcagatccgggccgcggctgtggggagggcgacggagcgggtgaccttccggaggcgggagcgagcgaggaggcccgggagcgccgagcgtcgccgccgccgccgccatgaacaactcgggcgccgacgagatcgggtgaggacgagcggcgcgggcctgcgtctccgccccgagcccggcccgccgctccccgccgcccggcctcagacgccgccccccggggccgccccgtcaaggtcacgccggccgggggcggactcgggacccggactcgccgcggcttcgcgccgggggccctggacgggtgcccggggtctgggggggtcctggcgcccccgccgccgcttcccggcttcccgtcctgggggatcctgaaggagagcctgaggggtccggggggccccgccgccgcctccagacttcctggtcgggggaaccccgaacggcaacctgggggggtgtcctggggcgcccgtgccgccgcttcccgactgcgcgtcctgagggaccccgaatgggagccagaggggttcaggggcccccgccgccgcttcctggttgtggcggccccgaacgggaacttgggggggtctggagcgtccccgttgccgcctgtagggcttcctggcctgggggaccccgaatgagaacctgagggagtctgcggggagtccagggcgccgtcgccgccgcctcccggcttcctggccagggggaccccaaactgtggcgtggggggtggtccggggcgcccccagcgcgcgcccaaacttggcgggcggcgcacgtggcgagccgaggcgagggttccggttctgccaccgcccaacctatcccactcggggctccgggctccccgctcccatcccacccccccaaagtggtaaggtcgggaggggttcgcaaacccagggcccagggggctcgggtcagccggggcctgctgtgtttacgttgcctcggcgcctccccgccgggggtgggcttgagctgcggaagggagagtcagcgcttccgaggcggcgacgggcccgcggatctttgctgcgccgaggcgtcccctcctataggagcctgacctgctccggaccccgcggggccgggaaacctcatttcgctgtgccccagggctcggcgccattctttggtaggagcggctcctgccgcagcgacgtcgttttagagttgcattcttccggcaaaacagtctgggttgggtttcctagtggtctggtgtaaatttctcggtgcccttagctttgagcagcgccctgtgttctcagcgctgggcttggctagtgcgggagcggttgctgctagagggttgccttggcaggcgcctctcgcaccagctacaggtcacacttgtggatgggaaatgccttttgtgggctctccccctccccagacaaaacaaaagagcaccttccgttggagaaccaggatgaaagcacttagcccctgcctagcccgtgctgtgagtcctctccaggcactttgacttggcagggtccgtgtgcctgtgtgagggacattgcagggatgggcctgagcagggagtccaccggccatgggggatggagccatcgactttggggtgaggcagggaaagggctcccagatggggtacctggattaggtccattcaagccgcgggtgaacgtgggcccgctccacccaagccgtggctgtgaggaggctggagagaggtgagggctcctgtcccctccctgcatggacacccttgggaagtggggcagctggggtcc

SEQ ID NO: 66690 - DNA, 1085 bp, Homo sapiens
gctgctgtttcttcaagtgacttggatttggtttggttttcagggttttatgtgtgtgtgtgtgtgtgtgtgtgtgtgtgtgtgtgttttgtttttttttttttttttgagaactgcttgaactttaattccaaaggattgtgtaaatgagcatttttccggtcggttccagccaggcttgggggcccttccttcatggggtgggggctgctgctggctcctgctgggtgccgggccctgctggcagggatgtgggcggggctggccctgactcagcgcgggcacagcctatggagagtgaggcacagcctatggagagtgaggcacgcggaggcctcgctcctcccacggtctctaggcctgacctcaacgctccctggcctgattgcgaagggtgcgtgggagacgtaggattttaagttaatgaggcctcaacctaagcctgttgctgttgcgtgatcagcatggttttccctgaaatttgccttttcagatctcgtctctaagggtcaggaagcacagggcggctggcacaccccgcctctaattcttcccgcctcagccctccccaccgaagaacggggctggggggttgcttgttgacgttttgaagacggcagtgggtgcctttcctgtggtgggaacatgctttgtttttcacacactaaatttaaatcagtcgttcttagggaaaaaagaaggaacagggacaagctcctggcggttggctgtggcagacacttcaccaggggctgactcgcgggggctgagtgtacaggccccaggtggtggttgatgagaggtgatgagtgtgccagccaccttgcaggggtctttcctggcgagctggcaggagcagggaggagcacgttgctcctgctgctggtggggcagtaacgtgttcaacctgacagcgacgtttttgctgaaagccgaagccaagggtggtgtggttggccgtcagggatacagggccccgcgtgggaatggtgctttcagtgaggctggcaggattcttgcggctcaggtgggagctttggcctgcacggtgttttgctctctggagaccaagggtgatgatggtg

SEQ ID NO: 66691 - DNA, 2275 bp, Homo sapiens
ggttgcagtgagccgagatcacaccactgcactccagccagggcaacaagagtgaaactctgtctcaaaaaaaaaaaaaagtcactcctacatagttctagttactccttctctttgagctatcattattcacattacatttacatatcttaacaaacccagtgatattcctaactttatttttgaggcagggtcttgctctgtcgcccaggctggagtgccgttggcgcgatcacggctcactgcagccttgacctcctgggctgaaggctcagcctcccgagtagctgggaattttttgtactttttattcttttatgtccgtgtgtacacaaatttttgtatttttttgtagagaggcagtctcactgtgttgtccttactaactttatatacaaaattttatctgttaaagccggaatggttcttttcagcgaggccctgtccctgctccagtatctgtaatgaattctcgtgttcctcccacagtgggacctgaaccgccaaaccgcacctacgagcaaacggtaggcgctccataaatacttgttgatgtgggtgccatcgtgtagatgacggagcacgaacccgaggctcagacaggggcggcgacttgtccaaagtcccactccgtggaggaagcggctctgcagacctcaggcggcggctgctctaatccctgcagcctgtgttttgccctccagacggcagagggcgcgtgttcgccgccgggaaagcggaagcgcgtgtgcgcgcacggccgagggggcgggacatgccggcagtctcgcgataactgcgcaggcgcggaccaaagcgatctcttctgaggatccggcaagatggtgagtgttgcgatttggcgcgtctctgccgggcctatccggctccatccaacctctgaccgtctcgcgggggccgcagttcgtccccgcggctacggcggcttgctcccgaccctgcaggcggctggatgttggggcgaggggcggacttggtgggtgtcgggacgacgcggggctgggaaggcctgtccgggccttcatgtccgggtcctcgtaacccggagccgcgagtgatccccggggacgggtcgaagcggtgtgtccctgtcgggcttctgtccccggcggcgccgcgcgtcttccgcggtgtcctcgggcccggtggccccgggagatgggtgtcgggatcccgctgacgcccgatccgcgcccgcacaggcagaagtagagcagaagaagaagcggaccttccgcaagttcacctaccgcggcgtggacctcgaccagctgctggacatgtcctagtaagggcggccgcgggggtcgcgggcaggggctgggccagcggtggggcttgtccgggtgagggcggcggggcgggggtccaagcgcctctgcggcggtgggcgggcacggtctccgcgcgggtttggaactgagtgtggtcttgcgcccagaaaactgtccagagacgttgaggtttttgcttatttgcaacctgccccccgttgttcacttttccgcggcttagttggaaggtgtagcccctgtctgtagcccacgtgacttagaataaggggctgcgttagactccttagattttaagggcggtggaggtcgctgggtcctttccaggcagggtggtggtgggcatctggcttgcgcttttattttttaatttttgattattttgaggcggagtctcatcctgtcgcccaggctggagtgcaatggctccgtcccagctcactgcagcctcccactcccgggttcaagcgattctcttgcctcagcctctcgagtagctgggattagagggcccccccaccacgtccggctaatttttgtatttttagtagagacgagtttcagtgttgcccaggctggtctcaaactcctgacctcaggtgatccacctgcctcggcctcccaaagtgctgggattacaggcgtgaacaccgcgcccgaccttgatttttgattatttgtggaaacagcgtttctctgtgtcgtccaggttggtcttgaactcctgggctcaagcgaccctcccgcctcaacctcccgaagtgctgggatcacaggcgggagccactgcgccctacctgccttcccctgcgtttttagaggcctttggcccgagctgtacgctgcagcaccttgtctgaggctgtggtctccgggccgcttgttctctctgaatctctgcagtcacacggtggctcttgcatgtgaggggtgagtcgcgcatatctggcgggggtgccaga

SEQ ID NO: 66692 - DNA, 535 bp, Homo sapiens
cggagcctccccggtgcccaaaacgccggcgcgcacccttctggcgaagcagcacaagacgcagagatcgcccgtgcggatcccgttcatgcagaggccggcccggcgtgggccgccaccgctggctcgggcagtcccggagccgggccccaggggccgggcggggaccgaggcgggcccgggggcgcgcgggggccgcctgggcctggtgcgtgtggcctcagccctctccagcggcagcgagtcctccgaccgctcgggcttccggcgacagctaaccttcatcaaggagtcgccgggcttgcggcgccgccgctccgagctgtcctcggccgagtccgcggcctctgccccccagggcgcctcgccccgccgcggccggcccgcgctgcccgccgtcttcctctgctcctcgcgctgcgaagagctccgagcggcaccccggcagggcccggccccggcccggcagcggccccccgcggcccgacccagccctggcgagcgccctgcccggcgcaccacctccgagagcccg

SEQ ID NO: 66693 - DNA, 1686 bp, Homo sapiens
tcactgcaaactctgcatcccgggttcaagcgattctcctgcctcagcctcccgagtagctgagattacaggcgcctgccactatgcccagctaactctgttttgtttttgtttttgtttttgttttgttttttcatttttagcagagacggggtttcaccatgttggccaggctggtctcgaactcctgggctcaagcgatcctcccgcctcatcctccgaaagtgctgggcttacaggcctgaaccacagcgcccggcctccacccctgtcagaagaaccctctgaaaatcggtcccactctacggaggagtagagggagactcggagaggatacggaccgtgcccatgttgcgggggttcccagggcgtggggtcaggagttaggggtgtgcttctctcccgtccccttgctgccggggtctcaggtccgcttttccccgggaccgggctccccctaccttccggggccaggatggtgaacactggatcctctgccggcgcaccccgcacatcctccaggatctgctccaccgtggggggcgctgggcgggtgggcagcagcacgcgcttctttgccttggagcccatctctgaaggcggggaagggggcgctgaccggggcgtccacctctccgcccttgcccgggctgctcctcccgcccagcgaactcgtacgcacccgtcgcggtcccgctcccggggaagcccgccctgtcccgcccctctgagctcgccccaggccctgaccctccctccgcccaaaaacacggtggccaaggcttcagggtctggctcaacctctgcctcagtttccccgcggtcaccccagtcgccggcctcttcccacctgggcgcgggacccgaaagcccagcgtcgacgacgcagccacttccgattccggtcggagcaccgccccgtccccgaacacgtgacacacacttccggcctcctctcccgccggcccgccgctcatcgcggggctccgccccgtcttaaagggatagtgcccttgagactcggatctcagcctctcaggcgaacccgaacctggacgcgctacgatgagagcgagttcgagtccaggctccactggctgggtagaaaagcatccgaggctcgtctttctgaaaaggggaacacggcactaggggacacgccacccatgtggctgacgggagcacaaaattgctgtccacctaagggagcctggtggtgcatgagcactcggcggccggaacacagcgggggcggggcggtcgcggcgcctccacttccggccaaggcgggtcctcccacctcggggacggtgctggaggtcaccttttcctctccgctgatgcctgggaaggcagaaagagcagagggcccttttcctctctcaggggctttattgagatgcagtttacataccataaagttctcctgtttatttcgttttgttttgtttttttagagacagagtctcactgtgtcgcccaggccggagtgcagtggcgtgatctcagctcactgcaacctccgcctcccgagttcaagcaattctcctgcctcagcctcccgagtagctgggactacaggcgcccgccaccacgtccgtcaaaatttttttttgtattttagtagagatggggcttcactgtgttgcccaggctggtgtcaaactcctgagctcaggcaatccg

SEQ ID NO: 66694 - DNA, 3282 bp, Homo sapiens
cctcccgccaaaccgccgagtgggcccaggcgtccgacccgcccccggcgccatagcaacgcagaaggcttcgactcccagggggccttgcggctactcagccaggaggggcgcgaagatctaacagaagcgggagagggacgcacgcctgcccgtcttccgcagacccacaccctcgggagcctcagttttcccatttgtacaacgacaagactaacccagagaagcgggttcactgttgcgataacgcgtcctaccctttgtttgacctctcccactttccaacacacccctccttcgagaatcagcccggcctcctgtccggcctaatcagaatcattcttttgcgtaatcccgcctcctccgataagcctcgccccgttcccgcccctaccattccgccctgcctcctttgtgatcagccccgccctccactggtctcgccaatgaatcgcgtcccgtttctccaatcggctcggatgtttctttagcccctccccccggttccgcccccccacgcctctcctcgccctggctccacccttcagccaataatcccatcctctgacaccgcccttccaatcagctacgtctcgctccggcccggccaatcggtgccctgggccgccgcgccccgccctctcccggcggggtctgggcagcggcggccgtggcggagggctatgcggcgggggagacggggcaggcccctcctcctttgtccgccctgccctcccattggtcctagcggggggccgggggcggacaccggcgcggggccggagcatcgcggctcaggctgcgggaaagcggtgcgcgtgcagcggggtgggtgccctggtccgcgggcgagctcgagcagccaaccccgggcgcgtcggggccatggacggcctgaggcagcgcgtggagcacttcctggagcaaaggaacctggtcaccgaagtgctgggggcgctggaggccaagaccggggtggagaagcggtatctggctgcaggtgagccgtcggcgctagcccgtttcgccgacgggcacaccgaggccatgggcctgggggtcgcagaccggactccttccccggctacggggtccggtccggccggtggagcgcgcgaggtgactgggacctcgaggtccgcccgcagcccttcccttgcccgcgccctgcgaccctgctcccgggccacccctctctagcttccgcccctggccgccccccgacgcctccttccgggcgctgggtgcctgccatgccgaagtccggttcttccagttgcccagtggccccagaggggtcgggatgccagtgtcctgcgcgtttcgccgtcccccttcccccgtggaccccggcctggctgcaacagtagagatcttcccgtttttctgaggggaggctcctggcgggaaggggaacggaccgtcctgggggcctgcccaggacccttctcctttcctcctcctctcctgccctagctcaccttcccccagctcaatggcttagtgccaccgagcgtaaatgtttgttaagacggagttgggttgtctgacggctgtgatgtggggaggctggactggggcccacagagccggagatccaggcaccccgattgtgactccattacagttcttccgtgactttcacccttggtgacgctgcgcgccccttcccctttccaaatctctagcaagagcatgtagtaaacgctccttaaatgcctccctccccacctttaaaacttttttttgagaccgagtcttgctctgctgcccaggctggagtgcagtggtgtgatcttggctcactgcaacctccacctcctgggttcaagcgattctcctgcctcagtctaccaagtagctgggattacaggtacccaccaccatgcccggctaacttttgtatttttagccgttcaacatggtgaaacggggtttcaccatgttggccaggctggtcttgaactcctggcctcaggtgatctgcccacctcggcctcccaaactgctgggattacaggcatgagccaccttgcctggcctaaaactttttaaaattaacttttttaagagacagggtctcactatgttacccagactagtcttaaacttctgggctcaagcgatcctcctgcctcagcctcccaaagctctgggattacaggtggaagccactgcacccagcctttcttccgtttgtgtggtgctcccagccccactggctctgccttctcttccaggaagctccgcagaatgactcacaaggacttgctctgggcctggggtattctgggtagaggacagtgccacttttttgagcaccttctgcaggtggatcccaggagtccagttcccccccaattttcccaccatctgggggttcccatgccaggcagcgccagaacagtctgaagtctgtgcccacaccctggaggtccccaggtgcctggtcccatgtgcagcgcagcaggtggcatgggcatggcccggctgtgcctgcccccgggagcaggtccctgacctctgccctccctttccacatccctggggctagtgggcaggaatttaggtcgtagagcgcccaggaggcaggcagcagggaggggctgcctggggcaccgtgtcaccagagacgaaactgaggcacagggaggcaggggctgcctctgtgcctgttctgtctgaagcatacagtcctccaccctgcccacccccagtcccatctgctgctaatcttgggggctgggcctccctccacagttctgatgtccaaggtcatcctcccgtcgctgaagctgcaggaaaagggatttaggggagggacgccctgggagagtcattcctccccacgagccaggcccggggagagatggcagtccctcatccccatctcccacctcctttaaattgacaaatcccacacccctgggtaacatacgaagaaactcagaggggacagtgactgggaggccactcctgggaccagctgggggactcctcctacccctgaccttgggtgcttttggataaagactaaagcaggtgggaggggctggggggacttgggcctctgccctttggtccagaagtggcctctatctcactctgcagatagcagccccaggggaggaggaagaaggctgtccaagctctctggagcacataggttccctgtgtgaccttgggcaacacccacccacccccagttttggctgttgaataattcaggaaaagcacaaaacctggcacacaataggcgcttaataaatgcagctgtcgtag

SEQ ID NO: 66695 - DNA, 698 bp, Homo sapiens
tcaccgcaacctctgcctcctgggttcaagcaattctcctgcctccacctcccgagtagctaggattacaggcatgcgccaccacacccagctaattttgtatttttagtagagacagggtttctccatgtccgtcaggctgttctcaaactcccaaactcaggtgatccacctgccttggcctcccaaagtgctgggatgacaggtgtgagccactgtgctcggcccgggactttgtcttttactcggggtgaaggatttatcagagcaaagggcaagggtaatcattaatcaccccccaccctgtgtcggtgatcacacggggatggcagacggggctctcagaatctgccgatcactggcccagctggtttgaagaatgtggtctggtcatggccctgagggaggagagagggtgccaggctcgctctgcacctggcatggtccctcactttcactggcggggagcagcaaaactggctctggcctgcccaggtcagcacacccagggagcacaggtggggaggaggacacacttgtcttaccaggtggaaatgtgacctttagcccctcaggcattttattttatttttattttgtattttttaaattttatgtttgagacggagcctcgctctgtcacccaggctggagtgcaatagtgcaatcttggctcactgcaacctctgcctcccggg

SEQ ID NO: 66696 - DNA, 1784 bp, Homo sapiens
aaaattagcccggtgtggtggtgcacacctgtaatcccagctacttgggaggctaaggcaggagaatcgcttgaacccaggaggcggaggttgcagtgagccgagatggggccaatgcactccagcctgggcgacatagtgagactcagtctcaaaaacaaccaaccaaccaaaaaaaacagggggagggggcttgaccttctgaccacccccaccggactctaagcctggtttgaggagtgggggtctaggtggtgaaaagtggggggctacaaggaccaccctaccccctcctcaatgggccctgcccagaatcaaggctctcccctccccgtgtgggctgcagcccggactggcggagggatctcaaggcaagccgcacctctgggcctcagtttcccccggagaaagtgggaggataggcagatggacttaccggctgcgcggagcccaggcagcgcgtcccggctccctgagcggccccagggcgagcggaagcggcggggcccaaggtgctgggcggggtggggagcctgggacggtccctcccaccgcggcctccgcaggcgcgcccaggcccgggtcaggaggggcggcggccccgggcgccctcgcgcggcgggcgcggatctgcggcaggggactgcccggcggacgcgagcgcaggggtcccggagccgcaggctggtgtcgggcgcccgggtccgggtgaccttggcaggctcgggcgggggcgcggcgcggggactgaccgccctcctctgccccggggctgctattccgggcgccgcgctcagggcccgggaatgtgcgcgaaccgaggtcaccccgccctgggtctgggagtcccgggcgctgcccctaccccgccgacgcccggattgcgtcccaccggcgtccccatccccggtcacagccccctcccctggtcctgcccctcacccctctcgcggggggtcgacctgctcgtggatggggaccctggcgcgcctgggctcccatccgggggttccccgacccaggtcccggtcacccccagcgcagggccccagcgcactggggagaggctcggccccgtgggccgcgcgcggggggcggagagaccctcccagctggcgcattcccgggcgctgctgtcaccaggggacgcgccccaccccgcctcccgccctccctgccgggccccggggctgccagcggggcttcagagccagacccgggtccaggcggtccctctccctcacagccgcggccacaccctctccggcctcagtttccccatcccagcagtgggcccggcagggatctccaccgcgaaccttccatctggaatccggctctgcgcggaccggcaacgcgagggggcaccccgggactccccccaccccaccctttcccgccgggcgtctgtgagccgccccgtgcccacccacgcagggatgagaccaggccctgggttctgggctccaccagtttctggtgtcgccccacggcgccccctggcgggcgggctgagggactggggcactaaaggagggggtggagggactgtcctgctccctgggctccacccaggctcggtctgagcaccccctcctccaggaagcccaccctgctgtcccacagcgctgaccacagggagagaggtttgctggggacatacagggtgttgctggtccaactcagtctgccctccagcctgtagcatgtcagcagagccacccatatgccatttattgagcacctactgtgtgcacagctgtgaacaacccagccagtcccag

SEQ ID NO: 66697 - DNA, 924 bp, Homo sapiens
acatattatgtctacaaactcagtcaacagtcacttttattaataatgcatcagcctgagattggtgggtagctctgttttgctgttttcccgttttcccagaatcctctagggcagtctcctcctgtcctcttctgcccctgccccagacgtcctggcccatggcagatgccagatgtcagacaactgagacagctcagaagaatctcccatagccagaaggaaactcaattctgcaggcactgcacagaaatgcttggtcccatgcttagctcaatcgcctctatccaggatctatgtactgggccgatacatagatcacaggaagttttatttctctccacccctgccccccaaccccgggcaaattccatggtccacaaggacacgggcaggctccagcatgtccagtaggacaggacgcctcagggagggcacgaggacaagtgcctgggggtctgaaaccactgagggctcttcccggagatttacttttgagacttaactcttttaattactctctggactggctgacgttcagtcgaagctggtttgcccagggcagtggaaagaaaccaagaaaccagaggctgagactcaggcttcatgtagccacaaggaaggaagaagagaccccacaaaacactcccaacagctctttgcctccggtcaccccaaagagaggccgttctgccttttaagatgaagggaaacaaggccgggcgcggtggctcacgcctgtaatcacagcactttgggaggctgaggtgggtggattgcctgagctcaggagttcgagaccagcctgggcaacatggtgaaacccgtttctactaaaatacaaaaaattggccgggcacagtggcacgtgcctatagtcccagctactcgggaggctgacgcagaattgggttgaacccagga

SEQ ID NO: 66698 - DNA, 2284 bp, Homo sapiens
gctgcctggacgcctctccctgtcactcaatgtcacgtcctcagagaagccctccctgaccccagtctcattcaggccccgtcatctgccctcccagatttcagcatgtgtcactgcagatctcaggacgtgtacagggttccagctcataagggtacacatttggggaccaagtttcccctctcttgctgtcctccaactttccaggaaccagtccctgagctcctcctgcaggacgaggccccacacattgcttctgatcacagccatcctttccccgctcacttttctcactttatctccccaaaccgggacagtcaagaaccacagaggaccgaagtgcacagtggacggagcggtcgttctgcccctccttggctcgtggaaaccacccgccctcacctgggcggtctcctgcccacgaccccgagctgtgggaaaaagggggaccagccgcacacccccctttacccaggtgctcggcacatggcaggcgtcctccgctttcccctcctgggggacctgaaggcgccacgggacactgaaccaaggggagggcgcaatcaaagctggcccagaatcaaaagcatctttcccgagccaggaaaaaaaaaaaaaagaggacaaacagcaggtggccgactgtctgggacttggctgcagcaggcgactaagtctttgttccacggagggggttccctgcgacctttcagagcagcgccttgttccaatttggggacgggggggtctctgaaagccttccaccaccagtaacatccacgcaaagactaccgttaggtgggctcggaaagtcgaaagcctcaggtctccaccctgagggggccacgacccaagaggaccagaggcctcggaaggagtcaaggggaatacctttaaaaaaagcaacgctgcgtgggagaccagtcaccctgaggcgcttattcccaggactggggcgagcccaagaacccgtattttcacgcacgccctccccgatccgcccatgagccctgctccccgaaatcccggctggccaccccctcgggctccgcgccaccccaggagcgccccaagaaggcaccccctgcgtctcacgggaaccaaagggacagcccaccctccacccctgccccccggtagcatctggccgccgccaggcgcccctggcccagcgcgcacgaacaaaggccgcagtcgccgtccggcagccagtccctgaacggccggccgaaagccatgcggcccaacaagcggcgcacgcgcactgggcctccgcgcgccgggcgcacacgcacgcaagacgcacgcacgcacgcacgacgcacgcgcggggcccaggccgcggcccggggcaggggcgccgaggccgccgcagaggccgctgggaggagcccgttgaggccctgcgcggccggcgcgctcattcacctatagtaaaagacatccctgtggccggccgacagccccgaccttctgggcacttcttccctctcccagccctgcgggagcgccgggcactcccacctcttccgctccattgcgcccggctcctcggcccgccgccgggcccgccgccgccgcccggacccccactcgccgccgccgcctcagctgcctccgctgccgctgccgccgccgccacttgccgcggctgttccggcccgcgggcccccgccctccgcccccagccgggcgcgcgccggctttgccgccctttcggccccctccccgcgctcgccagcccccgctcggggggcccgctccgcccacccgcccgcgcggggccccgcgctgcgcagccgcggcgccatgcccccgcccctctacggccccgccaatcagcgcgctgggagggggcggggccttaagtggcgtgcgcgcctgcgcgctgtgccttgcgagctgccagtgcccagcagctgtgcccggagtccgcgcggctccttttactgtgccctgtctctgccggccgcctggtgcgcgtgcgcggggacatgctttcggactagtggggtcctttcctccgacctttctccagcccaagtcttggggactctggcccagtgactggacctcgacttccccgccctcctggtctcccagcttccgagctttttacgagcgtccaaatctgggggacttcccccgtgaccaccccttccacgcccccaagttccctccagtagcttttttttttttgagacggggtctctgtcacccaggctggagtgcagaggcgcgatcttggctcactgtagcctccgcctcccgggttcaagttgtt

SEQ ID NO: 66699 - DNA, 2422 bp, Homo sapiens
ttgaactcccaggctcaagtgattctcctgcctgggcctcccaaagcactgggatcacaggccggagccactgcacccggctaagaccttgctgctttttttttcttttctctttttgggacacagtctcattctgtcacccaggctggagtgcaatggcgcaatctcagctcactgcaacctcctcctcccgggttcaagcgattctccttcctcagcctcccgagtagctgggattagaggcacccgccaccacgcctggctaatttttgcatttttagtagagacgcgggtttcaccacgttggccaggctggtctcgaactcctgacctcaggtgatccacctgcctcggcctcacaaagcgctgggatcacaggcgggagccaccgcacccagccaggccttgcttcttagcaccccacgtggaaacaccagacaaccctacggaggccacccccagcccggcttctatgggggccacccctatgccgtcccgctgcccacgtgggctcaggcgcagctgaagctttcacgctccttgttaaaaatcataaaaaccaaaatagtggcaaaggccgaagatgccgcgagtgctgggctggggatcgggactcggcaccttctgggcgcttccgtccagggggtcaccattcggatcccccggtagagatggggaaactgaggcttggagcggcctagccgcggagccgggcatgctggggtttggccttgggtccgtcacgtcccgttcacgccgggacgcgccgctccgcctctcggcctcagtttccccctctgtcaccgggaacaacaagggacctgggcccggcccggcccggcccccggaaacgcgcacaaatacggaacgcagcggcgcggggctgggccgaggcgggagcgcggatggggccgcgggtcggcgtcctcaccagttcttgaccagctcccggtagcgtgggcccaggaaccgggtcaccatcgcggcggagtcgcaccctcaggatgaccctgtccagctgacccggctacactgcgcaggcgcggccgcggcgcgcacgcgcgcggggagggcggggggggggggaggaaaaaaaaacatcatccgccactgtgcgcgcagacccggaagccacttacagtaacttccggcgagggttggacgaccgcggagaagtggtccggagtgggcggcgttagggcggtgctttctggccacgtggtctggcggccgattgtgcttctgggctccgcggggctacctgccagtgattttgtgcgcctagtatgtgccagaacgttatttacaatgaaggaaactgaggtccagcggggaagggtcttgctcagagtcacacagaggggaagagctgggattggagcccacttttggaggcgtcaggcgttgttcctgattcgctgtaggactttggtcgagcggcagtgcttccctgagcctcagcgttgcccgttgcttggaggccctgtcggaaatctctttgcaggattccgtttgcgagcctgggttattcctcattccggcagcagagggtggcctggctccttgctcggtgaacgtctctggatgctcttagctgatgacaggcaggtctttctgcctcctgctttccaccgcaccaggctcgcttgggctcgcctttctccagtccctgcttcctctgctctcccacaacccggcgcagcaccgtacatgctcactcagctcccagcttccagcctcccccctgcacaccgggccggtgtgggcagaaggaagaggggcatattcccagacaccgccattgcacttttgtgccttttcccccatattcaagagttgcctccctcaggaagccctcctggactgcctgacccacaggcacctttacagcatgaacggaaaggccatagcctagacggggcactgggcgtgatttgtctctcgggcgccagcgtcacttgcaggcctcgtgataaggaatggacaccgtgggttcttctgcccagcctggcctgtcctcctggggtcagcccctcagtacaccccaagcctgcagctctctggggactgcgggtgctaacccatccctatccctggttaaggactcagggtgggagccggaaataggttttggacaccacagtctgggcactgtttttctttctttttttttttgagacggagtctcgctctgtggcccaggctggagtgcaatgacacgatctcggctcactgcaacctccgcttcccgggttcaagcttctcctgcctcagcctcccaagtagctgggactacaggcgtgagccaccacacctggctagtttttgtatttttagtagagatggggtttggccatgttggccaggcttgtcttgaattcctgacctcaagtgatccgcctcccaaaatgctgggattaca

SEQ ID NO: 66700 - DNA, 1522 bp, Homo sapiens
gcgcgtgggggggggcggcggcatgaagcgggggggcccccccccggacaaaggtgcgtcgcggccgggcccccgagggtcgcgcgtgggcggcggcggcggcgcgcgtggcccgggcccctcccacccccgcgtggcccgtcccgcggggcccgtgcgcgcggccggccggggcgcccctggggcagcggcgtgcgcggtgcccgcggtgcccgccgccgcgtcggctccggcccgctacgcccgcagccgccgccgctgcctcatcttcctgcggcgggagacatgttccgccccccgcccgcgccgccccgccccgccccgtgcaggccccgcccctgccccgcccccgagtgccccgcccggcggcccacgcggatccctccgccacctccgggcggctcgggcccgaacgccctagctcggcctctcgagcaccctcgtgaggaccccgaatcccgtgaggtccagagcctgggagcggggacgcgcagaggaggcggtcgggccacggcgcggggagaaatcacggactatccccgtccgcggaagcacacacgagctgtgcgcttagtccatgacgcaagcgagtaaggcccgtgagattgaaagctaaggcagagcagtctggtcaatcggaagccgcgaaagtctgatgggcggggatcctagccattcgtggtgaggccccgcctcctttcttctcggccccgcccctcagcagaggcgggactctgcgagcgagaggccgcgagaggcggccggggtgggtcctggagttttgttctcaggttggcgtggccgcccgcgcggagccttctgcttggttatatttgcgttcctcgggccggccccgcgtgctgagtggtgcgagcgggtatcacggccccgagggggctacgtcagacccattttcccggcgggaaaaccgactctggctccggctctgggtcagagagccccgcggggagtctcagcggtgcctttgccgacttgagtctccgtctcggcatctgtgaatttggacctgactttggacagaactcaggccagatctggcttcctgattcttagtagtccgtgtctacattttagtaaaaagtgaccccgcctaggatcgggcgccgtggctcctgcctgtgatcccagcgctttgaaggaggccgaggcgggaagatcgcttgaggccaggagttcgagaacagcctgaacaacatagtgaaaccccccccacccacacccgtctctaaaaatatttaaaataatttaaaataataatttaaaaagttgaccggacgcggtggcccacgcttgtattcccagcactttgggaggccaaggcgggcagatcacctgaagtcaggagttcgagacctctctggccaacacggtgaaaccccatctctactaaaaatacaaaaattagccgggcatggtggcgggcacctgtagtcctagctactcgggaggctgaggcagcagaatcgctttcacccgaaaggcggaggttgcaatgagccga

SEQ ID NO: 66701 - DNA, 985 bp, Homo sapiens
cttctagcgcaaggtgactcacctgctggcccagggacaaagctcccccagccactccccaccgcccgccaccccccaccgcccgccacacacacacacacacacacatacacacacacacaccgcacagcacggagagggggtgagtcattccaccccaccacatctgtgatggcctccctgggtgcgtactaacctgtggggtggggggattatactaagggccgcccgggaccctccctgcttggcctcacagccagggagagaaggcccaaccacccccagcctggcattcaaggcctggctttgaacacatgccccccccccacacaccccagcttcattcagttttatctcattgactcattcaacaaacattccctaatgaagtcctgtgagggccccgaaactgggctaacgccagacgcctccccagccccaccgcctcttcctcagatgacaaggagtcttttcgtccttccattggcctacctgacttggactcctacacatcctacaaaacccaacctcagggctcctcctccaggaagggaggactgccgcctccccagttctgatctcagggggatggggatgacttttcccctccctaagtatgggagccccagcgggagggacagaggctgtggccgcagctctagggtggtgggggcaggggagcaggagtgatctgagaagtttgctaaatccagcgaatggcctggttcccctcccccatccccggtctgcagattctgcctaaggaggtgcgaatcccttcccctttccccattccccattccccagtccaacaccccctccccacccagaggtccacgaggcgagacagacccaaagagagaggcaaggacgtgggcgttggtcggtcttgcggggaggaggtgccgtgctctccccacttcctgacccagcagaaagcgcccgggcgtgtccagataaaccgcgccttaatcgaggcgccatt

SEQ ID NO: 66702 - DNA, 1032 bp, Homo sapiens
ctgcccctgtgttccggccacccgatgcacccgtcctcacccttctggtctccattcatacttcctagcccggccaggctgggccttgtgcctcctctcaggtgcccctctgcctggggagtctcccatcccagctctgatcaccgtctcacctccgcggatgccagcaggacctgagccttcctgagtcacgtctgagtcacccgtgtccccaggtcctggtggggcagggcttggctcagggccagctctggtgctcctgggagtctgagcggggccagtgcccattcaccgcatgaggaaaagggaggttcagggcgaagaggggtttaggctgtgggacgggggagaggtgggggagacccccgtgggggcagactggggattggagagttggagagaatgctcaaatggccagaatccactcgaagtgtatctgggggcagaaagagacacggacacagcgctggcttcctgccccctcactaactgggatgccccattactcggaagccccccaccccgtcttcccgcagccgcaggggcacaggaccgccctggacagggctccagagtccagggctgtctgcacccgccccggggccccgaccgcgcgaacctctaggggcgcgctctccacccccgccgccacgaccccagctctcagcctgggtggagcccagagagggtgcgcgggctcccggggacgcacagcagtgggagcacccgccgctcaccggcgcaggagaggcaggggggggcaggccgcgggcgtccagggcggcggacgtggtggaaccgttagcccggtgccaacggtcctgaaacggggggcgggatctcggggcggggcctcggggcccggccaaggcgaaggtggagccagttcggaccccggaagggggccgggggcggggcctggagggggtgggtggggccaaggcgaagaaggggcggggcctcgagggtggggccgagcggagcacggccgagcaggatgggggccaggcctcagggacgcggtcacggccg

SEQ ID NO: 66703 - DNA, 753 bp, Homo sapiens
gggaggggccgggactttggggaagggactagaaggaaggcgaggacgagcggggtctcgctgagcaaagtcagagtaggggcggggccaggactcaggggcttggccagagcgggaagcggggttgagcatggccttgcggagcagtgttatggtaggggcggggctgggatccggagccgttacaaaggaggaaggcggggccgcgcagagcagggtcagggtaggagggcgctcagggtgggtccaggacagaaggcagggccttgggagggccttagggagcagtgccagtgcaggggcggagcctgaaagggaagagggtgtcagggcagggccgggccgggcttggtcagggagcagaaagaacctgcaccgcagggcggggttggaagggttcttggaaaggtgggcctgggtcaggtcggaatgggccttgcagacctgacggggctgaggctggtgcggccagcgtggcagagtgcaggaggaaggaccacaggtaacggcggttatgtaagtcatgtctgatccgtgtcctgggttcgttcattcatcccatacacgttcaacgagcgcctcctaggcgcagatgcagggctgagcaccaggctggggagaggcggttatagccattgagaccaccctaaggccaagaggaagcccgcagggttctttccagcaggtggcaggggctcagggatccttactgaagaagtggcaggggtgagttcagcgacgaggctagggcgg

SEQ ID NO: 66704 - DNA, 1101 bp, Homo sapiens
gaatggaacagtccagcccccaggcacagcagctgagggctcagggccaacagtccctgggctttgtgtgggtgcagtcggaggggtgggcaggtgtcacacgttctgcagatgcccaaggctacctctcctgggcacccagggccccagcttggagaccccagggctgcagaatgaaagcacactgggaaagcgaggccaccttgggccgaaccagctgctgcgggctgagcacttgggctcagtctgtgtggagtgagctccccctggtggccaatttggggacacggggccaggagacccaggggtccagggctggcccaggagagcaagagctcgccacgctgggagtagggaggagggaggggaggagaaaggagccggaggggatgaggaggaggcaaggagaggagacagaggagctggaagagaagagacagagatgggggaagggaggaggggagaagagagggggaagggaggaaaggggaggcgaggggagaggggctagaagggtgtgccggaggtggattcccctgaggtgggtgggtgggccaatatccccctgccagtcagtgggaacagaccgtgtgcacgtggccacagaagcctggctggtggccacgggccagtgacctctgggtgggtgaggggcaacaggagcaacagggctgcccgggtgctcctgagctcctgagatttcaacgggctcagggaccagcactgaggagctgcctccaccccgtgcctccgagccaactggaaaccactccagatagaaggtctctcaccaggccctcggctctgcctctgcccgagcccagccccagcacccgcgcgcctcacctgccgggccagccggcctctgtcctccgtcttgacgctggtggactcgttgaagatccgcaggcactcctccatggggtcggagtcaaagtccacctccttctccagggccgagtagtccacatccgcccccgcgctggaggtggaggaggaggaggaggaggaggaggatggggcgggggaggggggcggggaggccttgagccgcttgggcggcccctgcgcctccgggaagcccaggctggagtctgagtc

SEQ ID NO: 66705 - DNA, 1673 bp, Homo sapiens
gatgagcagactgcttgagttcaagaccagcctaggcaacacggcgagaccccgtctctacaaaaaaatacaaaaaatgagctgggtgtgatggttgcatgcctgtggtcccagctacttggaaggctgaggtgggaggatctcttgagcctaagaggtcaaggcttcaatgagctgtgatcacaccaccgcattccagcctgggcaacagagcaagatcctgtctctaaaacaaataaaattaagtagcatttagacaagaggaaggatccgtgtgtctgttttggaccactcggaactccgcgggactgtgtggagggccacgaggtacgggcaggcaggggaacatcacacagaagccacaggttcttctttgcctgtgccaggctacagccaaggcatttccaggaaacgtcaccccatgtgcccagcaggcgcagaggggcccattctggcaccatctcacagccaaggaccctgggagtcagcgagggcacccaactaggatcagcaactgtggctgccagttcctctgtgcggggagggacagctgccaggccaggaggatgctcccggcagggaaacggccggctggggctgggtgtcagcccccacccagggggagggctgcggaggccagcagcagctcaagggcgccctcccggcccacttcactgggggaggctccggctcctccctgacccagccggctgcagagcacgccaccctgccacccgcctggtgaacagggcaactagtgccagccctcccccagccccggaagcccggctgcccagtgacgtggaggggccaggccaaggccactgtggcgtgagctgcagagattcatgaaggggaggtgacagagcacaattactgaggaggagcaaggccaggtcagggagacactggtctcccctcccaaggctccagctaacggggatgcagagaggaggaagagcccgcctaacgggaaggctctcctccccaggcaggggtgggcagcagtgagactgggccccaggagggcaggcgggggtggaggggactgaggcatctctaaggggctaaggataagggactccactcaggggcttccacctccttgtcctggaccccagggctctaagacacagcctgcaagatcaacccagcccaggggagccaagagtcacaggcaatacacacaccagccagcagacacccgcgagcccttcccaaaggaaggaaattcagacctctggacattgtggactctgaaaggagagaccatttccccaaaaggtgcttttggaaggtcttggaaggaatagcacctgcctcccaggagtggagccaggcccccaagcagagcgcaggacaggtgataagggtccaatctgggggacgtgggcttgtctttctaactggaagcctgtgtgagtacttgttttgttgttttgtggagacaggcattgcccaggctggagtgcagtggtaccatgatggctcgctgaagctttgcctccccggctccagcgatcctcccgcctcagcctcgcaagtagctgggaccacctgcgtgcaccaccacatccagctaattcttttctttttttggtagagacgggggtctcgctgtaattgcccaggctggtctcaaacttctaagctcaagcggtcttctcgcctcg

SEQ ID NO: 66706 - DNA, 621 bp, Homo sapiens
gctctgccccaccccccacaccagactccacccaggtctcagagcttgctgtggaggctgggctgtgcctgcagcagcggcacctggggtctaccccactgcccccagggttctcctcgacccccagggctgcgatccgagcctcccctctgctccaaggcaccgccctccccacctcgacagcgcagtgtgcagtgccaggaccgcccagcaggtggagccacacggcagggtccaggggagaaaaagaaaaaggtcccggcctgaccggggaccaccagctctgctctctggggcgtcctgggcatttattcacctcatggggcggccgtccccacatgccatgactggacgcgctgctgtcccaaggcttacagctcgaggctaggggacagggacggtaaccaggacagaggtcactgcctttcaaaacaatgtagaaacaggctgggcgcagtagctcacggctctaatccccgcgctctgggaggctgagcccaaggccgaggcaggtggatgatttgaggtgaggagtttgagaccagcctggccaacatggggaaaccccgtccctactaaaactacaaaaaattagccgggtgtgggggtgcctataacccc

SEQ ID NO: 66707 - DNA, 1928 bp, Homo sapiens
cacttatcagggaaatcagaaaaaaatgctaccttttctggcaaaacaggaaaataaacctattcttaaatcctagagaagatgtttctcttttgcaggaaaaggttctgagctgagactgtttcatggttaaagtaaaaacagtgcttgaaactcacgcccaatgaggaaatctgggacgaaggaagtcaggggctgggtgaagcagagagccactatcaagggacagaggtaacaggggagtctgaatgacatcacactcgataaccctccctccacgactttccttgcgatgtccctctttttctccaatccaaatcccacatctcctccaagaaacgctgccatgacgatgaaaaccaccatgacgctgtgaggtggagtccaccaacgtcctctgcccgaccaaaagcatggaattcctcggagcccactcgagtaagctttgacttcctccctgccagtcatgctggacacagggctcgacaaacacaagagacgatcctcggaccatcctaactcaacgactggagactgaggtggccgctgccagaggcgcggccggaggaaacgtcatggaaataaacaagggcggccacaagcacatggggtccgggaagcggcgggcgccaatcaggggcaggaggagtccaggacctgcctagcgccggccgcgcccgtctcccgagcccccttgtgtcaggcccggtgcccggtactcaacatgcgctcgcactccgccctctagacagccctggcaggacgcgtcctcctagttgacatttcacactcgtgaagacgaaggcttagggacatctagtgctttgcaccgggtcccagggtgggtggttccggtcccgactgggaaaaccgtcgcccgcgaacgtgtggggaggaggctgggccgagaacggggaccccgggcgggaccggggtggggtccagacccgggcaggggagccgagcccaaggcaagcaggcgggcgggcattacctgctgcggggggcgcctctccgccgtcaccgggcgcgccggagccccgggccccgcggtgccggaagtggcagtagggccgccggcagggccccccgggcgccccagaccaataggggcagtcaatggcccggaagaagccagtggagcgtagcatggtccgtcccgcggcggggccccggcccggagccgcccgggccccagggccccctcactggcgccgcggtcgccgccgcccgcgcctcacggaccccgccgccgccatcttgctccgaggcccccggaggccctcgggacgccgccgcaagggaccccgggaggggctgcccgcagcgcgcctgctcagaaacgcctgctcctgcgcgaccaaggctggtgacggacccctgggccgggacagacggccgcgggaggaagtaaggagggcaggggctgccctgcctgcggtctccgggagcctcgccagcgccgccgcccgaccttcggcggctgtagcggcgccatcttgagccccaggcccctgcggcgccagggctgtccacggcgcgcctgaccaaaaaagccccgcggggcccgctattactcatttgcatattatttcctttcgttagcatatcaccttaaggcgccctctgctggacgaggagagttctgcggggaggtggccttaaacctgggccaggtgaaactcatggttgaattactccgttcacagtctttaaaaatcccctcgccctggtatacagctggctctcaagaaacgccttaatctccccaacctcgactcttgtcatcagtctaatgaccaggtccacgttcactcatttgttcaacaaatattgagcgcctactgtataccagctagagggtgcattttaacagacaaacgaggaacaaggctgggatggggcaactctgtagtctggtggagtag

SEQ ID NO: 66708 - DNA, 1174 bp, Homo sapiens
ccggggccagggggcccgggccagggtcgcctctccggcctgggtgcctgccagccccgccccgcgcttggagactgaggcgcgcacatgcgcacgtgggtggcggggcagggggtgcacgggctacccacccacgctgcgctgggcgaagcgcctctgcgaaatgccaggccctgcctcgcacacaatccactcgcagggaggagggtggggtgaacttgtgggggcccagagcgcgctgctcctagccagccgggcccccaggtgcacagccacccagctgctccgcgctacctggccgagacgcagcgccctgaggatgcggtgggtggggacaacgcgggagggcagtgtgggcggggccgcggtggacttgaccctctgactcaggctgggcccgggtgagctcaggacagcctcggaaacaggcaggctcagaaaaatggagtccaggaagtcctggaaacctggcccggccccgtctgagccggcacaggaggggcctggagacaggactgcgggactgtgccaagggccctggttccgacagggaagcctcacctcctgagcttgtctggggggccttggggtggggaggggggctgtggccggctgcctgccggggcactcacgtccacctaacaggtggggtcgggtctgtaggggagggcacaggtggggaagaccagccccagccgcaaagcaagcatcccaggagagccaggaaaggctggggctggggaggcctcttacccacccagggaagggaggagctcctgaaggtgatccttgagcaggttctatagaacctataggcagctgcttctgggagccgctgcagaaaagggggaacactggtggtgaggccctgccagcctgggggtggggtctcgaatactactgggccatagcaacccccacacccactctgcccctagctcccctgacttcccaaagccaaagcttccttcctcccccatccccactcctccagtagacttcccctttccaaaccccctgctgttcccgccaaacacgcaggcaggcatacccacccttgtgtcaatcccgtacctccccacgtgccacctgccagccaaatcccatcaccttcgggatccgtccaggccccaccctgcccctcccagctcactcctggactagtgcagtagtc

SEQ ID NO: 66709 - DNA, 3314 bp, Homo sapiens
ctccttggagtgtccagctgcccaaagcggccaccgctatggctatgaaatagaggcagcatcgcactcttgatagaaatgagaaaattgagacccagatcgggtagaggtcttctgtttggtggcaaggccagaatgccaagcccaagggcagccgcacagctttcccccagccccccaccctccccggaagggacaagcacctctaatgcccaaaccagggccggccatcaaggcccaccgtcccctgttgcccagtccaaactcccagtccagaaagtggaaccctaggaggggacggagtgaaaaaatacagccaggcccaccaggctcccggttcccctcgccgccccggggactgcgctaggaggggcgttggtgtagccgaagcgctccaactacgcgcaccttcccgaatcgcccgccaggtaggggtgaacaaacacgccagggaaatacagcagtgtggacccgagcccctcgagggtcctccaatactatgaagttcccccgcccagactcaggccccaacccgcgctcctagcctcgccctccccctcgttaaaatacagagaacgcagagaaaacgtgccgggctccccccatcctggccccacgccaggtgctctgccgacctctggggagaatccgcgcggccaccccggcggcggcgacgcggttcctcctccattttcacagataaggaaactgaggctgggggagggggagaacccagaaccccagagccggatgctccaaccacggtgcccaccgcccagaccagaacgcaaaagaaaaaaaaaaaaacggaacaaggcccagaaagggagagaggtggtctgcccaggagtctcaatcccgcccgcagacctcgctgggcccccggagcccccgccactgccgccggggcggccatccgctcgccgcccgaccgcgtggccgccacgccccccgcgcgcgccccacccaccgaggccccgccctgccggccggcgcggcggcggcccgggcgcgcccccctccccgccccccacgcgccacgcagtttcggggtcctggcgggggaggggtctcaggcggccgcccccgcaagggccgggatcgcggctgcactcacctgtgtgcgtccgcaggtgcgactttaggtgcgaggacttgtagtaggctttggcgcagtccgggaagggacagcggtggctcttggcggcggcggagggcgcggcgccgggggcgcggcccgaggacggggacgaggcggctgaggaggaggaggcgggcgaggcgccccccggggcggctccgggtccgccgcgcaggtcggccaggatgctggcggccagcaggtggggcgccgcggcggcgccggggcccgggccagaagcggcggggggcggcgggggtggccccggggtcccgggtgaggcggcctcgcggcgcgccgcgcgcacatccaggccggcggcggggcccgcgccctcggggccgggccgcccgcggtgcaccacggcgcccgaagagatggccatgagcacgtcggcggcgaagtaatccacgcacgccacggccgccgacatgccgagcaagggcgcgcggcgcggcgggcggagcggaggcggcgggagcggcgtccgtccggccggcggcggctgctcgagtgcgggaggcggaggaggaggaggaggaggcccggcgcgcgccgccgccgacgcccgcgctcggcctgccccgccccgcctgacgcgtcctgacgcaccggagcccgcgggggcggccacagcccgccccgcccggaggacgccccctcggggcgccgcagccacgccccccgcccggcgcgccctccaccactctccgagccgcgcgcggccgccgggggcggggctcgggccggaggaacccgccccccggcgcgcccactccggcctccgccagcgcctagcgtcttaggcccggagcgcgccttctccgcgctagggtgcaaggccgggagccccgccccctcccggcgcgccccactccagcgcgcgcccccgtaccctttcccggagcaccaccccctcaagccggggcgggaggccgaggaccccgccccctctccggcacgcccctccttccgagagcgcgccccgccccatcccggcacgcccctccctcccagagcgcgccccgcctcctcgctggcgcgcccaccccacgccggggcgcgcggccggcgggagcccgccccctccccggatgcttccctcctggccccgggcgcgcccccgttcgcgatggaggagggctccgatccccacgtggccggggttggaggggtgcggaagcggccggccccgcccccaggccacgtgcgcgacccttcccccctcttctcccggcctggggccctgctttgaccccgcactcaggcatctgctcgtcctcttctctggggttccccctcgccgctcacagagcccctcggagcctcccggccgagacacccggtatcccgcgcccgcggcggggcccgggagggtggggcaaggctgcgttcgttcctctttttgcacccagttccggagctactagagcgcgccccactgggggtggggagggccggttgggtcccagagggtcgggatagggggacgggaagagggggccgaacgcaaagggctgggctgggctgggggcgcctgagcgggtcagaggttccccgccctgctgggacaccggggtccggggcttctctttccattcccaggcatcgattcttggggttcggacgggaaaactgaggccaggtattcgggcctcccggccgcgaggacgtccaggccaacttgttaaatattaggggggacaccagggacgcggatggcccagttcgcaggcccaaggcggcgggggcacagaaactgggcggcccccctcggtcgcgaccgcgctcccgccccttcccagctccggcggggcggcggggactgcgcagtggccggagctgcctccagggggcggagctgctttggcctgcggcgacctcctgctctgggttgggcatggacagaggccctgacccgattcggggcttctctagccccatcccccgcccacctgcaaccccagctgacgccctgaggctgaccactgttccctgggtcgcccgcactgcgcctgggctcaaccatgcttggttaagccagctgagccctccctgggccccagtaagcccactctacgtggctggacagagcggagccgagagagaggaggttcagcgaagtgtgggagggtacagggtgccctgcacacacttgcccctctcctaggcc

SEQ ID NO: 66710 - DNA, 1313 bp, Homo sapiens
tccagcccaggtaacagggtgacagtctgacccaaaaaaaaagaaagaaaaaaagaaagattcctgattcctggcctggcgtggtggctcacgcctttaatcccagcactttgggaggcagaggcgggcaggtcacctgaggtcaggagtttcagaccagcttggccaacatggtgaaaccccgtctctactaaaaatacaaaaattaaccaggcgtggtggcacgcgcccgtaatcccagctactcgggaggctgaggcaggagaatcacttgaacccaggaggtggagattgctgtaagccaagattgcgccactgcactccggcctgggccacagagtgagactctgtctcaaaaaaaagaaaaaagaaagatccgtaaggaaagagtgcacagggttgtgcactgtactgctggtaacagaaaaaacagggaatggaccccagtatcagcggcggggtcacagagaccctgaggctgctggagaatcaggcagaaccgtcagtcctgctgcagagcctcacagatggggtggcaaaagcaagcttcacagtaaagcctgtgccccagacatggcctcaattctccgtgtgttgtcacctgtacccacaggctgtttattcacggatgacctttgccaacctgtggaagccacctccggacaggcctgcagggacccagggccgtagcaggagggactggacgggctgcggaggtggccatgaggcctgcagaggacgcactcagcggtctgtgccacccatttgagtatctgacggtgtgaccctgacctctcccggtgatcctgattgtcaacaaaaccctaaagtccccacccccccggggctggcgctcctgcaggacactgtggtctggtgatagcctttatttacattactgcaggtgttgcattatgtgaccaaaacgccgacccccaaagccactcagggtatatttctgtgttaaggcgttaaatcacttaccatggtccagtccaggggggccaccacgcacggtggggggcgggggggcagctgcaagctcctgggggacagaggacaaggttccaccagccaggtgggaaggtggggcagcagctgccaccctccaaccggaggacacagcgaggtcaccctgctggccgactgcaaggaagcccctgcgtggggtcctgcagggagcatctctggggtccacggcatccatgctaggagctgcttcagggacaccaaggcctcctccatcctgcacagggtgggcagcaggggcaggatccggctggcatttcctttcccgtgcgaatcccccaacc

SEQ ID NO: 66711 - DNA, 1487 bp, Homo sapiens
ccttgaattttctactctgtgcacctgaacacacttttgttctcttgcaagcagttgctttgcactggaggcaatgaagacacggcggagtcccagctcgcagggagctcaggttctgacggcgtcagaggacaacacgctctggaccagcgcagcgcccaagggtcagcggcagcagcgagcagggggcacgggatgcggggaggctcttcgggaggcatgaaaggcagacgtgttccgaaacgtgagccgcgctgaggggcacggcgcacgaccggggacagaaggaagacactgcggtcgcaaagccctggccgtgcaaaggccccgtggtcagccaggagcccaggcgtcccctgctctagcgaggtttccttccgaacgtcccgtagcaccgcttaccatggaacggcgggcgctgcctcgcagccccgaccccgcggcggcccccacgggcctacgaggaactcgaggccgagggaaggagtgagagcggccggaaaggggcagggccgagccggaccggtacctggctgggtcccagcggccgccacttaccaccgaggccgcctcttcgtccacagcctgacgccagccaccgccgccgccgtctccactgccgcacgcacgccgccacttccgcttccgtccgtgctgcggccccgcacgtgacgcagcgccttctcgcgcccagactgaagcaccgcccccccttaaaggggccgcggactagagctagctggatgcagcttgggatcccggcctcgccaccgcctggtcgcgcgacacaggctgaaccctgcccaaccctaaggtggacaacaggccaccggttcccgagtcctcccggtcctaagccttctgccctagagatcgtaggaactcttctcgtgatcccagctccagtgtcggctccctcttccaggggagaccctcggggcccaagcacctgccaccgccctctgctggaccccagcttcgccatctacgaaggaagcggcctgtccgagctctgaggtccgtcaagcgcggcacctcaggacccagagtgcgctgtcctggcccctctgcagtaggactgacgggaagctgtcgagggggcagtcccgcgatggcagcagggcccccacgcctggcgtcctcatcgcgcccacccagcagggctcaccagcctccctaggaagcaggcaggggtcctgggctcaaacgctgccccacccatcatcgcccaggcaaccagctccctaagggctccccggactagacagagacccaccccacttccgcagagtaaaacctataagggggtccgtgccgatctctcctagggactcagggacgaaacctgggaaccccggccccctttcgagctcgctgagcgctcgagagagtgagcagagccatgaaaggaaggagagcagccctaaaattttaaatctttaatttccgttttcacgtattttcttcttgcttccaaaaggaaagga

SEQ ID NO: 66712 - DNA, 1368 bp, Homo sapiens
ctttgacagggaagggaaagtctagtctcctctcctctccagccacaggtacctggaacctccctagtgtcactaatgggcgtggactggggagtgcaaacccagacgcctcactcactgggcacacacccttgacaccctgaatcccaccaattccgttcccacgcacttaactgggcaaccctctgcaagctagaggtgttctgaggaccagcaagcaaccgagcagccaaaatactggaagatgacctacatatgggagacggtgactgcacctcactcaaccagtcagggtgggaaacccgcctggggggaggcgcggccatatcagagggcagacaaacgggccaggtgacagggggatgggacagagggacaagcaggagcaaaatccgaggtgacagagcaggctcctggctagagcagaccctgggaggaagaagtgagcagaagggtcctaagagagagcctgggacgggtgaggtcgcgcccccgagagtttgcacttcatcctgggagaaatggcggggccgcgaagaagtcccgagcaagcgatggacaacataggagaagggctgcatcccggagaacggacgcgagcggaggccgggaagcccgcccaggagtcagggtggcaggaagaagcctgacaagggaaacagcgactgggagctggttgggaagcagggctcgggagggcccctgggagctgccttggggggcgagaggccgaagcgtttgtcggactgggggcagtttcggggcaaaagagcggaatccgcggctcggacgggtgctccccgaaggcaagggccgcgtccgcaggagggtgggagcgcaacccacgccggagggctgaatggatggggacagggctttcccaatcacagacgctcatccgcggtccgcgcccctgctctgggctcctcgggcaggacccgcggaagccctgggactgcaggggtctcggggacgtccaaccgggctgtcaggccctcgaggcccggcccgggaccccgcgcggccgcgcccgcccccgcccctgcccggcactcaccaccccggcccgcgcccccgggccccagggccgcgctccatggctcccggccgcccgcccgtgcgtccgtcggtccctccgcacccctgcccggcctcctgcaccgccaccgccgcagctccccccacggacggaagtgagcctcgttctcaccaccgccccggaagtgacgcgaggagcgcgcggggcgggggtctgcaggcacagagcgaccgcgcgactagcgtcctgggggcggggctgatatgtcgaggggcgtggcctgctgctctgtgggcggggccaaacttaggtttcattcacttggggac

SEQ ID NO: 66713 - DNA, 1379 bp, Homo sapiens
aaaaatgtgcttgtttggcccaggagaggcaagaggtcttcttcacctacgttactggtgagaaaactcaaacctgagggcggcccacgccggagtgcagtaacaggcagaactggaacctggccccatcccggactcaggggacgggtgtcatataccccctctgcctcatccttcccactctgctaaccttccaaagatcccccgggttccgagttttccctggccgcttgatgggattcgaacctgcaaactcagcgctcgcccagcgcagcggccccgcctctcctcccctcccgccgcccggaggtcatgtgagcgcagtgccggagcggggcggggcgaggcggcggcgcgcagtgcctactagcaattgtagtccttgccccaccttggcctggcgaagatcccgcccctggaactacgctcccgtcgtgctccgcggctccaggcggagacgaggcggggtgaggtgggttgggccgggccggttgctaagacttggcgaagcgctgcgctcgcgcccggatccctcaggtaagcgcgcggccccgaggtctcgggttctccaggctcagacttccccagagggggagtaggggctgacatggggggtctcggcggtgaggggcgccggccgtttgtggggagaaaacggggggcccaggccagcctcgcgcgcgtctcgggcgggccggtgggcgacgcggggaggcggcgcgaatgcgcgtgcgcgcgcgcgcgcggcgctggcctgggggaagcctcaggaccgcgctcccccgggcctagcgcctttctgcgcgtgtgcgcccttatggtcggtgcgggagaccccgtatcctccagctgcttccggtggcccttcctcaggtcatgtcccgcagtcccctgcctctgaaccgcgctctcgcgagtttccgtagccttcgcgtccttcctccccagctctgattcgcctttatgtggagattcccctaggccttggtacatccccagaattgaccatcgttcctcatcgttacctagagtatgagtttttcaggtttttgtatcacaggcccccagttatctcccacacactaccccgaggaccgaggttccccgctgtcttgcagagaaggcctccttgtagggtggccagaaacagaggatcgactccgtggaaacaaggacggctgggtgcagttcctcaccctataaccccagcactttgggaggccaaggcgagtggatcacctgaggtccggagttcgagaccagcctgtctaacatggtgaaactccatctctgccaaaaatacaaaaattagctgggcgtggtgtcacgcgcctgtaaaaccagctactggggaggccaaggcaggagaatcgcttgga

SEQ ID NO: 66714 - DNA, 1555 bp, Homo sapiens
aaaatacaaaaaattagccaggcgtggtgatgcacacctgtaatcccagctacttgggaggctgaggtgggagaatcgcttgaaccgggaggtgtaggttgcagtgagccaagatcacaccactgcacttcagcctgggtgacagagcaagacaaaaaaaaaagggaaatttgggacacagacacacacaggacgaacaccatggtgaagctttcgcaagccaagaacgccggtcaccgccaagagaggcctgggacagagtccactcgggctcagaaggatccagcgtcgctcacaccttcgtctgggactcgcagccccagaaccgagagagaataaacaggtgtttgcgccgccgggtctgcggtacctgtcaaggcagccctagcaaaccgatgcgtgtttgcatgtgtgaatgcgtgtgtgcgtttacatgttcaggagtgacaggtgctgcagggtactgacggggaccgcagcctctgctgtgcgtcctaaatatcacgcccctctttctgcaaactgtcgccccagtcactgccccgtcttcccttcggaggtcgaccccgccgccctccgctcggccgccagagggcgacctcggactccagtcggacgggctctgccctggctcccgggcttcaggttctaatagaaactctcgcaggggtgggtcacgcctgtaatctcagccctttgggaggctgaggcaggagaatctgccgggaggcagaggttgcagtgagctgagagcgcaccattgcactccagcctgggcgacaagagtgaaactccttctcaaaaaaaaaaaaaaaaaaagaaaagaaaagaaaaaaaatggggagtgtccgcctctggacaaggtgcagccggcatgatgtggctcctgagtggccacgtccccttcagggtcacaggggcgatccagggaatgaggaaaggaagacggaactgcaggcatggcgggggacctggcgggcagctgggggcatcgtgtgcccccccccatggctactgcccctggtggtgagtccccggggtgggcatcactaaaagagtgactgtgatggcttcattgggctgggccctccaggctccccctccacccctgccactgagctccacgcccggacccaggcctgggggcactgcagggacggatcctcaaccctctggcttcagcttccatcccagcggggtccagctggggacttgcaccagggggcagggggctgggagagtgagggaggaagagtgagggaggggaagtgaggccgattgtcggtccctggcctcctccctctagaggacagcctgtccatgggggtccctctctgcagcccatcccccacctgtaaggcgcccactgttgccaaccccaggggctgtgtcattccgcgttgctgcccctcaccctgcctacgcctccacaaaccccactgctaaatccttcttccacatgagggagccatcgccttccaacagcaatttaggagggtgaatgtgatgtttgggatgtctcacgatttcccagcatgaacgcacaatctcaagc

SEQ ID NO: 66715 - DNA, 3350 bp, Homo sapiens
ctgcagcctcgacctcctggttgaagcaatcctcctgcctcaggatcccaagtagctggggccacaggcatgcgtcaccacgtcccgctacttttattttttgtagagacagggtctctgctactcaggctggtcttgaactcctgggctcaacgaagcctcctcctccgtcagcctcacaaagtgctgggattacaggcgtgagcaaccgcgcccgccccacaccctaccttataacatcatctgaaatcattacacagggctctctcctccccctaggaccgaggactccctaggaaacgatgccaagagtctagctcactgttctattctcagagccactggcaggcacttaatacatatttgaatgaatgtgtctccttcgactttaaaaatgcccccaccgggaagtgcgtgggggatgtgggaaggccggaaaccatttctgcagctgccagtccccttccaggccctgtcatgggatggagcagggcatcactgtgcggcgccttggcctgtggatcccctccccacgtttcttgcccggtgcaggccggaaggcaggcaggtacaagcaaggagtcggctctacgcgcagagccccaggggagcggcccgtgctgggcatggcagtcccagcagtgcatttgtctagctgccggccgcgggtccggggccacttcctctctgctccttgctgatgtcacggtggatgaagacaacggggcacccacgtcaccgctgttctccccctgaacacggagcagttattctagaactgttttcccctcctcgcccaggaaagccagatggaaaaaccctcttgccctgaaccagctcattttctggccagtcgccccttccagcgcctgtcccggaaacctcgcggcctagcgcgcgcagcccgccgcctccccgcgccgcgcccgccaccgccccacgcacggaacatcccgcggcgccgcccgtccgtgacgtcaggtggcgagactgtgacgtaacacacggcggcagggcggtgccaggacgaccagccacgcgtcgccatggcaacagcgggcggggaggggcgggcggcggaaggcccgcccctagaagggtgtggaaaccgttagaccccctttcctgcccgcgcgcgccctcgcggccacgcgctttcggtgtcccccgcgggcagcggcccggcggcctcgtagcggccgcaaaacgccgtggccgtcgcgcggcgccatccgttgtcgcaaagcggcgcgagaaacgcccagccgggtgttggccccgccccgcgctgtgacgtcggcggcgcgcgcccccggcgccgtggccgcggctgcgcagtggggcgcgtatggctgccgccccccgctggcagacgctggcggcgtaaggcgcgcgggccccggagcgggcgcggcggagcgcggcgagcccggcgcctcccgtcccgaacatgcggaggccggcccaggcggcgcgggagccggagcgggggcccaagcggcaccggagccggagcgcgagggggcgcggggcccggagcgggggtccgcgctgcgctgctgaggccgggccggccgcccagacgctgcccgcgggcccggccacggcggagccaaggtaacgacgcgcgcgcccgccccggccccttcgccccctgcaccctggccctgggcgcccccagtgacccccggcgcccccgcccccacactcggtgtccactgccctcctgcgccctgccgaccccgtgctccggaccccagcgccccccaacccgtctaaccgccccgcaagctgacccccacactcagggccccaccgccgcaacaccccgttgaccctgcactcgggaccccagcgtcccccaccgccctaacccgcgctcaggacctccggacacagccccacgctgacctccacactcaggagtctgccgccccagtgaccctcacactccagaccctgcccccgccgctccagtgacccccccactctgcaccccggtgactgtcgtgctccaactctcctgccctccgctgagcctttagtccccaccccacctcccgccttcttcccccacccagtgctcaagcccaccgcccactcacccgcgtccctcacgcctccccgcgttctggtcccgaggcccctgcccacctggccccatcgcctcctcctgtcttggcctggcccctccccacgcagctgtgtccccgtcctcactttgtggtcctaaagctcttgagggggagagcagggggtggtgggggggaggaaggtggtctgatccgcagggacctgttgcggcactgcctgggaactcccggctgggctcgctgccccctcccccttccgctgtggccaccggctttgttttccggaaacgcacggatcagggagggagggtgagatgtctgagcagggcctgcggtggcctcaccgatccccgatccccgcctggctcctctctcccaactttcttaggggaagactttcccgttgaggggcgtgggggctgagaggacattcggggactgttgcgtcttgagccagaatggctttgggacagctggttcttattcctgtggcctccggatggcattgtttgcaggaagcgggccggagggttgtctgtgtaggtggagtccagcatcttctccccgttacgctccaccgtgtggcccagtgcgccggggcggtccacaaggccatgtggggctctgcctccccaccccaggacatgcaggagccttcttggtgtttcctggctcccggaggccctggtagctcgtgggtgtgggagctgagcaggaaggtacaaaggctcctgtctgggggaaaaacccagccgtcccgccacgggaaggcgctcggattagggagggggctgggcgggggttggcagctggggatggaagcaccccgggctactctgccctgcacagcccagcctagcctggggtgcctctgtgcagaggaaagactgtgtgccagggcccccaggtttgaaagggggaagttcgcggttgtcactggtactttgttttgttttcccctgtgtctccaccaaaacgaaacgctctgggctgggctgactgatgagtttcccaggcaggcagcccccgggagtgtgtgcaggtacgcgcacgcctgccttgacgtctctagggccgagagtgttttgctcagccccccacagtgagctctgagagccgctcctgcacagacgagagggaacgggagacctgcatgcaggggagccgggtctggacggggtcccaatgggagggccaggtctgggggtgagaggccaaccatgtgtcctgcaggaccgtgcagcgggcaaatggggt

SEQ ID NO: 66716 - DNA, 1296 bp, Homo sapiens
gcaggccgagttggagggtcccaggaacggagggtaccggagtgcaggctgggtgggtccagggacggaggagagcaggggtcccaggggtacagggcctgggatcccggggaacaggctgggggcgcaagccagaggtggaggatccaggggggcctggggatggaggggtgcagaggcccagagtgcaggcctggtggggtctggggacagagaggtgcagaggcagggacagaggggtgcagagcccagggaactgggtggagtctagggatggaagggtgcaggccccggggtgcaggccgggtcggtttcaggaccggaggggtgcaggggtcccagggacagaggggtgcagggcctcaggtgcaggccccggggtgcaggccgagttgggttcggagcctgaggatgcaggggtgcaggggtcccggggacagaggggtgcagggctcggggatggaggggtgcgggggtctcggggacagaggggtgcagggcctcaggtgcagggcccgggcagcaggctgggtgggtcggggccagggctggcggggtcggggcgcccacctgtgcgcggggatgcgctgcgagctgagccccttgcccaccaggaagtgcacgtcgcacagcacctcgttgttgaagaggaaggcgaagcgctcctgcacggtgggcttgctggcctgccagttgtacgcggcctcgcgctgcagcgccgccgcccccgggcccgccgcctcctccgcccgctccgcgcccgcggcctgcgcgtctgtcccggggcccggcggggcgggcggcgtcggcccaggggcggcggcggcggcggcggcggcggcggcggcggcggccgcgttgccgggggccggggtggcggcggcgttggcgctgggcccgggactgccccccgtgcccgggccgaccccgacccccggcgggcacgacgcacgcccgccgctcccacccgccgccattttgtggctgcggcgtgggcgggggaggggaggagggaaggagggaggggaggagggaaggagggaggggaaaggaggagagtagggggaggagggggaggagggaggggaggggaaaagaggagggaggggaaaggaggggaggagggaggggaggggaagcgggaaggagggaggggaggagagggaggggaaaggagggggaaggagggaggggaggagagggaggggaaaggagggggaaggagggaggggaggagagggaggggaaaggagggggaaggagggaggggaggagagggaggggaaaggaggggga

SEQ ID NO: 66717 - DNA, 1380 bp, Homo sapiens
acaatctcagctcactgcaacctccgcctcccaggttcaagcgattctcctgcctcagcctcctgagtaactgggattataggcgcccgacaccacgcccggctaattttttgactcttagtagagacagggtttcaccatgttagccaagctggtctcgaactcctgacctcagatatctccccgcctcggcctcccaaagtgctgggattacaggcatgagccaccacgcacagccaaaaatgtatgtttctaaagaacagctttggggtttcaaagaaattgtgaaggtcacagggtttccgcacagtccacaccccacacctggtttctctgacaatctgtgtggtgcagtagcatgtgctgctgtctttttaaaggatccccgaatcactgctgcaatgtagaggtgattttgccatgaaggattcagtttgctcccacccctgacccggtgggacacgtgggcagaccccggcccgggcacctgtgcgccagagctggtggttcccttcacagaggggcagactgggctctggaggctgggggtggcctcggtcaccgcctgtgaaaggctcccagttcctccagctccagaattttcctgccactctacaagaagagactggaagagggcgggactggcagagaggaaaccacaaaaacaggattgagagcagcagctcagaagacaagctgttcctggcaggcggccgggggcaggcagcggtcagcgggggggcctggcagggctgggcggggctcggtgccacccgggagggaagtgacttggcctatggcacctcccacacttcctacacacaagccaggctgggcaagggacaagggcaacaggccagggagccctgaggatggccgggtgggggccgtctgtgtgccttcattcattcattcattcaatctgttatgtgcgagttcacaaactaggacaaaggaggagacagctgagctcagcccaccttcaagggtggcagatgagtaacccagggcgaggaacattcacggatggtcatgcggctgcaacacggcccgagctcctagggagcacctccagaagtgatcccagatccgggggctgaagggtgcagaggagaaaccaggtgcagaggatgttggggaggccccgctggaagggggagcaggtgcataggcccggcatccagaaggagctggggctggagaaactgagaggagggcagagtttgagggggaggcttgcaggctgggtactctgagccttgaactcctgggctcatgcaatcctcccacctcagccttccaaagtattgagattacaggtgtgggccactgtacccagactaaataaaataataataattattattattatcattatta

SEQ ID NO: 66718 - DNA, 1925 bp, Homo sapiens
tactgtgcactgacacgtggctccaaccggaccccaaccaggccctagaccaggccctagaccacgcacgcctggggcagagggggctgggagccggaccaggagagtcagctccacccaagtggagctggatttacaaaaaagcagctctgagggacctggttccagggaccacaggccacagatgctgagccttaagccgcgggcagggagcctgagcctgatccccccaaaccaggggcctcactccacctctcagctctctgaaccctgtctggggtttcccttgggcaggcaaacctgaaaagccttcgggaaactggcagacagggcggcactgccctgtggatggcatcagggagtagggcacaccgggcaggtccccaggggttagggggagtacagagtaggtccccgggggtctggggagcacacagggcaggtccccgagggttagggggtggtcagggggcaggtcccctggacttagagggtgcgcagggcaggtcccctggggttagggggtgttcagggcaggcccgggggaggagggtgcccaggagaggagggtgcgcgggccgccgcacctggcaggcagggcaggcctcgccgcggtcccagccgcagtcgctgccacagcggcccacgaagggcgggtagccgctgagtaggatatacaagatgacgcccaggctccacaggtcgcagcgcttgtcgtagatgctagcctcctcgctgaaggcctccactacctccggggccatgtactccgccgagccgcactgcgggcgggggaggggcgcgtcagccggggtttcccagcattacgtgggaaccgagcccgggtaactgcgggtcacctgcgccagccggctcggaccccgccccgccgggcccgaccaatcagcggctgccgggaacgcgcccccgcccaatcagcaggtgcagagctcgcccctcccccgccgcggccccgccccacccggccaaacaccgacgcgttggggcgcctgctcgaggccccgccgcgacaccccgcccaaccaatcagcggctgttgctaggcggaagcccgagctccgcggcctggagctgctggatggcccaggctccgcgaggttatgcaaccgcagagcaggcggccgagcccccagccctccccgcgggccctcaccggagtgagcagctccggggtggagataggggagcagtccccgttgagtttgatgccgctgcccaggtcgaagtcacagatcttcacgggggagacctgggaggggccaaaaggtccgtgagcctggggtcccacgcggtccacccctcccgcggggccaccctgccggaactggcctacctggttggggtgctcacagaggatgttttccggctttaggtccctgtgggcgatgcctgggggagaagccacagaaccacgacggggtgagggtctggaggtcttccaggagtccttggcaggcggccctaggagactccgggcggggtcaccacctacctttgttatgcagaaagtccaaggcgctggccacgtcctgcaccaccacgctggcctccagctcgttgaagtgccggcgcttgtggatgtggctcaggatggagcctgggcagggcagggcagggcaggacagggggaacacgcaggtcacctcaaagtcccctcaaggccagcacccacctccactttggcggggacgcccccacactggcttcctccagcacaaaggcctcacccctgagccaccatttgggcaggacactcaccccacaagccccctcctgcaggtggcactaggcccccatcccgtaatacctcccagctccctccctcctcacagcctggagcccccaggtacctccccgcatcttctcaaacaccaggtagaagcggtcctcctcctcgaagaact

SEQ ID NO: 66719 - DNA, 5422 bp, Homo sapiens
tgggggagctcctggcacggagtggggtggggcaggggtgctgctcagcaccctgcagtgcccaggacagccccaccccagagaaagatgggccccaacctccacagggccgtggggaagacctcctcccacctgcagagccctgggggcctctgggaaaggggtgcattgcggggaggggacagacacaagcagctggctcttgggaaccctgcctctgatgccaggattgagtcaccgtggggcccaagccgtgtcttgcacctccgtctgcttgtccacagaatggggacggctgacctctggggcgggtcgcggggatcaaaggcagcggggcagtgggaaggaggtgagtcactaggcgggctgccagcctggtggctgtgcctgctttcccacggcctcctgggccatctcagggcagctgagtcctccctgggcctcagtttcccccatctaagatggcacacaaccacctctccttcccctaagctgctcccctccctttcgctcagtgcctggggctggcggggtaagaattcagtgcctggtgctctggggcctgctgaaggtgggggctctgcttccatcacccctgccttctgcccctacccaagcccagacacctgcattcctccgcccatgtcccgcagctgcccggcacacctttcccctgccagctctgtgcacctacgcccccgccacccaccagaggctcatctgcttccagccccccaaccccgcagctaccagttaccgagtcagtatacacagtgctgtactggtcctgggggctcacgggagaggcacccacaggcgcgagtgtgccaggccctgcccagaccacatcctgcactctcccatttcagtgccagacacccctggagggagcccctggtgggccctgatacccggctaaggaagccgccttgggccctgggggccaggattcaaatccaggcctgttgcactgggcaggctggggctgggtcatttcttgacccagccccaggaccatgggagcaagaccctgaccagggtgcaaggaacagtgcagattagagtaggctttgcccagcccccgtggaagatggtggcatacatatgtacgtttccacagagcaaatggcccagcgcagggactgccggccctttacgaggggccgggcctttgaagctggggaaccgaggcccggtcaggttccttgtaccactgagctctcactcagcttcacccgtctgggtgaacccaggcgggaggggcccacagaggtggcgggggtcccagtcccagtgaggatgctggctgctctgggccaagtcactgcccctctctgggccccagacaacctgagtggggctctaacaagagggtcgttcagcagaagtgagactccagtggagcccgtgggagacccaaggccaggagatgggtggaggccagagggcagagtctgggaggggccgtgagccaagctgccctcctgcctccccacccaccctggctcgggcagatagctaccaggaggctgctgggggaggagggaaggaaggggggggctccaactagcccccatgggagtcagcattcccataaggctcctgtccagaggcccctggtggccctggggcagccaccacaaggcaggtgaccagggtctaaggccagactggagttcacctgctgtctgaccttggcctagtgacctcaccctggggtctgtcagcggtgagacgggaggcagctgcccccaactcgtgggagctcacgagagtgaaatgacctaaggggccacagagcccagcgtgagctcctggccctgtctggccaccgttcccctgtgccagccacagcctccaactcagcaaagctacagatggacggccgcagccaccacagcggaggggccaggcaccacgagactccgcggcctcctcgcccgtgtacaggggagccccaggcacacgcgcctgcagtctcagagcctcactttcccatctgcgaacggaaagaaacccaaggcacccacagacgtgcctccctgctgggctgctgcctgctggaggcaaggagagtatttcaggagaggtggccccaatccagggagcagccgtgcatggtgggggctgtggggggagattcctagagcaaccggtcccggccacctggaggaacacctcacagccaggactgcctgccaggccctcctccaccaagacgcccaccttcccagctcccagccaggctgccctggccatgcacagaggccggcccacaatcctgggcagtgtgggcggtcctggtcccactgttctaggtctggctgtgggactcgagtcagcaggccttggcaggaggtggctggaaccatctagaaagttcaagtgtgctttagctgcctggctggccccatgcactgactctgtatcagctcatgcctggccctaggagggagaagaccactgtcaggtcctcctctttcccgcccagcccctgacactctgatggtgccaggcctgctgccctaggggaaaactgggcaggggtggcaggggtggagtgctgccctggggcactggctggacagacctgggaattcttcccagtctctctttgctcctcccaccctggagcaccgcgttgtgtgtacacacaagacagagacacacacacacacaaacacacacacatacactcacactctctcttcctctctccagtcctgccttccctaccgggcaacaggtccctgcccaaggaagcccagtgaagcgattacataaccccggcctgaggggtggggcgggccggctgacatcactgcgtcccctgggccaggtcctgcggggcccctgcccagcacctgccctccccttcccccccaagatttgctcatctgaaaccagcactcaacagcagtcaccacccgggctgcgcagaaacttcccgctccgacaggaaacagcacttgggcctggggtgtctgcgaagtgcagggctgaggggacatcccatcccctcccccacggcacaggccccctgggggtgggtgcacctgaccagcccggcctggggattctgaaagaaagtccccagaagccacatggaggtgggaatgggactgtggcccgctgacccgtccccaccagggcacaaccagctggagcttgcaggggacaccccccataagccacatgcagcgactgggacaggactgcagcctgctgaccccccagaacatacccggcgggggcttgcaggggacacacagcctggtgccctgacccggagggggctcctgctcccagcctcacttgggggtcctggaggaaggacccggcggccatggctggagagaggactgtggcctgctgaacccccatcctcgcacaccgaccccgcttcagcgcacggccggcccgggcagccccgggtgtagggcgggggccaggcacgagccccgggagccgatcttaggggcgggccccgcgccccccacgccggccattccggtggtccagcccggagcgcccccaaaccgaccccgggcctcaccttgaacgaacggtggaaaccctgaagttcggctggtttcttctgcaccatcttctgtccgggccccgccagcgggggaggggaccgagggcccggggggaggcccgagggcgggcggccgggcggggggcggccgaggaggggaccctgcgggcgggagcagacaaagggagggcggtgagcggagcccggcctgccaggagcgcggaccgggcgggggcggcgagggctccgcggggcccgtttcccgctaccgggtcggtgtcctcggggccgccctggggttcgcactcaccggggtcgggcttgggccggggccgcagtgccgccgccgccccacgtcgcgcagcccggaccccgctccgcggaccgcgcggggaacagcgccgccgccgccgccagcgcggacccctctacctgggccaccgccgctgagaggagccgggcgcgtcgccgccgccgccacctttataggcccggacctgctctggccccgcccccgacgcaggctccgcccggcctcaccccctgcgcacgacgtgggcggagccagaagagggcgctctccgggaacccagtgcggctgcgcgctccggcggtggggcgtgtccgaaacggctagcgcacgcctgcgcagtgcggcgcacgggggtctcggtgcggaacctaggcagcgaccctgcggcgcgcccggagctggcctgtttttgccgcctgaggctcgcggggcccgtgggacctgcgaggccctgggccgtgtcctaccgcctggccccacacagggcaactcccttggcctgtcaacccaggcctagtataccccgactcccttggttcatgccctcgctctagaacctgccatggctccctcttgcagttctccagtgctggctccagcagtccccctcgtgcaccaccagcacgcttggagtcccagccactcccttctagtgctgggggaccagccaccgccacctactttcttcttcccctgggccaccctgcctggggagcactgagctccccgagtttgctttgtggttggcaggaaccagagtagagggtggggaccgaggtctgtgaaggacccttcctctgtcctcgaatagcatttcagggagaactgggacctgagacccactgggaaagagcccaaggggtggatggtcgccaggacaggaagtaaaacacagtcccattttggctggggccccaaaccaggcttagatagaatcagcctgtcctgagctgccagtcccccatcccacagcatcctggttcaaagtgctccccaggccccgggcctggggcacacaaggagtgggggttcccctgctgggtggactgtggtctcctcttctgcaggggtttccagaagcttcgcacagcccatcccaccatcccccaaccaggccctgagctcaagaggggctggagccccactgacctgaagctggagggcccctgcctgcaaggccacagctctcaggccacaggggctgggaggcctggcctcagccacccccggggcattggggggaagcctgtggggaattcccagccagaacccagcccagcacctggcattgccctgactcttggcaatggggggacagaaaaccaggtcccccagccccccttattgtgcatgtgggtgcgtgtgtgtgcgtgtgaacacatacacgcacaaacacacgttagctccaggtgccaactaggggtggagctgctagacctgcttgcctgggcctggctcacagagggcgcctagtaaatagtgcttggaggaaaggataagagtgtgtgtgtgtgtgcacgcgcacacgcgcacgtaggggttgtgtggtcgtgtgagcttcctggggc

SEQ ID NO: 66720 - DNA, 4841 bp, Homo sapiens
aactggccacacaggtgggtgactgacctgagggtgtggtgggtcgggggatgtgctccaggactcacctgtggctgagctgtctctgcccaatttctggctttgaccccgacgtacagcccccatggacacccagtgagcacccagtgacccgcactggagatcccagctgtctgggccatgctggccccatgcccctctcctataggagacccccagtaaacctagcttcttctctggctgacccgccactggtcccacctccctcaacctcccagggccctggcagagtggcctggagcacacagaaggttcagggatgagctcgagttccctgcaggccggccctggggtgacccagacccctgcgccacctcccgccctcacggctacttcctagggtcccacagccactgggtggcacggccttccctccaggacagggacagactcctgcttacttcctgggacaacagacgccttgtgacagtggaggccgcaccacccaccccaccatgagactccagcggtggaggcccaaaggctcagcctgccccgggtcctgcagctccctggaggcgacctgtcctgcccctggtctcggagcaggcttggccggcctctgcccaaaggtgcacagcccccgcttccttgggggcaacctgtctgcctcctgccagcctttgagcgcttcctcaatctgtagagtgattctttttgctttttttctttagttctgcagaatgcagggcgattttcagcctgtgtggcatgtagggtgtccccaaagccccagaagaggtgcccaggcaggtcctgacttgccagccctgggcttctccctccacccatctccctcaagccagggaggctggccacacagcccaccctgaccacccccgaccacccagcacagggcccggctggatgtgtgcaacaagggatcctatggggggctccattgtctggaggctttttgtttgtttgtttgtttgttttgagacggagtctcgctctgttgccaggctggagtgcagtggctcgatctcggctcacggtaacctccacctcccaggttcaggagatcctcatgcttcagcctcctgacgacctgggactacaggcgcgcaccaccacgacaagctaatttttgtatttttagtagagacgggcttttgccctgttggccaggctggtctggaactcctgagctcaggtgacccacccacctccacctcccaaagcgtgagccaccgcgcccagcaacgctcagctaattttattttcggtagagatgggggggtctcaacatgttgcctaggctggtcttgaactcctggcctcaaatgattctcccgcctcagcctcccaaaatgctgggatcaccacgccaggcccagttattcactgtttatttgccattcaaagttagcttggtgtccgtattatatcagacaaccctacgggggcggggggcggtgacaataaagacctttcccctacaacataaaaaaaaaaaaacttggtgtgggtacgagtgtgagcagatcggggcgtgtgtctgtgtgcccgcggaggcaggcgtccctgggggaggccccaagcctaggtccttgcagggtcagccatgggcccatgtgggagtgaaaggtgggggtgggctgtgcacgcctgtacacacttgcaagtgtagtgggtggcacgagagaccacctcacagttcccacctgcttggctctccagggaccagaaccacggcccaagggccatcccttgctatgaagggccgtgggcagggtcatttcaggacccctgcggggctgagagctctggccatggggccacgaggcaggaatatctgatgtaagtggccgcaagcgtcccttcttgccggctgactcacactcactccactccagtggctcggcaggcctgcctggggacacagccagggcccgcggtcctccagtgggggcagggagtgggcagggcaggtgtggcctggagcctggggctgcctacctgcccgggctgtgggtgtctggccaggagcccggggcagccatggggccatccacgctgctctgacggagtggcatcaggagcagcgtgcatgccccacctccctggggttcagcccctgcacagtccccaaggaagtgtggggcagggctggcccaggagatggccaaaggccaccgccctgccccagtgaccgtgaacaaagcactccgctgatctcctggcgtcctctcctcctcctattaccagggggtggagcccagaagacacccagatgactctcagagaaccactgggagcctggtgccctgtgccctggtcccagctgatctgtctcccaacaaggccttagtttttttgttgtttttttgtgtttttttgagatggagtctcgctctttcgcccagtctggagtgcagtggcaggatctctgctcactgcaacctccgcctcccaggttcaagcaattgtcccgcctcaacttcccaagtagctgggattacaggtgcatgtcaccacccccggctaatttttgtatttactatttagtagagacggggtttcaccatgttggccaggctggtcttgaacttccacctcagaaaatccgcccacctcagcctcccaaagtgctgggattacaggcgtgagccaccgcgcccggccacaaggccttttcagggtgtttttcagggtgcacatcctgggaagggcatggccagggaaacttccaaggcgcaaggcactctgcaggtgggactgggttaggattttgagatgggagatcaccctggatgatcggggagcccagtgtcctcacagggtcctcatgagaggaggcagccgggtgagagtcagagaccggaagaggctgctcttggctgtgagtgggaaggggcccaagctgaaggatgtgggcgcctctaaacgctgggaaaggcaggaactggattctcccctggagcccccaggagggaccagccctgcgcacaccttgatgttagcccagtgaggcccccatgtcgggtttctgacctccagaaccgtgagagaatcgatgtgggtcgtttcaagccactgcacgtgtgtgattcattgcacagctccaggaggctcacacaggcggtgttttcctgagtttccactgtgcagatgagaaggctgaagccagggcagccccggtcaagccccccggactgtcacaggtcctgggaggcgccaggggcagggagatgcggctgggggcgggcgaggccctgcagcctgggcatggggccggcccagggacagggccccctccccgcagggctggatttgctgcgtcgccaaatgccggggctgatcggctgctgggcgtgtgaccccgcgcctttgaaatccgcagagccacgggtcgggccctcccgccccgcccgccgaccgcacccgcgctaggccagtccccgggcgccgcctcctcctcctcccggcggccggggctctgggcgccccccacacggtgtcccggggtgacaggagggtcggagagcacggactcgggggtccgggccgcgcgccctgggaaccccctccccggcggcggccgcgcgcctgcgcactggctccagtgccggggcccctttgccccggggacggggagaggttgccggggcaacgcgtttgcgtcagcgaacctggcgcggcgcccgggctcagagggcgagggaggcggggcccgggctctggaccagtaggactccaaatatttagtgtgggggcgtggccagagatcacgctccagccaatggaattgttgttgtcggggccgcgcgatcagggccttgtgcctcttaaagggaccgtgcgcattactccacacttcgctcgccgctgtgttctgggcggaggcctagggctcagggttgggggtcagtgggcctggctgggggcagaggtaagggagggcgcagactcggagttggaggtcagcgggccgggcccagccccacgtcctcctgttttgcccgtttgtgtgactctgggtccggtctcggtctcccgagcttcagtttccgcaggtgcacagagctggagttgcggagttgtgggcgcgatgcattcacggctactcctcccctggcgggcgcccctgcatttatgcagcgcccacgttttgcactagcaccctatgcaacgaccggtctctctgcaggtcacagaggagctggggggggttgggggaccccagaaggtgaccaggcctggatgaccaggactgaaccgcaggccttggccctgcaccaacacctcttcctctgtggccaggaaacattccttccaaggacccctactggagggggtgggagggttggtcccccaggtcctccaggtcccgggcgctgtgcaactgagtgaaagcacagaggcaggtggtcagaatctgacccccagcggccacagccacaacccctcaccccaggcaggcctcactctccactgtagccctgatcaatgaatcacaagtgaggggcaggaaacgagattgaaggacccacggtgtagacagcaggggaggtgaccccaccaacccacccatctggcaccctctacgtcccaagtctggagtgtcccagtggcagccctcagggcatggataggctggaggcccggcacccctgccgaggctagcctagaagaatgggggtggcccctttggccatgggaagtggtacattcacagatcgcgggaatgacatgggcatctttgggggctgtgattcagccgaccacagagtgtctcaggcttcccccaaggatcccatcttcaccatgtaccgccc

SEQ ID NO: 66721 - DNA, 513 bp, Homo sapiens
agtcaagcgatcttcccacctcagccacccaaagtgcagggattacaggtgtgagccactgtgcctactgcatctctgacttctctcgtgggaaagcagacaggcaggaagcaaggcctgcccaggcccctctgggccaggtgctatcgagggcttagcatactgtcctaattctcctgatagtcttttcttctgtttttagattgacatatgactcacatcccacacgttttaaccttttcagttacagttcaggagtacagttacgtgactcctggcacgtttggcgttgcgcaaacaccacctttatctaattccagaacactttcctcacccctaaaagaagccctggccagctgcagtggctcacgcctgtaatcctggcactttgggaggccaaggcaggaggactgcttgaggccaggagctcaagaccagcctgggcaacatagtgagacccatctctgtacgaaatagttaagaaattagccaggcatggtggatgtgcctgta

SEQ ID NO: 66722 - DNA, 1583 bp, Homo sapiens
aaacaaacaaacaaaaaaacagtgtgtacaaagactggaaatcttacccccaggatgagctgcggcttggagcactgattttctgctctgtgactgcattttccaatttcccctcccctctcagtgactcctaataaaatgcaccctcgcttacactttctagcccctcttcgctgcagggaggaggggcagcttgtccctggcgggcgcctccttccggggtgggggggccctgccagcgactttggggaccccgagcaagaagggcctattcgaaagggcccgaccgccgcgttggcttggggatcctgaagccctgcagaattttaatccacaccgggaggtgcggggtcctgcgggagggcagcgggcagggccaggagttcacccccgcagctcgaccccgcaccctgtatccccctccggggtaatcggtctccccgccgcccgcgttcgcccctcctgggggatcggcctcctcgccgcctaagttcacccctcctgaaggatccggcttccctgccgcctgagttcgcccttccttttttcttttttcttttgttcttttttttttttcccccgctctggttgcccaggctggagtgcagtgatgtgatctcggctcactgcaacctctgcctcctgggttcaagtgattctcctgcctcagcctcctcagcagctgggattacaggtgcgcgccacctcgtccggctaattttgtatttttggtacagacggggtttcaccatgttggccagactggtctcgaactcccgacctcaggtgatccacccgcgtcggcctcccaaagtgctgggattacaggcgtgagccaccgcgcccggcctcgcccttcctgaaggctcggcctccccgtagcctaagttcgcccgtctgagggatccagcttccccgccgccagggttcgcccttcctgagaactcggtctcctcgccgcctaagttcacccctcccgggcacccacctggccgcctctgccgcccgccttcgcccctcccggacacccacctgatcgcctctgccgcccgccttcgcccctcccggtacccaactggccgcctcggccgcctcagccgccgcaccgcctcgcagccgccgcggagggacacggccgcgggaacgccccacacgcatgcccgaccgcacccgcggaccggacctactttccttaaagggcccggggctccgcgcagaagcggcgtgcaggggtctcccagactcggtcccgcgggctttaaggggcccgggcggcgaaggcgcacggagccaagttccgggcagcagccctgggatgccctgagccgggccgggcggaggtctccgttgcctagcaaccggggccgcggcctgtgggcggagcctgcaccgtggctgcgacacggggcggggcctcagcgggagccggccgaggagcgggcaccggccattggcacaggcacgggccattggcgcatgcgtagggcgcggccttggggcggggcccacccagtggcggagtcttctgaggggcgggtcgtgggcggggcctggaggcggagccggcgccgtcagtagtcggc

SEQ ID NO: 66723 - DNA, 2106 bp, Homo sapiens
agcagggacgggcgctgggagatcctgcctgtgcagaaaaagtcctctcgggaagtgaaccacatttccaatctgaaccaagctcagtaaaaaccaggcccatcagcgatgctttcaactcacaaagaatctgaacattactccagttagttacacgttgtaaccaaagcagttagggagagcttctgagatgaagaaaaccaaggaggccgaagggaagtggggtggagaagaacaaaaatgacctcattaaggtgggggcaggcgaagccacaccacttccaggaaagtgtaaaggtgtaacaatacggcaagagctcgggttcccagagagagggacatgggctgagggacatggtgccaggaagcaagtcccttaacttccctgccctcctgggcacctcgtcctggacacagcctctggtactgggactggtgcggtatcagacggcggctctctttcaggcctgccttgctgtccacgcagggaagcaggcaggcagtcgctcaagtaggacactttctaaggctcccactgcccaagggctgcacgggtatccttaatgaagccagacacgtggtggccactctgcccattcttcttcaatctaggtcacaggttgggggaagggaggagcgggaaggaaacgatccccacggttgtaattttacttctggaaaactatttcctcgccctggctttcaggttcctacttgaagtcagcttccccattccagcttcccgcaagctgctacctcactggggatcaggatgccgctgtccttcctccctcctggcagcagccccaccttcctgggaacgggggcactggaggcaacgccccaagaccctgcctggttccgagccaggcctcagggagcgacctggacacgcatttacacgacccagaaggaagaaggagtttctccagggacggcccaggaccccctgcctcggtctcccggggagggtccgggggcggggcccgggcccctgcatttttaatcggtgattcggaaacacactcaggttgaagaagctctgcccagagacctcgcaagtctcctgggagggtggcccgagacgggggcaggtgggcccgaatctccctctgagagagtaaactgagggtccagggggagggcacctataggcggggcccagggcattgcattttgaacagcgcttcccccaggtgatccgatgaggcgaggatccgagatgtgctgctccaaggccttcgcccctcgtggggaaactgatgctgggggaccgaggaggtgggcggcgccccaggcccaggccaggcagggccggagccctaagcgggacctccaactaagacagagcccgggcgggcggcaggccgagcaggcccagtgagcagggctgggccctgggccggggctgtgaccaggccgagcagccccttggcgcgccgggctcacctcgtcctccttgtggttacggatgccgcggaccaagtcctgcagattcttgtcgaacatgcggtcgatgctgcccttcaccatcttgagggccatcgcggcggcccacgggcttttgcctcgggaggcccgcggctgggcgccgtgagggggcccggggcccgtgcctgccgcccgcggagcgccgcgctgccggccgctgcggcggggcaagctcccaggccagggcggcggcggggtccaaggaccgcggcagaggcggcgacccgctcggcaggtgccgcgatcccgctccgggccccttgcaaatggcggacaagatggcggcgggtcagctgacgacgagcgcccggtcccagccgagccggccccggaagccccgcctcccagaaagccccgccccgccacctccccggcagggagacgctgcgtttccctgacgacgacaggtagtccaatggaaatgtggcacctctttctcctgcgcgcggccccgccttttccggccccaaaacttgcgctctcattggtcagtggcctccggaactccgccttcttcctagttctgagccctagccacgccccttagaggctggtcctgaccctcccaccagctgacaggtgtgagcgtggctggatgtgggcggggcgcccacg

SEQ ID NO: 66724 - DNA, 2696 bp, Homo sapiens
tcttgctctgttgcccaggccggagtgcagtggtgcaatatcggctcactgcaacctctgcctcctgggttcaagcgattctcctacctcagcccccgcagtagctgggattacaggcgcccgccaccgcgcccagctaatttttgtatttttaatagagacagggtttcaccatgttggccaggctgatctcgaactcctgacctcaggtgatcttcccgcctcggcctcacaaagtgctgggattacaggcatgagccagggctcctggccgtgagagggggtttctccatgttggtcaggctggtctcgaactcctgacctcaggtgatctgcccgccttggcctcccaaagtgctgggattacaggggtgaatcaccgcgcctggcctttttttttttttttgtacccaataaacagcattgttgtcgaatgaatactggacttggagctacagcaagtcctggaccgtgactcttatggggggaaattcggatttttggttttactaagccgtgtgtggggaggtgtccggcgtcctcctcctgggacgggattcgaacccgctatccgacgggcccgcccacagggtctccccgggtccccgcttcgggccggcgagtgggggaaggggtcggccgagggcaaccgaggacgtgcgtgcgtacgttcgtgcgtgcgtggattcgggcgggcgggcgagtccacggggcggggcgccgagggggtggcgcgcgcgggtcggcccgctgggcggcgggcacgcgccggcgtcttcgctccgggctcccctagcgcgcggggcgagtggttccgcccggcccccggctcattgtgctcgcttcacgccggcccaagatggcggaggcgctggaggccccgggcctgtgactacaaagagggagtcgggggccgggccggaccggagcgcggcggcggcggcggcggcggccgaggccgaggccaggccccctcccctcagcctcccgcccctccctcccgcccgccctcctccgcccaccggcggccccgcccctcccccaaccgcccgcctagcatggtgcggcggccgcgcgcgcggacatgggggagaagctggagctgagactgaagtcgcccgtgggggctgagcccgccgtctacccgtggccgctgccggtctacgtgagtgccgccctccaccgtccctacctcccggcctcccctcctccgccgcccctggggacaccccaaacccccccaagccgcgctcaccggtcccccctgcggaacggagaccctggactccactgtcgctgctccacccccgttgcttcccggccgagggccccgcggctgtttcccgcagggtgggagccccgcgcgcctggggtgggagcgggagccggcgcccccgagccctaccgcggtgccgttgcccccgccgggctgtcccgggcgcggaacggaaggggtaactcgtgccggccgcgttttgactggaagcccgcccgcccgccccgctcgttcccggcgctgtcagtgtgtccgccgccttatttttctttttgagggcatcctttcctgtctcctcttctcttctttttaaaaattgggcgtttgtcacgcttttcctactcgggcacggcgggcccgaccctgcgaaggtgggagttaacgtccccttgagtgggcgggagcggtctgacctttggaaatggggaatttttgtccccgtaattttgagtgggtatgggctgccctggccctgggaaattaggcatctttgacctgttaatcctagttggttggggacaggctttatttatccttggaaattgggacttctccccgatcttgagtgggcaggattgggctcacccccggagttagtaaattttgtcttcttcatcttggtgaccgttggaaaatgacaggccgggtggaatgttacagaggcaccccaccgggtggttccagaaacccgcgtgcggctcccggggtgcgagtcccggcgtggcccctgaggaggcggggcgcgtgcgtccgcgcttgggaccctctggccacgctccgggctgggcagggcgcgttttcggggaaaagtgaagcaggcgctgtcagcgagcgtgtccggggcgcgagttttggggggcgcgtctgcagggcccggccgggcatccccgcgcgccctgggactcccgcgcgcgctgggcttgtgtcagtttttggaaacgtgctcgctgggggcggggtcaggacgcggagagcgctggggagcccgggctggctcactgccccgggtcggtgcgagtggatgggagagggagcgcagcttccagcctggccgcacgtcccgcgcgcggggctggcggggtagggccctggggctctggcttctctggttgggcagctccgggtgtgcgcctgggcggcctgagccgggatcccgccaggagaggtcctaggacaaaaactgaaagcagaggccgcgcttcagcgccccgaccggtttcctccctcgaaagttcaaactccagaacccttccagcctccacttctctctgttgggctctcatcgttttaggtggtagaaggcatatgaccataagagttctaactgtaactgactgaagatcaattgaggtggcttaccaccgtccgaccagccccagtacatggcttcacatttttttttttttttttgagacggagt

SEQ ID NO: 66725 - DNA, 2510 bp, Homo sapiens
tcccaggtttcagtgattctcctgcctcagcctccccagtagctgggattacagacctgtgccaccatgcctggcttattttgtatttttagtagagacagggtttcaccatattggccaggctggtctcaaactcctgacctcaggtgatccgtccacctcggcctcccagagtgctgggatgacaggcgtgaaccaccgtgcccagacgcagctgcagcagcacatttattcatgattcattccaacagcagctactgaatactcagtgttgtgggggcacagaggacaacaagccaatattctccccccgccaccgccccagcattcttagtctcaagaaacctgtcaaatgaagacaggccgggcacaggggctcatgcctgtagtccctgcactttgggaagcccaggcgggaggattgcttgagcccaggagtttgagacaagccagggcaacatagggagactccatctctaccaaaaaatttaaaacagtgaagttaagtagattataaatagaagttcagcagagatactgtgctgagtacaaggtcagctgaggtccccagggaggggctgccacttctgccctgggggacctgtgggtggctgcttggaggaggggccatccggaggaggaagcagaaatagccacaactgtccacgctcggaaatgagcagttcggaaggggtttgcccaattggcaaacgcaagggggaggaagggagatttttattcttacatgacctgggagttcctggataaccgcttttctcaagccccgcatggcatttcttatttttttgagagggaatctcgtactgttgcctgggctggagtacaacggtgtgatctcggttcactgcaacatctgcctcctgggttcaagtgattctcctgtctcagcctccccagtaggtgggactacaggcacccgccaccacgcccagctaattttttgtatttttagtagcgacaggttttcactatgttggccaggctggtctcgaactcctgaccttgtcatctacctgcctgggcctcccagagtgctaggattacaggcatgagccaccgtgcctggccctgcgtggtatttctagggcaggatggccctgcccttcttctagtgggaagggcacaagtggcattattggttgtttgctcggaaagaaccttcaaaggccacagaacgggaccttccccctggtgactcacaggctgtgggcgggcaggggcggcctccactggccaagggtccggactctctgactctcattaatgagtgagtacatgttccgcctgacagcctggcctggagcccggctgtgggcggcggtgagtgggcagccagcagtgagtagcagccggggcggggtgagctgtccccaccgtgactcagaaggtattttctgctgctgacctctgagcttgagtgtcctgagtaatcccagctcccccggaggcagattaacctttaggcagctttgtgtgagtaaaggagtcgctttaaataggaaggaataatagaaaaaacccaagtgttccgttttatagcaaatgcacactgctttgttcctgctggcctgaaagaggttgcagggggtactggggcggggaattgtccagaaactctgcagatgatacagggacactccagcctagcctctgaggagagttttttttgagacggactcgctctgtctcccaggctggagtgcagtggcccaatctcggctcactgcagcctccgcctcctgggttcaagtgattctcctgcctcagcctcccgagtagctgggattacaggtgtgagccaccacgcccagctctttttttcctttaaaaatctgcttgttatctgctgctcatcagagtgtatatttggggtaattcgagcctgtgctcccaggttgcagtcctcaaatgtggcccaaataaatgctccacttatattaattttgctccagttcctttcctttagctcgacagtgtgaatctacaattatcttaaaataaaaagtttaattaaaaaaaacacacggttgcccaggcacggtggctcatgcctgtaatcccggcactttgggaggccaaggcgggcagatcacctgcggtcaggagttcgagaccagcttggccaacatgacgaaaccccgtatttaccaaaaatacaaaaattagctgggcgtggtggcggttgcctataatccggagaattgcttgaacccgagagggggaggctgcagtgagctgagatcatgccattacactccagactggtcgacagagtgagactctgtctcaaacaaacagacaaaattagataaaggaaaaaagaatttttgttcaagtaatattggccattgatggctgcaaatcactcttggtgttacagattccaggaacaggaagatagtgtccgagaccaggatgcaggaacagatagatgcctttccacgcttgcccctggtgtggttgggaggcgtgactgaaatccttgctct

SEQ ID NO: 66726 - DNA, 2678 bp, Homo sapiens
agattgcaccactgcactccagcctgggcgacataccaagaccctgtctcaaaaaataagcaaataaaataataaagtgaagtaaaaaggggttgtcagggtgggccctaaattctgcttggcgtctgtgtagaaggggaaatgtgggcacagacgtgatgcaaggaggacaaggtgacgcttccacaagccaaggaacctggaggatactggccaccactaggaactgggagattcccctcggcctcagaaggattcggccccacccacaccttcatctaggatttctggcctccagaactgtagagaatgtttctgatatttaagccacctggcctgtggaattttgacagccactctgggcaaactagcagggactccatctttccccgcagaagggaatctcttaagacccaggagaacacccccctctcactcctcctacccccacctgggatttccagcccggggccatataacaatgctagacccatgctactcttggcagctggggaaacgctttgggtggggctggcccacctgccctgtaagtacagcctgggcccacagggaacaaagagcagagtctgggagggacccaagcttaagtggactcggcaggtgggaagggtggtgcccgccaggagaacttgaccttgagctgcccgtggacaatgcactcttgtgtttgaggagggtggcgccaggctggggacacagaggagaccttgggcgcccggggaggggaaagtgcggcgctgcgggtgccccgggctgcgggaagcgccgctggcttccctagccccactcactgatggagaaggtgccgggctcttcccggacgactctgcagcgctccagcagcagggctccgacgggctggaggagacacgggcgccgggacggggcagtgagcacccggcctccgaggggcccagcctgggacccgcccgcgcgcccgggacgcccctacctcggcctcgtctgtccgaaagtagaagaggaaattcaccaccagcttcaccagccgccgcttcagcactgcgggcacagcgcgcactcaggggcgcaggcagcccccgcccggaccccggcctcccgtccccggcgccccgacccggactccggcctccggcacccccgcccagaccccggccccggcctcccgcccctggcactgtctcggtctcccgggtcccgctcaccgctgcccttcttggggcccctcatgcccagctcggccgccatctcggccggctgccgggacagagcctgcagctccttctcgttgtaccgcatggctccgcggggaacgggaacccgggccgcgccctcccggccgccgtccccgctcaggctggggccggcgccaaaaatgtctcagggcgcagacacggaagcacccccagggctagtgcgcctgcgcaccttgggccagccatgccgcccgcctccgctgcgtggcgctggcgacccgtggctgctggcgtgggcggggtaccggttggtaggagagacggaccgttgttacataaccattaaactgaaataaaccggaccaaggtggaacagaatcaaggcaccccagcgatggctggcacccctttctagagcggccaggcgcaggcggagggagcgataacgtcgcccggagagtgtcagccgctccctcgcgaaagttggccccgtgcggccgcagcggaccgagggttcgttgagagcgttgtgcgcacgcgcagtttgccttccaggccgcgctttcagcctctccccctccagccttttccttcgcgcctcgggaccctctgactcacgccgctgggcgggccaggcatgcgcacaccagagggcccgtctcatttgccccggaagtgctttctttgcccgccgttcgccaaacgaagtcgtggaggtggcgaaacgaggaggagataacgcggccttgggctctggtgaggagtagaggcggttgagggcggcggccgacgcggaccgggggttccctgggggacagcggacgtaggagagaggcgcttgcgacaggccgcgggccgagggtggggcggcggcgtcgctcccctccctcctcccgtgagcgtccggccttgtgcatcctgaggccccgcgctgggcgggcctggagggtcgggcccgccaggaactctatttccaaactcctgttgggaggccgcgcgcggggcctcacgcctgtaatctcactgctcagggaggccttggcgggaggatcgcttgaggccaggagttcgagaccagcctggacaacacaccgagacccccatctctacaaaaaattttaaaaaattagccaggagtggtggttgtacctgtaggcccagctactcgagaggatcgcttgagctcggaatgtcgaggctgcagtgagccatgatcccaccactgcactccagcctgggcaacatagcgagaccccatcactgcaaaaaaaaaaaaaaaaaaaattagccgggcgtggttggtgacgcgcgcctgtagtcccagctactctggaggctgaagcgggaagatcgcttgagtccaggaggtcgaggctgcagtgagttgtgattgtgccgttgcactccagcctggacaacagagcaagaccctgtttgacaaaataaaaaagaaacaaccaagattcgttggggtcgaatcgg

SEQ ID NO: 66727 - DNA, 3447 bp, Homo sapiens
tgggtgacagccaggcccggtcgcaaacaaaacaaaattaaaaccatgaaaggaatcaggatttgccaggagtagcatttttgcttggtaagaacaaaattttgtttatacatgaaataaaaaatattttattaaacctcactgcaaagtggcaactttttgctaaattcataatttagtctacacacaagctatgtacccgtatgtgactgccaagagttatatctttgcttattaaaagcaaagtgcagttcatacctgagattttttttctggatttaaccaggaggggaaatatttttgctaggtaagtccacattttacctcacaggcgaaacagtttaccgaacttgaccaccaaagaaatcgttttttccttgggagatccacattttagttcatacatgagatgtgtttctgaattttaactgccaggagtagtgtttttccttagggtaagtttcagtttccacaggaaaaatctgaatttatctgcaaggagtaaaatttttgcttaagtccaaattgtacacgaaatattttactaaatttgaatatctttaacattggaagttctttttttttaaacactggaagcattttaagaactgcaagaccaaatttaaaaaaataaaaccagtaatatcatcgatgattaccaggtgttactggaaataattctggcgcggttggacaaccccccaagcacccgggggcctacccaggggaggggtcccgctgcgtgaagggaccctagggagggcgacgtggaccacgacagacaaacgggcactcgaagacccccgaaaatcggccccagcgagccgcccccgcccccaaggcacgattgtgggggcggggacggctcggggcgcgcgcagcgcgtacccggcgccacggcagccccgcccccagaaggacgcgcgcaggagggggcgtggcccgaggctcaccaaccaatctccagagagcctcttcctttccctttccctttcaccaatcaggcgctgggaggggcgggcgcgactttttttcccggcggccccgcggctctgcccctcgtgcggtcgcgttcccggcggcgcggggggcgtggcctgggcgcagcatctataaaggcgggcggcggcagaggcgccattttgcgaacggcgagcagcggcggcggcgcggagagacgcagcggaggttttcctggtttcggaccccagcggccggatggtgaaatcctccctgcagcggatcctcaatagccactgcttcgccagagagaaggaaggggataaacccagcgccaccatccacgccagccgcaccatgccgctcctaagcctgcacagccgcggcggcagcagcagtgagaggtaagtgccccgcccccgtccgaagcttccagaagcgccggccgcgcaggcctgcggggggccgtcctcggggcgccagataggtccccggcgcgcgagatccgcccctttgtcaaggccagaatcgcgccggggacgaggtaggcgcagggcgggcctggaggtcccccccggccttagcagtgctctcgggggagtcgggtttggggggcaagggtgcggagttggatttggggggcaccgtccggggcgcctgatttgcgggaggggcatgggtcggaggtcggatttgggcgcaggacggggagtcgggggaggcgtgtgtcttttgcggggttcgcgggatgggactcggcttcggaggaggggagaggcttctggtcgagggttggatttgcggggcgcagactgggaattcggtttggaggaagggtgtgcggtcgggtcggatttgggaggcgcacgatggggcaatctggttgggggcggggtcggccttggggggctggtccgcggacaggcagggcccgcggggctggtgaatctgcacttttcggtcccggccgtcgagcgtgcgctgcgggagcggggagcgctttgcggtggacgagctcccgcgggtccctgttgcctcgatgtggcccctgcacgcgacggacctcgtgggccccgtttttcgcccctgagcgagtcggtctggatggcccgggacgcgccgggcgaggccgcgcacgtagacggcacccagggcttctccgcgggggccgccggggagctgggggtggcgcactccgacagcccggcagcgccctgggaagacccccgccgcttcccgggaagacgcgtcccgcttccgggggcgcgggtgccagctgcggttgtgggggagcccgcggggtctcggtcgagctttcccgactgcgtcccccgaggtgggcgtcgctcagccccggatcgggaggttgggccgcggtgctggcggtgccgcggtttgggggccgtgcaaaatggaggcaactttggggcctgtttaccctgcgcagcaaatggctgctggcgctgccggctgcgcgattgtgaaaatctcccccggggcgcgaggccgcgtctgcctggatgacgcaaccgggagggcccgggcctggagcgggggcgggggggcgggcggccgggagccggagcggggcgcgtcctccatgaggtcaggctaggcccgcccggtcttcgcggggacaagcaagagtcccagattttggccgtagtgcagggtggaaaggggaagccgcgacagaactgaaaaggggaagcgctggctgtcttggtggccggggggtgaggctctgccccggcggggctgcgtgaggggaaggggccccccgccctgggaaggttgggctgtcctgggcggcgccgcccgaggagtcggggctcagtgactgctgcccttgtaggtgcttggggcaggcgttggagctgccttcgggaagcctcgggggtgtgggaccgggtgggcccctgcctgggcggggcggggtcttttggccgaggcaggggtggggatgtgctgaaggccgcccggacgccctggaggggtctccgcccggagcctggcgctgcctcgtgacctgcatcatcttcagttccagggtctccctccactgctgtagtaacccgggtccggggcctcggtggtgctcctgatgcccctcacccacccctgaagatcccaggtgggcgagggaatagtcagagggatcacaatctttcagctaacttattctactccgtgagtatggggccgggcctgctggggctgctctggggccacaggtactttcttgtgcaccttgctgcccgtacctgtgattgaatgtaatcgtgggaaccctgagtttcatcagagccggcgcacagtctcctgcagcccaggcgttgcctgagctcaacacggcctaggcccaagctttagcgctgccgggttcttggagtcctgtggggtgagtcagggttctgaattgggctgcaccccctggacaggatgatcggctgaatgtaacagaggaactaacgtccaacgacaaga

SEQ ID NO: 66728 - DNA, 1117 bp, Homo sapiens
aggggtcgcgggggatttggcacccaggcagctgcgggacccctcccacggaggagaccccctgggctgggaggccgggccctcagcttggcgccagccttgccactgctcgcttgaagccccttcctgcctcgcgtccccttccgccccagcctgggcctgcgcatggggatgtctgtgctcccaactcaacttttgagttcgccgtgttactggccgcccctagggacctgcagcgccgttcggggcagcagcacttccggcggggtcgtggcctggagcgcttccgggtctgcaaccccgccgtctgcccggccgcagcgccacctgccggccgcatccgggagcgccacccggaaaatcagggccaggcctggccgggaaaccggctggaaagaggaggaaaggaggaactcgaaaagattgtagacttggcgagcgggccggggggatattcagccgtctgagcggtggtggggtcggccgggaggacaaacctggacacagatacccccagctcatttgggcagcgcaaatgcagagaaggggcattagagctgaggccatgcaggatgaataggagtatgaagcagagtagagggggctgttttctggtgtaaaaaacaacttgggcaaaggcgtggaggctggaaagtaacctccagggatgaacgacatggggttggagactctgaggagactttggaagagccctgtatgtattctgaggcactggggagccatgggaggtgtttgagctggagagggacctcatatctggggttggaaagatcctcccaggactgccatggggaatggaatggaggggcaactctgagtctccaggaaggaagccacaggcaagggcagtgcagtgtgtcagaggcataaaggaagactccatccccctccagtgagtctcctctgtgcctgtttattacatcatcctgtggtattaagtgagcacctactgtgtgccaagcctggcctttgcccccagggaactcacagccttgtggacagtaacagaggaataaatgctcctgagagtgggcggagaacgcagggtaaggagctagcgatggcccagagtgggcacctttatttgtttagagaa

SEQ ID NO: 66729 - DNA, 1810 bp, Homo sapiens
aaccaaagatccaagaggctattgaataagtgacgtgttgtctgactgcttacttcctgctgagagctgcctcaattacattacatgcctgtaaccattcattctcaccaccccctgtgaagtgggtggagttaccagccccatttgacaaatgaggaaacggaggctaggagaaggcagctcacttgcccagtcaaaaatgctaggctgggcatggtggctcatgcctgaaatcccagcaatttagggggctgaggcaggcagatcgcttgaggccaggagtttgagaccatcctggccaacatggcctctctactaaaaatacaaatattagccgggcgtggtggtacacattaattccagctactcgggaggctgaggcacaagaatcacttgaacctgggaggcggaggttgcagtgagctgagatcgcaccactgcactccagcccgggtgacagagcgagactgcgtctcaaaaaaaataatgaaaataaataaaagaggtgcttccgcatgcgtcctcatcatctctgttgctgggtttatttgaaatttttaaagagggggtaccgacagcgggagcctcctcaccttcgcggcctccctggaactttacccggatcgtcttgtcgatgtacttggacaagtccaagatgctctcctttttcttcttctccttatcctgcggggaaagcagagcgcatgagacctggagcgcggcccgagctccacgccccccggctccagattccgccgcgcgctcaccgccatcttgtcgcgccgtgtggctcttcgcaggcaccgccccgcgccctttgacctcccccacgcgcatgcgcggcgcatgcgtggcccggggtctcggggcgttgctgggaaacatctgccgttggttgcggcgggcaccggccgacatggcggcagcggtggcggctgcgctggcgcggcttttggcggcctttctgctcctcgcggcccaggtgagcgcggcaccggtcccgacggcaccgcgggctgcggcccttcggcctctctgtccccgggctacgcgcaggaacgaccccgctcggcccgtcttgggggtccagcctcggggatccgccgtccccgcgttgtcggccggcggtgccggggctcggccgtgaccttgcgggtctgtccccggctcctctcctttccccgcctcggaggccctccgccgctgcagcgccactcacttcccaccgggtctgaaatttgtgccccctccatcctccggttctgcttctccgtttcggggtctccagttgccgccggggacgcctctctccggctctgtggccttgagcaggcggctgcccacccctctccgagcctcagtttccccttaggcggaacgggcacggtgctaagctaacctcaccctagggggtgcggtgggggaacccagaggcgtcccgcgcgtcccccagtaactggcagcatcctggagcggccaggagtccagccctgcactggggtcggatccccgctccatcttttactccgtgaccttggacgatggaattcgtgtgcagaaggaggaccgactatggtgtggattctggaggttctgtccagggtgaccagcgcccagggccaacaggccttcattatgttcattgtgtgtcatttgatgtaaagagtgtcaggttctagtggggacagtctacgagatcgcactgtcataactgcatcttttattttcttaattccaaatcttccctctctcctgagttcggtggctcaggcaatggaacctggagcagccccacaaatgcagcccttaa

SEQ ID NO: 66730 - DNA, 1124 bp, Homo sapiens
tgaggtcgaggctgcagtgagcagtgattgtgccactgcactgaagcccgaacaatagagaccttgtctcaaaaaaataaaacatttaaaaaaataaaaatgagaattcagcccttcgcaaacagctcaccattttagttggagatgagaggctgagtggagagcgggaggcgttctgaactatttctgcaacttcctgaatctgcagttgtttagagtagaaacagagtgaggttgggacacagaggcggggcaattcagtccgcccaccagggtgctcgtgtttctttagtttcttgaacgagaaaacataccgtttttagaattggttcagaatattctatctactgaatatatggctacgtaaatacccatctagcatatctatccatttaggataaacggaattgggacccagctttcacggtttacgcggttgctatttgcatggtttaaatgttgtaattacggccattttttttgcgctggtgtgcacttctggtagttttaacgtatttttgaccaaaactcgtgctctcatggtttctgtggttgctctcgtagtttttatttagatttttttctgctgctgcttgcatcagcataggaattttttatgactattatttttgctgtactttgtactttggacacaacacagccaacagctaaaaaccagtgctttctgcctggcgtggtggctcacgcctgtcatcccggcactttggcaggctgaggcgggcagatcacctgaggtcaggagttcccgaccagcctggccaatgtggcgaaaccccatctctgctaaaaatacaaaaattaacgctgggtgcagtggctcacgcctgtaatctcagcacttcgggaggccaaggcgggtggatcacctgaggtcaggagttccagagcagcctggccaacatggtgaaatccagtctgtactaaaaatacaaaaaaactagccaggtgtggtggtccacgcctgtaatcccagctactcagcaggttgaggcaggaggctgaggcaggaggatcgcttgaacccgggagatggaggttgcagcgagctgagaaaacaccactgcactccagcctgggtgacagagtgagaccctatctcaaaa

SEQ ID NO: 66731 - DNA, 1212 bp, Homo sapiens
aggagatagagaccatcctggctaacacagtgaaatcccgtctctactaaaaatacaaaaaaattagccacgcgtggtcgtgggtgcctgtagtcccagctactcgggaggctgaggcaggagaatggcatgaacccgggaggcgcagcttgcagtgagccgagattgcgccaccgcactccagcctgggcgacagagcgagactctgtctcaaacaaacaaacacaaaccaaccagtggtttttgaagatgacctcatgggactgtggccggagagtcctgatggcctctggctgtgctcatgcccctgccataggaggcggggactgtcatttcaccgtctcctgatgccattccagaggttacgccctgaagtcagctcagatcctgggccaggcactgcatgggagacaggcatgagcaggacctctttctgccttcgaggaaaacacgggggcatctggggctcacttggcactcatccaccttgtgctgtacctggggacctccgggtgggtggctgtcatagaattcggctccaaaccaggatgcttttgggaattgagggagagccctgtgagtagctattcagggctatcacgggggcgtcgaccaccccactgcgtgtcaggagtgaccaccagggtgtgtgagtgcaaacagggcggggcctgggtggcagctcagcggagccctgagcccccaaaggtgggctctctcacgggccctggtctcgtccccagccttcctctctacacagggcttccacgtggaccacacggccgagctgcggggaatccggtggaccagcagtttgcggcgggagacctcggactatcaccgcacgctgacgcccaccctggaggcactggtgagggtggtctgtgtttgggggccagggaggaagagcgggtggccgggggctttgacctggaggtgctttccgtgtgggagggaggcaggccacaggcaacgaagctgaggtggaggctgtgagaccgggaggccaggccagggggcgggcaggacgaggccaggtggccaaggcagatacctgcaaggcagagctgtatccactgaggacacactcacatgggactttaggccacatttagaggtttttttttttttcttttttttcttgagacggagtctcactctgtcacccaggctggggtgcagtggaatgatctcggctcactgcaagctccg

SEQ ID NO: 66732 - DNA, 1854 bp, Homo sapiens
cccttagcctttggggcaggggtggcagcagcaacacattcctcgtgactcagcagcccggtggcactaaggggaaagatggacttctcccaacccaggggaggctgagaccctccgagctggggttccagggacacgcgtcacctcttcccagagacccctcaggagggaaataaagaggtttctctccgtcctccaccaatttatttgcccatccgcaggaggtgacagctcctgtggtgtctgaccacccccaactccgaagtccagacaagctgtccgcccagaatatgaggctgacttgggcacactaggggaataccccaaaggcctgaaggaggtgccactgggctgccagcacttcaggaaggcacagggccccacacccccgagatccaagctgcactggctggcagggggcagggcggggggtggcgaggacacagtcccgtgtgtcccagcaccggtgccaccctcctaagccccgggcaggcagtacgtacatgcggaccccgcctctcaaagcacgtttatggaaatgaacagggtggggtggcccgcgctcgccggtcacatgttggctcgttcccgctgcagccgcgagttgtaggcgcgagacacggtgttccaggcgtccatgtagcggtccatgcacatggcgatgcacttctgcgggagcggaggggcgcacggctcagctcgggacttcgcggccccggggaccgccctgaccccggctccaggacgcccgggctgcagactacgcacgtgcagtgaccactccgtcgcacctccccgttagtctgcgcacgcgcagacacctcccccctcgaatctaggccctcgcgacccttgccccgaacctccgcgggtctcacctgctcggagttgtccagggagcccccaggtttccctatacacttccggaaacacttgtccgtcatcctctgtggagacacgcgaggctttagccgcgacgtcggcccccaggggtggccctgtcgcccccagcgcccgtccccggccagccccgcacctgcagcagctcctgcgcgttggccacggcgatctgcactttcacctgctccattatgagccctgggtccagcttcccgctgccggagcccccgaaatcggagccgaagccgccctccatggctccgcaaagtcaaccggaccgaggccgcgtgcgccgactcgtaactaactgcgccggaagcgggccgcccggggcaccacgggaaacggagtccgcgcggacggggacggaggactacaactcccacacgaccgcgcgcgcccgggccattcaaggtcgcgcggggggccctccgctcatgcggaggcctggacctgccgttacctacacgagctacccgtggttgcgactccgcgggaagagggaggccctgacttggccggggagtaggggggctactacgtgcggccgaggccgatcactttgtactcacgctctgcctccagctcgtcccgaagggcctgccgcgcatgcgcacgaggcacccggcgcgtctatacagcgtgttgccgccggggcggagcccggtcgcatcacgtgacgaagagtcagcttgtgcaacagcgtcggaggctcactagaaaaaaaagggcagggtcccatgcatcgcctgggtcctgtttacactagctacactagccagtgacctttttccttgggggtggagggatctttcttagacatccgcttcattagggcagaggccccggctcgagcttcccctcaggaataaactcagaggcagaacctaaaatcaaaatgtttattggagtgttgtacaaaaaagtttccagtcataaaatgtatattacaaa

SEQ ID NO: 66733 - DNA, 1696 bp, Homo sapiens
tccataggtggggcattcctggtctgcacttttcactcagtgccctagaaaccccctggaggtccccaagagaatgggccactccggtctgcacccctcccaaggggtcccccaagatctcggaaactgcggtgggcagggcctgcccaggtggcacccctcactcagggtctccccctggagatccccgaggccaggctgaccccacccctgctcagggtcccccgtgatcgcgtactccgcggtgggctgggcctggccgagctgcacccctcactcagggaccccttgaaaccccctggagacccccaagccgggacccttcccggtctgcacccctgcccagggtccccgcgatcgcgcaccccgcggtggccaggacctgcacccttcatccaggagccccccgcaaaccccctggagaccccaagccgggagtcgttcagagtcccccgcgatcgcgcgccccgtggtgggcggggcctggccgagtagcacctttcactcagggactctccgaaacgcggcggagatccccgaggccggactgtccccgtctgcatcccagctcagggttccccgcgactgggagccccgcagtgggctgggcctagccgagcagcacccctcactcagaagcccccaaacctcctggagacccccgagccggagcctgtccccgtctgcacccccgcccagggtccccgcgatcacgcaccccgcggtgggcggggcctggccgaactgcaccgctcactcaggggcccctcgaaaccccctggagaccctcgagacccgggcccgtccctgtctgcacccagggtcccagcgattgcccaccccgcggtgggagggacctggccgagctgcacccctcactcaggggccccccgaaaccccgcggaaacccccgaagccggggcccgtccccgtctgcacccccgcccagggtccccgcgatcgcgcgccccgcggtgggcggggcctgccggctgcacccccgcccggcccctaagccccggcgcccacctcgcgcgtggtcacctcctccttctctgagatcttgagcaggagccggtcgttctccagctccagcgcgcggacgcggtcgatgtagtgcgccaggcggtcgttgagctcgcgcagctcctccttctcctgcagccgcgacaggcgcgtgggcgacagcggcgtggcgggcccgcccgcgcggccgggcagcggcgtggccatggtggcggcggctcgcggcctgcgctgctcccgacggcggcccgggctcggcgggctcattcaatccgcgccgccggctgcaagatggcgccgcgccgcgccgcgcccgccgcccgccgcggcggggcagcctgggactggtagtccgaccgccgggcgcgcgcggggcacgccggaagttgaagtctccgtccagctctcgcttcgcagaggcgctgactccagagacagacttcctggctgcaaactcccagctccgccacgaggaaacagcgttgggttgctttctagtacctgtttccccacttagagaacctcaaaacgtgttcaaagaaccagacacaaaaggccatatagggccgggcgtggtggctcacgcctgtaatcccagcactttgggaggccaaggccggtggatcacttgagaaaagaatttcgagatcagcctggaccacatagggag

SEQ ID NO: 66734 - DNA, 526 bp, Homo sapiens
cagcctaggcaacagagtaagactccacctcaaaaaaaaaaaaaaaaaaaaattagctgggcgcctatagtcctaggtatttgggaggctaaggtggcaggattgtttgagcaagagaggtcaaggttgcagtgagccctgatcacatcactgcattccagcctgggtgacagagtgagagtttgtctcaaaaaaagtaaaaataaaaatacgaaataaaaaccaattggttgtttcaaagttacttttttcatagggtctgttttaaccccctctattttgagggtacttccctatcaggttaaccggtcccctttggcttggtggctgtgaatgtttttttttgaaaacctgcaccctttaaagttcagtttgaggccaggtacgggtggctctcacctgtaatctcagcactttgggaggctgagatggggagatcgcttaagcctaggagtttgagaacatcctgggcaacatagtgagactctgtctccaaaaaaaaaaattttttttttttggagacaga

SEQ ID NO: 66735 - DNA, 1059 bp, Homo sapiens
cgggattcgaacgcgggaccctctttcccccgggagctagaaattagtgaccaattggctgggcgcggtggctcacgcctgtaatcccaactttgggagtccgaggcgggcggatcacctgaggtcaggagtgcgagaccagaatgaccaccatggcgaaaccccgtctccacttaaaaaaaaaaaaaaaaaaattagccgggcgtggtggcaggcgcctgtgaccccagctactcggaaggctgaggcaggagaatcgcttgaacccaggaggcggaggttgcagtgagccaagatcgcgccattgcactccagcccgggctacaaaagcgaaccttcgtctgaaaaaaaaaaaaagaaaagaaaagaaaagaaagttagtgaccaactgctgtctgcttttggggagagggtacggggccgcgggagagaaatcccggaccctgggactatgcagcccgtgagggccccagtcccgacccgtccattccactgacctccacccggcaccgccactcccacccggggagtggattttggcgccagattttaaaaatctcagcctaacggctgtggctggctcccagcccggaatgcgagcctggagcccggattccggaacctggatctggaggagcccggattccagagcctggttctgagggagctcggattccggagcctggatctcggggagcccggattccggaacctggatctgagggagctcggattccggagcctggatctccaggagcccggattccggaacctggatctcagggagcccggattcggagcttgggtctgagggagctcggattctgaagcctggatctcggggagcctgaattctggagcctggattctgggctgtgggtcttgggaagccgaattctggaacatagattccagaacttgaaggccaaacctggtatctaagatcagaattcaggaccctggagttggaaccttgtgaccccaacagaaatccgggaggcaagcagagctctggggccgtggctggcagctgcctgttaaatgagtgaatggaacagt

SEQ ID NO: 66736 - DNA, 6671 bp, Homo sapiens
caatgcccaagtatccatgaggaacaaaatatcaaaattgtaaataaagacagaatctgactttgcacttatcccacccacctccctgatcttccttatcttcagctcatgttggccatgttggtcaggttggtctcgaactcctgacctcagttgatccgcccgcctcggactcccaaagtgctgggattacaggcgtaagccaccgcgcccggccgatttaacttttaaattgaaattataaaatataaatatgtatgttgcatgcgtaaaacattgcataaagttacataaaacgttgcaaccgccacggtccccttatcccccgcctccagcccagtgccccgcccgtccgtccctctcttccggcgctgagggcgcagaaactcggcgcggccaccagatggcgccaccgcgcctcgcagccccgggacatttcgtgccccagcggtgggcggcgcggaggaggtgggatgcgtcagccggacccgcgggccggggagccgggcaactggggaaagtgagccgccgggcggaggccagaccccaggctggcgggggaggggactcagatgtgagtcacccgggagcccccagtcgaccgtgggagacgttgtcatgcggggcctgccagcctcgctcctgaacagccttcccggggcggcggagtcctgcaggcggccgtgcctggcgcacacgcgtggctccaacacgaactagcctatggcctcaccaagcctcagtttccccttttgcataatgcacataagcatcccccctgcttcccaggtcttggattaaatcatccatgaatccggaggggtggggggtaccaggtccgcaccacgcactcaatgcaggtcagcgcccaccccggagtgagaaataaaagtagccgtcatccttgcacgtgggccctgggtggcggcgtgcagccggagcctgcaccattcccctcaacaatggctttctccagggcctggaggcctccgcacgggcaaaggctggaacgccaggcagccggcgggggcggggccgcgccacctgcacctcccacgcgcaccccaccctgatactcgcggggtcggcgaggaggcgcccactttcttctccagagcgccccgggctttgcaacctcccactttcggggccctcgaggaggcctcccgcgaccaccaggtgacagctgatgtgtattgggctcttactgtcagccgtattttatgccatgctctgcaaaccagcgaggccggcgctgcagacccattactcagacgggaacagagaggccgggagaagcgaaatcacccaggggctggggtcgtcgcagccaggagagactccggccctcaccaccacctgggcgagatcacgctgcaaacggggccccttcccggtgcagcccctccacccccagcagaacttgggaaaggcgcggtccgggactctccgcggatcgggaggggattccaggcccccccgaaagtccgggccgcctcgcgcgctggaaatcccgcgcgcgccccgaaccgcggctcggctgccgggaaatcaggagaaaaaaacttctgcttttttttcttttctggcattcgcggtcacctacccggcccccgcgcgccctcctcccggttctcgcccccacgtggggcgcccccgcacgccgctcctccccctcccctccgtcggccaaccgcagagctagctgcactcgcccttgtctttccaccaataggaggggcgaatgactccactgaggccacgcccaatgttcaagtctataaaagtcggtgccggaggctcccagctcagatcgccgaagcgtcggactaccgttggtttccgcaacttcctggattatcctcgccaaggactttgcaatatatttttccgccttttctggaaggatttcgctgcttcccgaaggtcttggacgagcgctctagctctgtgggaaggttttgggctctctggctcggattttgcaatttctccctggggactgccgtggagccgcatccactgtggattataattgcaacatgacgctggaagagctcgtggcgtgcgacaacgcggcgcagaagtaagtagccggggctgccgccgcctgaggtcagccgggacgggatgggtcgggttgggccgggccgggagcggaacgtagcacccggtggtccgcccgtcactgatccctctttcctggtctcaggatgcagacggtgaccgccgcggtggaggagcttttggtggccgctcagcgccaggatcgcctcacagtgggggtgtacgagtcggccaagttgatgaatgtgtgagtcagacccccttcccgggctgggcgcgggtgggacgggacctcccctccgctctggacgctttccgcacgcttgtcttgcatggagctgggacttccccaagtgccccccgctgtggatgcagagcttctctgccgttttgtggatcgggggctgccgtatcctgatgtatcgtctgcaaacacccctcccgccgtgggcctgtctccccctaccccatactttgaaccgtgtgccctcccctccccccaccgtcaccagcttgcagaggcaatcccctgcacccttgcagtttctcttttgctcttgcacgctccttttttgcaaactccccctgcacggtggcccctcccctgtccccggctgacccatccctaccctttggccccctcagggacccagacagcgtggtcctctgcctcttggccattgacgaggaggaggaggatgacatcgccctgcaaatccacttcacgctcatccagtccttctgctgtgacaacgacatcaacatcgtgcgggtgtcgggcatgcagcgcctggcgcagctcctgggagagccggccgagacccagggcaccaccgaggcccgagacctgcattgtctcctggtcacggtgagtcgggcctctgccctgccccgccacgcccgggcacctgggccggtgtttgtcaacaaagtcgggctgactggtcctgcacagctcagcgctcagccacgtttggcatgtcccgtgggcagccgggctggggcctcctcacccaggaagctattttgagcctgactgttttccccacacaggggccccgggagagggaggctccactaaaccccttcttttccctcctacagaaccctcacacggacgcctggaagagccacggcttggtggaggtggccagctactgcgaagaaagccggggcaacaaccagtgggtcccctacatctctcttcaggaacgctgaggcccttcccagcagcagaatctgttgagttgctgccacaaacaaaaaatacaataaatatttgaaccccctcccccccagcacaacccccccaaaacaacccaacccacgaggaccatcgggggcagagtcgttggagactgaagaggaagaggaggaggagaaggggagtgagcggccgcccccagggcggagatccaggagctggcggccgccgatccgatggagaaggggggacccaggccagcaggagacaggacccccgaagctgaggccttgggatggagcagaagccggagtggcggggcacgctgccgccttccccatcacggagggtccagactgtccactcgggggtggagtgagactgactgcaagccccaccctccttgagactggagctggcgtctgcatacgagagacttggttgaacttggttggtccttgtctgcaccctcgacaagaccacactttgggacttgggagctggggctgaagttgctctgtacccatgaactcccagtttgcgaattatagagacaatctattttgttacttgcacttgttattcgaaccactgagagcgagatgggaagcatagatatctatatttttatttctactatgagggccttgtaataaatttctaaagcctctggttgcttgtatgttttcggcttctagaacaactaggacccctgccccctccccggggacacgcttcaccccccacaacccccgccagctcaccaggaagtgttacttaagcccctgttagcagctccaggctcccgtgcagaaacagtaccccttctctccgcagcaggcgccgccaccgactccaacaaatctatgcctctttttttttttccttctcctcctaccctgcagcaattaagagaccggtttattacgaaacctggccgccgtgccaccactgttactggctgtgcaggagccaaccccaagctctgggcacatatggaggcatttcagcgggagggggtgctggctgcagcccctgaccgcctaggcggccaccgcagcccaaggtccggatcggtcaagggggcacctggtaccacacagcgaggtgagctcagggcttgcaaggaagagcgcttttggaggcttccccagggagtgcccccccagcccaccacagccttctccatcccaggataggcctctcttttgcactaaagaaaaaaactttttttatttccgcaaactaaaatcaacaagcagaaaaataccccaggaagtcggcctccgggccagccgggcttggcgcagtgctgcgttttgcctgtaaaccgaaactgcgagccctggccagccacctcctacttctcccaaagttgcaggcgcggtggtgactccccctgccccgggctgggagcgtggcccagcccttccgtgcccggcctcagtcttcccgccccgggtctgcagagtgggcccgccctggccaggcgccgggacgacctcggttcccctctgccctgcagcccccaagcctgggaactaggggggagtggggagggggtggggtggtcctgcccgcaggccgcgacctttccacggagcctcacgtgggcgcatgaggaaaaccccagcggctccctaggagtcacggggatcgggggagccccgacgggggagggagagagagaaggagggggaagtcccagagggagaagcggggaggggagaggatcccgcctggggctaggaggaggggagaactgaagtggggagaggggagcccaagaaggggaaggggaatcccccacagccctgaaccaacagggaaaccccgggaggggggtagacaggtaggagtcccgaaggggttgggggaggggagaatggaggcgaagaggcgggagccccgagggggtagggggtgatggagtggggatccctgagatggagcccaagaggggagggcacctgggaagagtgacagagggcgaggggctcttgagggattggggtgcgggagaacatgtggggccaaaacccaagggggctccaggtggggaaggaccaggtggggcaagggtgcgcctagcggcggcctggaaaagctctggcttttctttttctttcttttgagacagtctcactccatcgcccaggctggagtgcagtggcacgatctcgcctccctgcagcctccacctcctgggttcaagcgattctcctgagtagctgggaccacaaggacccactaccacacccactagtttttgtatttttagtagagatggggtttcaccatgttggccagactggtctcaaactcctgacctcacgcccgacttggcctgcaaaatgctgagattacaggtctgagccaccgctcccagtctctggctcttcgttggtcaacctcgtagggtagggaggcgaggccagctcggagggctatgcccccggggatcggatggtctgtctccatccggattgttccattcttgctcctcggtctctagaactgtgcagcaggatctcaggctcctgagccccaagtggagacagggcatggaggggccccagtggtgggaccctcagccaggaccttcacctgtctgtgcctcagtttctccctctgaaaaatgggggataatgctacctagctcatagattgttgaggaggttaaatgatatatagattcctgggccggccctgtggctcactctctgtaatcccaagactttgggaggcttgggggaggtggggaggaatccctgaacccaggagtttgagaccagcatgggcaaacatagagagatccagatctctacaaaaaaatttaaaaattagctgggcatggtggtgtgggcctgtggtcccagctacttgggagcctgaggcgggaggagcacttgagccctgaagattgaggctgcagtgagctgtgatggcaccaccacactccagcctgggtgacagagtgagaccctgtctcaaaacaaacaaacaaacaaacaacagaccctgaaatatagattccttgaccggcttccttcaatgtacttccagaatcatggttttttttccccaatttttaaaagatcattcatttaaaaattttagatttagctgggcgtggtggcttatgcctgttatggtttgaattgtcttccccacaaaagatgtggaaggctgggcgcagtggctcacgcctgtaatcccaggactgtgggaggccgaggtgggcggatcatgtgaggtcaagagttcgagaccagcctggccaagagggtgaaaccctgtctctactaaaaatacgaaagttagctgggtgtggtggcgtgcacctgtagtcccagctactcgggaggctgaggcaggagaatggcgtgaacccgggagg

SEQ ID NO: 66737 - DNA, 1797 bp, Homo sapiens
ccagagcctggagcatgctccccggacatgtaggtcacgcgacccacagctttacagatccctagggatccaggagggacccccgagacccagaacgacccatagccacacagtgggaaggccaaggacctgctccccaggacgctgggccagggagaccgcaggcacacgggacagccacaccagagctgcatctggagaaggggtggggggtttcctctcgccgctcctcgctattctttccctacattgttccgttccgtgctcccagttcccaccccactccctccacccggacgccggcggttcccaggccccggagccggggtgcattgggggtgggggtggggtagagtgaggggcctcgtgaagagcgctgcgggccaagaccctcttgcgcatgtgacgagagcgcacgagtgtgggagcttcggcctgcgctcacaggcgtgtgcgtggggaagtgtttgggccgccgtgtacacagcaggcacgccataaacgcttcttggatggctccatgcgagggaagggagggagggcagagttcaggccctacagggaggaaaagggaggggcggaggcctggctttaggtttgaatctccgcggcttactagctccagcagctcagcaaaagcgtgactcagtttccctcgtccataaaagggaaagccgaatcgccctcccacgtgtcgaggtgaaactagacagtgcactaaggcacttagcaaaacgcgctgccttgagaacccttattacgccttccttccttccacctcaccccctggccagacactctgggggtggagaggggcgctgacccaggccccagacgcccctcccgtccgccctccctagcaggcaggagtcccggctttcccgttccttaaattggataattggagacagaggcgggtgctcgagacggagaaatccccaagtgggcgaaaggcaaggggcctgtcctagtttccctgcactgggggcccccaccctcgccagcgctccctccggtgcgccctgggcgcgcagtctgtgcgctcgggagcccccagcgccggctgtcgaccccctccagagcccggcggtgccagcctccctctgttgcccgccaggcgcggtgtctgcggccgccccggcaggaggggttggggggtccgggccggcggcagctccggcggcgtctccctcctccaagcccctggcggcgggcggccgggccgagggcggggcgtctgcacagaccctccttttgtgagcggcgccttccccgggcggcctggcgcgcagggctcgggcactgcgccagggcccggaatagcctccctgcccggccgcccgccccacgccccggcggagccgcctgacctgcccggtcgggcgcagaagagcctggggccgcggtggcacaggaaccgggtgcgtgctcagctgcacggggctgcagccgctactctccgctgggccggcactggacgcgtgcagccgggcctactgtgcgcagcccgtcttttgtgtgaaaacgcccgctgtgtgcagatctccgtcttcgtgcagggcctactgtgcgccgcaccccccttccatgcaaagcctactgtgtgcagaaccccatttgcctgcaatgcctactgtgtgcggcccctctcctgcgtgcaaacgcctgctgtgtgtgacccttttcttgcatgcaaggcctactgtgtgcagagccctaccttcttgcagtgcctacagggtgcagcccctctcctgcgtgcagacgtccactgtgtgcagatcgctgtcttcgcgc

SEQ ID NO: 66738 - DNA, 1563 bp, Homo sapiens
atttttgtatttttaatagagacggcatttcaccatgttggccaggctggtctcgaactcctgacctcaggtgatctgcctgtctcagcctcccaaactgctgggattacaggcatgtgagccatggtgcccggcacaaacagccttgtccatgcaagcacaagcacccacatgtgtctaagaccctggtgtgcacacctgcactctgacctgcactgcgtgttcccactagggaaatgcaaatatttctaagctccaatgctcactccacagagccccgaggcctgtgaatacccgcggtatacagagatccatgaggtgccagtactcaaactgtggaagcctgcacgtgctgatttggggtgggagtagagtgcagggaactcatctgtgtgcagcccctttctctgggccctttgtgtgcacctcagtttaccccacctgggtaagagactctgccctgctggagtctcttctggttctgactttgaagggctccaaggtgtggggggaaagggggctgcattccctctctgctgtgtgcctctgggtggtggattcaggctagcagggctgggggctgggcctccaggcccttcccggaagcccgggaagcaggtgcaagggtaggcagtctccacgggcagggcgccagaccttggcttccctgaaactgggcacagcagctgggagaggtttccgggcccgcctggccccacctggcccctggcactttcggaagatgggcggggcaggcaggcaatgccaaggacgggcgaggcccagcctgcacaagagtcgccggtgaacctgtgcgcacacacgggtgtgcatgtatatgtgtgcacacgtgcatgggccatgctgatgtgagttctgtaccccacctacaaacgggtgtgctcatgaacacgtgcagggtcaccctggcacatgaaccgtgcagcacaggcaatggcccagcggtaattcacccatagcggtgacaggaaagagatgcttgtctgctttgctcactgtgcgtctccagcaccccacagctggttggcacttggtgaatatttgctgagtggacaaatgagtgaatacacgaacacatcattttgcaaatatgtactgaatgtctctactctgcataccagacatttgcacatcttcaaacaacaaaaagatcctgggaaacgacattctagacatccacggggtgggaataagcccacgcctgagagtacacactcatgtccaggaaacacctgagtccactttgatttgttcacctccagaagccagagcctggtgcccacacacaggccctcatgcagagacacgcattttctttcttttttttctttctttctttttttttttgagatggagttttgctcagttgcccgggctggagtgcagtggcgcgatctcggcccactgcaagctccgcctcccgggctcacgccactctcctgcctcagcctcccgagtagctgggactacaggcgcctgccaccacgcctggctaatttttcatatttttttagtagagacggggtttcaccttgttagcca

SEQ ID NO: 66739 - DNA, 2339 bp, Homo sapiens
atccatcactttcccatcactcaccgcagaccctccaggacccacgcagaaacccagggctcccccacggtgcacgcagcacccaggctgcccgccctccacccagggccgcgtcacgcccgacacccccggaacagacgcctatgaggcctgcagctccagacgggctgcagacacacagcgatttgttcatctttccagccaccccgtctggtcctgacagtaattagctcccagactggtggggagacggtgaacagcctgagagtcatcgcccacggctccacgcccacaggccacgggcaccgggagagagggtgaatgagtgtgtgtgtgtgtgtgagtgtgtgtgtccggaatctgtactctccagccagggctccccatcctcctgcaaagggccagcaccgtgcacgggtacccacggcgccttccaaggggaacgtgcacaggcatacccactgttcattccacgaaggatcgtgcacacgcatgcctacctttgcatttcacgcgggattgtgcacacgcatgtccaccgtgccttccacgcgggatcgtgcacacgcatgtccacgaactcctgcacacctacacccaccaggcctgcccatgcgatgcgtccctgcagacccactgtggacgcctgcttgtcggcgtcctgcgcatcccgcgtgagtggagtgtgcactcgtggagggggcgactgagtgcggggcaagcgcaagcgcaagcacactgggctcgcggagggtggagagaggccgtgcgcgttcccggggctggcgcggaggtggggtcagcggcgcgggagaacgccccgccccgctaccgccagcccggaagacccacggcggcgggcgctggcgtcacgggtttccactggggccccggcgccggggccgggattccctggcgcaggaacgcccgtgacggcggcgcctgcctgcgtcggccacgctgggaggtttgagcctggggatgacatcagcccctgcgtttctggagctggcccgggcgggacggggacttggagaaagcagtgacacccactttcgttgactgccaacccgtgcagagcgcttagtgcgtgtccgaccgtgagctgagcgctgtgatgcgggtgctgttaatgtcccattgcacagatggggaaactgaggccggcgcactgcccgccccgccgggcccccagagtgagggcccggggctgggagcagccttttcccagcgccctctgcagtgtagagtcccaccagcttgtctcccgctctctcctgcacaagccggctcagagagggtctgcgggtgtcctggcaccacccagcaagttgggtgctgcagccagctctgtccatacagttggtctctgcccagctgcggtggccaggggcggtgcctgagccagggcgcccgggcggcccggtggggtgtgcccagccgctgccttcctgctgacgccggtgccaagggatctaaatatagcctgggaggaggcaagggctatttttaacgcgagtggcttggcccctcccagttcccgggtcaggagccctttggtccaggattttggggaggggcaggggcgagggggagccaggggccccacacccgcctgggcctgcccctctgcccacacctggccctggaagactctaggggacgaagggccgtagagggagggcagggtgggggggctgtcgcaggtcacctttcttaaacgccacctcctctctagctgccgaccagccctggccttttgttgggcccagagactgctttctattttgggaaggtgttggaataatttccttggctatttttagccggttcggggattcctccactcaggctggccgccctgcctctcctcctcctcctcctcctcctagtcgtcttcctcctcccggcagacccaagggcggcctccttcatggagggcagtcagggacacacagtccctgagccagacccagaatggggagacccctatatttcctgggtcggggagggaagggagctctgaagggcgttcccacgttccaggtgagcaggactttcagacctctgggaatccatgacgccaggtatctgaattctgtctccagggcagggtggggcgacccagcagcctctgacctttcacctcctttcagggttgtcacaggaaagtggcctgctgagaacagaccttgactcccacatccctaggctaggggctcccatgttcccaagaggaagatcagtgtgatgagggtaaactgaggcacagaggggacactgggatgggacacatcttgggctcattccctgatggtttcatttccttccacattcta

SEQ ID NO: 66740 - DNA, 1285 bp, Homo sapiens
acaatcttggctcactgcaacctctgccccccaggttcattgcctgcctcatcttcctgagtagctgggatcacaggtgcctgccaccatgcctggctaatttttattttttattttggtatttttagtagagacggggtttcaccatgttgaccaggctggccttgaactcctgacctcaggtgatcctcccgcctcggcctctcaaagtgctgggatttcaggtgtgagccaccgcgtccggctaagcatgtaaattaaattactctggagttgttaaaatgcactgatttttaaaaaattattatttttatatcttttttgttttccttcataaaaatgcaatgacttagcaagctgtcggtcataggaagttaagcgaaaaaaaaaaaaagctaagccagcctcagagcagtctgtgttgagtgagtccagttttaaaaacaaatggcaagtgttggtatgaaatagtgccgatctccattacagaagacggtcttgggcacatgtgcgggagccctacggtctggctgaaaatgctgcccagttctggccgtaccactttctagctgtggactcaagggagttgtttaccttctgtcagtccatgtttattcatctgcacaatcaatgcgtagaaccatagcccttacctcacagcgtttccgggaggatcagatgacacaatccgaggaaatgaaccattattgctacttactgtcactgctttcttctgaggccaacgtttgggcacgcctagaagtttgaaggatttgcctcagctgtgaacaaatggtggctacaggtgctgagaatgggtctgaagaagggcgtggagggatcttccctcccctcccctccccacccctccccttctctttctctctccctccctccctctcttctttttctttctctctctcccctccctccctccctctctctctctttctttttttctctctctcccctcccccccttctctcttttctttctttctcttttttgacagagtctcactttgtcgcccagtctggagtgcagtggtgtgatctcagctcactgcaacctctgcctcccagattcacgccattctcctgcctcagcctcctgagtagctgggattacaggcgtgcgccaccacgcccggctaatttttgtatatttagtggagacggcgtttcaccgtgttagccaggatggtctccatctcctgacctcgtgatccgcccgcctcggcctcccaaagtgctgggattacaggcatgagccaccgtgcccggcc

SEQ ID NO: 66741 - DNA, 1154 bp, Homo sapiens
cgtgtgtggacacggcactgcatgtgcgtgtgcgcacacgtgtgtgggcatgcatgtcactatgggtgtgtgcatgcgtgttggcgtgtgtgtacgtcactgtaggtgcgtggatatgtgcgtgcgtgggtgtgtacatgtgtctgcatgtgtacatgcgtgtgcgtgtgtgtgcgcacgggagtgcatgtggatgcttgggctgagatgccgagactcagacacagattgcatcacccatgcagtcgcctccctaagtccccgtctcggtggtgtcaccagccggcactgactcaggagcagccatgcccccagcagaggactaagccaacagcagcagaactggccacgcactgagtcagccaggaacgcccctcccaactgcctccctgcagaggcgcacgggtgccgggcaccccgacctgaatgagcttgcctcggggcccgtggcccggggaagctgtgggaggggcgggagcaggcagctccgggggcagggccaggtggtcaaaggtgcacacagtccccacggctccctcctgacggtcgggctctgcctcggtgcacaggctcctgcaggcaggcaaggctccaggccaggctctccaaaaataaaactgaagagggacgccgcccggccccgcgctggcctcctagcaaaaggctcatagccacacccgagtctaagcccgcctcgtgcagaaaaatcccactcgcgcctgaaagtcaagaaggatgagggtacccccccactccaggacatagtggaaatctgtggtcgctcagggaagggtgaccagccccgaaacagagcagacctgagctgatcagacacgaggctccagtgcacagaagggctgaacaaaaccgcaggacaggagctggcagcaccggcagggagggaggtgggaccacagggacccccagggagcagccgccctctaaccccttgctccggcagttatcccgagggcaaaaaatgaaaagaaataaaaatctacatatagaaaggcgtttataattgcgttatgtgtaagagtgaaaagttagaatgaaagcaagtgctctgcctcttttttttttgagtcggagtctcgctctgtcgcccaggctgaagtgcggtggcgcgatctcagctcactgcaacctccgcc

SEQ ID NO: 66742 - DNA, 2189 bp, Homo sapiens
aggagatacagaccatcctggctaacacggtgaaaccctgtctctactaaaaaaaaaaaaaaatacaaaaaaattagccgggcatggcggcgggcacctgtagtcccagctactcaggaggctgaggcaggagaatggtctcaaaaaaaaaaaaaaaagtaaatacaggggtgtttccaaaagggctttaattttattagcatcccagaatgctttgtgactaggagaggccccacagggcgggagtcttcccccagatgtgagccccgttgcatttgaagggagtgagaccacagctcccacagaggagggaactcgggaaggtggtaggccagaaatctgcccttgctctaccaagctgtgtggccttgggaaagtttccttccctctctgagccccagtgacctctgttggaattctcagagggacactctcatctctgcaccaggcctggcccccaggttcctgtgtgaggaaacaggggttccagagtctggcaggcaggaagaggaccctcttccagggacctgtggcaactgccaaatataaacacagctgctggaaagacaaggtggctggaacatcctgcacccagcgaatgtggaagggccggtttgcccggagctcttgagaaatctcactccccgtggacttgcaccctgtcgccactcccctgacctgccctgaggctggggtgcagcagggaattgcaacagccccccaccgccggccctggagagacctgggcagagctggaagctgatcagattaaaaatcagcatggatcggattcgggatagagccacaaactgggtgtcctgaaattacccatttttgtgttggtgggtttttttgtttgtttgtttgttttttggagatgatggctcactctgtcgcccaggctggagtgcagtggcaccaactcggctcactgcaacctccgcctcccaggttcaagcgattctcttgcctcagcctcccggagtagctgggattacaagcatgcgccaccacgcccggctaatttttgtatttttagtggagacagggttttgccatgttggccaggctggtctcgaactcctgacctcaggtgatccacctgcctgggcctcccaaagtgctgggatgacaggcgtgagccaccacgcccggcccatttttgtgttgttgaacttaaagcatgagcttgggcaaatcccttcttcttctgagccatagggtaaaggtgagaggagagtcttgtaagctccgtgatgagttccagaagtccagggtgaccagtcatgcttagatcatttccgtgtcatttatggactcgatgagagacaaaagggcctctggggactgtgagttgcatcagcctcttgctgaactgacagaacattcaggtttcagggagaggtgaggtcattgccagggatcttgttcaagggataagggctgacacctgctcctgaagagggaccacacggtgcctgcctggaaatggaaaatccgggctcgcactctggctctgctcctggtttttgggtcttggcttcctcagctggaagatgagagggctcctctcaaggctgaggatgggtccccatttgtcatcctgtggctccaagatcaagaggatctagaatatccatgacctccttctaaacgacttggactttgggttaaaaatctctcttggcagattttggcttgcacaatggtggattagcagctaaggacaaacccactctcttgctgaggtccactagaaaagctggacagggccgggtgcggcggctcacgcctgtgatcccagcactgtgggaggtcgaggcgggaggatcacttgaggtcgggagtttgagaccagcctggccaacatggtgaaaccccatctctgctaaaaatacaaaaattagctgggcatggtggcacgtgcctgtagtcccagctacttgggaggctgaggcacaagaatcacttaaacccgggaggcagtggttgcagtgagctgagattgtgccactgcactccagcctgggcgacagagagagaccctgtctcaaaaaaaagaaaaaaaagctggacagggctgggtgcggtggctcaagcctgtaatcccagcactttgggaggctgaggtgggaggatcacttgaagtcgggagtttgagaccagcctggccaacatggtgaaacccc

SEQ ID NO: 66743 - DNA, 5015 bp, Homo sapiens
gcctaggcaggcggatcatgaggtcaggagatcaagaccatcctggctgacacggtgaaaccccgtctctactaaaaacacaaaaaattagccgggcgccatggcaggcgcctctagtcccagctacttgggaggctgaagcaggagaatggcatgaacccgggaggcggagcttgcagtgagctgagatcacgccactgcactgcagcctgggcaaaagaacgagactccgtctcaaaaaaaaaaacaaaaaaaaaaacaaaaaccagcactacaaagagacccacagggtttccatatactgggaattgacagagactttaaattaattgtgttaattacgttcaaagagataaaaagatgagattggaattttcgctgcaaattggaacaatggggaaaaaaaggaaccagtggatatggagaaaatgacaatatctgaaaagtaagaattcaatggaagaaataaaaattagtgaactggaagacagaacagagaaaaatatccagaatgaagcaagacgacacaaagggaaagaaactacagaagaaagagcaaaagacatagaagatgcagtgacgtctaatatacgtgttattggaacaccagaaggaggagagagagaatgaagcaggaacaatctttgaagagataatgaccaataactttctaaaactgataaaaagacctcaagccacagatttcagaatccctagaacctcaggcaaaagaaatgtcctaaaaagtggcagagaaatggccaataagcacatgaaatggtgtctaatgattagtcatgaaggaaatatgaattaaagtcatcaagagagactgcctctcaaccactagagtggcaaaaatttaaaagactgacaacactaaatatttgggaggatgtagaagaactggaggcatcatccattactgacaggaatgtgaaatagtacaaccaccatggaaaatggcttagcagtttcttataaggctgaacacatacctcacctatgacccagcaattccactcctagggatttattcaagataaataaaaacatgtctccataaaaggacttgtacgagatgttcataagcttttactcataacagcaaaacctggaaacaacccaaatgcctgtcaacgagagaataaacaagccatggcatttcacacaatgaaatacggctgcacacaaaaaaagaataaactattgagagatcaagcaacgtgtatgattctcaaaaatataaatgtattctaaaaaaataaaagataatacattattcaatattaaatattagtatttaattaatattaatatattaaatattaatattaaatatttaaaaaataaatgcctctcaaaaataaaaaaagtaaagcaacagaagctggatattagaggtgcatattatataattccatttatataaagttcaagaataggcaaaactatggtgatagaaatgaaaacagaggttgctgcctctggccagggtgttggctagaaagggccatgaaataacttctagggtgatggcgatgttctctatgttggttgagctgttggtgtacacaggtgtacacatttgctaaaatccatcaaactgtatctttaagatctgttcatcttactgcatttgaattggactttgataaaatcagttaattacaaacaaaaatcaacaaacaaaagttgccagaggaaaaaacagcagcaattaggtggacccagtgaaaatatccttcaagaattagggggaaataagggcattttcagataaacaaaaccagactttctcaccaacagacttgccttttaaaaggtaaaactagagaaagataattccagatgaaaggtagaaaatgcaggaagaagtgaaaaacaacaaaaatgttgtagagaggaaagagcttgataagataattctaaaattccagtggaaagatcaacaggaagtgaaaaactctgcaaaagccttagaacaaacacacatgaatcatatcagccttcagctcagtcctcacctccaaccaacccacaacagaagatgttctatgcttctgccttcacatttttattatacgatttttattatataattttggtcacgggattccagtgataggagttataaatattatttcaggagtttactagtgacattaattgaattttgcaattctacacacacacaaaatgaagtcagcatctgaaaaaatatatatacatcctcatccgctgtgactggtccaatgtcagtgtgataagactcaatgccagctgtccccagagacttttcttcagtccagccagcccctccttggatgtccacttcagcagtgctctgcagcctcaggcagatccccgtgtactccaccagtggcctccgctccactccccactccctccatctcctaacagctagagtgcgcttctgaaaatgcagttgaatctgttcctcccctactcagaaaccaccagcagcttccaattccttacaaaatcaagtgcaaaaatcaaggcttattgttcaattcccactgctaggaattcttcccccagctccaatcccatcaaagaactgccttctctgatgcatggctccaggatcatctcctttctcaccctgtggcctcatgagctcagcattttccagattcggaaatcctggagggggccatgagggagatggctgtccctgggaaactaagacccagagaaggtagatggcttgcccagaagatatttattataagaaattggctcacataattatggaggctgagaagccataagatgtacaattggcaagctagagagacacgagaactgatagtttctgtctgaaagccagcaggcttgagacccaagagcagatgtttccactggagtccaaaggctggaaaaacctatctgtcagcttgaaggctgccaggcaggaggaattatctcttacttagcatttttgttctattgagggctttaactgattagatgaggcccccacattggggagggggaggaatatgctttacacagcctatggttcatttcatccagaaacattctcacagacacacagaataacatttaaacagatatctgtgcaccccatggaccagtcaagttaacacataaaattaacagttacaacaatcttggagccagtcattcagcccaccacatcattctctcatggccctctgtttcttttcttgtagtatttataatttgatatttgagttgtatgcctactggactgtcagcctcatgaggccaaagatctgggggctgggtgcagtggctcatgctggtagtcccagcactttgggaggctgaggcaggaggatcacttgagcccaagagttcgagaccagcctgggcaacatggcaaaaccttgactctacaaaaaaaaaaaaaaaatacaaaaaactagttgggtgtggtggtgcacacctgtagtcccagctactcaggaggctgaggtgggagaatcgcttgagcccaggaagtggaggttgcagtgagccgagatcatgccactgcactccagcctgggtgacagagtaagaccttgtctcaaaaaaaaaaaaaaagatctgaattgttgtccccagaacctggtatataaatgttcaagagacatttgcttggggcctgaagcgggggctatgcctgtctttgcagatgtcgaccttaaccctggaagatctctttcccctgtgacatattccttctttatgatgcgggcttcaaatgttatttctttttggaacacatgttttttaatggcttctagcaccaggtgaccttgactcggaattcctagaacacggtacactcggaaagtcatatgggctgtttgttgcagactaaatatttgtgtcctcctctgaccccatcaagttcatatgttgaaatcctgggccaggtgtggtggctcatgcttggaattccagtgctttgggaggccaaggtgggagggtcacttgagcccaggagtttgaaaccagcccgagcaacagagtgaaaccccacctgtacaaaaataagaaaattaactgggtgtggtggtgtgtgcctatagtctcagctacttggatggctgaggcaggaggatcgcttgagtccaggagttggaggctgcggtgagttgtgaccacaccactgtacttcagccgggcaacagagtgagacatatctcaaaaagaaaagaaggccgggcgcggtggctcccacccgtaatcccagcactttgggaggccgaggtgggcggatcacgaggtcaggagtttgagaccagcctggccaacatgatgaaatcccgtctctactaaaaatacaaaaacagtagctgggtgtggtggcgggcgcctgtagtcccagctactcaggaggctgaggcaggagaattgcttgaacctgggaggcggcggttgcagtgagccgagattgcaccattgcactccagcctgggcaacaggagcgaaactccatctcaaaaaaaaaaagaaaagaaaagaaaagaaaagggcctcagcttgctgtttttgaaactgaagccacatgttttcttcctaatcagaactaaagtgaaagattaaaacaatcgatgttttgtttgtcttggagcaagaaatataagatctgtgtttctggcttgcagacaagagcactgccgcactgaagcgtgtgtgggtcgtatatgtgacagagcacaggaggcctgcagcgaggtcccgacagggaggactttcttgggccggagacctggttctgagcacgtcccctggacttccctgagcctcagctttctcggctgtaaagttcagaactagacagcggtttcccctgtgctccacgacaccctaggggttctgtgcagaggctgggccaccctgggttctcgggaggggctctcttggccttggggtacagtctgtgcttcctggtcggactccatttgtgtatgtgtatattttattatacagataataaaatatatatacat

SEQ ID NO: 66744 - DNA, 8823 bp, Homo sapiens
cactgcaacctttgcttcctgattcaagcgattctcctgcctcagcctcccgagcagctgggattacaggtgtccgccaccacgcctggctaatttttgtatttttagtagagacggggtttcaccatgttggccaggctggtctcgaactcctgaactcaggtgatctgcccgcctcggcctcccaaagcgctgggattacaggcgggagacactgcgcccggccataagctcaattttagacacatacgatatccaatgggggatggacacacacctgacacggtcccagtggagccctgaatggacctctgtgctggaggctgggtgtcgtccctcccccagctgccctgtctcattggccaaagggtttagggagaacaacctagaggccttgctcatccagtggcctaaagttctgcattctaaatacacaccatcgcaggaactcacacctctcctttctccttcctgcctccctcccttcttctttctctctccctctccttccttccttcctccttccctccctccctctttctctttctttcttctctctccctctccttcctgccttccttccttcctccctccctccttctctctctctttccttccttttttctttcttctttctttctctttctctctggctctccctccctccctccctcccttccttccctcctccctccctctctctctctctctgtttctttctcaatttctttcttttcttttctccttccttccttccgtctctctctctctttctttctttttcttctctgagaaggggtcttactctgttgcccaggctagagtacagtagtgtgatcccacctcactgaaaacttgaactcctgggcctaagccgttctcctgccccagcctcccaagtagctgggaccacaggcacacaccaccatgcccccctaattttttaattttttgtagagatgggggtctcactatgttgtccaggctggttttgatctcctggcctccggtgatcctcctgcctcagcctcccaaagtgctgggattacagacggagcctccacactcggcctgtgctctaagactgattcttgccgggacccttagcccgacggcgtgcccagcctgtgcagagggtgggtgcgtgggcccctgctcgggggtgggtgggctgaatccaggtgtcctgggctgtaaagccaagaagcagacagcaggcctggggtggttggagattttgcggggaccctgggggcgctgaggctggagcatcccgagaagtccaaacctgcctggcctgtctctgccgagcagacagcgaggcccgccgggcagcgggacagactggcttccctcctcccggggagacctgccggagcaaacccagctccttttttaggtctgtgatgccacggccactcttggaggtgttttccagctgcacaggaagccgtgacagcgagacccagagaggctggcggtggctctgaattccaagcatagttctcatagttgggaaagtgccactcccggctcgataaaccgaccaggagccgccgccgccagggccatcttctcaccagcagggagagagcatgcagccggtggaggcttctgagagctggccggggcggcctgcgtaaaaggacaggaatgtcaagaatgcacccggcctggcagagacagggactttaccgagcggctcctgggcctggcggccagagaggcgagggagcgggagctaccgagggttcctccatcggcagggaaggtcctgagtcccccagaccctgttaaaagaggctgatcaggttgggtgcggtggctcgtgcctgtaatcccagcactttgggaggctgagtcaggagaattgcttgaggccaggagttcaaagccagcctggggcaacacagtgagaccctgtctctaaaataaaaaaataaaaataaatgttcttggggaagcgaagccgaatttcaggagaacataatgagggtgcagtgagctgggatggcaccactgcactccagcctgggcaatacagcgagaccctgcctctaagtaaaaaaatcaaggccgggggcagtggctcacgcctgtaatcccagcaggttgggaggccgaggtgggtggatcacgaggtcaggagttcgagaccagcctggccaagatggtgaaaccccgtctctactaaaaatacaaaaaacaaaaaaattagcctggcatggtggtgggcacctgtaatcccagctactcaggaggctgaggcaggagaatcgcttgaacctgggaggcggaggttgcagtgagccgagatcacgccactgcactctagcctgggcgacacagcaagactccatcaaaaaaaaaaaaaaaaattaaaaggtaagctgggtgtggtcgcacaagcctgtagtctcagctactccgggaggctgaggcgggaggatggcttgaggccaggagtttgaggttgcagtgagctagggtttcaccattgcactccagactgggggacaaagtgagactctgtctcaagaaaataaaaataaaataagaaaggctgatcagggccgagggctgagatgggaagaaatggtgcttctgtacccagtgctgctgggcctcctgtctggggctggctgcagggcggcccttccaaagagctccctgtggcaggtacacagtcgggccttggctaggctcatgggaggcagcgctgtgtgttctttttttttttttttttttttttttgagatggagtcttgctctgtcacccaggctggagtgcaatggcgtgatctcggctcaccgcaacctccgcctcccaggttcaagtgattctcctgcctcagcctcccgagtaactgcgattacaggcgctcacaaccacatccagctaacttttgtattttttagtcgagacggggtttcaccatgttgcccaggctggtcttgaactcctggcctcaagcaatccacccaccgcggcctcccaaagtgctgggattacaggtgcgagtcaccgcgcctggcctggggtgggttttttcatttgtgcactgaatgtttattactgacagccagcaaggaaagggggactgcgccctacgactgcaaggaagtgaattcaggaagaacctgaatgagctggggacgacaactggaagcttcgcgtcagacagcaggcggctcacgtttcagtttcagcctgggagaccctgggcagaggacgtcattgcaccatgacctccagaactgtaagctcaggcaggcgtgttgctctaagccaccacatatgcagtagtttcttatgcagtgtaaggagctgatacgcaaggccaggatgggactggttggggtctccaggctggagggccccccggtgagcaggcatggggtcccacagcccaggacagcttcagctcttatttgccatctgctgctgctaggtgttagacgctggactgagcatgctgcacacatcatctctgctgttttccttttttttttttttttttggtggtttttgttttgttttgttttgtttttgaggcagagtctcgctctgtcacccaggctggagtgcaatgacgccatctcggctccctgcaacctccgcctcccaggttcaagtgattctcctgcctcagtctcccgagtagctgggattacaggcatccaccaccacaccaggcttattttttatttttatttttttgtagagacagggtttcaccatgttggccaggctggtctcaaactcctgatctcaagtgatccacctgccttggcctcccaaagtcctgggattccatgtatgagacgccgtgcctggcctcctttttttttttttttttgacacagggtcttgctctgtcacccaggctggagtgcagtggtgcaatcacagctcactgcagccttgacctcctggcctccagagatcctcccacctcagccttctgagtagctgggactacaggtgtgcaccaccatgcccggctaatttttaatattttttcttttagagctggggcctcaccgtattgctcaggccagtctcaaactcctgggctcaagcaatccctctgcttcggcctcccaaagtgctaggatcccgggcatgaacccccgctcccggcctgcaatttttcttttcacagccctgagatgagggtgcagcattaaaacccgtgcagagggtggctgcttctccatgagccgagcaaaccgtcctcccatggctgcttcctgtaaaccggctcctaaggccagcgggcgtttgctctcctgacggcacaggaagtcaggctcagcgaattccagctcagagcgggctctggcggcttccaggcagctccacaatgaggcggctgcgcttttccagtctgctcatcaaagcagagccagccttgtgtggcgcggcgtgccggggtgagtcagccccgggggaaggtggccttgaaggcgggaggggcggccggcctgcagcagcaacgtgagaacagaagcaaccttcatctggctctaaaacttccagaaccagtagctttatagctcgcagagctcctggactctttcctcctgggggtctggcaatcccccacctctcacccctccaaacctctgcctgcctcgaaaaaggaaagaaaaataaaccccaagcaacaaaaccagcaaccagatttggcaggaggggagacaatgcttggagtggaaacgtcagcccttccccgtggagggatgactgcttctgagaacacagtgttcagagacaagagagacagggtgttatgtttagagaggaaaagatccaaacccaaacaaaatggaacagtagtttgggagagaagagaaggctccgaggcactgtgaggaacaagtcgccttcgtacagtggctggggcagctgggtttgcagagagctgtgtccctgggcacctgcgtcaatgtgcacatctgcacgcctgctgtgggcacgagggcctcagccatgagcacccccgggagccatgaggacctcagtgcatctcacagaagcccctgaggacagtgtgcagtggcgcgatctcggctcactgcaacctccgcctcccgggttcaggagattctcctgcctcagcctcctgagtagctggggttataggcgccccccacccccaccacgcccagctaatttttgcatttttagtagagatggggtttcaccatgttggccaggttggtctcaaactcctgacctcaggtgatctgcccaccttggcctctcaaagtgctgggattttaggcatgagccaccgtgctgggccaacagtggctcttaattgggggggtgggtgattcagccccgccaggaaaccctgggcgatgcctgagacatctgtggttgtcggggttgggggagctcctggcatggagtgggtggaggccaggggcgctgctcagcaaccgtaagtgcccagcacagcctcaccccagagaaggatcttaccccactgtccacagtgctgagggagaagaccctgagttaattatttggggaaaatggggttcaatccctacccacactagaataagctcccaacgggatggatggtgtgaaccagggggacccccaactcctgggattcacctcctctctccctcccagctcggtgtggatttcattgtgtgcagcctcctgggacctcagcacagcagaggatcatgggacgcagagtctcttgggggtccgtggaatcccctatccctgggggtttcacctagaggtaattccgtcccccaggggaccctgggcgctgtctggcgacatctgtggttgtcgtaactggggggtgctcctggcatggagtgggtggaggccagggatactgctcagcaccctgcagtgcccaggacaggcccacctcagagaacaatctggccgccatgtctacagtgcctaggggaccctggtttagactctgcagaaaggtgcacacataggccgggcacggtggcttatgcctgtatttccagcactttgggagaccgaggcgggcggatcacttgacgtcaggggttcgagaccagcctggtcaacatagtgaaaccccatctctactaaaaaaaaaatcaaaattagctgggcatggtagcgcatgcctgtaatcccagctactcaggaggctgaggcaggagaattgcctgaacctgggaggcagaggttgcagtgagccaagattgcgccactatactccagcctaagcaacaagagcgaaactgtcttaaaaaaaaaaaaaaaaaaaaaaggccaggtgcagtggctcatgcctgtaataccagcactttgggaggctgaggtgggtggatcacctgagatcaggagtttgagaccagcctggccaacacggtgaaaccccctctctactaaaaatacaaaaaaattagccgtgagtggtggtgggcacctgtaatgccactactcaggagtctgaggcaggagaattgcttgaacccgggaggtaaaggttgcggtgagccaaaatcgcgccactgcactccagcctgggcaacggagcgagactctgcctcaaaaacaaaacaaaacaaaacaaaacaaacaaacgaaaaagaaaggtgcacacagcttccagagcggacacagggcatcagggtgagaaggcacagggcaacgatcaggcgttgatgtgtcccctggcagctgggatgcaggccccccacggcctgccatgttctcaccaggacgccaaagaggggacccacgcagagcccggggagcccgactgaaatggaaacttcaatacaagagacaggtctgagactggccacacctgctgcccgctccacagaaccccagggccccctcagcaaccagggtctgcatgcagagaccctgcacccagcgtgggcacccaccctgcacctgcagcctctccagggccaggtcgcccagcagggcctgggagggcggctgtgtgtggggccttccgtgccagctctgaccgttggtggctctgtgacctcaaggcagggccgtggggcccagggctgcgggcgggagggcctctgccacatggaagggagggccgcactggctggaaaatagtgccttgtgactgtccctgtcagtgtgggccctttgctctcaggctaaatcggtccccggggcagctatatttagaaggggctaaagagagggaatgaatgaggtgcccacgagaaagtgaaaaatagaccagcggggcaggtcccgccgctgccttcagccggagcttggagcctaagaatgagccggcttgttcagacaaagaggccgcgacgacagagggtgacgcgccgccagtgtgggtttggtcgccgcggtgacgggagcaggagaaaagaaaagctgctctctgtccacccggcggtggggtcggcgggggcgggggatgaccacggtcatgtgagagtttgcaagcccgggaaccggggccgggccaggacactgaaccccgtggctcctgtcactccagttctgggcttcccggctgaggaaatgctgtcaccctggccccgggccagggcaaggggcagcgccggcctcgtgacggtggtgctcgggagctgaagggcaggagggttaggaagagaacagagggcagtaccgggccttcccacctcagcacaggtgggtctttctccacgcatgccccccccccagaaaactcctacacatcctgcaaagccccaccgatgtcatcccctctgagaagcccctgattgcaaccatctatgcacagccaggctgcactaaaaccccttctccgcacactggcagctccctggacgttcgttgtgtcctgtgacattgtggctgctgcacacgacccatgtttctcatctcacagctctgggctcagagtccaacatgggcctcactggtttaaaatcaaggcacaggcagggctggtccctcctggaggctccaggggagaatctctttcccgcctttcgcctagaggtgcccgtatccctcggctcgggacccttcctcccccttcacagacacagcacagcctcttcagtctctctctgactctcaccctcctgcctcctctcgtgaggatcctgtgaggtcactgcgcccccccaccccggatcatccacggtggtgctctcatgactcaggtggtccttcactcaatcccacctgcagagtccctttttccatgtgtggtgacacagccacagctcccagggattaggacatggatgtctttgaggcctttgttctgccaaccccagcacatcccagacactgggtaccaaagatgccacttggatggaaggggctggaggccatggtgcagggagttcacaaagggtgttacttcctggaacccactctgttcccagggccgatctccttcccaggacagaggctcccaggcccaggcagccctcggatgtgaagtgcctgccccacctccatccatagcaggtgctgctgctgtgcatgggcacacgtggcctggtaggcccacccctctgggctctgcagcaggggccggcccgtccgggcacacacatggccaaggatggacctcgagcctggggttctctgctgtggcccgtgggctccaggtcacatcatcagaatggctagaggtcaccagtatcatgtgtgacatctccagggccaccccactccagccctggtgttgttagaaagtcccggaaaactacaggcccagggagcttctccctgagggctagggatcattacggatgttttcatgttaacaatggaaaacaaaaatcaaaaaacaaaaacca

SEQ ID NO: 66745 - DNA, 916 bp, Homo sapiens
acacagacacgtgcacacacagaggtgcacatacacgcacagacacacatgtgcacacagacacacacatgtgcacacacacagacacacacacacgtgcacgcacacatgcacgcaggagcgagcgcctccacccagccctgcatctgaagcaaggtcctgctagtaaacatgcacagactcaagaaacgaggggctgcaggacttttcctcctcctgcccaaaggcacctgcactcacaaaagactcagaggctccgcctggccgggtcagcgaatggagttgtagcaccgtttcaggaccgtgatagagaaagacgggaagttagacttctgacccatcacaaactctgagtcaaagtgcgatgtgcccaggccagcccggtgtgacctcagctcctgatccataaaatcaggacagtgaccgaggatgctggggccacctcacctgcagccccgggtcagcctcagaacccacaggactttgaccctgccccaggccatggtccttgaccagggaaccacagctccttattctgatggggtgactcggtgcatttctctctcaggcttactttttttctctttgagacagagtctcactctgtcgcccaggctggactgcagtagtgcgatctcggctcactgcaacctctgcctcctgggtacaagcgactctcctgcctcagcctctcaagtagctgggactacaggcacgggccaccaggcctgggtaattttttgtgtttttagtagagagggggtttcaccgtgttagccaggatggccttgatctcctgacctcgtgatccgcccacctcggcctccgaaagtgctgggattacaggcgtgagccaccgcgcccggcctctcaggcttacttttaggtggctggaaatactgcttttcatgtgcac

SEQ ID NO: 66746 - DNA, 4630 bp, Homo sapiens
cacgcagacacgcaggcacacgcagacacaggcacacgcaggcacacgcagacacgcaggcacacgcaggcatacacagacacacaggcacatacagacacacaaaggcagacacatgcagacacaggcacatgcaggcagacacacacatgctcacactcaggtacacgcagacatgcagacacacacacagacacacacagacacatgctcacactcaggtacacgcagacatgcagacacacacacagacacacacagaaccagacacacagatgcatgcagacacacacagacacatgcggcacgggcacgtgctcccagagcaggagttgtgaggctggcaggctccaagactgagtttcccaacccaccgcagtggggcggcctcggatgacgtgcaggcgtgcagcccggacggccccaggggactgcagcaaaaacaaacatgccgggttgattccagcagaacccttcgacccaggcctgcacacggtgtgctgggaatccgccctgggtggggctgacccactccctcctagagttcaccgtggtccctggatgcttgctgaccccagggaggacagggcgggccgcggcaggcgggggacgggcactgcagcagctggtggccaccctcacacgtctgggaaaccaggaacccttgggaactaaacttggtcttttttattttattatgtatttatttatttatttatttaagaaacaggggtcttgcttcactgcccaggctgagtgcaggggtgcaatcacagctcaatgcagcctccacctcctgggctcaagcgatcctcccacctcagcctcctgagtagctgggactacaggtgcgtaccagcccatctgggtaatttttaaaacttttttttacagatggggtctccctgggttgcccaggctggtctcaaactcctgaacgcaagcgatcctgctgcctcagcctcctgagtagctaagattacaggagtgcagcatcaccctggctaatttttaaaatttgttctaaagacagggtctcgctatgtggcccaggctggtctcaaactcctgggctcaagtgatcctcccacctcagcctcccaaagtgccgggattacaggcgtgggcctctgtgcccggcctgaatttgctcttaagtcattcacgctacgtgagtcaccagggctgtcccgtgtgcaaagttccagtaagtctttgtattcctgttggcagggtcaggacaaggtccacctcgcaagctggggctgtggggcagtgagctcagtctctgtgttgcgtaaccaattgccatccatgtggcgccttccaacacacatccacttagtacgtcacggtttgtggggtcaggagtccgggaacagccaagccagggcctctgttcagggtacccccagggctgcagtctgggtgttggttggggctgcgtctcatccaaggctcgcccggggaaggctcttcatccagcattccctcaggctgttggcaccatttgcctccctgtggttgtaggaccggggtccctgtttccttgctggctgttgcctgggggacactcccagctcctatgggccacccttgggtcctagctatcagaccctcctcgggccttctcgcaatgcaccgctcacttcttcacaccaggaaccagcaggggagtgtcttcccacaactctgctaagctagagtcttctgggtgggcgtggtggctcacgcctgtaatcctagcactttgggaggctgaggcaggaaaattgctttaagccaggaggcggaggttgcagtgagccgagatcacgccactgcactccagcctgggtgacagagcaagattccatctcaaaaaaaaaaaaaaaaaaaaaatcagcgtaatattttacatattatatatgcatgtaagcatttgctacatatttatattgagaaataaatctaaaaagaaaatgtagaacatccctatataaaatgttatggtgttattttcctttttttttttttttgagatgaagtcttgctgtcacccaggctggaatgcaatggcgcaatcacagctcactgcagcctcaacctcccaggctccagatcctcccacctcagcccctcgagtagctgggaccacaggtgtgcaccaccacgcccggctaattcttttatttttttgtagagacggaggtctcgttgttgcccaggctggtcttgaactcttgggctcaagtgatcctcccaccttggcctcccaaagtgctgagattacaggcgtgagccaccgcgcccggctacgtgcttgtcttattcagcattatgacatcatagagggtgctgattcttaggggctttgagggtctctgagggctttgaggctcagagatctgctgagacacaggtagcgtaggcagagctgggacaaatcccccgttagagccgggggccctcggagaacccaatacgggacccagaggaccgagggcagcctagtgccaactcctgactcgccctgttctctactatgttaggaagctatttgcagttttgtatttgatagaatctcttcctgaatgcttgctccgatcctttgtggaatgaggcagaatataaataaatcaacagaaaacggtgctccagccacaagcaagagactgcccgtcctgcagggcctaaggaattcacgagcaacgcccgcccaggggctgggctcaatggctggcagccacaggtttcatcgctaaccaggccggagaagctgggcagaaaagcacctgtttgcagcttttcagcaggacctctccccctcagccctgtggacattggggctggatccttctctctggggtggggccgtcctgggcactgcagggtgctgagcagcgtctctggtctccacccactccctgccaggaagccccccaacaccccgagaccaagaatcatcagcttccaaatgttaacatgcacaagtagggaaaccgatgctaaaggattttaaggtcacagagctgggaaggggtggatcggggcctcaaacccctggctcccggccccccaggggccgagctgtggggatgtggatcccagactgaccccggcatggaaaaccaccagcgtggcccggcgccagacctgcttgtctgtcgcttgtctgcgagaggccaggaaatggctgggagagggagagacggttaaacgaaaaaacatcccaagaatgcacatggctcgtctccggccctggcagcccgccccgccggtgcctgcagcagagggtcccgtgatttggggctccgcctcagcatctgcgggatgggtgcccccggccgggcaggtccagacgccaaggtctgcacaggggtcacccggacacacctgactcggaccatgtggctaagtttgttttgaaatttcactgccccagcgtaacccagagtccaggccacgcccagcacggctggctcccgtccgggtctctgtgtcctgcagctcagggtggccagggcgggcgggcaggagggcaggcacctggcacccacccagacctgcgccctggccatcaggctgccccgggaagccgggcgaccgggaagatagcagagtcaacagggcgggtgcaggaaagggcgctccccatgcgagcctctgaagccctcggcacacagccctggaggctgggaatccttgagcgttttcctctgaggtctccaagtgtttatggtaacaagaggagggaggagggcgaggggacggccgccgctgggcagcagctccgcctgctggtcaccttcctcggggacatgcaaggacaagctgccgacggaaggggctttggcagaaatgcggggagcaggggacgcacccccacggacaggggcttttctggttgccaaacgtgcagacgacgggcctgacatccccatttcccaggaactctgtggatgggtgtcctggggctgccgtaagaaagtgccacaaatgggggactgggagggggtcttaaaaccacagacatggatcctctcccagttctggaggccagaagtccaaaatcatggggtctgcaagcctgtgctccctccagaggttccaggggagaacgctttctgcctcctccagttctgggggcgcaggtgtctctcagcttgtgtcctcctcggacacctggccagaatccactaggactttaaaaaaaaccattgcacccccccagtgccatcccagaggacccactcaataaacactggagcaactcccagggcaggggaatgcaggtgtgcccaggggtcagggcccatacacgcagctgagtgagccctgccaaccctaccagtcccagtcctggcccccgacattggtcccggcctggcctgctcaccccttcatgcctctctgtctaaggggcagggataggacgcagccctgctgctctctgtctggttctattttttttttttttttttttttgaggctgagtctcactctgttgcccaggctggagtgcagtggtgtgatctcggctcactgcaacctccgcctcctggtttcaagagattctcctgccttggcctcccaagtagctgggactacaggtgcactccaccatgtccggctaatttttgtattttta

SEQ ID NO: 66747 - DNA, 2098 bp, Homo sapiens
tttcaccacggagagttgcggcggcaagaagacaccaggaggaagtgacctgcacacaatcaccagatcgtccctgagcatctggctctagggtctctgcctggaccgaagcattcccaggtgcagacccaggggtctctcctgtccctccgacctcacctgcgtaccctgcgttgcttcctctgccggggaagctcacccacgttctcaggtcctgggcggaagggcagagggctccccgggcacaatgtcttctgatgagaatcacagctgctgagatgcaactgcaaggggctgggaaagttcctgggacccaaaggagctgtgagatctagcgcctgggatggcagaggctctggccggtgaggacaacagccggcgtcagctcgggggtcggtacgcaggcggccaccttgtaacggccacaaacgggcttcaaaggggaggcaggcctgggctgctgagtcacccgggcctcatgcagttcacaaaaagctgtaactcgaggcagcatcacaccgaccgtggaagcatggaagggagggggacgctgtctcagcctccaggagctacctggcaggctgaggcaggagaatcacttgaacctgggaggcagaggttgcggtgagccaagatcgtgccactgcactccagcctgggcgacacagcaagactctcatctcaagaaaagagagagaaagagagaaggaaggaaggaaggaaggaaggaaggaaagaaaagaaaagaaggagagagagagagaaggaaggaaggaaagaaaagaaaaagaaagaaagaacaggaacaagataagggtggccactctcactgtttctattcagtattgttattgcaaattcaagccagggcaactgggcatgaaaaggaaatgaaaagcatccagattggagcaagagaagaaaaaccatctctctatttgcaaacggcctgttgtggtgtaaaaggtccccgggtacaatttgtgcagcagaaatacggcacttcacaggctgcttagaaacctagcaagtcccttgagcacaaactattttcctaagcttggtgggggcgtgagagggtggccggggactggtgacaatgttgtttgtgcactgggagagtccggctgaattgcaactggcctttacatcctaatcagctccctgaggacaacccgaaagacatcagattaaaaagtcacaatgagataaaccagcacgacgcggctctctgcaaagcgacaggtagtaaacagaccttaacgcacgtcatgaggtttgtttttcttttaaaagtcaacagctggtgaatcgcacagggccgggcagggcggtcaaagggcccgttcccccggctgggaaaaaagcaggagcccagggcggcggcagctggacgcgggccccgtggaactttctcccgtcagtcaggggccgtatttcttagccatcctcctctgaccttcatttcaaaccgcctgctgacgcatctaaccttggcccgttccgtgggaactccagactcagggtgaccaaccccagctgggttacccagggttgtcctggttggagtggctccaagtcctcagacccagcaaacccaggcttgctgatcacaccgcagaccccaccaggtggtcatctttctggggaaactggcttcttttcctccccgactcccttgctttgtcttcgtggtggcacctctcttcccaggtgctcaggtgtgacatcagccgtcccttgctggccctggtgccagctgactcccaggtctcctttctcttctttaagatggagtctccctctgtgacccaggctggagtgtaatggcgcgatcttggctcaccacaacctcccccttccaggttcaagcgattctcctgcctcagcctcccaagtagctgggattacaggcatgagccaccacacctggctaattttgtatttttagtagagatggggtttctccaccttggtcaggctggtctcgaactcccaacctcaggtgatccgcctgcctcagcctcccaaagtgctgggattccaggcatgagccaccacgcccggccgtctctttcttctaagatggagtctccct

SEQ ID NO: 66748 - DNA, 1061 bp, Homo sapiens
aaagaaccaaagttgggggaaagtctatcccaaggctccagcccaaaggaagctctcttctacaatgggtgtgttaggatggaggagagccacaaagccagtaaaaaggcacatagcaaactggaagaaaatagtaatatgtagcatatgtaacaaagtgttagtgcctgtcatatgtaaagagcacctacaaatcaataagaaaaactcaatagccaaatagaagatatacagaggtacttagtgcaaagatactaacaatcagaaaagaaaggaataggtgactgatctcactgatggccaaataaatgaatattataacaccaaagagacactaatttcacataactggctggcaaaacttttaaattcagttgataaccattatggcaaggctgtgggggaactggcattttcactcactgttgacaggagttcaagttgctataaactttgtggaaggttattcgtcaatgattaacagaattgtaaatgccactatcttctaaagctgcatttctgcttttaggaatttacctcctgagatatttagacaaggtcaaaagtgatgtataccatgatgtttctgctgcaacattatttggatgtaagaaaaactgtaaagatcagtagtgtgttcttcaagtcactctggcatatccatacacaagaacgcgctaactaaaaagaatgaagctcactgatcacactgacaaaaaatggcaaccaaaaacaactcttaacatttttcaaaaggctgaaaagtagagttgctacattaaaaaaaaattgctccttctatcacagcatttttatttctagcaatgtggcagaaaacatcactttaaatctctcctcctctaaaacccaagcaagactggatgaaagaaatgaacaaaggccaggtgcagtggctcatgcctgtaatcccagcactttgggagactgaggcaggaagatcgcttgagcccaggagttcatgaccagcctgggaaacatagcaagatcctatctctagaaaaaatttttaaaaagcatccaggtgtgctggtatgtgccca

SEQ ID NO: 66749 - DNA, 1301 bp, Homo sapiens
ggaggcagagcttgcagtgagctgagatcgcgccactgcactccagcctgagcgacagagcgagactccgtctcaaaaaaaatgaaaagtaataaaataataataataataataataataataataataataataataataatgctacttgggcatcttccgtcaaaagaatcagacatcgggtgcatttaaatctcttgccaccgttattctttctaaggagccactaggaaaaggatgtctcaaaagaaggtgatcacggaaaaagaaagcttatgaaacactgacttctgtaatcacgttttcagttgaaagaaatggaaactgatctaacttccagctcacctcaagctggaaagaagtctagtttctagaagcatctccaaaattggaaagtgaagtttctagcatacagttccaccgagggcccatgatgaagagggggagaggcgggcacgaggcgaagcgggtgccccgcgctcggctggaaaaagccaatgtcaccgggctgtgctatttgcttgtgggagggacgcctggggtgggggcgtgccgctggttgctccgccgcagacaccacgtggtgctttttgaactgatcagagccccagcctgcctgctttgctgtcccgggctgacctccgaaaacaccgcactttcccctcgctgacttggtagatgtctgtctgtctgcttgagtatctcgaagatctgaggtttccattccagcagaataaatactaggagggcccaccccttcctcctcccagccgaggctggatgaatccaaataaacccagctggtggggaagagcatttctaggacttcggcgggagaaagcaccgcccacccgggtgggtttccaggaggtggaggtgcggacctgggaggggggccctcgggcagccctgccatgcagccgcgtcactccgcctgcctgatgtcacaggagctgggggagtttgggtatttcatgaagctgttgagttattgtggctttggtttgtgacaccggcgttcaggcacggcctaaaggcaacatcaaagacggtgcatgaaaaccgggggttaggccgggcgcggtggctcacgcctgtaatcccagcactttgggagaccgaggcaggcggatcacctgcggtcaggagttcgagaccagcctgggcaatacggcgaaaccccgtctctactaaaaatacaaaaattagccgggggtggtggtgctggcctgtgatcccagctactcaggaggctgaggcaggagaatcgcttgagccctggaggtggaggttgcagagag

SEQ ID NO: 66750 - DNA, 747 bp, Homo sapiens
aaaacaacaacagaaaaagcagcactgaggactgggctgcgggctgcgtcctctgcaggccctggctcccctgtacccaccccctcctgcacgcttttaagcagatccagcactcccttcagggcgctggggaggagctgccagcagacaggaatgcgctgtgcagaagcagcaggttctgccagctcctcccgagcctgcagggaaatgcaggcagatctgtggcctcgcacaggcggacagacgggcagcagggatctccaaccgggccccggagcacgaaccactacgcaatcgtcacagcatgtgctaccttccgtggtgttctgggaatctaaatcaatcccatacgctggacagcaagccagaaacggaagccaatctcgggctgggcagagggccacccggccctcccctcaccaccacccctcccttttccttcaatcagaattgccttttataggcaggttgatagttcacagctggaagggggctcactgcggctctgcaaggaaagatgcgctacccacccttttctctctttctctttctttttctctttttctttctttctttctttctttctttttgtttcttcctttcttcctttctttcttttctttctctttctttctttctctctctctttccttccttcctttcttttctttctccctttcctttccccttccttccttccctttctttctttctttttctcttttctgttctgttctgttctttttt

SEQ ID NO: 66751 - DNA, 1423 bp, Homo sapiens
acagagtcttgctctgtcgcccaggctggagtgtagtggtgtgatcctgggtcattgcaacctctgcctcctgggttcaagcgattctcctgcctcagcctcctgagtagctgggattacaggcaactgccaccacgctcagctaatttttgtgttttcagtagagacggggtttcaccatgttggccaggctgatctcaaactcctgacctcaggtgatccacccgcctcgcaaagtggtgggattacaggcatgagctatcacgcccggccactaatttttttattttttagtagagacggggtcttgctgtcttgtccaggctggtctcaaactcctgggcttaagcgatcctcccgcctcagcctcccaaagtgctgggattgcaggcacaagagaccctcttttattgttgcaagatgctgacaggtttcagaagaggtttgaaccaaagcggcctcagggacccaggtggcccctgggatacgtttctcccaggccaggtttggtttcagtcggcctgagcgtgcagacacctgtctcctgggcactaaacttgacactttcagttcctatcaggcggtggggacgagggggcgggtgggagggggggaacgggctcacgtgccaggctcggggggggggaagcgtcctcaacattctcagaaaggaccacgcccggcaccggccttggatggcttccctctcgcaatctgctttctgggaagtgggcccctcgcaccgggtgcggcgcccagggttccccgccaccccgacccttactaagccgctcagcccagggatccagggccctggcgagacagcctgggagacgcagagtgggaaatgatgactgggagctggtatcgcgaatgtctacacgcagactgacttcaggggcgaggaattccgcctggcgagcgtctagactgcggtgtttctgggacgctgggagctggagccaggacaggtctcccgggagctggtctgtgctgccacctgctggtcatggcccgacaggcggcctcgctgtcaccactgagtgagctcgaggtgccccgtcccaggaccgtggcaggagggggtcccgtcctgcgtggggcttgaaggcaggtgggcaagacggtgcatagcccgaatctatttaatgatttatttgataataccatttaaaaatatctcttaggccgggtgcaatggctcacgcctgtaatcccagcacttggagaggccaaggtgggaggataacttgggctcagaaggtcgagaccagcctggccaagagagcaacaccaggtctctacaaaaaattaaaaattagccgggcatgctggcgggcgcctgtaatcccatctactcaggagaccgaggcaggagaatcgctcgaaccggggaggtggaggctgcactgagcgttgatcg

SEQ ID NO: 66752 - DNA, 7766 bp, Homo sapiens
acccgggaggcggagcttgcagtgagccgagattgtgccacttaactccagcctgggagacagcgagactccgtctcaaaaaaaaaaaaaaaaaagaaaaagaaaaaaagaaaagaaagaaagaaaggtgctccagtggctctcaggcagagctccacctctgtctggttgccggtggtgccacagcacagcaggcctctcgtctccggagcagtgactgtgacctgttgccagccctggcggctattcctagcagctcctgacctgcaggaggctgagcccagcagtgccttctgggaaggagggaaggagggaggctttctggtaattacccccaggcagagggcaggcgggcacaggggcccgagcccctccagcccatcccacaggctccagggtgtttactgagcttgcagaattccacgctgtgggctgggccactcctgccctgagacaggaagacaaggtcagctcagggcacagaagccatctcctggctgtcacctttccttgtgggtgcagagccggaccccaggcaggggtggacgcctgtggtttacctccctgggggctcgggccctgtgccgagggtgcatgtgttgtcccctggggcctctagacctcttcctttcttttgagacaagatcttgctctgtcgccaggctggagtgcagtggtgcgatctcagctcactgcaacctccgcctcccgggttcaagcaatcctcctgcctcagcctcccgaatagctgggaatacaggtgcacaccactgcacccggctaatttttaaaaatttttttgtagacaagggggtctcactcttttactgagcctggtcctgaatcctggcctcaagcaattctctcacttcagcaccccaaagcactgggattataggtgtgagccactgtgcccagccagggtttttatttttattttttgcagaaatagaggggggtctctgttgcccaggctggtctcaaactcccggcctcaagcgatcttcccatgtcggcctctgaaagtgctgggattacaggcgtgagccactgctcccagattagccagacttctctcttctcctcggtcacggggatcaggaagcagagaaccaaggttctgccaccaacttgtagaagggccatgggtcacccatgcccctcccagtgtttccatggttgccagggaagccagtgaagggcagagtctttggggaggaggaagctgggtcagagaggagatgagggtgtgagagggtgagcaggtagcgccctcaccgtgctgggcacaagacaaggacttcagagctgattattttggttttggggttttttgtttgtttttgtttttgttttgtttttgaggcggagtctcactctgtcgcccaggctggactgctcactgatgctcaccgcaactccgcctcccgggttcaagcgattctcctgcctcagcctcccaagtagctaggattacaggcgcccaccaccacgcctggctaatttttgtatttttagtagagatggggtttcactatgttggccaggctggtctcgaactcctgacctcaggtgatccacccgcctcggcctcccaaagtgctgggatgacaggcgtgagccatggcgcccggcctgattatttcatttactccctgcagcaaccctggactgcaggggtggtgatcaccccccattttaccaaacagaagcagagagtgaccgcgggtgcccacctgaccccgtgtctccagcgggaacgtgaagctgatgctgctcccgccccaggcctgaagccggccccctgccccaaaccagcctgaccagcggcaccgtggaaacccaccgggatctctgccacccacaggaggctggggcatctctcaccccctctgtgcctcagtttcctaatctgtcacacagggaggctggacccaaaccaattgattgttgtcatgggtggagccggaacccgctatggctccctcctgccctcgggataaaatgcagcctctgccgtgcggcctcctcactccctccctctcaccttttcaaggtcctggaaccatctctgcacctgtatcccccaccccacctgtcaccttcagggcactagcaacactcaactcatgtcacttcctccaggaagccctccctgaattcccgaacaaagctcctggtgtgggcacctgctttcactcttgggcggtgttgtcttcatcggttcactcaatcagggtctcaactggggtaattctgtcccctcaggggacactgggcggtgtcgggggacatctgtaattgtcatgacggagggaagtgggaccttccctgactaatattccctcacatcggtccatgctcctggcatggagtgggtggaggccagggatgctgctcagcaccctgcagtgcccaggacggcctcaccccagagaacagtccagtgtcagtgtccacagtgcccagggggagagacctgctttaattatttgggaataaactgagtgtcctccctactcacaccagacactggaataaactccagatggagcagacggcataaacccgggagccccagctcctgggactcatctcctctctctcttcccactcaggtgtggatttcaatgtgtgcagcctcctgggacctccgcagggcagaggatcatgggatgcagaatctcttggggtctgtggaatcttctatcccagagggtctcaaccaaggtgtttctgtcccaggggacgctgggtgatgtctggggatatttgtggttgtcatgactgggggtgctcctggcatggagttggtggaggccagggacactgtcagcaccctgcagtgcccaggatgacccaccccagagaacgatccacctcacatgttaaatggcggtaagggggtgaacccaccccctgcatggctccaggggcacccagagtggggccccagccctgtggccgcctctcctcccacttcctccgggcgcctgtcctctgcacctgcatcctctggccctggctcccttcagagctggtcacagctggcagcccgcgtgctgtaaacacccacccaggcgtgccagccagacctggctttctgtcactcccggctgattctgaattcccagtctcacatgggccagagggtgactggctcgagacttgcctctcattacgagcaaagctctgattcagccggaatattagtcagggtacagcatgtcacattccaggaggctgatcagctccgacctcaacaccggcagctgactcagcccggggagttgcatgtgctgactactccttctgagcctcacagttatgttctcgagatttcactcagtgtcctatggtgtcactggtcctggtcgcagacacagactcacctgtgtgcaggaggtcaggtgaggatcggtcccagcaccttcattctttgtttctttcactcactcagtaaacatctggtgaagacttggaccagatccctgatcttaatgaaggaggtgacggtccggcccaggtgacaggcacagttaatgtgatgatcacaacacagttgccatgtgaccctgggcacgtcagcccctctcagctactgttttctcctatgtgaagtggagatcattatctcaatctcaacatggcaaacaacacggcaagtgtatgagtcagctactgctgagtaacaacagcggcaacaaagacaccatttgccatctcacaacttctgtgtgtcaagagtctggcttaactgggtcccccgctcagagtcttataagcctaaaatcaaggtatgggctgggccgagttgtcatctggaatttggggtcctcttctgagctagtttggttatcggcagaattcatttccttgcagctctaggaatgaggtccctgtttacctactggctgttggatgtgagtgctctgagcccctagaggctactctcaggtgtctgccacatggaccctccacaggcagctcacgacatagctgtttgctttctttaaggcaagaaaccccttccctttctctctttctttcaactgtggtgtgtgtgtgtgtgtgtatatatatatataacataagacggatcatcttaaccacgtttatgtgtacggttcagtgatgttaagtatactcacactgctgtgcaatggctctccagaaccttccatcttgtaaaactgagacactgtatccactgaacaacagctcccctcttccctcccccagcccctagcacccaccattctcccttctgtctctctgaatttgacacctcgggatgtgcttctggtctcttttatgggctcacctgatgaggtcaggcccacccaggatgtctcctttttgatgagctcaggtcaactgactaggaatcttcgtcgcatctgcaaaatccctttaccgaacacacgacctaactgcattaacctaaccactggagtgacaccccatcgtattcgcaggtccagcccatcctcaagtgcaggggattagataagatgtgggcaccaggcggtgggggtcttgggcgccatcttggaattctgcctaggactgtagctgtaaaagacatggtggccattgctgctgtaggtgccattagtaggaaacacacacaaagtggcccccaaggagcacgtactatgcatcaggctctgtgcaaggcacagagaaaacagcaaagaactttggggaaagttgaagacttgaggtgaacaactggatatcttagtaggtctctctgaaggttgagcaaatggataggggatattgggagatgggttatgtcccttggaaagaactccaaatgtccctttcaataactttccactctaccagtcatctcctccttccagaaattctcaggaggcagcgcttggtggctcttctgcagatgccaggatggtgacggtgacagcaggccacgctcttgtgtttagaataggaggtccccaaggacacagagtcacagacgggtcaggtaagttgcctgggcgcccacacgaataggaggtgcttctggatttgaaacaagtcttctagtgctaggagccccagaacacacctagtgccaccccctccccacgacaaagcccaccagaagggctggctgcctaaagaggtagtggacaagacctcacagactcacagactagtgggagaagacagaagagcgtagccctgaacgcagtgtgggggcacacggtgattggaacctggcacccacatcaacggtcaaagtctagatggttttgtttggttgtactcccgcctccctctgaccccatgcccacgagtaagaggagctccgtccacatttatggacacttaatgttcctgcacacccataaataaggtgaagccgagtctgcatgtgtgcgaaagggcacagagctttgcacatacatggtgccagggtccatttcctggttttgtactatggttacgtaagatgtcaccactgggggaaactgtgaagatacatgtgatgttttttgctctgtgtgatttttgcaacttcctctgaatctgtaatgatttcaaaataaaggttgttttttttttttaataagtggagacacatttaggtgtaactgggacacagcctgccacctactttccaaatgcctcctttctcccaataacccccaccctctccccaaagacctggcagtactcctgcaagaggaagggatggacgccagaaaaagggagtgaaggtcctgctgattcggtcctggctgaggccgaacgcaggcccccccttccctttgccaccaagaggagtctaagatctccctggagaacatatcttgtagaaccccctccccttgagtgtgggcagggcccgtggacatgatgagatatcactcccctgattaggttgcttttcaggaaagaagggattttgaagaggtaaataaggtcctaaatcagttgaccttgagttcactgaaagggcgattatcctaggtgggcctggtctaatcaggtgaccctttaaaagggattgggcctttcctgaaatgagagcctggaagcatgaggggcctatggagaaggccaagtggcctgagagtggcctcaaagagctgagagttgccccctcctgacagctaacaacgcaacagaaacagtctatcaaccacaaagaactgaattctgaatgagcctggaatgagcttggaaggggatccgtcaccacacaaaccttcggatgagaatgcagccctggctcacatctccgaggtcagaagtttggacatagtgtggctgggtcctctgtgcagggtcttacccagccacactacatccaaacttctgacctatggaaccatgagataataaatgggtgtcactctaagctactgcattcatggtagttgttacgcagccatagctagctaatacactctttatgtgctgcagactagagcattctgggattttatggtcagctttcaaacttattcatacacaagggtttggacatcatgtccctccacaatcagccaagcaactcagcagtttcctcctgagtatgtctgagtatatcatcaaaaaggtctaatgactatgacattatctgattgtctcaacagcactgtgtggggctgaggaggcatagcaggcatgaagaccagaggaagaatggtgcatttagtattagacagcttgacatgcattaaccccttgagaggcaggcactgcctattctcccccctttcacagacgagggcattgaggttcagaaaagcacagagatggcccagggtcacagagccagtaggtggcagagttgggagcccaagccctaaactgctggttatgtcacctcatgaagccacttaacctcgctaggtctcagcatccttatctgtccagtgacgatcattctttcctcacgagtggttatgagatgaaatcagataactcaaggcctctaggctgagggtcagcaaaccttttctgcaaaaggccactgagctctgtccttgtagtatgaaagcagtcactgatgacaggtaaatgaatgtctgtggccgtgtgccaataaaactttattcataaaaacaggaagtggaacagagaacttggcccagggacctgcagtatgtctgtggctgtgtgccaataaaactttatttatacaaacagggagtggaggggggaacttggcccagggagctgcagtttgtctgtggctgtgtgccaataaaacttcatttataaaaacaggaagtggagggccagactgggcctggggtgggggcacagcatgtctgtggctgtatgccaataaaactttatttataaaaacaggaactagatgggggacttggcctgggggccacagttttcgaccccggctttagcagttttttccttcttttgctaacttctaaaatgaagccgactgaccctagaagtgccatttctgaaagaggaagagagaaaaggggtgaaaggacgttgaaccagccaaggcagactacagcattttcagggcgtctccccaagatctccaataaggacaactagcatcgactaggctaatcccgtgacggcctgttctgcggggacatcatcaccctggtgctgccctctcccccattctctagagaaaggagccccaaaagaacagataaactctgcctcctagaaaggtaagactcctggcctggcgctgtgtgggatcatgcctgtaatcccagcactttgggaggcagaggcaggtggatcacttgagg

SEQ ID NO: 66753 - DNA, 5001 bp, Homo sapiens
aaaaaaaaaaaaaacaaaaaaacccaacctgctataaacaaaactcacacacacacacacacacacacacacacacacacacgcacacagaaaacagactgggaattgtaaaaacagctgacgaacagagactttctactctacagggaagtctctcaccgtcagcactgtggacatcgggactggatccatctctggggtgaggctgccctggcactgcagggtgctgagcagagtccctggcctccacccactccctgccaggagcaccccttagttacactgagctatgatcgcaccactgcactcgcacctgggcaacagagtgagactctgactctaaaataataataataacaagaatataagaataataattcagatccatgtccgataaaaataataaataagtaaagctgaggctctaacatgaagtcattacgaggctcatccagccacagtgggctctgcactggggcacccgcctgggcctctgcctggcccatgtctgctcaggagccctcagccccttgaaccctgctggtgggacagggggcccctctaccaggcccctaacttctcaacagaccccaccttgggcctccccaggctgcaccttaaccatctatgacacgcatccccaggcggcaccgggagtgtctgcgcagagatccgagggtgttagcctggcaggggccctgcaggtgggtgctggttcactaaaacgatgaagcggatgggaggaaaattagcatccaacgggcctcatcattgctgtcctgggcaatggactctgacccctgctgtagagggtcagagagggtcaaggtcaagccacagattggcagagccatcctctctggcctccactcggctcccccatgtcccctgcccccagcatctcatcatatgcgactgtcaccgccgtgtgtattttgagtcaaaggcggccaaggctcgatgaatctgccgatgaccaagttggtgcctcatccctcgttctgtgggaggctgactgttcaagcggttgcttagcaacaggcgcgcgcgcgcgcgcgcacacacacacacacacacacacacacacacacacacgagaggtggctgtggtctgcacactgggctggggtactcagatccccgggctcggtggtcgtggatgtgagcctctctgggtatggagcctcaatcagtagagtcaggtggtcgcaataacagctctgaaacggggattcattgagaggacatcggtgggcttgaaaacgggtgtctgtttaccggggcttgagtgggagctgtagtaattctgtccagaagaggacagaagcctgctctcaactcacccgggaggcaggttcttctgcaccgggccttctccccccggcactgtgggcatttggggctgaatcattcttggttgtggggctgccccgggcactgcagggtgctgagtggcacccctgacctccaccccatggcatccaccaatcgaggcagccacaaatgtctcctgggtgcaaaattgccccgagttgagaccccctgggataggggattccacggacccccaagagactccgcgtcccatgatcctctgccctgctgaggtccccggaggctgcacacattgaaatccacaccctgagtgaggagggagagaggaggtgagtcccaggagctgggggtcctcctggtttacaccgtctgccccactgggcgtttatggtgcctatcatgagcaggaaaataactcgaatttttttccccaaaataatgaacccagagtttctccccctcagcactgtggacatttgaggcccgattgttctctggggtggggccgtcctgggcactgcggggtgctgagcagtatccctggcctccacccactccatgccaggagctcccccaagtcgcgaaaaccacagatgtcccagaaattgctcagtgtccccggggttgggggtggggggcggcatcacccagatgacccctgctatagagggtcaaggtcatgtccaagctctcctaccgccgggaagcactgccttgtcctgggctacagatgtggaggctgctgggtacagggagaggtttctgagtcctggagactgtggcagagcccctgatttcggcacagcgccccgtaattacttgcgggctgcacacacgttttctctcggggagggtggtagcaatgagctgtgaccttccgggagcagagcgttttcaggctctggctgtatatcttggcaattctttcaggggaacaacttgtccgcgaaaagaactgataataacgtgaatttcaacacgaccaggacatgctgaaatctggtgaccgaccagggggaaataaacccgctctgactggccgcggggactggagtttgcttaccacacaagagcccttctcaggataagaggctccagtaaagctctcagcagaaatgttaccaaaaaaaaaaaaccctcgccgggagaacaaggagctaccagaaaaacacactcggtgatctggaggtcgcaaagttcttccgcactcagtgaggcaagaagcaaaaaggctgaagaaatgcttatcctggaagaggggttctcacccgggttctgtggacatcggagccggattgttctctggggtggggtcgtcctgggcactgcaggctgctgagcagcgtcccgggcctccacccactccatgccaggggcaccccccagtcgtgtaaccacaaatatccccagacattgccccagatgagtgaggacagaggtgcaggtgggtgcaggtgggcacaggtgggtgcaggtgccccgtgaacccatctccatctgcaccctctgcatctccaaccccacccccagccccagtgtctcctaaggggtagaaagtcttcagtgctgaatgtgagagaccctgccttaatttgagggaaaaaaaagtaatcaagtctgtcccctgctcacatcagacaccacgacaaactcccaatggagcagacggtgtaagacagggggaccccagctcctgggatttgcctcttctctccctcctcactcggagtgtggatttcagtgtgtgcagcctcctggaacctcagaggtccatatgatcatgggacacacctgagacccaggaggtctcaacttggggtgattttttttttttttgagacggagtctcgctgtattgcccaggctgtagtgcaatggtgcaatctcggctcactgcaacctctgcctcccaggttcaattgattctcctgcctcagcctacggagtagctgggattgcaggcgcccgccaccacacccagctaatttttgtatttttagtacagaggagttttcaccatgttggccaggatggtctcgaactcctgacctcaagtgatccgcccacctcagcctcccaaagtgctgggattacaggtgtgagccaccgtgcctggccaacttggggtgattctgtcccctaagggacactgagtgatatttggggacatttgtggttgtcacaactggcgggtgcacctggcatggagtgggtggaggcccgggacgctgctcagcagcctgcagtgcccaggacagccccaccccagagaaaaatgtggccccaatgtctacaggagccagggggagagagaccctgtgttatttggaaaaaaacagagtctgctctctgctcacaccggacaccagaataaactcccaaaggggcagacagcataaatcagggtaactccagctcctgggattcacctcctctctccctcccactcagggggtggatggaattctcctctggccaaactgaaccagctctctactgccttcactcaggggcgcacgagtctctaactcacaggcgaggatccaggccctctgcccgccaggacaatgacccctctctgagctggggagtggcagccccaggtccacagccagttctcaccctgaggagcatgacatctgggaggggggatgacaggcaccccagggcctgatggtggggacaagccagggtctgattcccatggcaggatgacctgcactctcccagggccacccagccctccagggatgctttatgccttccattctctggtccgagctctgctctggagacacctctgtgcccgagtgtgaggtgcattccctgactgccttaaggccactcctggggagcagagccagtgcctcccgcctcctgccacgcacaacacccagggaccgcctctggttttgggcagagaggctctgagtgtgcccacaggggcccctagggcaggggccaaccatctgggtttgcctgggacttagggctgtcagtgttgaaccaggaaggtatcaagcaaactgcagtgggggtagtgacagagcttaaagaggggctcgggggtgactgaagacatctgggatacagtcagtatgcactgcctgcacctccatccccacctgcacccacctgaacccaactacgcacacctgcgcccatctgcacctccgtccccacttgtgcccacctgcgcccacctgcacttccgtccccacctgcacctctgtccccacctgcacctccaactccacttgtcctcacctgcacccacctgcacacccactgcacccccgtccctacctgcaccccccgcatctccagccccctgccggctccaggcccggggccaggaaactccgtgggcctcctctgccccctcgtggccgccagcggtaacagcagccctctgcaaatcgagcttcagaggccccaggaacaggctccccccgcccccgagcccggcccgtctttgctgttgtcgttgttgttttgccctggggcctgcagaaggataggagcaggggatcacggtgctggttttgtcatcaggacaggcagccacggccctcacttggcggcgcacctgctctcctggagaggctgccacccagaggtcagagacccccgcaggcgcctgcacccctcacagcctcgctctcc

SEQ ID NO: 66754 - DNA, 1190 bp, Homo sapiens
tgggccaaagtgaagtcggtttcaccctggaccccaaaatgtcaccgttcttaggaggaatctcagctcctcccctgtccttgagttttccccaactgggttttctcccccaccatcagccccaagcgcctcatggccccgctacctcactgcattcaggtcttcgggtcactgctcagatgtctccactcagagctctccccgcccccttccctggtgttattttcttttattttgtgctacagagggagctaggaattacattattttaagtcatttaaagtcgtccctcccccccggcggtgagctgggcgggaccaggctgtctgtcttgctcagggccagctgcacccagcgcagagccacccaggcacacagtaggcgcccaataaagacctgtccggcatctggatacctcagtctgtacagtgaaggtgagggtggcctgcacgctctcaaaccggaggctgctcgggccgggatgaggagggcacgggctcattcattcaatcagcacttattgagcgccttctgtgtgcctcgcgctaccgggcaccggagacgggcctcggctaacgtgcgggtagagtccaacagacccccggccgctcagcgccgccccgccccgccgccccaggtcctctctctgcccgcacctacctcccgggggcccctcgtccgccgactggcgccgctgcacgcccaacggccgcgcagtctcgaccccacagacgcggcccggagaggccccgctcggcgcggctggtccacgccccgcccacgcccctgcccattggcctccccgagacccgctggcagaactttccatactattggctgcgaaacctgccactcatatgcgactccacctctcctaccggcacaggaaaggggtttcctcccgctgagcggcgggcgcagccaccaagcggccccggcgggaaacccggattggcgaggaacggttccggcagggttgggtttccagagctgtccaggggcgcctggtgctgaatcccgcttggaaagaggcttggaggtggatgggaagggatttccaacggaggcggctcctctctcagcgtcctcgctgctgatccccttaccgacggctgaagaagcagattcatcccttcaacaaatctctgttgataggcaggaggagtaagtccaagagatcgactgtacat

SEQ ID NO: 66755 - DNA, 1285 bp, Homo sapiens
gcatagtcccagacacactgggtgtgcccacagctttgtttccctttcagggaaagcaacatccatcagcaatcattaaaaaacaaaacaaaacagagagcaaaagagccagacccaaagcacacacagggtgtgacaccgactccatttctatgaaatgtccaggacaggcccatccagagacaggaaggagacgcgtgggtgccggggcttggggaggggaaggggagtgacagctggtggggaccagcttccttgctcccttttggggcgatgagacagctctggaaccagagagtggtgatggttgcacaaccctgtgaaggcaccaaatgccactgaatttcacggtgtggggatcacagcggtgtgggaatcacagctcaatgttttaaagggggagaaatctacaagagctgtgttttgtgtcgctggacagggagttacggtcttcctgaaagctcctgcgggatggtaatgagttttccgcccccatctcaggacacaatggacagcccagaactttgaggtctgggatcaggactgcctagagccggcgggcagccagtcccagaatccaaagatctcatgtacgacacatcagggcccacggcagtcaaccaccaccagaaagtgaaaccacaaaagctgacgtcatccgccccggccaacagggttcagagagcaaaccagtcaggtctcctgacccccaagcccaaggaaaacagacacatgccacccgaaaggtgaagatttttggtttacggagtttcttttgttttatttttaagcacgttttgacaacagcattacaatagccaaaagcaaacagcccaagtgtccacggacaggtgagtggatcaacacaatgtggcctagccacacgacggaacgctacgcagccatgaaaaggaaatcctgaccaggctacaacatgggcggaccttgaggacgtcgcactcagtgaaataagccagaaacaaaggtacaaaacctgtgtgactcccctcctaggcggtccctagagtcgttggattcacagagaccaaaagtggaattgggggtgccaggggctggggagtgaatgtttcatggggacagaatttcagcctggggagatgagaaacttctggagatgatggtggcgatggctacatagctgtgtgaatgtgcttaaagccactgaactgtgcatttataactgattaagatggtaatttttggcctggcatggtggctcacgcctgtaatcccagaacttttggaggcagaggcaggtggatca

SEQ ID NO: 66756 - DNA, 1821 bp, Homo sapiens
gctgggattacaggtgcacaccaccatgcccagctaattttcatattttcagtagagacggggtttcaccacgttggctaggctggtcttgaactcctgacctcaggtcatcagcccgtatggtagggtttttaaagcattattgacatttaaagctggatcattttctggggtgaggccgtcctgggtactgcagggtgccgagcagcaaccctggcctccaccaactccaaaccagggggtcccccaaatcatgacaagcacaaatgtcaccaagaatccctggggcacagaattgttcctggttgagaaccactggtcaagggagggaaaaggcagacaaaaggaataatcagagacagaaacaaaagaaaatgggacaatcattcaacctctgaagggcacactacactgcaattttctggcacctaataacaaaaacagctattctcaagccagctctctcttatcaagttccaggcacctgatcaaataattgaatgtgggtttatcctcataatgaccctccgaggcatctgcttttacaactcgtttgcgaaagaaggaacagtttgctcagagagggaaggcgactcacccaggtttacacagcgggtgggaggtggtggtggacggtcctgaatcccagatttcccccacctctagcacgatatgcagaagaagactctaaacatgatataagacgaacgcctgctaattctttggagttctcagattccgctggaccctgcggctctccttctcctaggcagggacttttgaacaacgcccgttttacagaggggaaaactgaggctccgagaagccaagaggctgggcaaggtcacccaggtagggactggcggcgctggaaccagagttccgacttcagtccccacaaacgggggtccctgagtcacagggacgacgtttccaggcggttaataagagcggaacggcagcgaacacccagcgagcgctcactacatgcggggcgccttcccctcccgccgtcctcgccaccaggccgcggaccagcatttccaggacctggggcctggggaagggagatcagggctcgaagggcctgcccgatggcgcccggcctcagtttcccctccgcaccgcctactcacaggaccccgcgggtcgcggtgaccctggcctcacgatccccaaactcttacgagctttggggccccgtgggccccgagccgcagaccccagacccaccaggctcagcgcagtgcccctcactcacctctcaggcgaccgatccccgacccaccgacggttgcgcttgcgcaccgcggtgccgcccggccccggccccagggcgcgacgcctgcgcaaaagaaaggcgcccggagttgcttcccttctgcacaggcgcgttaatgatggaggcgggcgtggaaggaagtgacgcaacgtagaggcgggaaccagctggttgttagggcaactgacctctgcgacctaatggaggccggaaatcgggtctggtttgccctctagagcgggaatgaagcggtgcacggtggaacagtggctgactccagccggtcgccgagctgaccacgtggtgctgggccggccacgtggtgcagccgcgtttggacacctggactccagagcgtcacagctgcgcaatgaatgggagtcagtgttacccgcttactatctttgttcatttattcacccacccatctactcacccacaaatgcattctttcatgcagtgtgagacgtttgtgagtatagagccatttgtagacagcaggtgcctaatattcattcaatatttattgcaaagcagcc

SEQ ID NO: 66757 - DNA, 1510 bp, Homo sapiens
tggaaaggctgaggcaggaaaattacttgaaccagggaggcggaggttgcagtgagccgagattgctgctactgcactccagcctgggcgacagagcgagactccgtctcaaaaacaaccaaagcaccaaaacttctggttaatttaattgattcgtcggattcagatgctggaaagtgggcctgggatatacagtaagcgatcaataataacactggcccaacacacagctataagaagcgaggcaagtacacattaacgcggtagcctgaagcccaagcgaagtctcagcgcaatgagccgcgcagaggctcagaggcgtcagcggcgtgcgcggtttccaaggaaaccgtccgtcctagccaccccagcggctctggaatggtagagcaagaggctccgcccacgcaccgccgagaccaataacggaccgggagggttacggcgagtgcgcagagggctccagcgcactcccggccctcctcctttagctgtgggcggggctcaggggcgcgtgcgtcctgccctccctgtgcgcgcgccgccccagcatgccccgggagcgcgggcggcgggccccttggtcctcaggcggccgtggcggcggtggcggcggttgggccgaggcaggcggcctcagtggccgaggtggctggacgcgtagcaggtggaaggagggagggagccgcaggcgcagacccacccgccatgaagccccccgcaggtaccgactaccccgctcgccggacccgggcgtcccctgcaccctcgctcctcccggggtcgcgacttgggcctaaggctggagcgaagcgacccccgagccaccctcggccgggctggaggggcagcgggggaggtggacgaccctgctctctcgtttgccgaatgaatgaaccagcttttccagcgcttcattcattctgcaaagttgatggcgcttcccttccggatgggtcgggccccgtggcggaccctggggaggccgtgatttaacgactccagtcccgttttcctggaattctagagccacagacagacattcaaaaattaaataagagaggatcgaagatagggagggatcggtgctctggtgcagataaacacgaacggggcagtcccagggacacgtttttagagagagggtggttcctggggggcttttctgaagaggtgagcgtcgacttgcttgattgggagaagcaagtgtcctgccaagaccggggaaggaggcgtcccgggaggagggaacgtgtttggagagcagaaagtcagtttggctggaacgtaacgaggggaccttttaattttgttatttatttactttgtctcccaagcgggagtgcagtggtgcgatcacgactccctgcagcctcgaactcttggactcagtcaatcctcccgcctcagccacctgagtaactgggactacaggcctgcaccaccacacttggctaattttttgtagaaacgaggtttcgccatgttgcccaggctggtcttgaagtcc

SEQ ID NO: 66758 - DNA, 1501 bp, Homo sapiens
gggtactaagcaggatccctggcctccacccactccacgccaggagcatctgcaaccgcgacagccacatgtgtcctagatgtcacccagggttccctggatgggattgatggcagagtagcctcctgctctagaggactggtcagtctgtgcttccctacaagagccctggacctcactcttctggatgagaagcgggtgatcccttcctttccctctgccctcctgactttgaccctaactgaaccgaaagcagacccgcccggcactgggttttgtttctgcgtagcctgtgcaggagacatggcggacgcagcatctccgtgctctgtggtaaacgacctgcggtgggacctgagtgcccagcagatagaggagcgcaccagggagctcatcgagcagaccaagcgcgtgtatgaccaggttggcacccaggagtttgaggacgtgtcctacgagagcacgctcaaggcgctggccgatgtggaggtcacctacacaggtaagtcccaggcagggtctgtgcgtgggccgcaggtgccgagggaggtggcaccgcaggcgggagtagcccagcccgtggagccggttcagaacctggcttgaagtgtcaccagcaccctgcccctgagcacagggcagcgccacctgctcccaggctggtcgtggtggctaaatcagatggctgggcggaagcgtctggcaggtgctggtcactagaggtgtaggagagaggcagttcctcccgtgctccgctctgcttcacagcctcgtccattcaaaggactccctggttgtgtgatctgagagccggagatgagaaaatatgtctaaacagcacgcctctccagcctctcccagagccagcagccttgaaccctgaccccgtctggcctctttccctggcccgggaaggcgggtatttgtttctctctgaatgactgaacttggcccccttggcttctgcctctgcgccctccggcgggggtgacctcatgtcctcgggcgtcctcctcaccctcagcccgatcctcctcctctccttggggtccctgtgctcacggtgaggagtgaggtgcctagtgacaggggttagggacactgcttcccgagctctgcctaaggctgacagtgtacctgcctgaccaagagacccagagagtctccgcagagagctctgagtgaggcaactccccacccttccatctagcggaaggcctttttgctgggaaccatcgagaatccttgagttcaagcccagggcttctctcgtgttccaaggcatcccctgaaagggttggcctccgtggcccatgccatgaggcctccagagggtttgttgtctgggccaggggctggagggagggctgaagctccgcaagcaccccaagcctgcaggtcccgcagcccctgattggaatcctgaccctcttcccactccctctggcttccgacaagtggcttagagcccgtatgacctcggtttcccctcctcggccac

SEQ ID NO: 66759 - DNA, 1867 bp, Homo sapiens
gaacctgggaggcggagcttgcagtgagccgagatcgcgccgctgcactccagcctgggcgacagagcgagactccatctcaaaaaaaaaaaaaaaaagaacaggggagctgaatatacggaaacattggttctttggagaggagctcataactgattgtacttaacaatttacaggctaaaacctttgaagaggaatttgttgtatcctacaacagtatattaattatagtagttttactattttaatttctcataaataacaatcagtagaatattaaataaatatttaaacaataatttaatttggctgggcgtggtggctcacgcctgtaatcccagcactttgggaggccaaggcgggcagatcactggaagtcaggagttcgagaccagcctggccaacatggtgaaaccgcgtcgctaccaaaaatataaaaaattagccgagtgtggttgtgcacgcccgtaatcccagctacttgggagactgaggcaggataatcgcttgaacccgagggggcggaggtttcagtgacctgagatcatgccattgcactccagcctgggcgacaagagcgaaactcagtctcaaaaacaaacaacaattacttaagcaatcattttaataagtatgtaatacattatacgtttatataacttgcttaataaataatagtagttattaatatccaatggcaagccgccgggaaacgacggagctgggatttgaggattggctccgcgaaccccacaacacccggggactccagcgaaccacacggggtggatccaacagccgcaggggcatcgtggtcctgcggagacgccgcccgcccggaggcggcgctgtgacccaggttggagagtcaggagcccagcgccgcgctgcggggcctgctgggacttgtagttcgcaggttcggggtgcgcaggcgcagtgccgagtttacctctgcgcgcgtcggggttggtggcggcggctgcggcgagttcctgaggggcgcctgcggggggcgtccgctccgagcgccgaggagccgagcggaggaggcgtcccagggacacgcaggggaggccggccggcctgcacggggcgctcccgcctcgggggccctgtctggcgcctcagcgcgcgccccgatggtcacctgcgcccacctgggccggcgcgcgcggctcccggcagctcagccgtaagtgccgccgcctcccgcgccgcgacctccgtgccgggcctgccggggctctggtggggctgggtctggcggggccgggtggccggggcatgaccctgtcgcgatagggtccccacgggagggtcgggagccggcagctcgcccagggccccaacgcccaggatggcacggtctgcccttgccctgtgaaaacgcccctgggtgagagacgcataagctttccgaggcccagcctgcaaggagagggagaagacgcattgactctaccctaaaggcagagaggggctgccacgctcgcactgcagtgaggccacatcagagggtctgagcgaggggcggtcctgccctccaggggacaccgggcgatgtctggggacgtctgtggttgtcataactgggggcagttcctggcatggagtaggtggaggccagggatgcaactcagcaccctgcccagcccagagaatgacccaggctccagtgtccacagcgccctgagggagagacctcacttatacgttagcaccgctgtcctggtgataagacagcaagggtccttttttttttttttttgagacggagtctggagtgcaatggcatgatctcggctcactgcaacctccgcctcccgggttcaagccattgtcctgcctcagcctcccaagtagc

SEQ ID NO: 66760 - DNA, 2123 bp, Homo sapiens
cggcaccacgccgggctgatttctgtatttttagtagagaaagggtttcaccatattggccacgatggtctcaaactcctgaactcagatgatccgtccacctcggtctcccaaagtgctgggattacaggcgtgagccactgcgcccagccaaatgtgagggttttaatgaacatctcatatcttctggttgatttgagcaaagctcctgccccctgccaggctttgggttcggcctcccccagaccgggtctccggattcgcagccccctgggcggggtctccatgtcgcccgcagcgcgatgacgtcacgtctgcgggtcccgcccccacgtaggtctcggcccttcggacccggcgcccagcccccgttcgccctgccaggcccgggccgcccgcttgcatccacctcctgtccggacaaggggtcgcctcgtgaggaaactagtctggagttcccacgcccgtcccggaggaggacgcgggcggggcgcccgaactgcggggagagggcgattccgccccgggctgaaaccagttcgcccagaagccagtgtccccgcagggcgggacagccacgcgtgttcgcaacgctcccgtcactcaccggcagggggtgggccctagggaactacccagtcaggacgggcgggggcggggccgagacaagtatccaatgagggacgcccaatcggaatccggggaactgcccaatttacagcgccaggggacggactggggaattctccaatcagagtcgccgacgttggcagcactgtccaatcagaagcgcggcttcccgagctctgtctaatcaggcccctgggacgggacgcctctgtcctagccgtgagtgccccgcctgcccctagcggtccctggcgtcccggttcctgtcgcgctcacctgcgccggtagcgaagaaatcgccccgggacatggtgagtgtggcgcaggagaggatcccggtgcggggcagcaggaaccggcgaccgcccgagaccgcggcttggggggagctgagggacgcggggggcggccccggcgagggcggcgcaggacgggagcctgggccccgggggtcccgcccggccccgcctcccgcgctgaggtcgcggctagggcgctccgagctccgggtccccgcccgcctctggccccaaggctgcagagcggggagcggcgcccggagcccgactccgtccccgtcgtcccggggtccccgcgtccctgcgctcccgaccccccacgccccgcccggggccgcgacgcctcggagcgtttcgctgcggcttcgggacccccgggccgcgggaggcagagtcgcccgagaccccgaggtgcggtccaggctcccccgggacccgccctggggccgacgccgcggtgcctcctggggtgcgggtccctggtcggtgccgcctccgctcgcgctcccgcggctcagctccttggaggccccgcgcctccggccgcggtctctgggggaccctgggttcctcccgggacagcccgggagcggtggggcctcggcgggggcggagacgcccccacctgcaaaggcagcccctggggcgtgcgaggtttcctcccctgagtcccggttttccttcttgaggacttcttgtcccctctgaccccaagatgcctggggtaggtaaggggaaaaaaaacaagggttcctggtccctgggctctcacacacaaggaagaaaagtaactgaaaagactagagaaacaagggagagcgaggaccccaaaagcaaacgcacgcagacccacagcggggacgcccgggaggctggtgcattagtgtcctcggactgctgtagcaactgactgcaaacgagggggctaaaaccacggaaatatattctttcacggttccctagaaagtgtggatttgaagacgtttctcagttctgttttgagtactagcaatgggattccttgctgaggcaacacctgagttgggggtgggagggcgtccgtcgtggtagcctggccagacttgacccctccctgggtttgtcactgtgaaaagattttccttttttcgagtcagcagtttttaggaagtgaaacgtacatttaattagtagaagttggaagataaaatattt

SEQ ID NO: 66761 - DNA, 1376 bp, Homo sapiens
aaaaaaaaaaaaaaaaaaaatcaggacactgacagcacgtgctccagcacggggcagggcctccatggggtccgcgcccacgcggggcagcgcggtgacgtcacggctgaggaccccgccccacgaagggctcaccccacgcgacccacgccgctcgctcgcccctcccctccacgcagcactccggctgctccgtggggaaactgagtctggacttctcgtgcccgttcgggagaaggacgcgggaggcgcggccgagctgcggggagaggttgggctcaccccgggccagagcgagttcgcgcaaacgggagtgtccaccgctggcgggtcagccactagcgttggctacgcgccggtcactcgggcgacaggaggcggggcggcgcggaagttatcttccaatcaggtgctccgggggcgggtccggaaaactgtccaatcaaggcacggggcggacaccgggaagcggattgcaggtttgcagtagtgtccaatcgaaggccccaggggtgaagggggcgtgtccaaaacgctgtccgctcagagcgttgaaagggcgggggcttagagattgtccaatcagggcgccgcttcctgagctccgaggccccgagggcgggacgtttcgtcctccctgccgcgcgtgccctgcctaccacgagcggcccgggagtacctgtacctttcagctgcgccggccgcgaggccacggagagctcgccttggagagcccaggagcaggggagacatggtgagtgcgaggcaggagcagagccaggggacggtcggagcgacgggaaccggctggaaccagagtccgccgaagtctgcggccgggattggctgagggacgcgcggggcggcgcaggactagcacctgggacccggggacgccatcacagcggccgggctggaggactgggggcagtttggggggacggaaggggcggcaaggagcttgggggtaacttagggggaggcctgggcaggaggggggctggaggtagtttggggggacggtaggggcggtcaggggtcagggaccagtttggggggacggcaagggacggtcagcaggttggggatgttacgcgtgtccgtataagaggtcacctgagcaggcttagtgtgagccacaaggctgtttactcacttgggtgcaagtgggctgagtctgagaaaggactcagcaaagggtgatgggattattattggttttatttttttattttttttatttttgggacggagtcccgctctgtcgccaggctggagtgcagtggcgtgatctcggctcactgcaacttccgcctcccgggttcaagcgattctcctgcctcagcctccggagtagctgagattacaggcgcccg

SEQ ID NO: 66762 - DNA, 1806 bp, Homo sapiens
ctctccccgatcccctgactgcctctactgtcccccaacacatccctcgagcccgactccctttactgtccccccaaacttccctcaagcccctgatcgcctctactgccccccttaaagtgcccctgagcccctgactgcttctgctgtcccctcgagctgcccccaaactcccgactgcagctactgtccccctaaactgccttcgagcccctgatcacctgtcccccaaaactgccccttcaaacccatgaccgcctctacggccccctcaaactgtccccgagttcctgaccgctgctattggccccctaatctgcccttgagcctgactcccttccactgaacccccaaactgccgccgagcccctgaccgtgtctgttcccgcaaactgcccctgtgccccttaaacctctactgtccacttaaattgcctcaagcccctgaccacctctgctgtccccacaagctctccccaaactcctgacctgtactgtccccagaaactacccctcgagcccctgaccgcttttgctgtcaccccagactgcccccagccctacccctcggccgctgtgaccacgtccccggggcccaggcgctcgtcgtgcgccgccccgcgcgtccctcagctttctccggctgcgaactcgggcggaagccggttcctgccgccccacctcgccctgggcccgggctcggctcccgcccggcactcaccatgtcccgcccgctcctgggctctccagggttagcgccccgcggtccagcgaccggcgcaggtgagcacgacaggacacctgagccgctcggggtaggcggggaagcgcgcaaggcagaggggaactcggcttaccgtcctcggggtctgattggacagatctcgggaagtggagactctgattggacagtgctgtcgactccgcacccctgattggagaattctccagtccgtccccctagcgcccttgattgggcagggctccgcttcggattaacgtctctgattggacagttccctaggccccgcccctgcctgtcctgattggataattctctcctcagtgacgggctcgtcgagaacacgcgtggctgaccctctagccgggcagccgcggatctgggagaactcactccagtccagggagggcgcggcgtcctcctccctgactgcacggcaactccagactcagtttcccctcggagcggcccctcgtgcggggaggagaggaagggcacggagtcccatggggcggagtcctgcgtgggggcgggacccgcgtgcgtgacgtcaccgtgctgtcccgcgtgggcgcggacgcctggggtccagagacctggagatctggagaccagacgacgaggccccaggaggccggaccccaccaggcgctccctgtgttcttaaaactctcggccgggcgcggtggttcacgccggtaatcccagcaccgtgagaggcggagaccggcggatcatcagaggtcaggagttcaagtccagcctgaccaaaatggcgaaaaccacttctctcctaaaaatacaaaaattagctgggcacggtggcgggcgcctgtaatcccagctactccggaggctgaggcaggagaatcgcttgaacccaggaggcggagattgcagtgagccaagatcaggacactgcactccagcctgggcaacaagagcgaaactgagtctcaaaaaaaaaaaaagcagccctcccacaaacagaaccacgtaaggtcatgaagagagaggtctcacatttatatgcttaataacgaaaaagactctacaaaaaccac

SEQ ID NO: 66763 - DNA, 1957 bp, Homo sapiens
gacaaccaagtctgcagacattgtccagtgtcccctgggcgtaaaatttctcctcccctctttgataatcactgctttagactctatttggtcttagagtcttttctctgaagtccatcattttatccgccgtaaccctgctgtcttcacttaaggggtccaagacgtttacaggagggtgataatggtgatgatgagctgccaataataatccacacacagcactatttgacaaatgcaggtaatgttatgtattttacagacctggaaactgaggcacttaggggcttggcaacttgcctaatatcacccgagagctgattaaggcttggggccaggactgggaccccaggatgaagcccagctgagcagaaaacctctgtgcacaggatgcagcaatcaagataataaaaatcaactccgactgagaaagtatctgcctacacattcatcaggctgggaggacagacccagatggtatcagttggaaaattaacagaaaacagtatttttgccaaggacacctttttctgagccatcaatgtcttctagctcgctaaatgccttccttgcccattacaatcatacacagtgattgacattttatcagtaagaataaacttcccttttccggccggagggtctgattttcttggacacagagaatccgtctccatttccaacccaggtgcagggctctgataagcggtttccggacataacaatctacagcggtcttatcttgtggttcccaaggaaacaggtcccggctgcacttcgcagcccagacccgagggtgacccctttacaagcttgctctttgccaaatggaaaccacgcagtatttacatttcacctaaaccccacccttccctccaaatccgatgggttactcaggcctaggatcctcaggcctagggggtcaaaacgccccgcgtccccaaccaagacccctgaagtctagcggggttccactggcctccggagcctcctccctggggcgcggtgccaggacttcgccattaaacgagcccgccccctgcactttgaactctgcccccatcctttgacccaaacccccctacgccccggcatcggagtccccttgcttggcctctgccacgaagatacggggccaggtccagcagtacaaggaggagaaaccgctctcacgggaggcgctgcggccactgagggagacggccgccgcgggtcacagacggatgcttccgtttccggttccggggcggctgggagctgaaaagtgggctagtaatgagcttgggattggtggagcctcaaagataggcgggacgacctacgtcgtccaatcgctgagcaggaaaagctagtttccgccgtctgggagataattggcattgttggcagatccgcccctcgagggcaagtctcgggacagaatcgcgctgtgggcgtggcttgtactggatcctccccggggcgtggctaaaacaagaccgaggtcccgggacgaggttgggggcgtggtctttcgcgcaatcctccaacgcccaattaccctgataaacaataaacgctaaaataagtaataaatgctcatttcctccagccaacacattcctcgtgataacatactcctgcacaaagatattcccattgttgggatttttcttccttgaatgtctgttatttcttccagaaataaggtcatttttatgcatttacatgtggcttttcttattaatgagtgcgttgtgatgttcccttctggccactagatggccacgtagctcacattttcaaattcgcggatattttgttttagttgctttagacataggtgtccaatcttttggcttcactgggacacattggaataattgtcttgggccacacataaaatacaggaacactaactatagctgatgagctaaaacaagacaaaaattgcaaaataatctcataatgttttttt

SEQ ID NO: 66764 - DNA, 1286 bp, Homo sapiens
gtatctaagaattggggtgacagcgctaaagattgaacccacccacctcccactcctcacctccagccataagccacttccggacaaggctaaaaatgcgtaaaacaatgcaactactcgccacctatccctgcccaagttccagcctctgagcctcaagccccacgccctcctaaatatccccgcccccgctgggaccccaaattgcctatagctctgcaagtccgcccttcccggcagcgggaccgaaagggtaaagcagaggctcccggctcgctgagtgacagcatggccggcggccggggagagccgaccaatcagggagggcgtacgcgacccacgtgcgtaaacggcctcgctattggccggcgccgccagaggcctgccccccccggagcccgaacccacgtgcagctactgcgccttcattgatctgcttcgcggtccaggtggcggctgggtggggcctgggcgggacggggcggggacaaggcgggacgaggcggggcccgatgggtcaaatggcccccggtgggggaaggaggagtttcctcttggcctgaacttggctgacctccgcagcttccgcccggtgagggacgtgagttgccaggcgtgttctagggggctggggggactccaggattcccggccggggaaggggctgcaggggcgtggaggggcaggactgaggcaaggaagaagctgggtgctgcagcagggatggaggtggagagaggtcgtttcttctgtctgatgaattccgcctaatgcacctggctaactcctagtcatccttcaaaacccctttctagtgatctccctgcgctttaggaaattgtctcaaaactaaggttgagctttggcgaccttccctgggctcccccgtccctgactgcccccagcagggagtgtatgtgcactatccaccccagcctcctagggtgaggcctgggaggcaaggctcagttctttctgggtccccgcccccatgaatctgggcagctggaggcattgataagtgaggacaggacctagggaacgcatgggagaaccgcaggattgggtccctggagacttaccaaactgggaggtgcgggtggggtaacgggtgccttgcttccctggcactgccttattttctgtccctcaagacctgccgtctccttgttgttttagactctggctaaagtcttggaggctactgccttgaagatgacctctagggaccagcccagacccaagggccccccgaaaagcacttcggtgaggagggcatgtggtgg

SEQ ID NO: 66765 - DNA, 2899 bp, Homo sapiens
gcatcaccctagccctctattcccaacacctggcctgcaaccctcctccgttctccccaccccagcagcccccaccctgaccaggcctttgtcctctctcccatctggaccacagccacctcctccctctgagcagcctttgtttttggtgatcttcaattggagcctggccctccttccctcaaaccctcccctggctccctattgccctagggataaatttccagctcttcaccctagcactggaacctctgcaaccctgccccagccagcttcaccttcctccaccagatcacaccacacccccaaccccctccagccaccctggccagatcacctaatttgtgtcctttctttcccacctctgagcctttccctgcttgttatctcttcctggaattccctccccctccttttatgcctggagaaagtccatttttttcaaggcccaacccaaaaactgtctcctgcaaaagccttctcccccagcctcctgtcttcttcgcctcctgtcttctccatacgcgcgtacacacacacacacacatacacacactggatataaactgcttggtgttggtggataaatggatgtttagtctacgaacacctccacatgctgcaagaggctggattcctagagaagatccagccctaggccttccagggaggggctcccagagcatctggtggggacagaggtacagggacacgtaccctcccagggtcacatagggtcagtgtcagcacaggagcgagctaaggatgaaggcagagccgggcgaggaacaggggcattgcccggtgagtgagctgaggctccctagagcaggggatctttacccagcagtcttcagatccctctaacaggcacactgcaccggggagggtaaatacagatttgtggattgcccgagaagccacaagaccacacacgcacacaggaacacaccccatcccttagtgtgtgatccgccaggaaggaggagtttttgctctgggcagcaacatccccaactttgggagcagcgggtggaatttggggagactctgctgccagcaactgtgtgcatactggggaacccttggccgcctgtgactccataactccccaaaataccacatccggccagagcaggaagcagggaagcaacctgccaggcgtgttccaacgtgggtagagtccccagcgacttcatttgccacgcgggacttcacggaccccctctttgcgcctcagtttccccagctgcaccatcagggaagaagctgccagaggggaaaaggagctcagccgccgatctcccccttcccattacagagaggctcagcccctggttcctggctagggttttacgttgtggatgtgggtttacggaaaaaaaaaaaagggaaaaagctgagaagctgcgctgggaccccggattgctcagaccaccttaaatcagcctggccgccccagctactgtggaaattcctttctccgcggtggttggctgggggcgccagccaatccgctcgcgacgctcccacatgggtcagtgacgtcacataggaaactggccaatggggattaggagaccagcaaccaatggcaggaggcactgggatcagtagggccaatcggaaggcagctcggcgctcccggcggggtttggcgagtgtggcccccctccctaggagaatctgagaccctagtggacgcccgagctcgaccggattggaggagggggggctaaggctccattattatccagaaacaggggaaagcgagtcacccccaagcctggcctatctccccttcaaaacaagggaccctcgtgcaatatgctaccagctagctggcggagcagaggttgcatctttctccctatttcacagataggtaaactgaagcaaagagtagttaagtcacgctggacgcccggcgaagagctgaagctcttacccgagcctgggggctccaggaacggtctcagttttacccccaggtgggggggatgggcctataggtagtcaggggtggaggggggtggtgctgggccttgtgcctcagtttccccgagcgtggaagctggaggagagcacgggttttcagaaaaagactacgattcccagaagctcccgcgcggctcccgcccaggctgtcaatcaaagtaacgtgggtacctctccggcccgcgctctcccgcccgtcgcctccctcccgccagctcccgctccctccctgccggctcccggcccggcgcggtataattacagcccattgatccgacccgggccgggaaagcggctccctcggggaggccaagcctttggcttccgacaccgccaacctctgcctaccgccccctccagccgaactgccgggccaccagccaggcctgtcccctcccgctggccccgggctcgcgggtgacctctgagcctcagctccccgccacgcttggcggtgtgccccccggaaaaatcacacacacatttccttccacccaggaacatgaggagccatctccctagaacctccagggcctctctttgagcctcagtttacccagatgcacagtgagattgctggacaaaactttcatgaaacccatactccgtgctgttctgcctgggagcagccagggctgaccttggtggaaactcaaggaggggctcccaagtttgggaggagggggagacagcccagctctctcagaacccctgtggtcggggttggggttagggaggatcagagctgggggtgggagtgggggcaggctcagccaggatttagcgcccccattgggaagttgggatagctttctagatgttgggtggtagtatttaatagatgttggggcagggcgtggtggctcacgcccgtaatcccagcacttcaggaggccgaggc

SEQ ID NO: 66766 - DNA, 2013 bp, Homo sapiens
caggagtccgaggtggtgaatttgagttgctggggtaggtgcgaggagccctgtagggatggggcggcccgggtcaggcccaggcgtgggctggacccccctcaagggccggctaggagggagcggccgcgcagctgcggcgccccccctcctgccccacttcctgggcccgtgtttacggcccctggcgcgaccccacccgcgcttcctgccccccgcctctcccgggggaagccgagcgggtgggtgcgcccggagccgccccgtcccccgccacccccaggcagtgggggtgcgttttaaggcccgccctagatggggggcagggtgcgccctctaccgccctccaaagcgccgggagggagtgcacatccgaggggggtagaaacgcgccctagggagccccctccccaagttggggggcagcgattcctccctgcaaagtcctcttgggggaggggtctctctctcggtgctcgaaatcttccgggggggcccaaccccagattcccagcgcccttcctcggggacacgctcttccgggaggggtgcgcctcggatcaccccccccaccacaggcccccaaaggatccccgggctagaggtgcctcgcggggcttccggagcgccccaggcccgaggccaaggccgtccgaggccctgactgtcccggcgggttggggggggggggcgccaagccgggagctgcggcgggggggctcggggcccggaagctggggtggatcgggaactggagggggggtgtccgggggccggcggcaggaggggaggggggtcgcgccgggctgggagctggagagggaagacagggccggggagttggggggggcgccgggccggaggcaccgggcctgggggttggggggcgcggggccgggagccgggggtcgggggcgtagggcccggatccggggtgggggcgccggccggacgggccccgcttaccgaatgcctgctttgtggaaacatcatgtcaatcgcggcggggggcgcgggctgcgccccggctgtgcgccccggctcgggctgctgggggcgccgggcggccgcgcctttgtcccggcgccgatcggcagctcccggggccgccgccgcctcccgcgcccggcctcgcccgcttcctgcgccccctccccgcgcgcccggccccggcgcgccccgggccccgcttcctgcgcgcccggcgcccctccccgcccctccccgccgcccgcctccccgctccccggccccaccgctattgtctaatggcggcgacgccggcagtggccgcggctcggctgctgcggaggcttcggctccacctgccgccgcccgtgccccgtgcgcgccgccgaggggggggacgcgcgcgcccggggaggcctgcggatccccacgccggcccgcctccccgtggcccgcccgccgcggtgaccttgggcccggcccgcccccgccccgggcagcggcccccgccaccctctcctacccggcagccggccgggcctcggtttccccatctgtcaaagaaaagggacccggctgcccgcgtcgaagccgccggccctgctgtggcacgacctggacgcgtgccacggacgtgctctgtgaccttggctctggctgggcggtggttcttgctgagccttagtttccttttctgcagaaaggcagcggtaatgccgccttcctgagggaagccattcttgtgacacatttatagaacgcctactgtgtgccaggccccgctgctccagggccctggggtggggcggggcgggggtgggtccctgccctggtggtggtgcctggagacagacagagacaaattcacaagctgaattcctggcaggtcagatggtggggacagttctgcagaaaaaccagccgggagaatggcagggtaggaaggtgcaaagttaaagaggtgggagggaggatcagagacggcttcctccacccctaaagcgacctgaagaaggagggagaacagggggatggggtacagag

SEQ ID NO: 66767 - DNA, 2087 bp, Homo sapiens
gattacgggcgtgcaccaccacgccgggctaattttgtagttttagtagagacggcgtttctccctgttggtcaggctggtctcgaactccagacctcaggtgatccgcccgcctcggccttccaaagtgctgggattacaggcgtgagccaccgcgcccgacctccattaacgctttttaatggatgagtgaaggttcctgtcaggcaatgtcagggcgcttcccgggggcagcgactgctgcccaggcacctggagacccagagagcgcagcggccgcgtgcgcgcctccgccaccgcgcctgggccgagccgagcgggaccgagcggggccgaacggagccgagcggagccgagcctggccgggccgagtccgccacattcccacaatcccgggcggccccgccccggctcccggctgcgcgtcccccttcccacgtcggcgcaaccaaacccgcgggccccccgccctcgccccgccccgcccctttcgcgcccgccgacgccccgcccaggccgctagtcccgcccccatggtgggcgcgcttggccgccggcccctcccattggccgcaccgtctgcccgtcgcgggctgcgctcccagcctgctaggttgtccggcgctgtcgctcggttgcggcggctgcggttggcggtggctgcggcggcggcgcgggctgagtgcggccgcgcgggagtccgcggctggcgcggcccgagcggggacccggcggctcgccaggcggcggccgaggcggggcgggccggcccggggccgagggccggtggccgaggccggagggccgcggcgggcggcggccgaggcggctccggccagggccgggccgggggccggggggcggcggcgggcaggcggccgcgtcggccggggccgggacgatgactctggagtccatgatggcgtgttgcctgagcgatgaggtgaaggagtccaagcggatcaacgccgagatcgagaagcagctgcggcgggacaagcgcgacgcccggcgcgagctcaagctgctgctgctcggtgagtgcggcccccgggcctgccggctgcgggccctgccctgcctgtgcctgccctgcctgtccgggtcgggccgggaccctccggggtcagccctgcctgtgccgtccgggtcgcgagaccctccggggtcagccctgcctgtgccttccctgcctgtccgggtcgcgggaccctcgagtgtcagccctgcctgtgccttcactgcctgtccgggtcggggcggggccctccgggatcagccctgcctgtgtcgtctgggtcggctcgggaccctctggggtcagccctgcctttgctgtctaggtcggcacctgggaccctccggggtcagctgcgggcccctgatttctttggggtcagcccctgccttaactgttcatgttggcacctgggactctccggtgtcagcctgtgtctgtcctgtctggatcaggcccccgatcactcctaggtcagctcccagcttctgctgtctacattgggcctccaggactcttcaggatttgccctctgttccttctcaagggaccagtccctccctgcacagggaccttctgaccttaccccaccggagtacccacccctcgctaccccttcagggccagacctttgggctgtaacccacagggcacactcacccctcactgctcagggccccgcgttgacccttccctccaggcagagccctgtacactccatgcaggccctgtaccctccatgcaggccctgtacacccccccatccccccgaagactcctccgtgtcccctatccccacattcccttcagggccattctcctgccttcctgttccgggaaaccccgtactcctcttggctggaatgcaccctgtgggaaaaagacagtctttcctctcctcagggttccgctcagctgagggtggggcggttgacacctgagggagcctttgcttgttgtcccaagcagctatctcggcagcctcccccgcccccttccttagagtcctggtgggagccacgctgagtcctcgttgagagcagccccccacctgccggctcctccccac

SEQ ID NO: 66768 - DNA, 2357 bp, Homo sapiens
acagctactcaggaggctgagacacaggaattgcttgaacccaggaggtggaggttgcggtgagctgagatcaagccactgcactccagcctaggtgacagagactacatctcaaaaacaaacaaacaaacaaacaaacaaacagaattctcacatgctgctggcagggagagtgcttgattctttatcattatatctgaggaaactgagactctgagaggtgaagcgacttgcccaaagccacacagctgggaaatggaggagttgggatttgagcccaggctcttaatcggcaccaatgccacttctcacttgggacagaaaggaagccctgactccttaggcagctgtacggagcctgggatgataacgtgctgagagccagggctactgtctgctgcaccctggggctcagtctccccatctgtacaaagggacgttccttaggtacctccagccctgagacactgggttttaactttaaatttctgatgaacaacaaatacttttttagtataagtatgccccaaatatgaataaagataaatataaatacctgccaccgacccctgcacaaaccgcaggttccagactacaagtcccacaacccactgcggcctcccttaggaactgactatcatgactttctatttttcattcattcattcaaaaatggtataggccacccgccgtgcgccaggtcttgtgctagatgccggggatacatcatatgcacaaaacagacaaaagtttttgccttcgtggagtttgacatctacatcctcgggagttttaagtgatttttgtttttctcagcaatttctgccaggacgactacagttcccgtgaccctttgtgtgtttgacgggactacaactcccagaagacctagcgcgccaggcaggcacttccttttctctttatccccaacttccttccaggtcgcaaggtcacgtcctgtccccacctttcgcccctcaccctagctcccccaacgccaaagacaaggttaagaaagtgatatcgcgaaatagttttttaaagcattttattgcattttatgacttggagtttatgtgaaacctcaacggtattagccgaacagcctgccgcaccttccgggagttccagagtgggcctacaactcccacagggctccgcgagcgccggacggacggactacaattcccgacaggcagcgcggctggcggggcggttcgccgcggtgcccacaggacctcagggcgagtgcgggctgccccgcgcggcgcccgcaggaccccggcggctacccatgccgaggtgagtccgcgggagccgccgccgccgccgtcccgtcccagctgccgccccgcgcggccccgccgccggccaggatgctggaggaagcgggcgaggtgctggagaacatgctgaaggcgtcttgtctgccgctcggcttcatcgtcttcctgcccgctgtgctgctgctggtggcgccgccgctgcctgccgccgacgccgcgcacgagttcaccgtgtaccgcatgcagcagtacgacctgcagggccagccctacggtgcgtgtccccggcccaccctcggggctccccgggctccccggccacgccactccggcccggcgatccccaggccgatccctagctccggcctgggctgcccgacccatgctcaggccccaggcgaggcagagccctgccgccctggacccccgggcgccctggaatccctgctctccttgcctagcgcccagggaccccccgcgctcgctcccacagcccccggcccctgcctaggtctccctgccccggaacccatggccgggccaagcgtcccgcgtccctggagccctaagtcccctctctcctgtccccagctgggccggcgtctgcctgccttgccgagtttctccctcctgggccccctccgccccttaggcttcctggtccgggctcacttgagcagacgctcccgtcctgacctccagctcccagggtcctgttctggagaccatctggttggtctctggattcactgggtcacgtccgtgttcccaggcctctcgcctttagctgactgcgtttggagttaaaggtccctgcactgatttctgccaggctgagccacccgacgcggtggtccagcattccccaccccctcccacggccctgggtgccaagtgcattttgtccagtgcccaaattcaactcccctgaattttctcgctctagtcaccggcccccacgtcaagggcacatttgtccccagacccctgacgctctctggtcccagttcgtgagtcatgtttcagaatctgctagcccagcttccctggtctcctcccacgtccccagtt

SEQ ID NO: 66769 - DNA, 3525 bp, Homo sapiens
ttctattctttctcttttcttttctttttttagacatggggtctccctatgttgccccggctggtctcgaactcctgggctcaagtgatcctccagctttggcctcccaaagtgctggggttacaggcgtgagctactgcacccagctcaagcattgttaatagggatacatataacataggtgaagttcctgcacacagtgggaccacagagatgctgtcatcatttgtgattggctcagggaatcaggcaatgaattgcccattggagaagacaaggaatagaacagagggaagagagagattaaaggttaaaagcactgggcgctgtggcttacatctgtaatcccagcactttgggatgccaaggcgggcagatcacctgaggtcaggagttgaagaccagcctggctaatatggtgaaaccctgtctatactaaaaatacaacaattagccaggcgtggtggtgcgtacctgtagtcccagctactcaggagtctgaggcaggacaatcgcttgaacccaggaggtggaggctgcagtgagccaagattgtaccactgcactccagcctgggtgacagaatgagactctatctaaaaaaaaaaaaaaaaaaaaaaaaaaaaaaaggctggagggagttgtgtgttgcctggcaggtccacgggggacagagatccctcctacccacctgtttccccccagttctgtgccagtggggtcagcggggagatcaggagaaggagctgctggtgggttcagttgctttcgaggtgctggggacaggtggctgcagggagagtgagtgaactgtggggtggaccaatacaagggccaccctgtggggtagtttggggggctatctgggttcagggaacctccacagccccgtccctgcctcccagagcagcaggtacctgcctggggacagcaggcagccaggctgggagctggggggttggggaatctagctactctctcatccagtcccagctactgctgctggccaaggctgtgacctttctcccagatcctggagctgagtaacagttactggaaaaataagttggccatctgggggtggccacagccccatcctcttgggtccccagcctggctgctagaagtgagggtaccagggctgggctgtctgtcccatacaacagtaccatagccaccggtgtgaccagaccaggtacctcctccccgtcacactctatccccaccatgccacacttcccccactgcaggggcctgaaatgacagccccactcccatacccggacaccaaggaaggcgtgatgggtgggtggagaaagagtcccgggcatccctggcagccctgaatgtttcctctggccccagtctcagagacgcccatgcctgggaagagcaagtcagcaacttggcccagaaggagactttgacagcgaggagggctgcatttgaatttcagctctgtcactttttttgcaggtgactgagcaggtcactccttttctctgggcctcagtttccccctctggaaaaatgggaataatgaagcaccctcctggccggtttcgcaatgctcaaatgcaatatggttgtgctgagtgcaaagcgtggtcctgagagggcactcaatacacatgaacgattcagccctaagttctcgaaatatgttcaaggtacccgctgcgggtctagctctgtcctagacacaggagatccagcagcaaacaaaagtgacactgacacctgtccttctcgagggtttgggactccagggagagacacaaaccgtgaattaaaatgttaacgttcaagaaggatgaatgctataaagagaaatgaaactatcgttagatcttattattgttgtgactgttactgttgatacccaattgatcgtgattatagccctgattccagcttccacagttattggaggtatgcaattatttagcaccaactgtgtaccaggctccaaatacctatagccccacaaaatcatttcccagaagagaaaccaaggtctcaggtctgtccaagattgtgagctggttgtgcagggcaggcctgggagtggatctgccagatggcacgattcccggacctgcccccacctcccagggggagctggcatcctcccagctggacctggcccccccttggagcttccccaacctggggatacagaagggcccccacggggagggaggcagccagggcaggcagtggcacagagcaaggagggagcagggcgtctgccacccgcccccacggctgcctgggaaacgccacggcctaatcctggctcaagaggacacgttgtaccagagattatataaaccgacctctccctttgtttgtttaattctttcaggctttttccctcatccttctctctttaatcgctctgccaacagggctgggggtggggtgctccgggctaggcctcttccaggagggagggggctgcatacccagcaccccccactctggtcatacccctacctggtttcccagccacccaggcccgctcctcccccagtcacacacaccaagtcctgccggtggcaggggtgtggggctggacaggcttggccagtggagtgagtctgagaggccaaggccaagggcactgagtcaggctcggactctgctgggcccctaggatgtggcctctccacttggcactcagcttcctcttccaaaaaaatgggatccctgtggtcccaacccccaggttgttgagaacacgcccatgcaaggagtgagcatggcccatggtggatgccgggtgagagccgctgcctgctcccagcccacactacagacacccagggaacagtttcgccctcagactggccctggagcaccgtgactgtggtggccaattgggcctccgagatgtccacgatgcctggtgggtgctctgatgtggaacactgggcaccatcacccagagagggcaaccaggggtgtctggctttgtgctcacccaccgctgaccccgagcctggccctggccctcaccaagacccagtatttccatctgtgtcctggggaggccaacacgaacctccccaccatcagggcagtccacccacagaggggcctgggttcccatcctgaccccctcctttaccacctctgccaccctgtgctgcttggttgctctgtgcctcagtttctccatctgtaaagtggggatcatcatagcagtcagaccccccaagaggattaatcgtgttaatccttataatgcatttattcttaatttatattactttttttttgtagagatgggcttttcccatattgcccaagctggtctggaactcctgggctcacgtgatccacctgcctcggcctcccaaagtgctgtgattacaggcatgagccaccacatctagctatgcattttagaacgggccctcacgtatattaacatgaaagtatctgctaactaaaagaaaataacagcaacagaaataagtaaagaaatggccagttgcagtggctcacgcctgtaatccc

SEQ ID NO: 66770 - DNA, 1021 bp, Homo sapiens
gaacccgggaggcagaggttgcagtgagctgacatcgcaccactgcactccagcctgggcgacaaagtgagactcagtctcaaaaaaaaaaaaaaaattaaaattaaaaaaaaaagtaaagaaagaatccaggcccattgcacacatgggaaactgaagttgatgttcccaaagcaagtcagaggcagggctgggagctgagaaatcagctgggaacctctcaccctacacctccctggagcccagtggagggaggctgggggcaggggacagagaactgaggtcatggtgccaggtcccaaggggcccaggctcacgttcctgcctgatggctgcaagctcccaaacatcccactctgagcctctccttcccttctctgtacgacaagccccagggtggcacagggtgggcggggtgttggggtgcccggccactcccagccctttacataacctgcggcacagcaggaaatcaaagtgccaacaactgcctcctcagtaaccgacttcctgtcgttacccacccaccttgggcaccagctgcctgctccctacctccagtggcagaggggtcccatccctgaccccagggtttcctccccaaggaagggcccccgtaccctaggctgctccatcatgcgaccctgagccagtgtccagccagctctggcctcagttcctccatccagatgtgtccctgggctgccaggaccgtcaccctgctcctttcggccactggctgggagactgcatactggctgccccagacctgaggctggaggtcagagggcaaagggcaaaggccaaggaattccctttttttttttttttctgtgacagagtctcgctctgttgtccaggctggagtgcagtggcactatcttggctcactgcaacctcagctcccaggttcaagcaattctcctgcctcagcctccctagtagctgggattacaggcatgtgccaccatccctggctaatttttttttttttttttttgtatttttagtagagacgggg

SEQ ID NO: 66771 - DNA, 1139 bp, Homo sapiens
ccgcctgtaatcccagctactcgggaggctgaggtaggaggattgtttgaacccaggaggcagaggttgcagcgagccgagatcacgccactgcactccagcctgggcgacagagtgaggctctgtctcaaataaataaatattaaaattaaaacatgttaaaaatgtaataaaaagccagccctctgaaggactggcccatcgtagcaagtcaataaatgtttgttgagtaaataacaaaaataatgacgcagctccttccttgggcatgatgtcttcccgtttccaaaactgctagatttctgcagctggcttctcagcactgtggacatccgggccagatcggcatgtgtgtgttggggaatgtgctgtgcatggcgggaggtttcgcaacatccctgcctccacctactgcatgctagcagcaactccccccacccacccacccacccctgtcccagtcataacaaccaaaaatgtccccagacattgccaagtgtcccctggggggcagaattaccccgttgagaaccactgcccggcatcgcggttactgttcaaagttcccttttagcagaagagaataaaggctcagagaggggcaggtctagcgcagggtcacacagcacagtggggtggagccaccttctgtgctgggcatgactccgggcacagccgagccgaggtgggggccaacaacccctaccatgccagggttccaggaactgccagcaggggcccaggccatgccactgttgcaaaatctgagggcggcataccggcaagcctgagcagttgccacggcctcagccccacgggcaccgccaggaaagaaaaatgcaacttactcctgggcaccgggacaaccggtggaacctcaggcgtgggacggctgccggaaagcagggcccaatcagagacagctgccttgctgtgtggcctatcagaagatggctgcatatgtcctggccaatgagaatgccccagtgaggaaggccacgcccccccaagtgaagcccattggccccatgaaagggcttgaggtgggtccctttggtcctaaaatttcttcttcactctgttggttgcagacgcaggtcagctgaggcttcctgatgtgtgggcactgagggtcgatc

SEQ ID NO: 66772 - DNA, 1694 bp, Homo sapiens
aattgcttgaacccaggaggcggaggttgcagtgaactgacattgtaccattgcactccagcctgggtgacagtacgagactctgtctcaaaaaaaagaacagggcctggcacacagcaggtgctcaataaatgcgggtgcatgaattgctgaaaggcggctgccattatccttacccctccatgttccagatcagtccctgtccccctttttgccctccttctcccactccagccaccctccccagccctgggggaaccccagacgtcctttgggtgggagagggaggagcaggtaggaccagccacctccagcagccttcagcccctcgtcacaccgacggccaagcaggagtcctggtgcttttcttcttgaatcagaggagggggtataagcccggcagtggccacgcttgtgtagggggaacttcatgccacacggttgcctgagctcagttctggccaggggctgtcctgtgggatggcttccctggaggtggtggggatggttctacgtgggtgggtgcagaaatgccgtggggtcccgaccccacactcaacctgtaagcccagctcagaccatcttggtgggggtggtaggcaaggccctggcgagccccctctttccctatttctggcccagggtccccgcctttagctctggactccaccagcaaaaccccaacgccacgaggttttcaacgatgaacagatggtcacaggcggtgggggtgggggctgagctgagtctgaggggacccagggtctctggagcagtcctgctgccctcccagtggggaaactgagacagggagccccctccgtgcccctgtgcctggggctgggaaaccggtgccatcctcggaagatccccagagcggccacgtcatagttggcgagggcagctccggggagggcgaggaccgggcccactgccatgtcaaattcctcccgggagcggtgggggaaggagaggcagtgcttttttttgtctcccctgcatcctcacccccaccaactccgcgacagaatcaaaaagaggagagagagagctgttggcaggaagaaggaattggagccaagccgaggctgggctcaccctgaaaaatcacactctgggcgggaagagaggacagaggctcttccaccccctttccagcattttgcaaaggcggaaagggggtggcccactcaaagggcatcagacgtggccttcacggcccgcagctggcagctgccacctctcccacgagtggcttgacaggctttctacctccagacctcagcttgggccgtcctctcctcctggaatgccttcctcatccacctcagtctcctcccaggcaccacctgggatctggacttcaagtcccatggacctacaaggccaagaagggtcgcgttgcatcctaaggccaaaataaaccccaaaagcagtaatatgtaatcgatctttatttaaatattggtacttcattcattctggatcttctgcaatcacttttattcttagaaagtttgtgttaaaacatgagttatcagttgggtacggtggccccacccacccagcacccagtgtcaacccagcactttgggaggccaaggcaggaggatcacttgaggccaggagttcaagactagcctgggaaacatagcaagaccccatctctacaaaaatttaaaaattaggcaggg

SEQ ID NO: 66773 - DNA, 1141 bp, Homo sapiens
actcctggcctcaagtcatctgaacgccttggcctagttttggtatttttattagagacgaggtttcaccatgttggccaggctggtcgcgaactcctgacctcaagtgatctgcccgccttggcctcttaaaatttttacttttttttagtgatgaggtctgcctctgttgcccaggctggagtgcagtggtgtcatcagctcactggaggctcagcctccctgggctcaagtgatcctccctcctcagccttctgagtagctgggactaggggtgcgctccacacacacagctaattttgaaattttttgtaaagatgggatctctctaggttgcccaggctgatctcaaactcctgggctctagcgatcctcctgcttcagcctcccaaagtgctaaaattacaactatgagccaccctgctcggttttgtttttttacattgtttagtggtagaaagaagtcaaaagaatactttgtgacacgtgaaaagtacatgtgattcacatttcagtgtgtgtaaagtttgattggcacacagccacgtttattcatgaccatgccgtctatggcagcttttgtgcactagggcacagccaagcaggtgcaatggggatgatatgtcctgcaaagatgaaaatatttactctctggctctttacagaaaaagtttgcccacccctgagttaatgtatcatgagcactttgaacaatgctgggcacaaaatgtgcttgggattgttattcaaaatgtgtttcaggtcgggcgtggtggttcacgcctgtaatcccagcactttgggagactgaagagggcagatcacctgaggtcaggagttcaagaccagcctggctgacacggtgaaacccattttaatctctactaaaaatacaaaaattagccaggtgtggtggtgcgtgcctgtaatcccagctactcaggaggctgaggcaggagaatcacttgaacccatgaggcagaggttgcagtgagccgagatcgtgccgctgcactccagcctgggcgacagagcgaaactccatctcaaaaaaaaaaaaaaaatgtgtttcaggctgggcgaggtggctcatgactgtaaacccaacactttgggaagccaagatgagaggatcgtttga

SEQ ID NO: 66774 - DNA, 3646 bp, Homo sapiens
ggtcggagcaacactccccccacaccccctgcaacctcccccagctgcgccagacgcagagccggtgggggcgagggggcggcgcctactctgcggctgtcagaggagggggactgcgggagagcgcttgggggggcgctgcggcagccggtcccaacccgcagcggctcgcgcggcaggggcgggggcgctgacccacctcggcccggcccctcctccgctgcggaggcctcgccattaatcctgaccgggggagggggcgcccgctgccccccacttcctacgggggccgctgcgagcgctcccctgccgccccctgcctggagcccctgcgggacccccaggggacccccgccccaggtctgtcgccctcggtgtcggagtctctgtctgtgtccccgtctgtcccgtctccctgctgtgcgtgtgtgtagccgcgtgtcccccggacacctgcagtcaccggccagggctgctcggggaggggtcccgggggtcggcgcgtgagtccctctgaggtctgggtgtctttctgggactgtgcgtctgtgagatctcggggtgccagccccacaggctgcgagtgtgcgtctgtgttgacctcctgcagaaggtgtgtgtcccagatgccccaccggcttcgagcatgggtccccgtgtgcccggcggacacccacgggccgtgtgtccgtcacacgctgtaggcgccgcgcgtggggatctctgcgcgtgtccgtgtgcggtgtgtgtgtgtccgtggctgagtcgaggaggcccggcccgccggtgtccccgagtcgcctgcgcgtgagtgtgtgtgtgcgcgtgtgtgtgcgcgcgcgccgcggcgaaggtggatccgctcgctccgcagcgagcccagccggggccccgcgacctgcagccgccgccgccaccgcctccgccgctccccgggcctccccttgcgcgggccgggccggggatggagccgcagccggagccgccgcagccggggccgcggcgcggagcagcctgaggcgcgggcggtgcgcgggaccggggggagggcgggccgaggggagggtcctgcgggccgggggggcgggcgcggcgcgccccctccctggcgcgctcgctccctcccccgcgcgccctccctcgccgcctcctcccgccgcctgcggcccccccctcgccggggaccgagcgcgctcgctccggcgccggcctcgcctcctcgcagcagcgccatggtacgtcgccgcacccactttcgttttcgcccggggactttttggggtggtgcgtgggctccgggcgaaagttgcaagatctggggggacagggggcgggggccgcccggaggaggggctcgaggcggggacccccactcgccagtcgccacgggacccctacccacgatccccccccgcaccccggctgggggcggagctggcgcgcggggcgccgcgggagaccccaagtggggggcccctcgcgggcgccgcgagttggcgaggagggcggggctccccggagaaggcccccgcaaccccaggccgggcccccgccccctccccgggccagaccccaggcgggagggcgcggccctgggcgcacgacccccgagcgcgcagtccgtgggggagcccgggccagggagggggcgcacggcgggacggcgcgtggggcgggggtcgcggcggcccccgcggggtgccccggcccgggcgagcgcggcgcgccagctagcggaaaatggccgctgcggagaggggcggagagcgcgccgcggccgccgccgggcgccttgaacttggagccgggcgggcggccgcgctcggcgccgcgcaggagcagccgccccgcctgccctcgcaccgcccccgccccgcccctcggcagacccccggccccgctgccgcgcgcgcggggtccccagctgggagggacccccgggtctcggcccggcgcgccccaggccctggagcggcggtggctgcacttggggttccggtgtccggtcgactggcgtcggtgtcgtgcgcacctcgaggggtgcgtgggagcccctgcgctccgtaacgggccggcattggcatctgggggagcgtctggggtgtgcgcggcggggtggtagtgtacctgccttggggccgcgggtcccggcgcgtcggctccgccgctttctgtgtccgcgtgtgtctgcacatccacgtgctggcgcgtgttgtgttgtgagcgccgcccgcattgtgcggctgcgggacacttgtgtctttggataactgggcgactgtgcgcgcgtccctgcgggacggtgttgtgaaactatggctgggctgcgtgtccgcggagccgcgtgtccctgggtgaccgtggggtgtccccgtgtgggtgtgtggcggttggggggggtcgccagggagtggagaactgtcgagtggccgcgttccaggggacagttgggtgccgcttgctgtgtgcgagtgactggcgctgagcctccccctagggaagggtctgccttccactcccggcctcgcctcccccagttccttttttcctgtaactggggactgcctgggcggcggaggaagagcgctccctccaccttttcaaaactctgtccctttatctttcccctacgtcccctccacttcccccagccttcggggtcccccatccgcttggcccgagggggtcctggctggaggttcgggcgcgaggtggcgccgggacgcgatcactcggcacgcagacgtcgctcgccaggggttgcgcttgcgcggggacctgccccgagaggggcggggcggcaggggttccccctccctgagaggccgtggaagtcccgaggggtgggtggttacagcagcacaggggttaggacgggcccgggaggtggctaaggagacccctattatcctatgctggggagagcgtaggggcaccgggactggtcccgcagtcccgcctccagcacttgcccccaatggaccagaggccgtgggcacagagagctgttttgtcacctccagggaaatccccgccgctctccacccccaccccacccccagtgcgtttgatataattttctaaatataaaaagcccaaggccaggctggtctctctcgctttcttcttgacatcccatcatggggggctgtttgggatgtcaagaaggagagaaaaccctcccacaatgacacagaggcctcccccaacaacactcaaggtcattctcgggttgtcaccatccctcacacccactcccagcctcagactcacagctatctccctccgcactcccggagggacggttggatgccctggccttcagcacacggcatggccctctgtccccattttgggttctgtgcacagtgggacacacgtgcatgcagtcatagttacacacacacacacacgacactccctcacggtgcctgtgtctgcatgactctgcacacacaaccacacagagactcacatagacacacacaggcctgtctagagacagacgtcacacacacaggcgtgcacagacacacatgggcagacacactcacggacacaaacaccgcacttgcggggggatagacaaccacatctcaccctcctgcccttccctgtccccaccgcgtttctgcagggccgagag

SEQ ID NO: 66775 - DNA, 6318 bp, Homo sapiens
gttctctgggcctcagtttcctctcctgtaatgcctgaggataatgggtgctggtatcttctgcgcccctgggcctggggcacctgccccagcttggtgagagggtatcatttgtccttgggaagctcagagagatgaggtgaaatggccaagctttctaagaatgtgtctttagtgaacatttgacccaaggtcaaggctctgctaaggtcattgtccttatccccagcaatcccacaggatgggcatctttaagccactttataggggagaacccttgggatgggaatgagagacacagcagcctctgagctagcctgggaggatccagggagtgaaccgggggagggttggggccctgtcatcagatgccctgggggctcagacggaggcaggccaggtctctgccctgttacgtctagaaggagaacagaatgtgggctccaggtccagatggcctggctccaagccacacttgccatacctcagtcttgagatctgtgaaaagggcacacccctgaggcaggtggaaattattggatacccagggggaggctgcaagggtttatctggccagctggagatcccgcctggacaccgtcctcctggggtgctggagagacacacaggcgaggccacccctcccctgccccttgggtgctgggtgaagagagcaaattctggagcctcccgtgttagcctgggcccttctggccaaggaagggacagctgcacacaagcccctctagctggggacccgcagcccctgcctggctctggggggagaagggagccagggtgctgtgggaccagctcaccgtgcacccagggtcgtacatctttaaggggaaagaggcgcgctggccggcctctgcgcacgtcacttcttcattccttccctcccccctggctctttcctccaacttcccggccagctcgggggtgatgggggggtggggagggggggccttaaaaatccacccctggcccctcaatgtccagaaacaaccctgtcccccctctccgcttgatccgaattggggtcgccctgcagtcctggggtcctggtctagtgccctggggcattgcgtaaatacgggaggagcgggggggtcctgagacgtcgggggaggctctcctttctcgctcgcgcccttttttccctcgtttctttgaaagttgggtgttgagaagtgggaggttcggggtgggagggggagggtgtcagagggtagagagagagacagagagacagagacgggggagagaggaagagagagacggagggagagagggacagagagcgaggcgggcggcgcgagagagggagagcaggagggaggaggagggagaccgagggaggaggcggcgaggagagcgcgccggccgcggggcgggggggggggttggggggggcgggggggtggtttggaaaaatgactcagtaagttcagcgcgcccgctccggccggccctgcgcctcccgccgcgcccgggatgtattcgtccccgctctgcctcacccaggtacggtcctcgcccggccccccgccggcgcccccgcgccccccgcatcccagccccggagttttgaagcaggaggaggcgggacgaaaaaggcgcgcgtccctcccgccatccctgcccgggatgccccccgcgccgagggctggggtccggtggggggatgggtcaggctggggtaccccccccacacccttacctaccgcggaccccctacgcgggactcccgcccagcacccccaaccccgactctcgggacctctcccggatgtggggcttggtctgcagatttgcgtcccccccccacacaccgacgcactccgcacccccgccccgacactcggaaaggtcggggtgggggctggcccccctccagcaagggctctgcgggaagccccccgcctgcctctgagaggaatctagggggtcgtgattggaccctgggtctccccagctggagagaaagggacctctcatgtgttttccccgtgtccccccaccaaggttgtgcgggccgccctggccctcggtcgcctttccctcgttattggcccacgtgtgcatggagggggagggggcaggagaagttggaggcccaggagggggaagggtgctccggcggcccggctgggtcccccctcctttgcaagccccccagcaccgtcccggtattttcgctgcatcgattctggattctggattctggattctggagccgccgccgggaggagcgggaggcccggcgctccgggtctggcccgggcactgcggcgctgcggacgccctcgccagcccggcacctgccccgtcccctccccctccccctccccctcccgtagcctctcacccctggccgcactcccagactgccccggggccgagccttgtgcaatggccgagggggtgtgtggggagggggcggctccccccggggactccttccagcccaggctcccggggaccccgaggtctgcaagttccgttttctagaccgctgctttcctccttacgcagtgtgtctttaggctggagaggttctggcctcagtttcccctgaagtgaggtgcggctaaggccggttctggagaggggacagtatggcgggcaaactgtaaagtcccggcacgtggggggtgcgattccagcgagggccaggcccgtcttaagaagcactgtgtggggagtatatgagtccccggcttccgctccagggcatggtgcagtgagggaccccccacgccaggcatgctccttggtagggtctttctcaccggccccctgcagccgacagggaatgtgggagctggtgctgagggggtctgaggtctgtcctacctgtgatcccctgagtgaccttgggtaagtccctgtcccagcctcagtttccctttctgagcagctttggggggggggttcccgaagaaggcatctctttgaagttctccaagaacaactagggttcgagtgggcacgctgtgtgacctcgggcagcctttgaagtctctgggcttgtggggtgactgaggtgtccccgctctgtcctcaccagctggaaggagccatttgggagggctgagcggaggggaggctgttccaggctggggaggttggaaggctgcctgtgcaccctggaattcccccatcagggctggttgggagacatcctggttgctggggtgggttgggggttagtaagaaccccagtccaggctttgcctcagagaattgctaactcggcctcagtttctccaggaacagggcaaggaccagccaggagggctgtctgtggaaaccaaaaaacggagaggctaaaaactaaaaactatccaggggtgctgcgtgcaagagacagagatgagaagacagagacaggcagagagacagaggcagagagctcccaggccagagtggggacagcgagtcccaagtgcagggggctccctcctcccctgcgattctcctctctgccccgccctccaccccagccctgtagtggagctggggaccccctttccagtttgtcttcagcctgaatgtaatccccactgttcccccaaggcccagcctggtctggggtagccagtggggtgggctgggggactcagaaggaccctgagtgccccatgcaggagcctcccacccaagtcctggctgcctgactcagtttcccgaatcacgtcccctccgtttctctcatcttggtctctttttgtctgtctttctctctttctctctgtcttgctctgactctgtgtgtgtgtgtgtgtgtgtgtgtgtgtgtgtgtctgtttctccctgtctctccatctctgtctctccccgcctctgtttcactcccagtcactgttggtctctttgtgtctctctttctcatcctctgtctctctgatgtctcagtctctcccactgtctctgtctcttcatgtctatctcaccatccctttctcctctttgtctctgcatgtctctttgatgtgtctctgtctctctgtctctccctccctttgccttctttgtgtgtctgtccgatgtgtctctgtctgtttctctgtctctgtctctctgcccccttcctctctgtctctgtttctctccaatatgtctgtctgtctcttcatctctgtctcaccttccctttctcctctgtctctgcgtgtctccccttgccccctctctccctgtctctctctatctctgcatgtgtctccttactcctctctctctgtctctctctgtctctgggcctccctctcccccttttcccagctaattttacaacctgagcccaaccgaaaatagctcccttttagctgatccgacccggatccttctcgggagccgaggctggcggggggtggggggcatctcggtgccagcccgctctgtgccacccgggcccggcccgccgagtggggagtgggtgctggcggccctggggcattctgggagccccgggccgggctcagcggtgactcaagcgctttttcacttttactcttaagaggaactgtgtggagcccatggctcccataaatcctgccggcgggaaggccggcctccccgcgcctgctctgggcctccctccctgcctccctcccgctggcgccaccgccacgttagttattccgggtttggggccaagtccctcttggccgcagcgtggcggattccccgagccacctccatcccgccaccgggtccctgtctcattcgttcgttgtttccttcattcgttcgtcccatgccctctcggagcacaatgtgctttgctgccatttctccagcagggtaaccgaggctgggagaggctgtcctcccaccccagacccccgacctttgttggattttctagatcttccttaagcatctcctgggccctggggataggtgggggtgggggaggcagcagggcccaggcccagtgtaggttcttagagggagcttggggggtgcctaccaggagcagggggcctgcagcccctcagtgccgggagaggggctaagagtcagagagggccagggcctgcccgaggtggcacagtggggctggcagagctggggttcaggccattttccatctggcggcttgggcaggtgggcgctctctccccgtgtgccccccacccggggcctggtggcctctgattcactctctacaaggctccaccactctcccgctgtatctccctctgggtctctctgtgcatctctctctgtttctccccctcccctctctgcggcggaggtgcctctgcgcgccagggccaagcgccctgtaaatcaccaaagctgggattctggcagagtcagcgttctcctctctctctctctctctctctgtctccctccctttctccccccatctcgctctctcctcctctctccctctctccttctctgtctccctttccgtctttccctcttcctttctctctctctccccgtctcccttctctccctctctccttctctcttctctctctctttctccctccctacctccctctctgttcctcttctttctctctgtctgtctctttctttctccctcccttcctctctctctgttcctcctcttctttctctctctctgtctctctgagctggcctccctccctgtctcacaccaaatggatgggaaatgctgcctgggcctcctgccccggacacggcccgccccccactctcctgcctgtgtccacgccgacctcacctgggtgcccatctgccctgagcacacagcgtgcgggcacccaagtcctgaccagttcacatccatgagcacacgctgggcgcacacgcgtgcacactccctgacacccatacggacgaggacacagctctgcctgcctcggatctgccttgatgggggtcaccaacacacagacctagagtgcccctcacatctgcctgaaaatcttgctcaggaggtgccaaacccaatatagtacctggtatagagaaggtgccaaataactgctatagagtggtgccaaataagtgttgctgtgcttgtgattgttgctaaactaattctcctctttcctgactctggtgggtgacctgcccccacccccggaccgtttcttgccctgaaatgaagtcagcagaaacccccacttcctcagggctgctgcagattcagggaggcagcacaatttttttttttttttttttttgaggtagagtctcgctctgtcgcccaggctggagtgcagcggtgcgatcttggctcactgcagcctccggggaggcaggacatttctgaggtccacagtgcagggcttggtactc

SEQ ID NO: 66776 - DNA, 3130 bp, Homo sapiens
ctcgctgttcctctaacacgccaggtgcggtcctgccccagggcctttgcatgacccatttctccatcagaaagctcctggcctggagtgccatctctcaagactttgttcaggtgtctcctcctgcaagagaccttcctggaccccccccccaagctaaaaaacaccccccaccccagagattctctggtccctcaaactcttaaatttcttcagagcactttgcccaacttgacgttttattacatattttgctgattttaaccatccgtccctgccccagatctggatccaggtgagggccgagcccaggtccctgccaagtcctcggcaccctacctgggaccggcatgcagcaggcactcactaaatgtttgctgagcaacagaatgaatcttccctctctgggagccgttcacatgtccacaggctgtgattttctgagccaggggaaggagcggcccaaggttagagcctgacgctggtgccggatgggcctggggttgtccgtgggaccatggacaagtcatccgacccggagaagaaggcattagaactaaggctttgaaggatgcgtaggaatttgggataagtgctaagtaggtaatgagctagattctcatgaaggattgttgagtcacttttacctggaaacttttggtttggaaattggagtttcttgtcctggtttgctggcctggactttcagggtgggaggagcacagggaggtgagtgagggcatcacccagtgcatggcgtggtcgttcagcaaggtcttgggtccagatgtctctcccagctgctgctgctctctttggccaggaagtcccagtgggctaagctggggtttccaggaaagacctagccttgttccccttctccccatcaccttgcaaggaacaaggtcaccaggcaagctcccctgtctccagcaggctgcaatattcctttctgcccattgtacagaatgagagactgaggcttatctgaggtgatctgttccccagccattcagatggtgaaaatagaccttactgtcacccagccaccttctccgacagtgggtgcctcaactctgggcctcaggattggagagggagaggtgatagaactggatggtcctggctagatctgggaaaccctgggttgaggaggaaaggctgcttgaaggaggggacactagagatagggcgttgagggatgtgtaggagtttgggaggattttcagcatctagcttgtcttggttatctcttttgccggttgggcctctgagggcagtaggaggtccctggggaagaggccctggttattgcaggtcatgtgggagaaacagagtgacaaccggccaaccaggccctgcctctcacgtggtctgatcccctggggaggacaagggaggatggggcagcaggtccatgacccagttacaagctgtttgtcttcctgcctctgtaactagccggggtcaccactgacgtgggcccccacccctgcccgcctccctggcacctgtccccggaaagggcacagagaaggggaggaacatagagaagggagggacagttagggaggaggaagggaactcagatctacgaggggccagatgagaaaaggaattaagaggagaggggaagtggggagggggaattcagagagagaggggggttggggagagaaggagttggggggacagtgatccctgcccccatcatggatgcctcccctgtcccttccagcagcctcttatcacagccccagtaagcgccagagcttgggtggcagccacggccccagctggacaacattgtccgggcctcctgcccgcctggcatctcctccacaggcaggtcctgcgcctctatgggtcctctctgccgcgtcccactgtgccccccaccacccccactgcccggcttccctggccagaccatctgggctctggtcccagctctgctgaccggctgtgtgaccctggacaaaccactccccatctctgggtctcatccagtcaggggcagggacgagattggacagggcctgggccgggccccctccacctcccctttgccttagcaggttggctggggaagcgggggcagcggaaaagggccctgaggtccggtccccgccgcagctgttacggtgactcacgctttgggggacattggggtgggggagcttcgctggtacaagctgactctggtctcactgggtggggaggctattttcagagcctcagtaataggtgaaatctgatgtcctgcccctccccccgaagcaccccacggccggaggtggcccaaggggacgtggagcacagagcagggagggtgatctggcagcagctgctctgcccatcccggcctggaaatgggaccgagtccagccacatccgctggcacacacagtgggagtccagggtcaacgtctccctaccttcctgagaccccaatcttacagagaacaggctgttctgagaaagggacccgtggccttccagggggtcagggccctgattcttatcctcacaccggccctgagaccctgtgggacctcagccaggtctccgcccctctctgagccttagtttccatgccacagaacacggagcggggcctcaggctgttccctgcttcctggaagattgtctgcaatcaaaatgatcatcgcagcaatcgcgtccatagtaatgaaaataccccagcatcttagaggggccgaggcgggaggatcgcttgagcccaggaattcgagaccagcctgggcaacatagcaagacccccatctctactaaaagtacaaaaattagctgggcatggtggcgcacctggaatcccagctactcgggaggctgagacatgagaatcgcctgaacccaggaggcggaggttgcagtgagctgagatcatgccaccgccctccagcctgggcaacagtgtgagacactgtctcaaaaaaaaaaaaaaaaaaaaaaaaaaaaaaaggaaagaaaatagaaaatatcccagtgccttaggaggccgaggtgggaggatcacttgagcccaggagtttgagaccggccaaggcaacacagtgagtgagactccatctctgcaaaaataaaaattagccagacatggtggttt

SEQ ID NO: 66777 - DNA, 1266 bp, Homo sapiens
aggcgcacaccaccacacccagctaatattttatatatatatatatttttttgtagagacagggtcttgctatgttgcccaggttggcctcaaactcctgggctcaagccatcctcccaccttggcctcccaaagtgttagaagtacagcaggcaagagccactgcaccacaccagttacccagtcttttttttttttctttctttttttggagatggagtttcgccctgttccccgggctggagtccagtgacgcaatctcggctcactgcaatctccacctcccaggttcaagcgattctcctgcctttgcctccccagtagctgggcttacaggtgactgccaccacgcctggctaatttttgtatttttagtagagacggggtttcaccatgttggccaggctggtcttgaactcctgaactcaaacgatccactggcctcagcctccccaagtgcggggattacaggcgtgagccaccgcgcccggcagttacccagtcttgatcttgattctttgaccttgaccttagcatctttctcctcccccacccccactgatgagcaacaaacctgctggggttggctgtgagggggcactggggacggtgggggcagagaggtgggccgggtgactgcctgttgggagcaggggccaccgtggggacggaggttctcatcgtcacacagggccagacctctctgccaccacacatcttcctcgcccggggccccgcccccacctcctccgtgctgagctgatacaattttgaagcgagcttttctgctgcagtcagcacaacctctgggcgcctccccacccccaccctgcccctcccgcctctgctcagcaggcaggcctgtgccccaggtcaggttggcctctctgagtgaaggctgcaccctcccttgcccccagcctgcccccttcatccccaagggaatccctgcttcaattggccccagcaggccacaccctcccccaattggccccagcagggcacacccccccccaaccctcccacctgcccactgcgggtgctccagctcctcatgggggtaagagctgggcctggactccaaccccagctcagctgcccactggctgggtgatgtggggccagtcactcaccctctctgtgcttcatttccttgtctataaactggggggctcaaaactggttgccttgtgggaaatgtcaagtgcccagggtgagagctcagtaaaccacccacaaggcatcgtgaagaccaggcactaggca

SEQ ID NO: 66778 - DNA, 3358 bp, Homo sapiens
gattacaggcgagcgccaccacacctggccaatttttgtatttttagtagagacgggctttcaccatgttggccagggtggtctggaactcatggcctcaagtgatccgccctcctcggcctcccaaagtgctgggatgacaggcgtgagccaccgcgcccggcctgttgtacgcattttacagaggaggaaacagaggctcagaggagggatttgacctgccgtggtcacacagccgagactgggccaggtgggatttggacccacaagcagcttctgcctctgccctgtccttgacacctgcctcatcctccattattgtcagaaggggatgggcggaagttgtggtgcgtgagggggcagtctgctggcacggtgtggtcaccttctggcagggttgtgtgagggccccacaggctgaggtcttatgtagggtccccaggctgtggctggcctccaggcctcagcgctgatcccagtggttgtcaccctgacagcaggaagactggccaccggcttccttttccgaaccgagagtccccttggctgtggagcgtcctggcccagccagagtgcagtgtctggctttcatcagccctgctgggcagctgaggccctgggatagagggagagggagggacgggcatcaggcatagggccttggctggcctcttggaggggtgcagggtggatggcggtggaggggcacctgccatggggctgaaaggagccaccacttgcaacgtcacaagtgagagaggaggccgggcacagtggctcatacctgcaatcccagcacttcgggaggccgaggcaggcggatcacctgaggtcaggagtttgaggccagcctggccaacatggtgaaaccccatctctactaaaaatacaaaaattagccgggcgtggtggcgggcgtctgtagtaccagctactcgggaggctgaggcaggagaatcgctggaacccgggaggttgcagtgagccaagatcgcgacactgcactccagcctgagcgacagagtgagactctgtctcaaaaaataaaaattaaaattaataagaagagggtgtcagggaactgcaggaaaataaagcagggagggacatggaggggggctgggggccactctggatggggagggcttctctgaggaggcgtctttgaggtgaggcttgaagggggtgagggagtctggagaggctgggtggagggagcagtgagggggttatagccagtgcgaaggcctggagcccaggagcagcacatggagctggctgggatgttcagggggtagtgagtggcgagggccgtcctgtggccttccagtgagggtgaccagccgggggtggggcgggagagggtgacccgggtgctctccgacctgccacgtgctggggaaggagcctgcaggaaccagggcccagagagggaagctgtctgcccgcccagggcctaaacccagccaggcctccccgccccctctggcagcccaagaaatctgaggcgcgggcgggcaccgtgccagggctgggcgggggaggggctgccaggcccgcccgtcccagcagctgccagcccgccccgagccgccagcccagatggtgcccatctgctgacgccgccatgggccagcctcctgttcccgccttgcgtcgtgccaagctcctgcagtccagcgccgggaatggcgcggtgggcagagcccggcccgggaagctcatagcacgccagagaggctgccccgggtgccctggagagggtggcaggagaaacatgggagggggagttccccagcgcttcctggatggaattggggagcaaggaccccaacagcgataatgatggcggcaaacacacatggcgtgccctctgtgtgccaggctccgaggccaccgctcaccctaactggtttaattctctcccccatccaagcaggaagggactttggccttctctcgtgttctagtggaggaagcagagacccagaggtttggacaagagtcacttgtccaaggtcacaaagctcctcaggggcagagccggaatgagaatccagaacccctttgaaaaagggattgaggccaggcgaggtggctcctgcctgtaatcccaacactttgggaggctgaggcaggaggatcacttgaggccaggagttcgagaccagcctgggcaacatagcacgaccatgcccccccccaacaaaatttttaaaaatgagccaggtgtggtggtgtgtacctgtagtcccagctactcgggaggctgaggcaggaggatggcttgagcccaggagttggaggttgcagtgagctgtgatcccaccactgcactccagcctgggtgacaaggcaagaccttatctctaaaaaccgttttttttaaggggtgattgaggccaggtgtggtggctcacacatgtaatcccagctacacaggaggctgaggcaggagagtcgcttgaacctaggaggcggaggttgcagcgagctgagctcatgccactgcactccagcctgggcgacagagtgagaccctgtctccaataaaagggaggtggtattgaaaccccttaaacctcttttcaaaaacaaactaaaagtgccctttgaggttatctagtggaagccacaccctctgagtcatacagatcatacagtgcaggccgtgcacactcagggagtaaatgaatgaatgaatgaatgaatgaggtgaaccctatggaaggggaccaagcctggggccagggtgtccataaagctcaccctgagcttgatggcaggagaaagggtctcaacctgggagtgagggacctgggtcagccacagtgctgccctggcttgctgtgtggctttgagaaaagtcctgccctctctggtctggggttgaggggagtggagggtgggaaggggcggccttgtgggccacagacaggagcaaggcgggtcttcactgaaagcctcccgtcctcttctgcctttattgatcttcatcccggttgtgggtgctgcactggggagacaggccatgagctcgggtgacggtgcctgtttatttgtatggtggacagaatttgtgttcctgtgtgctccaggcagtgtggggcgcattcttctctttgagccttagtttttgcctctgtagaatggggagaatcagagctgtgcccattgcattaaagattggagtcagtggtctctgagaagcatacaggaggcactcaataaatgctcacttccggccgggcgcagtggctcacacctgtaatcccagcactctgggaggcccaggcgggtggatcacctgaggtcgggagttcgagaccagcctgaccaacatggagaaaccccatct

SEQ ID NO: 66779 - DNA, 2265 bp, Homo sapiens
tcaccgtctcacaaccacccgctgaggttggaatgatcattaacagcatttaacagatggggaaactgaggcctagagaggcaaagtcactggcctaaggtcacatagctaaggagcacagtcaggatttaaatccaagcctgggagatcccaggacccacagtgggcaccacataaaggggctgtttggggtatggcagggactgccctggaacgttccggatcctgcctttgggcctacagggctttggtgccggtgagcaggccgcaggttcagctggctcaaggagcagcttcagggctgcagccaggctgggggctgggcaggtctcaaacccctggacctggggaatcagggaggtgtgagctgcatctgaggtcgggtgtctctgtgactctgtctctgtctctctacctctgattctccccaggctgccttgtctcagtccctgtctattcccaccccacctcgctctctctcccggccttgcgagtctcctcccagccccccatcccacccagtgggctgcccggaggtggcggcaacggggcagctgaatgggcctcttgttcctggccacacccgccccttggggtcaccctgggacatgcccaggcagcgtggctaccttaaagggccagtgctcagaaagaatgtgagcgggggaggctgcgtccactcccaaatcccacaccctccccaaggtggaccactcatgtgtctgacgggggtggggagctgtgtacctacacaccctcgtggcttgggggaggcctgtctggagcaggagatgtgatagggtttgggtttgaccttggataaatcccttcatctctctgtgcctcagtttccccatctagatcagggggctccttggtgccacccctgtgggttgctgggcagatggcatattatccaggattttgcacacagttgacactcttccggcgcccactgtgcattgatagagcacctgctgtttcagcccagcattcatccgccgtgcagacttggcaattccttcttcaccttgctccgtgcctcagtttccccaaatgcagaatgaggcgatggctgtcttagcttcacagagagctacgcaaggattgagtcggttcgtggaattagagggtattagggagaagggcctgaaacactgccaagtgtcacctccactggcgcacttattgagcgccagctgcataccaggccttgctgaggaagcctcactgcagaggttgcagtgagctgagaggcaaaggccacccagcctggatctcactctggtgtcatcgcctcctccctctgctcagggttgtgcagcttcaggctgctcccctgccctctctgggcctcagtttcaccttcagagcaacgggaacagccccatcctttcacacactggaaaccatcaccttcttctgcctgggagggggttgtgctgtctctgggaatcccaggcatcccccaggcaggagtcaacccagaggccctcggacccgggctgtaccctgtgacagctccgggtggctacgacgctcccgtgctccaggccagccccacagacagcccgggacaggttgctgccggatggacaagcctgtgcctcgctgccttatgtaaccagtttatgcaagggcagccggcccgcttacataaggggaggccgggccagcgcccagctggggagggggaggctcttaaagggaccggcgtcccccgcggctccctccacgggcactggtgcgaattcataggcgagctgcggactccgccctcagcaaggccgccattaatgtcgttatgattatttttgtggatgttgtttatcatcactatattctttccccagggcgggggttcagctgagcggaggaccacgcccagtgcttgggcagaggcttgggctgtgacgctggctctgggtgtcacctggttaagtccctgtctctgagcctcagcctccccttctgcacagtggggcaatgcaggaagacgtgaggtcctggagggtcctggccctgctgcctgttcactgtgtggcctcaggcaggtggcatcccctctctgggcctcagtttccccatctataaaatagcgcctgctctgtggggttgctgagggagagtcaataagacatattaagagtttacatgcccgccaggcatggtggctcacacctgtaatcccagcgctttgagaggctgagacgggaggatcacttgaggccaggagttcaagaccagcctgggcaacatagtgag

SEQ ID NO: 66780 - DNA, 2907 bp, Homo sapiens
gcagggcctgtggtcctagtcctccactttgactactcccccaaatctcttaatgttcctcacattcctttccctgacaagcatttattttgcacctgctgtataccagatcctatcaggagaatcccaaatattcatgcaacaagttcatattgggtgcctactgtgtgccaggctctgctggaataatcacactcatttggctgcaggcatttattgagtgccagctgtgtaaaagcatttatcgagcaccacctgtgtagcaggctctggggagagaggccacatgaaagcttgggaaggagaaagtttccttctaccccctttcaggtttgtgccctctggtttccagccccctcccacattcaaggcaacatttaaacctctgggttcaagttccgttgtccaactgcgtggccgtgagatctgcggcaagccccttcctctctcggatcttccgtttccccctttgtaaagcagaacactccacaatctgatgtgtttacaacttgacatctactttttgcagcaagggaaactgaggcacagagcagggcggagatgtgtctacctctccctccccaagcaagactggcatggagtctattctcctgaccccacgccaaagccagggcgtttggtattttgttttttcttggaggcccagagaggggcagggcttgcctgaagccacacagcaccgggcaggcctcggaattgcggagagccctcccctgggcgcctgcccgggctcccgcgccttcctcctgcctcctttggctgggccgccagccttgcctcccgtcctccggactccccgcgggctgcccagttggagacgcgccccaagaaatatcagaaggaaggggaagccgggaggggcctccgcctcctcccgccaccccccgccgcgcccggctgcccccacccggtgcccgacattggcagagagtgtcctcgggcgcttccgactggccctgcctgcttcgtgtggccactgatcccttccggagcctctccatggggacgcccgtgtgtgcgctcagccagtggcacatgtggctcccggggctcccttctccacccccccagcccctggcctgcccctttccccccatcccttcccgaacctctccatggggacgcgtgcgtgtgcgttcagcccgtgggcacatgtggctcccagggctccccccgaggcctgcccttctcccccccccgtcacagccgccgagtcaggcctgccaggaaggtgttgggggtgggggtgtggggaggcctcagcttggctgctgggaagccaagaatttgctccaaatgtaaacagcgagttattttcagtccactcccccccaccccgggtggcgttgacacatttgacattggcgggaccgggagggggtgggggtgagggtgtgcgtgcgggtatttttaaccttgctcctcacatccctggagtggctggtgccgagtggcagataatggggagggggcgcggaggcgtggggagccctgggtggccgtgcgcgggtgggcgcttggcaaggccgccctgctgttggcaccacgtgtttaacccctcagaggctgcagaggggctgggggaggcggcccagggcccagtggtgccccagaggctcccttgtcaccttctcctggtgtccccccacccccaccccacccaggagggcagggccgggtgcccgaggccggtgccagcctgcgccgcccagacctacaaaatggccgccaaggccggagaaacatctggaacaggggaagggagaggcgagaaaatggccgccagagggatgatgtcatgggcggcgtggcctcccagagcgtccccagcacggggcgagtccctacgcgcaggcctccgagcaggggccctgcggcctccagggacctccagacccgctgcccaggccggacacccacaaagagtgacaccggggtccccaggggtccccagaggcgggcccgagacctgggggagggcgaggccagcactgggcctccagtcccaacagcccgatgctggggacggttccggggcggtggtggccgctgacctgacccgcaggacaccgaggcgtccaccagcgcccgggagggcccggagccaggccatggagccggcgggggccgggtggaaagaaaaaagaaacttttctttgaaagtgattccgaagcaggttggctccggcccaggcggcccggcggcaggggagagggagatggaaagtatgggccagacttaaggaacgcaggaaggacgaggccggggaggcccgggatggaggccagcgtcctggaggtcaccccgtccacgcctctgcctctcgggcccccccaggtcacatccagattttcctccctgtccctggggcgggcggggagtgcggagaacatctatgggcttgtgttttttcctcttttgatttgtccagacaggcgatggacaagggctgggcaggggttttaggtcatctgcactgtcaggatgtggaggctcagagagggagagtgcttttagtgaggtcacacagcactggcaaaactgacagctgcttccctccttagagcatcttggggaggaggaagttctctatggaggatcagggtccgtactggaattcctttctatttttatttaatttaatttatttatttatttatttatttttgagatggagtttcactcttgttgcctaggctggagtgcaatggcacgatctcggctcactgcaacctccacctcctgagttcaagcgattctcctgtctcagcctcttgagtaactgggattacaggtgcctgccactacacccagctaatttttttgtatttttagtagagacaggggtctcaccatgttggccaggctggtctcgaactcctgac

SEQ ID NO: 66781 - DNA, 7466 bp, Homo sapiens
gacctcgtgatccacccgcctcggcctcccaaagtgctgggattacaggcgtgagccaccgcgcccggcccaattgtttggttttgtttttgctttgttgttgttgtttttgagatggagtctcgctctgtcacccaggctggagtcactggtgcaatcttggttcaccgtgccctctgcctcccgggttcgagcaattctcctgcctcagcctcctgagcatctgggattacaggcatgcaccaccacgcctggctaatttttgtgtttttagcagagacgaggtttccgccatgttggtcaggctgagctggaactcctgaccttgtgatctgctcgccttggcctcccaaagtgctgggattacagacgtgagccaccgcgcccgggtgaactttcacatatttgtagacccagacacagtccagggtgctggggactagaacaaacgtttgcagaaagggctggggagggtgttccagagaaggagatgtcagagctgggctgcaaagtatggctggaggtttcctaggagggagaggggcagggaagacggcacagcaggagctcagaggactcaggcccaggtcactcgtatattccattgccttccaggacagagaaagttgaaccttcgccgggtaatgtttaaaaatggccggtgacacccagtagctgggaattccagggcctggctttggttctctctttagctggctgaggttgggaggcggacgtggcagccggcagagccagcaacatttggaagccggctaacgttggaaaatcaaccaggcgagctcacggtggcggccgatgctggaaacctgggctccgtgaggtccagcagatgccctgctggggcccaagtggacattctaggccttctgacagcccgccgggtttttaaataagtgtgattatggtttcagcaagtcctgtccttcctacagccaaaagatcaattcaatatggccactccgtgcaatgctgggccacccctgctgggccagggtgttgtgttgaagccaagattcccaacacctgagagtccagaagtttctttaaaaattgctttaactgtggtgagacacacatcacacactttttttttcttgagacagggtttcactctgtcacccaggctggagtgcagtggcactgtcatagctcatcgcagcctcaaactcccaggctcaagcaatcctcgcacctcagcctcctgagcatctgggaccacacatgcagcacgcaccaccacacccagctaatttttattttattttattttatttttgagacggagtctcactctgtcgcgccaactcggctcactacaacctccgcctcctgggttcaagcagttctcctgcctcagcctcccgagtagctgggactataggcgaccgccaccacacctggctaatttttgtatttttagtagagacaaggtttcaccatgttgaccaggttggtctcgaactcctgaccttgtgatcccaaagtgctgggattataggcgtgagccaccgcccctggctgacacccggctaatttttaaaaatattttgtagagatggggtcttgctatgtggtccaggctggtctcgaactccttgcctcaagtgatcctcccacttcagcctcccaaagtgctggaattacaggtgtgagccactgtgcccggcccagagacttttgaaagtctaaaatggattgtatcatagctcacatcactcctcttcccactgcaggataaaacccaggcctctcactgcaacacacaaggccccgaatggtcccgctcccctctccgttcgttcctctttctcttgcccaccacgctgcagcctggggtctgtctctgcctttcacacatccaacttcattcctgccccgtggaccttgcccttgtcaccgaacctttgtggaacgctttcaccccagctctccacatggctgggctccttctcccgctggagagccaccgtcacatcctcagagaggttctgcctgagtcctccctccaacgccgcccccaaagccattctgccttccgccagtttcattgcctccgtagaacctagaaccgtgtgaaatgatctgaggcttcctccatgcactggttctgcccgtctccctccccacttccttctctgccatccccccaaggcctggcgagtagtaggtggtcagtaaacacctgttccgtgagtgccgggtgtgcgttgacctcccagtcaccaacggcggaagcttcagccagcggacgcagggagttgtcccttgcaaagggggtgggtgctcccgggcgggaagggtggggccagagcccacggcgatgcctttgtcatgagctaggatggactgaatttgggctcacagccacggacaggagagaacagtgtgtccgccccgtcagtgccatccagcgtgcgtggctgttgtgcatcatttgtttgcttgagcaaaggctacagggtccagtgacattcttggcagtccatgacacctcacagacctgggaagtcaagagacctggctcccggccagatgagggtatcatttgaaatacaatttgctggccggctgcggtggctcgcacctgtgtttcccctactttgggagacagaggtgggaggattgcttgagcccaggagtttgagtccagcctgggcaacatagcgagactgcgtctctactttttttttttcctgagacggagtctcgctcctttgcacaggctggagtgcagtggttcgatctcggctcactgcaagctccgcctcccgggttcacgccattctcctgcctcagcctcccgagtagctgggactacaggcgcctgccaccacgcccggctttttttttgtatttttaatagagacggggttttaccgtgttagctaggagaacaacaatttgctttccagaaccagagcctctcaacactagcatgtgtgtggtcatccatgctaaatggtgctgaaagaggcatttgtgtctctctgagaaggagctatttgaggaaagtcctgaatgaggggagagaatgagccatgtagatagctgagggaacagtgttccaggcagaggcgcagcccgtgcaaaggccctgaggcaggaccatgcctggtgtgttggaggaacagcgaggaggcccccgtggctagagcagagtgaggaaggggagacaggaaggaggggagggcagggaggggactgatcgggccatgcagggccttgtgggccacgggaagaaggtgggcttttccccgcaaagaaggtgggagctatggagggctgcgggcagaggaggggtaatgttcatttaactcctggagtttgacaaaatgctatcatcaaaacagactttatcacagaacctctagctatccccgtcccctccgtaagctcctctgagcatagcaacagaacgggaaggtaaggcagcgattggaaacgcccgcgttatagatgagcggagagccgctggaggttggaggctccgacagaggaggtgactggtccagagccacatggccaggttgtgctggggctggaactccatcgaacgcaggtttcagggtgcagcccttgtttccataagataccccaaaatcagacaagcctgggacttgccacctcttctttaaaaaccccagtgctgtttttgttgttttttttgagatagggtctccctctgttgcccaggctggagtgcagtggctcaatcatagctcacccactgcagccttgacctcctgggctcaagcagtcctcctgcctcagcctcttgagtagctgatactacaggtgtgcatcaccacagccaggtaacttttttttttaaagtagagatggggtggggtatcctgtattgcccaggcttgtctcaaactcctgagctcaagtaatcctccctccttgaccttccaaagtgcaggaattataggtgtgagccaccatgcccagccctccagtgctttttttttttttttttgagacggagtcttgctctgttgcccaggctagagtgcagtggcacgatctcggttcactgcaacctctgtctcccgggttcaagcaattctccttcctcagcctaccgagtagctgggactacaggcacacaccaccatgcccggctaatttttgtatttttagtagagaccaggtttcaccgtgtcggtcaggctggtctcgaactcctgacctccagtgatctgccctccttggcctctggggattacaggtgtgagccaccactcccggccctccagtgcattttaaaggctctgaaaagtcctacgttgtcctgaaaactcctcagtgatgctgaacctttttgacctgtgaaccccaggtttgggtaaagtctgctcacatccggcggcacacccataggaaacccccagcccggctgtgaggagtgtgaactttgattcaccaggtccttggcccagctttagtttctcccgtgtccgtgtttgcttgtgcaatcatgaatatatattgaccagcaccaggtgccacattgaacagtttgtccgcgccgtcagtgccatccggcatgcacggctgttgtacatcatgtctttgcactggactgagctcagctgcagaaagcagcacatttcagagggtgtctaccgggccaggagaaaacacacaaaccgccaacattttaaagcctgtaatcgacatcgtatacaattggaaaagatgttcatttatatgttttgtttttgttttcttaagacagggtctcagtctgtcacccaggctggaatgcagtggtgcgatcatagctcactgcagcctggagctcctgggctcagacgatccacccacctcagcccccagagtagctgggactgcaggcacaggccaccacgctgggctaatttttagatttttgtagagatggggtcttgctctgttgcccaggctggagtgcagtggtgtgatcttagctcactgcagactcaaactcctggattcaagccatccccacctcagcctcccaagtagctgcgactacaggatgtgccaccatgcccagctaatttatttttatttttatttttgctagagagagtgtctccttatgttgaccaggctggtcttgaactcctgacctcaagcaatcctcctgccaaggcaatcctctcaaaatgcagggattacaggtgtgagccactgtgcccagcctgttcatacgttttaaagagaggtgcagacaaaactgggttggtgcatccacatccctctctgtgtgatgctgggtaatttgcttaccctctctgggtatcctggagattgtcagccccagccaaggatggttaaaaggcattaaacaatacctaggacagagcctgacatctggagctcattaaaccatccgtacatgcagatgtcgttataattattatcaatgctattctgtcactccacaccctgactcccacctcagtggccccaggtgggggtgctctgaaatttctctggcctggctgagcgggaggggccggggttctgctggaataaagaacagaggaggaagccttgaaggatttgttctgtcccagctgtccccagtatcacagttagccacacggatggcagaagggacctttgacagtggacacaggggctggaagggcccagcctggggctcactgcaatctccgccttccagattcaaatgatcctcctacctcagccttccgagtagctgggattacaggtgtgtgccaccacacccggctaatttttgtatttttagtagagatggggtttcaccgtgttagccaggctggtcttgaactcccgacctcaggtgatctactcacctcagcctcctaaagtgctggaattacaggcatgagtcaccgtgcctggccttggggctttatctgactggctagagaatgggattcaaacaccaggaatcatcccaaaccgccaatgagaaggagccctggagtgaggggaaccgagacccctcctaaaaggatttacagggtgtcacagaatcaaaattacagcaaaggctcaactgtgagatgccagggtggctgatcattgattctagacccatcactaccagctggtgttctgtgagtttgaagccattgctgtctagctttgtgcctcagtttccccagctggcgattaccgtcccccatatggggacggtaatcacgtgtctgctgcagaggagttacaaagatttgtgaggcaatggaggcaacatttgcagccgaacctagtcaaaggaattactcactgcgcattaatttgttgttttttgagatggagtctcgctctgtctcccaggctggagtacaatggcgcgatcttggctcactgcagccatcccccgggttcaagcaattctcccgtctcagcctccggagcagctgggattacaggcacgcaccaccacgccaggctagtttttgtatttttagtagagacagggtttcgctatgttggccaggctggtctcaaactccaggcctcaggtgatcctcccacctcagcctcccaacctccctagcatttcaacgacctgaagtgaccctcttgatttattttctgacttgttcatttcctgtcacgttcccattagaacatcagtgcctcgagaggagggattcttgtctgtctctgttgccgctgtgtcccttgggcgtctggcatccgggtggctctctgcaatctgtttgctgagtgatcaaaggaaagaactaatggcaacatagtgcagctccaatgtacagatgaagaaatccaggctcagagatgtggaagtacttgcccagggccacacagccggaagcccgccaactcttttagtaaagggccagtgacactgtaaacattttaggcttttaggcaggtcacatgcagtctctgttgcctattttttcttttgtttacgaccctttaaaaatggaaaagacaggccgggcgcggtggctcacgattgtaatcccagcactttgggagtccgaggcggacggatcacgaggtcaagagttcgagaccagcctgaccaacatggcaaaaccctgtctctactaaaaatacaaaaattagctgggcgtggtggcacgtgcctgtagtcccagctactctggaggctgaggcaggagaatcacttgaacccgggaggtggaggttgcagtgagccgagatcacgtcaccgcactccagtctgggagacggggcgagactgcatctaaaataaaataaaataaaataaaataaaataaaataaaataaaataaaataaaataaggaaaagaccatacttagctgactgtgcaagaataggcaaccccttctagtttgctcatctaatgtcagaacccacgaactgattccaaaaccctccacagagaatctaaaatgctgcaaaccccgactctgtgatgctggggatctaaagtgcttag

SEQ ID NO: 66782 - DNA, 937 bp, Homo sapiens
cccctgtagccccccaacccctgcaaacttgttatttaagcctcctcattacaggggtttggagccgaggaagccctgctgccttttcgtaaatgctctccctagacagcaatctttgatggaggctctgggagaagttgttcagtgatgtgcatttgtcgagcacctactgtatacctggtgccagtatagggttgggtggaagggtcttgtccactcaacacccctttttctgccctattattgccttccctggccaggcgaggtgactgacacctgtaatcccagcactttggatggctgaggcaggaggagcgcttcagccctggagtttgagttcagcctggccaacatagtgagacctcatctctacaaaaaaatgtttgttaaaaattagccagatgtagggccacaagcctgtagccccggctacttgggaaaagaaggcaagagaatcacttgagcccaggaggtcgagcctgcagtgagctatgatgacaccactgtcctccatcccgggccacagagtgaggccctgtctcaaaaaaaaaaaaaaaatcaagaccatgattgcccccccataaagagcccttttaaacattttttccctaatcactctcctgtgaaattttaatagcataggtatattttatatacctatatatattaaaaatgtacctgtgccatcaaatatatataatatatattatacataggtatataaagtataactatatgtcatatagataggtatataaaatgtacctatatggcctgtaggtatataaaatatgccatataggtatataaaatatacttacgccattaaatatatatttaatatacaaatatatttgtttttttctatactgtaacaacatatgtctgtacattattattattattattattatttttgagacagagtttcactctt

SEQ ID NO: 66783 - DNA, 1023 bp, Homo sapiens
agaaaagaaaaagaaggaaggggccagggcgcagtggcttacacctgtaatcccagtactttgggaggccgagtcaggtggatgacctgaggtcaggagttcaagaccagcctggccaacatggcgaaaccccatctgtactaggaggacacgggaggctgacgcaggagaattgcttgaacccaggaggaggcggaggttgcagtgagccgagatcacgccactgcactccagcctgggggatagagtgagactgtctcaaaaaaaaaaaaggaaaggaaaagaaggaaggaagagaaagcgagtgggtgaggcgtccttcttggaaggaccggaacaggcatgcacagggaggctggaaggttctcggaggttcacaggcctgaggccactcctcactggcccccggtgactcctccgtctgtgacccgggtcctccgcggcctcctgtgatccccagacgcctctctccaagccagatgttggagggaggtgggggcagcggcgcttggcctggtcccctggggagcttgggcgtctggtagaggaaatcacgtcctcccagctcgccagggagtcccccagagatggagctgagcaggcgctgcacaaacaggaaaccccggtcgggggaggcggagggggcgtgctgacaccagctggccagctgggtcagcaggaaacggctctggccacttctcctggacactcgggggccaccgctctgtcctcttcagaatgcgtggccctgaacctcccagcgcggggcagggttggttcattgccttcactcagcaaatgactgtaacagggggccgggtgcggtggctcacgcctgcaatcccagcactttgggaggctgaagcgggaggatcgcttgagcccaggagttcaagaccagcctgggtaatatagcaagaccctatctctacccaaaaaaaaaatatacacacacacacacacacacacacacacacacacacactagccccaggagttcaagaccagcctgggtaatatagc

SEQ ID NO: 66784 - DNA, 1642 bp, Homo sapiens
ctgtagtcccagctacttgggaggctgaggcaggagcatcacttcagcccaggagttcgaggctgcagtgagctatgattgcaccgctgcactcgagcctgggcaacagagcaaaattctgtctctaaaaaagaaagattgtaacagggggactggcgggggtttgggtctgcagaactggacacagccctgagctccctgcagtccgtgctgccccctgggggccgggagaggaactgctcccaccgccacccaaaagccaagagcctgtcccacctccaaacctaccaggctccctggctctttccactccaaccctgctggcctgcaacttgccaagtgcatttctacccggaggcctttgcacgggctgttcccagtgccgggaacatcgtggccctcagggaggtgatgaaacatcatccccatcggagaagccaacagtcacggggcggttgccaggcgctgttctcggagctttgcagattttaacaagttccttcctcttatccagtctcatcttgaggtctgtaaaatgccaccatctcggtcaggctttctctgagccctgggtgtaaaatagcctccctccccaccctagctagttccccaccagccgcctgccttaccacaggctgatgcacctcgcatttgacttaatgagcttttaatttgtagtaaaatgtgcatgatgtacaatgcatcattttagccatttttaagtgtccaagtcaaagtgcactaagtacattcacctctatctaattccagaacctttctttttttttttttttacccccaggctggagtgcagtggcgcaatctcggctcactgcaacctccaccttcctggttcaagcaattctcatggctcagcctcccaagtagctgggatcataggcacatgccaccacacccggctaattttttgtattttcagtagagatggagtttcaccatgttggccaggctggtctcgaactcttgaccttaagtgattctcttgcctcagccttccaaagtgctgggattacagatgtgagccgccgagcctggcctaattccagaacatttcatcccccctaaaagaaaccccatccccatcagccaccactccctgtctcctctcccagccctggtgcccacgcatccccttcttgtctctgtggcttggcctgtcctggacatttcagtgaaatggctcatgcctgtaatcccagcactttgggaggccaaggtgggtggatcatgtggtcaggagttcgagaccagccggaccaagatggtgaaaccccgtctctattaaaaatccaaaatttagacaggcactgtggcaggtacttgtaatcccagctacttgggaggctgagacaggagaatcgcttgaacctgggaggcataggttgcagtgagccaagattgcgccactgcactccagcctgggcgacagagtgagactccgtctcaaaaaaaaaaaaaaagaaaagaaaaagaaagaaagaaatggcatcacacactgtgtggccttttgtctctggtgtccctcactgaatgatgtcctcaaggtgcatccatgttgtagcctgtgtcagagcctcgttcttttatttttatttatttactggttttgagatgaagtctc

SEQ ID NO: 66785 - DNA, 1288 bp, Homo sapiens
ctaatttttgtactttttgtagggatggggtttcgccatgttgcccagtcccgtctcaaactctggggctcaagtgatccacctgcctcagcttcccaaagtgctgggactataggcacaagccaccatacccagctaattttcgtattttttgtagacacagggtttcgccatgttgcccgggctgatctcaaactcctgagctcacgagatccacccacctcagcttcccaaagtgccgggattacaggcatgagccaccacgcccggcatccttttcacggctgagtcctattccagtgtgtggctagaccacgctgtgtttatctcttcatcttttgaagggacatttgggtggctttccagtttgagctgtggtgaacagtgctgctaggaacattcgtggacttttgctgacctattaatcttggctgctgtctgtcgctcacactggactttgagtctcacaggggcaactgcttcagcctgtatcatctcctgctgtgccggggcccagctcagaatcagacactgtggatgcttagtaaacgcctgttgagtccatgaatccctcctacaagggcgtccgagggcaggacagggctgtccccaagctgtctgaggttggccaaggctcccgacctctcggggacaacttcgatttccaaatctgtgaaatgggtccaaaccactccagtcgagaggacagtctcccttcctttaatattaggtaggagcaatgctggggacactgagggttttaactgcggcttgtgggcctcccattcaaccccccattttaactgacccattgctgggtgccaagctctggtctaggcacgaaggacactgcagggtcggggcagacagacatccctgcccacacggacctcccagtctgaaggggagaagaacaagaagccagagtatctcgaagggtgacagtgtgtaaagcaagccagctgcccctcccaggcagttggatacagatctcacgacaaccccgatgatgggattgatggtttcacttttgcaattagggaaacttggaggctgagagagggaaagtgacctgccccagatcacacaccgaggcaggtgatggagccgatgtgagcccaggcctccgctttccgctcttttttttttttttttttgagatggagtcttgctctgttgcccaggctggatggagtgcagtggcgcaatctcggctcactgcaagctccacctctcgggttcacaccattctcctgcctcagcctcccaggtagctgggactacaggc

SEQ ID NO: 66786 - DNA, 2824 bp, Homo sapiens
aaaaaaaaaaaaagagacatctccatctcggccaggcacagtggttcacacctgtaatcccagcactttgggaggccgaggcaggcggatcacctgaggtcaggagttcaagaccagcctggacaacatggtgaaatctcgtttctactaaaatacaaaaattagctcggtgtggtgatgcatgcctgtgatcccagctactcaggaggctgaggcacaagaatttcttgaacccgggaggcggaggctgcagtgagccaagattgtgccattgcactccagcctgggcaacagagcaagactccatctcaaaaaaaaacaaaacagaacaaacaaaaaatcaccttccatggttgccattgggattaaggggggtgaattgtaggaagcctcaaatattgcttaccaccccatgttctagtgatcaactatttagttctttacacagtcatgcacacagagaggcagtcccaaatcaaagcagccatttgggccaggggtcagcaaacgctggccccctggttgcctgttcttacgaataaagttttattggcaaacagccacgaccacgtctttgtatatgtcctgtggcagctctcaccctgtcttggcagggctgagtaattacagcagagaccacgtggccaaaagccaaaaatatttactatctggccagaggctgtggagatgagggagtgactgctataaatagtgaaaatactaaaaatcactgaactgtttagaaagaggaaaaggcaggcaccacaatagaatatgactcagccatgaaaacgcacgaggctctgacgcaggccaccttgaggacgtcatgctcagtaagagaagccagacaaaaaggccacacagcatgtgatctcatttctatgaaatgtccaggacagggccagccacagaggcaggaaggggatgtatgggtgctggggctgggggaggaggtgaggagtgacggctgatggagacggaatttctttatgtgctggaattaggccgggcacagtggctcatgcctgcaatcccagcactttgggaggctgaggtgggtggattgcttgagtccaggagtttgagaccagcttgggcaacatgatgaaaccccatctctactaaaaatacaaaaaattaaccaggcgtggtggcacacgccggcagtccgtgctactcaggccgaggcaggaggatcacctgaggtcaggaggtcaaggctgtagtgagccatgatcatgcccctgcactccagcctgggtgacaaagcgagattctatctcttaaaaaaaaaaaaaaaagatcactattcagccatttgcagaaagagcttgccaaccctagatttatagtgtagactgtggggccagatgggctgggttcaaattcccggtctgccatctgatgccgtgtggccccaggcaggtgacacatcccctgaaggccaccctgtcatcctctgtttaaaaaaaaaaaaaaaaagacggggccaggtgcagtggctcacgcctgcaatcccagctctttgggaggccaaagtgggcggatcacctgaggtcaggagttcaagaccagcctggccaacatggcgaaaccccatctctactaaaaatacaaaagttagccaggcatggcggcgtgcacttgtaatcccagctactcgggaggctgaggcagaattgcttgaacccaggaggtggaggttgcagtgagctgaggtcataccactgcactccagcctgggtgactgtctcaaaaaaaaaaaaaaaaaaaaaagaccaggctcagtgggttacacctgtaatccccgcactttgggaggcctaggagggaggatcgcttgagcccaggagttcgagacctgcctgggcaacatagcaagacccccacctctacaaaactaaaaaattaaattaaaacacaaggataatatcacagccccagtggggttgccgtgggagtcggggaatttgggtgtcaatgtggtcagtgctgctgggtttttttggtggttattgttactaaacgcactgagatgccggcaggaatgacacccacagacacacagtcacacggtcacagagcagaccggctggagcccccaagtaacccccgcttcccactgtctccgcagggatcgcccggagcccacacccgtcctccgctctgcatttccctacgacgtccatcctaccccagacggcctccacctacttcccccacacggccatccgctacccacctcatctcaacccccaggacccgctcaaagatcttgtctcgctggcctgcgacccagccagccagcaacctggaccggtgagttgggcggggcgcattcgggcctctcctggcggctccaggtgacctcccgggggccacgtgctcacacgaaggcacaacctctgcttaaaagggtcttgaggacttggctctgaagtcccctcctctgtcgtgctgggaggcagctggattgggtcagaattgagatgctttcggatgtcagggtttcgggcgcatcatgtcgcaccctgtggggtctgggtagcacccgtaggtcccagcaactgcgtgagtcgtactcatgttaacacaaggcagggagggactgggcatagcggctcatgcctgtgatcccagcgctttcggaggccaaggcgggaggattgcataagcccagagttcaagaccaacctgggcagcatagcgtgacccagtttctacaaaaaaaatacttaaaaatgagccacgcatggtggcgggcgcctgtagtcccagctactcaggaggctgaggtgggaggatcgcttgaacctgggag

SEQ ID NO: 66787 - DNA, 1724 bp, Homo sapiens
gcacctgggttgaggccgggcgccgccacctccctgcagaccccggagagagggagggaagaagcagtgagatcccgctctcccctctcccagctcccgctcaaagggccctgagcttggaggcctctcatttccgattctggccagtcagcacttctgcctccgcctcctctattcctggcggattcgcttccctctgccccctcctcccccaaagcctgggtgggcgcgcctttccctctgcctctccggctcccgacaccccccagtccatggactctccccccatcaatatccctccccgtgatctatgctaattgatctcgccctggtcagttacccacccatcgccccatgtccgtccctatcaatccccccactgtgaggctgggtggctctgacgccctggcccctcccctctgtgatgtccttcacgcccctacatttctcctgcacgggaacccacgtaagcagctgggtaaaccgagggtggggggcaaggcgggcattgagccacatgccgggagccacacaggcggctgcagccaggccagcaggataccagagcccaaacctcccccttcacacctactgcctcagtctcccctcagctgagtgggaggatgtggagttgagggtgcccccaccccacccccgccccattgctggggccacagccaggcaggaaggggaggggagggaagggaggagggaggaagggctgaggggaggctggtccaccacggggagggtcacgcccagagtctgtcggttgccaacagaaaccagacatgaggtaatggccaagatgaacttgaacttggctggaggtggggcgctgggaaccactgtggcgccagttccatgggctggcccagtggctgcctggttggaggggctctgttgaatgatttgctgcagcggtggggggcggccccacctctaacctcagttggggagtggaggggtctccccagttccagaggcacagccctcccctcacagtccaccctggatgctccatctggggttggagtttgcgtttccagggcaggggtctggacagcagcttctctgcagagactgaggccggagctgtccccaaatgacgtgaccttgggtacagccccatgcagaactcccctcccttagcctcggtctcccgcctctgggaggttgagagtcatcctcagcccccctgtgcttagtgagcttctgtggagcaagagggggccatccgggggacctgtgacaggatgggccctggacgcccaggacagtgctcagaagatgccaaggggattcctgagaggcaggcgagggggttggccctgggcaggagcagaaatgagagccagagccagacaggcctgagttcaagttccacctctgccgcttccatgctggtgacctcgggcaagttccttgacttctctgggcctcactttcttcacacaaaacagcggtggagggagacctaccccctccttcacggggataccggggacatcattaaagaggagaatttttttttgtttttttttggtttttttggtttttgttttgagacggagtcttatgctgcccaggctggagtgcaatggcacgatcttggctgactacaacctccgccccctggattcagacgattctgctgcctcagcctcccgagtagctgggattacaggcacgtgccaccacgcctggctaatttttgtattttt

SEQ ID NO: 66788 - DNA, 506 bp, Homo sapiens
tcataatacagaatatatagtggctaccttgtatcttggtctggattctctctctgagaccccggattttactttctctttggagggcgctgggacatacatctctcaatccagcttcctccgcatcctcccatcttgccccatttctgccacgtcagacacttcctgagagtctcaccttcaaaatgacaccgctgcccatccattgctcaatggtacagagtgtggggtcagtccaccacccttgacctcccggcagggcaaggtgaggaggcggacccaaagcagtaccagcaggacttgttgccagtgataccaaaacagacttttcccaagcagtgcctcacatgtctgctggtgtggctttgggattctcctgccccacccccccgtccatggcagccccctccccaaggctttgctcacacctgagacaggaaggaggaaggggatccaataggaatatgggccccggaggggaagtcatgcacccccaagccaccacc

SEQ ID NO: 66789 - DNA, 1322 bp, Homo sapiens
accctgtgaggtagttactaagattgtccccattttacaggtgaggaaactgaggcacagtttgggactgtgcttgggaacttgcttgggagcagcgtgaagagttaggaatccaggaagtctggctccagagtcgggctctaaaccaccaacgctttgttgaatgacttaggataaaagaacacagccaaggggagaagggacccctctctttccagatcggctgagaacctggcggatgcttcatctcaagacaggctggctatggcatgctggcagccctctctggtgaacagtggcgtcagcaaggctgcctgggcttgacgagggcagtgtagccacctaagcacaggtgaccatcaaaggagagtgacacctttaaagaggggtcatcagaaaccagagggcaggcctgtgcgagctggcagggcactggggaccattgagacccaaccgtacgacataggagcttcaggacgtgaggtgggcactctttcatgtaaaaaatcccagaggaaagagatcgccgggactcgagaccccttaacccgccccatccacagtcaacgaatccctgagaccggattccctaacgaggcgctcccggtgccaccgcccgccagacccgggccccacaccgtgatcgccgcctccgggacgcctcaccgagctctggagactcaggacccgtcggcccggccagtaaccgcaggcgcctctgccaccaccgcttcacctgccgcgacgcccgcagtgcggtctgggggccgccattttctcgcccacgtgaccgtgccggacggcaccaacgcagccgcgggtgagacctagtgagaggctccgtgcatgagggaggcccggaaggctgagtcggtgctggtgccacagctcatgcaaacgcaggaacagtattcctagtgcgttcttcggggaaggggacgggcaacgtatgccctttcatgggaaaaaattctctccaacctccccactgcggtacaagaagtgagactggtttgtgccgattcagcgccctgcctgggctggctagcaacggagcatgcgcagtgtttctaggcgtggtcagactccagaggtgttggccaatgggctcagggagctcgaaccttaagtaggtgaggaataaaaaaaggaagaaatgcagtcgttcattcattcatgtatgtaataaatagtacatggccttgaggacaagagagccttcagcccttaccctcgtacgcctcccagtgttgttatagagacagaaaataacacgataagtaaatgcaatacctattagatggtgaaaaaggctaacgaga

SEQ ID NO: 66790 - DNA, 4499 bp, Homo sapiens
attctcctgcctcagtctccccagtagctgggattacaggcgcctgccacgatgcttggctaatttttcgtatttttagtagagacggggtttcactatgttggccaggctggtctcgaactcctgacctcaggtgatccacccacctccacctcccaaagtgctgtgattacaggcgtgagccaccgcgcccggcccataatttttttaaaaacctgttttttgttttttttttcaagacgtagtgttgctctgtcaccctggctgaagtgcagtggcgcaatctcggctcattgcaacctctgcctcctgggttcaagggattcttctgcctcaacctcccgagtagctgggattaactccgtacctcaggtgatccgcccgcctcggcctcccaaagtgccgggattacaggcttgagccaccgcacctggcctaaaaacctgttttgttccctgctgtctcactggggcctggaggagcagcacttaggagcgcaatgcaggtttgttgaataaattaatgactctcagcagtgacgtttgtacgttcgggacacgcacctggtgttgggtcccatctgcgctcattaggcgcgacgtcaatgccgcactgaggtgtgcctggcttcgatctaccctaggaagggtctgccctggggcgccccattccgcgactgtccccagtgggaaccacgccctccatctaccagagccatttctgcaacgtctagcaccccgcgggtcctcttccggccgcggttgccctgggcaacgcgtggagccgcgcttcctgtattgatttgaatcgcgggagacgtcacgtcctcccgagatgcccaacgcgcgcaggcgcagccactcggagtgggcagggcctggctgggtgttgggcagggcctggcggtgtgtggggtaggcggggggcgtggccgcgattagccgcgcgcggcgtgggggcgtggtcgggttgcgggggtgcgcgcggccggccgggcgcgcgcggcggagggagggagccgggaggcagcggaggagcgaccgccgccatattagggaccgcggagcccgggatcccgtcagcggcggccgcggccgggcctgcgggagctgcggaggccggaggcgggcgctgtgcggtgccaggagaggcggggtcggcgggagccagcgagccacgggagcgagccaggtgaggcggccggggtcggggacccgccccccgggccctaggcggcggagcttgactgcgaccccccaaaaccgggacggcggggcgggctgcgacccccaccccagctcaggcccctccaggagcccccagtcccctcgaatgccgcctcccaggccgaactaggcccgggtgacctcagcatccgcgtctcccgagttaacacccaaatcccagcgtcccccccacgtcggggcctgccgtgacccccaccccgagccacctgtaagtcgtgacctccccgcagccgccgtcagcgtccaccattctttttaaaataggctgagccctgcacccccaaccaggggaccccactgcgcacccctagaacagcagaccccgcctcctaacccgggtgatttctccctggcctgtcatccccgggacttcccagttcagaccctcccagcttgggtcctgcccacacgaagccgccccccatcgctgagcctgtggtgtgcgatggctcgcccaggccgcaaccagcccctcgccccagtaaaatgcagtcccagcccgggacacccggaaacctgtgtctgtggtcactgttgtgtccaccagtccccgcaggcacgggttgagtgcatggatgtccccgtctcacctcatctcgctgatttctgctcccccaccctcccagcgtgccccctaccagcccccattcccccgaaatccagctctcccaccaaagcctcagacgagctatccgtgcacaagcccctccctcctccgaactgaacctccgtcctgcgtcctgccccgtgtcttctccaaacgcaagcctggccatctcggatccccagaatatggagtgtgccccccattcagagccgttttacccctactcaaacctgtgacaccccctccccctcttccaccgtccagacctgtctccaccccacgtcctgagacccccgatatgcagatgttcagcctaaatctgttttgtcttttcccctgttttctccaccccaaactcatcctctggttcagggcgtctctctggttccgattcccccgccccgccccagtctaccgggcgatgacctcatgcctctccgtggtgaggcccccaccccaacctatgtgctttgaaggagggtgatttacctaagggaaaaccatccaccaaggacacacaccaccagcatgagggcagcctgcggggactttgaagtgaaggcggagtggtctctctcggggtgggggtggggatagaagctgacggcatcacctaggtttggtccccggagtggatgtgtcgggggccgtctgtcatgcggaattccgcgtgggcctcctcctgtgtcaggggcccgtgtgttttggcgacacccgattgtcatttccttcggaatcccaagtggaggcaggtgtgctggccactggccgctgcccggcgccttgagcagcgagcggagttgggttgcagagggttttgctaagggagcagacacttactcaaaggcaagcccggtgctttactggggaggggtatcttggcaaggtggtacccgccagtttgcccctgtgacttgcttcccaggtcaaatttcagaacctgtgccctggctgcaggcagtggtgggggtaggggttggggtggggctttggggtttggaggaggagtttctagaaacagacaagccggattggtcttcaaggtggggctacattgattttctttttttttttttttttttttgagatggagtttcgctctgggctgaagtccagtggcgcgatctcggctcaccgcaacctctgcctcccaggttcaagtgattctcctgcctcagcctcctgagtagctgggattacaggtgtgcgcaccacgcccggctatttttgtattttaagtagagacaggttttcaccatgttggccaggctggtctccaactcctgacctcaggcgatctgcccgcctcgaggcctcccaaagtgctgtgattacaggcgtgcgccaccgcgctcggccttacgttgattttcaaaccacttactgtttaatggggtttctggtagaggggttttgtagactgagaacttctgggtttgggagtcccagaatggaattggttctgaggaccttttgcttggtgtcatttagaggggagaggatggaaagtctgtgtgtgtagggccgctcccggggactccaggcagaggtgaagatccaggggcttggtcttctaggaactcagcgctgtcactcctttctcctggcgcaaagctctccactgcccaattctgtccccaggggacatttggcagtatttgagccaggcatgctgctcagtgcccccactgtgcccagaacggcccagtacagaaagcagcctgtccccaatgtctggactgtgagccccgtgagggcagtgagtgtgcctgcctggtccccgctccgcctccggcctgctcagtgccctgggctgtgtgcttgcccacagcgggccccctgttggcactgccacagggacctgggcacctaccagcaggaaagggagtgtttgacctcatctctcttctgcccccgacacctccctgtggtcaccagtgacctgctcgtcaactccgcttgtcactgccttgcccacatgtcactgttcttcccagccactggactcagcacagagccagagccccttcctgggccacttatgttctcgtccagggacgttcatgtccccagtggccccaggtccctgtgtgcgttggcaggtgactgccttcctctgcctcagtgtcctcattcatggatgggatgaggggcacacaagcagcctgcctggccgcgcctcattcagtcactcagccgccactgaccacgaatgacacaccgcccccacaacggtgaacacccccactctctcttggcttcctactccgtctggttcttccttcaggcttcttcactggcccttctttctttatttaatttttgctcgtagtagctttatttggatacacttctcctgccgcacgattcactgctttagagcgtgcagttccctggtttttatatgttcacaggctcgggccgccatcacctctgcccaattctggagcattctcattccctcaggaagaaaccagccttgaccccatcagccgccaccacctgtctcccctgcctctgtggctgggcctgtcccggacatttcatagaaatggaatcccacattgtgtggccttttgtgtctggcatctctcactgagtgtgatgtcctcaaggtgcgtctaggctgtggcctgagtcagagc

SEQ ID NO: 66791 - DNA, 540 bp, Homo sapiens
agccttgggcagcgttgagtgagttgtgtggccagtagactgacagctgctgcccacctggcaacgtttgggccattggctcacggcgtctctgttgccccggagggcttgtcaggtgcagccatgtgctgctgggcagcgatgtgtgccaggggccgtgtgcagctgcagctggcgcccggtgtatttgctttcagtgctgacttcagggcagcatcagtgttctggggaagtgggggatgatattttagccaatcacaaccagactctgccagcaagtgcctcagtgcacgcggttaccaccgctgctgccagtgacacttgtttacattctctcattctggaaaaatgccagctgggcgcggtggctcacacctgtaaccccagcactctgggaggcagaggcaggcagattgcttgagcccagaagttcgagaccagcctgggcaacatgggaagcctccatctctacaaaaaatacaaaaagtggctgggtctggtggagtacacctgtggtcgcagctcctccagaggctgagg

SEQ ID NO: 66792 - DNA, 770 bp, Homo sapiens
aaagctcacgcaggccctgcagcagagctctgagctgtgggaggaggcgggggatgagtaggcaccgcgggtaccacccccccgccacccaagctgaacctgtgcctcccctcacccccgacagcggctccgtcctgtccaatccaggagctgggggccctgccactccctccctcctgtcccacacccaacagctcggccagtcctgtgggccctgcttccagcatccatgccaaatccaccatgtctccccttccctgtctcctcatggtccagccccagcatggcccgcctgcacccgccccggtcccaggctgcaacttctcccccagcagctgtcctcccggcagcaaccaccagagggcgtctgtgagcgcctgggtcagggcctgtccctcttctgcccacagctctctgtgagtcccactgtcctcagggtcaaatcccctaagtcctccccatggcccaccaggccctgcacgacctgccctcccctcctccctctactccagccacacaggcctcctccctgttcttccaacacaacatgccaggtgtggtcctgccccagggctttggcactacttgtccctccccattggcctggaatgctctgacatcctgcaggtgtcagggccacgtcacctcctccaagaagccctccctggcttcctgccctggctgtccaggtttctctgagcgttcacctttacacaccacccacgccggtaccaaccacatgttcacctctgtgactattaacacggctg

SEQ ID NO: 66793 - DNA, 569 bp, Homo sapiens
ctgtaagcgtgggtgtcattatcctcattttccagatgggaaaattgaggcccctagagtgagtcggagccaggctccttccctgcagccctgcactcctctcctcccagcctggggcacctggaagggcccctgtaccaagcctggtggctggacctccttcctccctccggaggtgacctcatccccagaccctgggcccgcccccagagaactggaattgggaagtgaaaccaaaaccagcctctcctgctggtttctctggaactagggcctgggagggtttgcgcagattcctggggtccttggggaggtcatccgggggcagagcatgaactgtggactccagtgagaaggtcccttcctggctggactccctgttcctgctggccagtctgggttaaccattgttggggccaggctgcctggcctggggacctcgggcaagtgactgtgcctctctaggcctcagttttcagaaaacagggatagtggccaggagtggtggatcatgtaatcaatcccagcactttgggaggctgaggtgggaggactgcttgaacccagga

SEQ ID NO: 66794 - DNA, 1812 bp, Homo sapiens
cccactagaaagtcatgtagtcagatggtgagggccccgcaggtcagacagcagctctgaggcagacaggggaggctggaccaagggacagacagaggggatacggggcagttaaacagacagatgggggaggctcatggctcaggcagatagagaagccctgcacagttggacagatgggggaggcactgcacagtcagacagatgggggaggcacagcacagtcagacgggggaggctcaggccatggggcagaaagacgggggatgctggatggtgggacaggcaggggaggctcaggagtgacaccacagaggggccactgggtagtcagacagacgggggaggctcaggccacggaacagccagaggggtgaaaactcagctcatggggcagacaaacaggggagacttaggtcccaggcaggcagagagagggggctgggtggtgggactgatggaggaagctcaggccatgggcacagacagacagacaggggaggttcgggccaggggacagacagaggggtgaaaactcagctcatagggcagacagatacataggggaggttaaggccgtggacagacagtgcagggaagctcgggccacgggacagacagaccgaggggagactccgatcctgaggcaggcagacggcgggtggtgagtcagagggaggaggcgcccgggtcgcggagtctcggaggggctgcccgacaggtggcggggccgggacgcttaccgaccaggtgccaggccttgcgcgggccgtagcgggcgcagcagctggcggcgcggtcggcctcgtagcccacgagcggtgtgcacagcccgtcggccacctggcccagcagcagcagcagccccgcgccgcgggagctgtaggcgcgcaccgagtgcaggtagagcagcaggtaggtgaaccacatggacgcgcacaggtcgttgaggaagtggcccacggcgtagctcagccgcgccaccagggacagcggccgcggggacggcgccgctccggccgctgggggtcccgggcccatcgcggcgccgggcccgcgccccccacccccgggctccgcggagggtaccctggccaggccttcttgggtgccgtgggggcaggcgccggggacccccaccacgcgccgggcaccccgcgtcccgctctcttacggccgcgccctcacccacgtccgccgcgtccgccccacgctcgactctgcagccgccgggccccagagccgggcgactgcgccgggcggggcagggcggggaggttccggtgcctgagccaatcggagccgcgccccggggaaccgcagccaatcgccaaggagagaggagaggggcgtggccgcagggctcgttccgcctctacgacgggcgcccacgcggtcctagcgcccgccgggtatgagggcgaaccccgagcgcgccgcaggagtggccggcacccccatagactggggaaggaaatggaccagagggcaccgccggctcccacccagacccggcctccaggcccgcaccaccccagtccacccggagctggacagcccactgcgggccggggtggagcgagtgggacgggctctggatttggggttggggggaggtctgagcccgagctggcctcggggtccgctgactccccggcctagagagacgcgatcgggcgcggagaggacgcaacaacactaattaattggttactaacggtaatgatgggggtaatcaacataatagtaccagctggcctttaacgagcgttgcctgcaaagagccccacgtggtgacgcaaatttcactct

SEQ ID NO: 66795 - DNA, 1252 bp, Homo sapiens
gggctggggactgcctcgcaggaccttaaccctagcaacccacctccgtccccatggcaaccggggcggggcccgacccggatccgccggtcgccccatccggcagcggctgggagtcttgccttcagagagggaggaggagtccgcgcctctcctactggccctttaagaggctccgcccggcaagtccgccactcgctcccgattggtcccgagcgcggccgagcgcagccgaacttgacgcaccgcccgcagccttccttaccaacctcccacgcgactcagcaacctccccaaccaatcgccggccggcgcgccgatcggtatctgcatgggctcgcccggggggaaggtctcacccaatgggaccgttcgccgaggccttcattagcatgccgggggcggggaggggcggggcggccgacgggggcgggctgcgggcggttggttggagcgtcgcgcagtcgggaggtccgggaaagtttctttggaggtgaaaacagccgcggaactccgggccctgagagggggcgggggtgcaggggtcccagggccgggccggggtctttcctggcccgggggaaaccggcccaggcctcccggggggggcaatcgcccaacaaaggattcttggggcgcccgccctcgaggacttccctgcccctggatccggcccccccagcgctccgggcccggcatcccggggctctccatcgcggggtaccccagttcgcggtctgccatcgggcagcccgggcgctactcacctccgcccgcgtccgtgttccaggtccggcccggagcggccatgtcccacggccccaagcagcccggcgcggccgccgcgtgagtgcactgatcccctccccacgccctcgctactttcccggctgcagccctagctcctgaacccctgacccagtccctcccgccggagtcttgactcccccacctgggtcagggggcttctccctccacccaattctgcaccccccacctcggcctccagtccctcccaggagccccgcttgtcccaccttccccggatactgaccccatcagaccctgcctcctcgggctcatgcactctcgctgcagccccgccgtcgggggtcaaaacgccctggggtgggcttttgggggaggggagattcttgggacggggctgaccgcggtatccttggctccaggccggcgggcggcaaggctccgggccagcatgggggcttcgtggtgactgtcaagcaagagc

SEQ ID NO: 66796 - DNA, 507 bp, Homo sapiens
cgcctccgcctcccaaagtgctgggattacaggtatgagccaccgcacccggactatatgtccttttgtatctggcttctctcactgagtgtgattgtcctccagatttatccacgctgtggcctgtgtcagagcctcattccttttggtggctgagtcattgtccagtgtgtggatgaatccgctgtattgaccccatctatctgtcaaaggacacttggctatttctaccacttgtgagtcatgctgctgtgaacattcatgtacatgtttttgttagaatgcacattttccattcttttggagatacagattgctgggagttctgcatttggcttgttttgtgtacgtgtgtgtgtgtgtgtgtgttgcttattgagaaacctttccagggacttctgcgtttaatggcatacataagacatcctaaaaaattcggagaataatctgaaccccagaacctctgaacgtgaccttatttggaaatagggtcactgcagatataat

SEQ ID NO: 66797 - DNA, 1806 bp, Homo sapiens
aaaaacaaacaaacaaaaaaaccaacaaccgatgagtgaacttggcccagagcggggcaagactggcctgagtgtcagccacgaaggggctgagccagcactggggccccggtctgggaatcagtccctgtccccattttggtttctctgtactggagccggctcaaggcaaatccgaccaagtgccccatctccagaagaaaaggaccatggggaagctgagattcaggcactaggaatcagctgtgagtcctgccagctgacaccgagtctttttccctcccacagcccacctccattagcaaatgttgtctcctctacttccagaatccctctgaaatctacgcactttgcccgctgtggttgactacagcctccctcccatcgagactgccatcatctactgtctggacaattgtgccgtcctactctgatgccgctcctgcctaccccgctccatcccttctccacctcaaagccagaaagtatgcagagttaagtcagtccacgtcactcccctacccaaactcctctcaagactctccatttccctccgactaatagccaagatctaatgtgctgagcacacagggctcgatatgatatgatctgatctctcgttacctccccgccgcctcgctcacccggctccgggctgtccctccaaccgcccggtcccctgcctggaacgcctctcgccttccttccgctgccaggttaattccaaccggtggtcaattgtccccttctctaggaagccctccccgagtaagtcgggggtttcccggttccccgggatctccaaccctcggtcgggcgctcctgaggtaggagccggatccccagcgctgctcccgcagcgaccccacctgcgctcccggctccgccgcctccgtctgcgccgtccctcgtcctcccggcgccgtcggtttcgccgcccatggctcctgctccgacttcggctcccgctctgactctgccgccttcggccccggcgacccgcggaccgcgagcgcgagcgtgtgtcccgacccatcggctgggccagtggccgcggcaccaacaccaatagccgaagcctgcgctgggggccttcctcgcccacggcgctctccaggctgccccgtttgcgcctgagccgggaaagagcaacccatcccgtcgccccagcccgcaaggactccgacaccccagactttccactacgtctgcaaatgtggaccgcgtgattgactccagtgggattgttgcctccagggtggcggagtctcctttcaggcagtgctggaggcagccctaggcgggtccccacgcctcagggggcctgagaaactgtgggcggggcaagggcaaactaggaaccttgtgcagggaggggcctgccgaggcgagaccaataagaagcgggtctaggtcggaagtagcgcttcattggcgtggccaggggcgtggccgaggagaggcgtgtccggggagcgaggtccccgaaaggcgaggaaccgggaaggtgttaggtgccaggcagctccagagggcagagggcgggcgcggggacagaaactgaaaagccttcttatgagagtcatcgttatgctccaccacctgccaatgaacacctatgtattttgggagttaagctttaaaaaaaaacaaaaactttgataactccctgtattcccccatcaacccattttagagacggggaaactgaggctcagagagggaaagtcactcttaacacttgccttctcaacccaggctgcccagctttgtggtgtgggtgctggggacccgtgggagggttgt

SEQ ID NO: 66798 - DNA, 717 bp, Homo sapiens
cccgagttccctgtcctgcccacccgactgtctctatgagacacactgggacctggcacagtgcctgcccctcctgggatcctgcagaccagtgactcccatctaatgagctggccagggatgcctgcaggcttcaaccccttctatgtgcggcccagcccgggcagggcccccactttcagatggacactgacagccttggggagcaccaggtgttgtggttagagaagcctgtggctcagcatgtagggcctgagcgcagatccaggctcacccgctggctgtgcggctcggtctctctgggccctgggggccgaccttagcggtggggtgaggtggggcaggtgatgtcccgcacagggccaggcctgtcctcagtgctgtgtgagctctgcctcctcaccaagctcttgtgacctctgcccccagaatgacccacacagctcctggtaaacagtaggtgctcagtttgccttgtgcagcttcctacaatcaccaaaggctggcaaacagccctggatgacggaatgatcctgtggcatcggtcccagagagtggggtgtggggacaggctcaacggctggctctctggagacagatcctgacacgtggtgtctgccaattcccacggtgttgatgagagggggtccctgacctcgaggccgtgagcaagtgtgcaggccgggaagagcagcctgcctgcaagcgctgggcact

SEQ ID NO: 66799 - DNA, 562 bp, Homo sapiens
aggctgctgtgagctgtgacagcgccactgccctccaacctgggcaacagagcaagagtgtttaaaaaaacaccccaacaagtgaggggaaccacctttggaaaatgctggaagagccaggggcttgaggcgtgagttgggtccccagcgccacacacactctgatctgtgaatatgtttggggaccagaggacgccggaaacatgaggtcacatcaggcccagggcctgggaatgccccagtccctccttgggctcaagtcaccacccccgccctgcactgcccgaggtgctctcgggccagggaacggcgccatcagttatcacacgtcggtcaacacaggctggattttgcggagtcagcaacagccctgccaaccttggcagctcagaacagcgagggtccttcctcctgcatgcgctgcttctgccatggcctggctgggagtgatggtgcagggtgagagagccgtgtggggtggactctgaggctggagggagatctgtccaggccactgctgtcgcccagcccagccatctgcctgcctttttctgcccacagc

SEQ ID NO: 66800 - DNA, 1296 bp, Homo sapiens
ggaaacttccgatttgggagcttgtgacctcgactgagaaggaactgttcccttcctctgggctctgcacaccgtccccacagaagggaaggcccagctgccgccacctacccggctggaggtccaggaagcagctaaagggggcatgagacagccgtgccccccgcccagcccgcagccccaccagtgtgtcctgggggaaggctcggggagaggaaaagggggcgacagggcaccctgtgtgcacagccggggcggtggaggcatcttgagatgtaacccttttcctcccctcattttagcagggaggtaaactgaggcccaggaaggtgaggaaaggtcgcgcacccggactcaggtctggggacttacagaaagggaggtgacatcaggaggtgggcacgcacggcctcagagacccccgcctccacccaagcagccgccactcacacgacgggcagcccctgggagcgggtcaggcagaacggggatccccagcggcgcccacgccgagtcgcccccggcccgggagcggtgggaggtagcccctcgcaggcctcccgcttcccggcgcggcttcagccccgtcctccccgcggctccaggggactgccccgccccaggctcctggaaccggcggcgcccccgcagcgaccgtgcagcccccgccccggccccgcagccccgcgactctcggcgctcggacgagcccagcgggccgcagccccgggaggccgggccgttacctgccgccgccccgctctctgccgcccacgccgcctccgagggcacggcccccgcctcagcgctctccgcctcgtccggtacctccagctccatggccgcgcgcggacggcggcgggggcgcccgagggggacccgagctgcgaccgccgccgccgaacaacaagcgccgccggccaagggagggcgcgccgggccggcgcggggcggacggggcggggcctgcgtgcgtgcgacgccgcggacggcgcgcggccaatcggggctcgggggcggggcctgcttgcgacccgcagccaggagcgcctcgagtgccccctcgcgcccaggggtgggagtacagagccaggctcgccattccatcgtattaggtcagtaagattgacaggcacgatacgtatcaataacattgctgtgcacaacacataccaataacatggatctacacaacacatgacaataatatggatctatacagcacgtgccaataatatggatgtacacagcacatgccaataacatggatctaaacagcacatgccaataacaggg

SEQ ID NO: 66801 - DNA, 844 bp, Homo sapiens
cgggagtgcggtccattcatgtctgaatgtagccaacgagggtttcctaagcacctaccatgtgcggacgcttgataccagggcctcggcggtgagggcacaggcaggagcaagctcacctctgggcaagcaggggttaaggccagttgctcccacgtgagggcaccttgcgacagagccacacacccagtcctcctgctggcccgcccctcaccctggtccgtctccctgtgtctgtggtcgtcagttccactggcaggggacctgcctccctgttgccaccacaagagaggaaaagttggtcaaacaggtggggaggccagagctacaagcctcgggttccctccccaccacccgtgccaggcaggcacccgggccctggcacctgctgcctgcccagaggccacccagcctcctagacaggtaagtcccccgccccactgtgcttttccacccagtgtgcattgtctgagctggccttccccagctgagggtccttagactcccccccaacctcccccaccacgagctgtctccccggctcctcggaaagcaggaaactgacactcctgcgtgggcatctgacatagtttcgtagggattatctgaccggcagttactgcacctggcggcctgcccaggacgctgagctggaaacttaaaagggtcattgttacctaggtggcgcagggaccggggaggcggcaaaggggcacaggttggtctctgatccccctaactgaggaggggaggggatatcagtccagacggagcctgggtttacctcctgcagcccgaggctaggaggtgacaggtgggaaaggctgcgacctcactcatctct

SEQ ID NO: 66802 - DNA, 740 bp, Homo sapiens
gtaacagattctcggtcattctggggtcaagacgagctatcccggtccgaatcggagtctggtctcatcagcttcctggtttgtagaggatgaaccctggctcagagaaggacagccgcttaccccgggccgcacagccaagtagaaatgtcaggcggccaagagtcaagacgcagaggacagggagctggtggcgggggtggtgctctggaggctggccctgcccccagctgatgcctcaggctcagcatctcgagaaagtcctgccccctggcttggtgcttcctcgtggccctgagtcccggggaaagtccagggcagggagtatgggtacttgttcttcctctttagggctggccaggggccaggggagctgtgtttgctcagggtggaacctgacaccctttggaatggattgaggttagcggaagcctaggctggggggaggggtcgcccagggagcgaacgggcatttattgtgcacttactgtatgcgcgagtgtggggtcaccaggccttggagattcagcagtgagcaaggcaggccaagcttcctgctctcgtggggcgcatattttggtggggaaagacagacatgaaacaagagcgcagtaatggagccaatggctgcacagagggtaacatgcgtgagaggcgctttgtaactttattttactttttatatttttttgaaacggagtctcgctctgtcgcccaggctggagtgcggtggcgcgatc

SEQ ID NO: 66803 - DNA, 2786 bp, Homo sapiens
cggaggttgcagtgagctgagatcgcgccattgcactccaaggtgggcgacagacgagactatctccaaaaaaaaaaaaaaaaactagctaggggtggtggtgtaggctgtagtcccagctacttgggaggctgaggtgggaggatcacctgaaccaggggaggcagaggctgcagtgagccttgattgtgccactgcactccagcctgggtgacagagtgaggccctgtcttaaaaaaaacaaacaaacccgaaaaacaaaaaacttgaggtttcccggctgcctatccggtgctaggctctagctgggtactgttcatacagggcacataatttaatacccactaacccttgcaaggaagttaggattcccattttacagatgaagaaactgagccacagaatggggaggtgtgaggcagtggcttcccgagcccctgtgtcatcccagacctctctcaactaatggagtctgttcactccagccctggttcttccaggtcctcctccctcaagacgcggaacccaggctggagacccagacctcacaccctgactctaccgactggtcagaggcagttccccaagaccccagacccaagaccccagtcccatgacctcaacccccaatacctccatccagaactttagacccaggaccctggacttaataccagagacccaagacgccataaggcggaccccagtctccaaacctccaatgctaccccaagatcgactccagactcagaccccgacttcaggacccagccccaagcccagaccctagtcccccctcagaccgaagacctcaagcgccgactcagactgcgctctgcacctcgaggacactcacttcccaaatcgaggccgcctcagccccgcgcagcctccaggaccccgctccccacggacggccccgacgtagcccgggccgcgtccccagaaggcgcagctcggggattcccggtcccggcgcccgctcctctatccgcgcagagccctggcccattgagcatgcgcggcctcgcgaggcctgctgggaaatgtagttctcccacccagcctcgccacgcgggggcgctgggacaactgcagatgttggaggggagttcgaatcccaggcttcccggcccgcagactgccccggctggccccaggacctgtttgttctcctgcaaaatagggttaataatcactgcctggctctgggggctgtgttcattattccaaaggatggcagatggggagaagtggggttgggaaatattaaagaagtgtgagaggtggtttccttgggaccttgaggcaccggaagcgtcgtggagaccctgttaaagacggactttcggtttggctcacagtagggagacacataggtgcaccatggatttggggtcggcctgggaactttacctccctgagaactcagtttcctcattataagctggggaaaaaatagtacctacctctcaattgtgaggattaaattagatcaagcgggttaaggatttagcagtagtagagctggaaaagaatatataaaatatatattattaatttatatattatatataaaacatactatatattatatgtattatatatgttatatataattttaaaaatataatgttataaaaattaacagtgattagactccagccctactggagtatattagactcattgttaatcttctttttttaactttaaagctttgaataattactcattggatggaatcaggaacatataaagtgtgatatttttagtaaatgttatgtaattgaagaagggcaagaagtcaatgaaatatcccttgaacgcctcctcctatagtaactgtgtatgtctacaaaagtctgaagaaatcaccatagattatgaaagcttgggagaccgcatttcccagacacctccacggggcctacacttccacggggcctacaactcccaaacacccttgggccactgacgtcttccggaaacgtgcacttgcaagctgcccgcaatacgtcatggcgaccaaacgccttttcggggctacccggacgtgggccggctggggggcctgggagctcctaaaccccgccacttccggaagactcctggcccgggattatgccaagaaaccaggtgagctgggttaagaggaaccaaatggggacggtgggtgcactgaggaattgacagtgcgcaggcggtggttggggaggtggtgctagaactgatgcgcaagcgcagagaggcggatgccaggctgtatgcgcaggcgcagtttgagggacccagcgccgcttggagctcgggcgtctggctcggagatactgtagcgattggacccagggcgcaggcgccagcttggggcggagcggcctgggaggaggatgtggttacgtggagaccacgcgtttcactgcgcaggcgcgggttggaaaggatttgaagggagtctggggaggtcatgaacttgggttccagttctgtttctctgcctgcctccaaatcgctgggtaaccttggccaagacgttaccaaacattcaaagaaattatggagcccgtttaattggccacttcagcaagaacaaaacaaggttattaaggtttagctggatacagccttgcctgatctcctttgttgaaagggggaaattgtccaatgttcggccttaaagacagacacatagcagacaaaatataacttgaatgacttggtcattccaagcatcggtgttacttaatgctatgtccaaatcccacttaaagttacttaatgctgtg

SEQ ID NO: 66804 - DNA, 509 bp, Homo sapiens
gctatgatttcactactgtgctctaggctgggcaacagagcaagaccctgtctcaaaaaaaaaaaaaaaaaaaaaaagctgcctcctcaatgaggccttccctgaccaccccacagatttttttctctctctctcctctcctttatttcattcattttctttgccgtaagcatcactatctgccttgttcacttatttgcttattgtcttcctttatatacatggtctcaagccaggaattgctttgcacaatcctgggaaccaccaagtccaaaatccacagggcaggctggaaactgtcaggtaagagctaatgctgcagtttttgtttttgtttttgagacggagtctcactctgtcgccaggctggagtgcaatggcacgatctcagctcactgcaacctccgcttcctgggttcaagccattctcttgcctcagcctcctgagtagctggggttacaggcatgcaccaccacacccagctaatttttgtatttttagtagagat

SEQ ID NO: 66805 - DNA, 3670 bp, Homo sapiens
caaggcttcacggcaaaaacagaaggctaaatactttttttaaaattatgaatttctgtttgtttgagagatgggggtcaacttatgttgcccaggctagtcttgaagtcctgggctcaagcgatcctcccgccttggcctcccaaagcgctagaattacaggcggaagccgccgcacctggccctgcctggttctttttacaagctgcatcctattccagccctgatgcagtggtttggggaaggccatttaagaggctgctgttcccagcggggtgcggtggctcacgcctgtgatcccagcactttgggaggccgaggcaggtgaatcacctgaggtcagtagttcgagaccagcctggccaacatggtgaaatcctgtctctactaaaaatacaaaaattagccaggggtggtggcgggctcctgtaatcccagctactcgggaggctaggctggaggccgaggctgcaatgagtcgagatcgcatcactgcactccagcctgggcgacagaatgagatagtgtcaaggaaaaaaaaaaaaggctgttattctggtaaacgttctagcaactaccccagtcttaagtcattccatccatgtatgtacagttttccaatgaattaattcctagaggtgaaatcggcgagttaaaagaaatttggctgaattttgctgacttttgccaaacgacccctagcaggaggggtcaacactgaagcatgagaagggggaggagggagcatgctttctctgccactaacgaggaaattcctgaaggagggacctcaggatcccaaaagagcctgcagcactctccctagcctgacacagagctcacttatttacattcccttctggtgacatcatggggaggctccagggaggctggccagtagcaaactcaccaaataaggctggaggctctacaaaaggaggcagggcctagtggtgcctggctagtctggagggggtggggccccagggggaccctccaaggcccagacaggcaggaaatcagctgcctccctggaagaggaaacctctgctttttcccacaagcatgttaaacaattgaccgaggtttgggcccagctgggagacacgcccctccctccccccactttaaacatccaagagctgggcaaaaaaactaaagtgcctcccacaaaagaggattaacacagggagatttttttttttttaaataaatggggtttcactctgttgcccaggctacagtgcagtggcacgatcatagctcactgcagcctcctccaactcctgggctcaagccatcctcccgtctcagcttccctagtagctgggactacaggcatgagctaccacacctggttaattttttttcatttttattttttgtagggatggagtcttgctatgttgcccaggcagaagacacatcttttaataacaaaagcagctggcatctgttgctctggtgccccatgccaggcacggtcttggctgctgtaacggctcaattacttttctccccacaggaaacacacagaggattcccaagcaggaattcacagccggggctgtctgactccacggcccaaattcgttcccccaccgcatgatactgactcattccttctcagcatacaggataaagaacaggaaaggagagctgctgttcagaaaaccccacagcgcctctctcctatccctggagcccagccgtgcgggcagacagctcacctgcccagctcctcccccatctcataatggtcctccacgtcctcctgcctgaacgtggacatggcggccggtccgccttccagcagcttccactccagggaaagtgcagtcaccgcagcctggagataggacctcaggagtcccctaatggcaaccctggagaagacagggaaagacagaagtgaggaactgagacaccacccttttctcctagattaatggacagacctgtccagcaaacacaagcctcccacctctccactctgaagctccaaactcgacaaaaagaggtgctgtgtttactgggctgggtcctgtcatgtcacctcttagagccccataaccactcaaaagtttggtaacagccccactgggccaccttcaccccgcaaaactctctccagacacataattctgatttccccgacgctgcctgcgtctttttttgcctctcactcctagacttctctcaacctgctcagccaaaatcccccaccattcctgcacgttctcctcaacctcaaatcccagggctaccttactccctggccaatgtcttaacgaagttctcaagtctacttcttttgttgttggtgttgttgttttttgagaaggagtctcgctctgtcgccctggctggagtgcagtggtgcaatcatggctcactgcagcctggaactccaaggctcaagcgatcgtcccaggcctcccaaagtgctgccattccgatcaaaattcccaagttactaccttaacccctcctggtccttgccctcggcaggtctcttaagaccctcatcgatggaacacccccgcccacccccaaccatctctgactccctccaattctgaattttccaagaaccggacgacgccttccacgctcctgaaagcccactttgcctccctcccccgctgacctccactgtcctcgcaagattaacctcttcctccacgctccatgtatcaaagtcccccaaccgccgtctcccctaccccccaaaacgggccgccaaaaagggccccatctgagtctcctccaccgtcctctgccccttctcgcccgcaatctccgcacaagcccctaggcagaccccagtggctccctttgcagaacctccccccgcccccaaggccttgcccatccctaaggctccgctccagcatccctggggccgctacgcccctcgcacgcccggccgagccctttccccggcccggtcacccagatgggtccccaaacctaccagctcctcagattctctccctccctcgtcctccgcgggcccccgaagcgccgctctggccccacccagccctccagcctcggcccgagcccgctctttaccctccgcagcccggagaatacggccggcgccgccgcgctggccaccgccgccgcctccagaagccccgcgcccctgccgccgcgacgcgcctgcgccgacgtcaccgcacccgccagtgcccacccccgggaaacgaaccccgccgcctattggccggtgcgcccgccgctcgtgccgcacctcgacgtcccgcccccagctgccttttcggcacccacacccggatgcagcctcaccactggctgaacactcgccatccctgatttcattggctgcagtcgacgctggtcaagcggacggaaaaaaggccgacttccggtcccttcatcgccccgcccgcctctcctctgacccaggtgctgaagctgcgagaagtgaggctgaagccctgcatcccgcttcctgccttcctggagcaccggttgggcgaatggatggctcacctgtggccgagcgcgcctggcagctcctggagtggaccctgggactgctttagtccctatgtggcagtttcctccactgaaaactgttacccacattctaaatacttaaaatgcaaatgaggtcaatctggggttgtcatacacaggg

SEQ ID NO: 66806 - DNA, 3926 bp, Homo sapiens
cgtctgcacgcacacgcctggggacacgggggacagggcggcgctgtcatcctcaagcaaggatggcccccggttccaggccgtgcctcagggggacccactgcttacctgacacgcagtccaccaccaccaatgcgccatcggtgactcggagggcagcagtcacctccgaggagaagtcgacatgcccgggggagtcaatgaggttgatgaggaagccggcaccgtccttgctctgcttgatgaagttcaagtcattctccgagagctcgtagaagagggagatggcactgatggagggagggactcgtcagggggacaggagccacacacctggcccagggagtctgggatgctgtcagaagccaggctgctcctccctccatgactcatccctggagaggctcccacaagagccaacccacccttgtcctttgcctctgtccgagacatgccacccccatgacagggaactcctggtaccagccccatagccagatcctcagagccctcctgaccagacatcctgccccaccgacttggtcccaagattcatcacacctgactcaaagtagcaactaaaagacccagcaggacggcaaaagcctccagagactccgaccctcccctcctcacttctgcccctgctccaggggaaatgaagagccttagccagagtccctcaccaatgtaccaacccaggacaaaaagcagttggggtcaccgtactctgcgctccccctactcatatcggggccagaaactgacatggaatgaacatcatccagtgcaacacaggagcttcccagcgtcccaagcactagaacaccctcccctcccaggtgtgacagccaaacctctccagatattgtaggagtgggggcaagtcccccagggagggagaaccacggagttaagccccctcctcaagaaaaccttccagctcgcagtaccccgaatccctgtgcctctccatcctgtctcgctggactgaacctcactcattctcccatgaattaagaaaccaggggaaagagacgttgccaagtctctccccgcgcaccctggcccagtggcctccagctgccaggccagcacctccctgcctgggtacagagggcacagggagctcacgttgacttgatggtgatgcaacgctcctgctcgtccttccgggtatcagtgaagcgtgtctccccggcccgggccgaggcgatgatgcccgccttgcacaccagggagtctgtcagcgtggacttgccatggtccacgtgggcgatgacagacatgttgcggatgttggccttcttgtccatgatggcgcggatctggtctaccgtgaagttcacctgggcaagacaaggaggctcagaccagctcgtgatttccaggaacacagcatggcacggagcgttcagtccaaacgaaccagcatgcccaaggccaggagggggttggtgctggggtgccccaagcccaccgaatcttgccagcctaacaccccttaagagccaccccgcaatctccaaggaaccaccgttaataggtgtcattcatgattgacaacccagaaataaaagtgctcaggaataaaactgagtgtcaacagatttccttgataccaggtacaaatactaaagtctcatttggggccaaacacgtaagggatgaatcctctcctaaagccccctccacgttgtcaccgggccacccaaacttccccgagcaagaagcttcatcataaaatgcaaggtcaccccttggcaaacgggatcagacaaggccacccaccccaggaaataacggggagccggaacggccctaactgccacaagcctacacctcgtgtctcaataagagtctttgtacatctgggagtcataggaaggacaagtgcctaaggtcgacgattaacagcatcaggagaaggtatttggaaggaaaaggggagcctttcaggtgtcgctttgctcgttctgccattccctgccgcccctagtcccccggcagaaaatcgatctcaaactcgcggcccgcgggttacataaggcgcctccctgtctccccgcttccaccgcggtgcccgccattactacgcctgccacatcatcattccccacccccatccccgctaacaacccagctccaaccaggtctgggcaaggttatggcgccctcggaaacggagaaagggctcggtgaacagcgcggcgcacagacatggcggcggccgcttccccagccccgggtcctccggccccgccgccgctacgtctcctcctggcacggggggccccagcgtcccaggctaggcagcgtaggccccgcggaggccccgccgccgctccggggcaccagcgaggcagggttactcaccatggtggcggatggcggtggattctcccaggtagaaccgaaagaagcgagtcgcgccgaggatggcggcgacgacggcggaagagaacgctgacgtcaacactcagctttttataggcggacgccggttgggcgggtcatgtgactgcgctgcgaaggcggggcgaagggacgccgcgcaagcgcacggaggcgtgtccccccgcccgttaacccattcggcgccggcgcggcgctctagaatagaagctgggcatctcgggggcggtggtcgccctcggtgtgcagtgttcaggtgcacaaagtaaagagcgccgttttagctgagaacgagaaccatagcaacgatattagcttacaagttgtccagtacttctattaaaaccaatttacaaggtgaatagagtctgtggattatacccaagtcaatttccctgtttggacattgttacgtaagacgatacccctgggagaagccgagggaaaaaggacactcgcgaccactatactgtttttgcaactccttacctgtaattatttctaaataaaaactttataagaagcaggcatcggaatcactgatcccacaaatgcatactgagcatctatacaccaggcattgttaggggttttgtagatatagcagtggaccaaacaccttgctagcttgaccacactgcgtgttcttctaccagctactaggatttctctgtgcctcaatttcacctgctcggaggtgatcaataccaccctattgtttgggggagagtgaaacgaactaaagacatctaaaagaattaggaccgtgcctgatacccaacgctcaataaacgctatctattttaattagctaagattgctattaataaaacagttatttatttcaggactggtttgccatgtcccaggcacccggctaagcggtttactggcacaatttcattttctatttcatttcctctccagggggaggcgcaggaagactgtttagcatttgtgtcctaatctgaccctaagaaacagttgaatgtatttcatatctcatgaattggcattcaattgtgtaactctatcccttatgaaaagcccaacccgctgtttagcacatagtaggtactcagcatttcttgcatgaatgatgttctcacagtgcaaatgaaccccctgcggtacatctttccttaaactcactttgtgaaacaggagagccactgcagtgcttttcctgggctgggagagggggaggtgtggatccacaaaaagcaatgcaaattccagcctggactctaaaataaacctgtacactcctccccctcacgaatgcttcgggcactttgctttacaaagcgctgtctcaaccttgggtttcatttaacggatgattgctcttcctatcaccatttaacccagtggaaaactgaaaagtatcttccgaaaggattgaggctctgaaaggcagagggcgcggcagggagcagatgggagcgcccggggtccctaaccacctacacctgtacctgtgacgcgtttagttaagttgcaagtcaagc

SEQ ID NO: 66807 - DNA, 1938 bp, Homo sapiens
agagtaaaactccgtctcgaaaataaataaataaataacaatttggtatttcatccatcatggactcttttgcactgatttttttatgtttaaagtgttggactagccaggtgtggtgactcgcgcctgtaatcccagcactgtgggaggcccagacagaaggatcatttaagcccagacattcgagaccaccctggataacataatgagatcctcgtctctacaaaaataaaaataaaaaataaattgcactaaaatacttgattattgaagtttgaaatccacttctacgggcacgaagccacttagctccaaagccaaggagcgctttggagaagaggtcccaactggtgcagatccaaggtttcccatgggtggggaggcaggatggggggggcgcctgcaaagaggtgagggctgtacgatctccaaggaatttgggagcaggggtcccgcttttctccgccgggcgcccccagccagctggttgccgagcccacgccccatctgcacaccaggacccggatgtgcagcgcgcggggtgtctgggcccgtggagcctgcaccgcgctgcgctgcaaggcgcctcactgtacgcactggcggccgttgcggcggagcaaccatcccctgcccgacgccgccgggagtctggagacgcacctggcggccgccgcgcgcaggaagccacggcacctagctgcattgttgtcgctgccaccgccccctctcgccttccctccctagaggaaaccgagcacccgtccccacctgcgcagggctagtaccactttaaggagtcaggcgccgccggggtaggcgtggtcgccgcgagcgggggggggggcgctggtgtaggacggacctgattggccggaggcccgggcggtggccgcgcgcgcctgcgcaggaggcagcagcgcgcaccggcggcgggaggagcgcgcgcgggtgctaattggcccgggcggcggccccgcccgcgagtggtgagcggtcacgtgacgcgacggctgggggctcccggcgcgggggacgctggtgaccaagatggcggcggagctggtggaggccaaagtgagtgagcggtggcggcgccggccggggcaagtgggcgagagggcgggggccgggccgcaggtcgaggtctgcgccttctgtccggggccccacagcgcggccggcccgcggctcgccgtcccggcccccagaccccgacccccggtctcagggtgagggcggggggcggggaggccgggggcggggccctcctgcctcacccaggtcttcgcgccgggggtcgctcccccggcttcaggcagggtccccccacccagcccgagcccttagggtcccggtccctgagcgccaggccagggccgcgcctcccggttgaggcaccgtcccgccgggatgcgggacgtgttgagctactcgttgccctcttggttccgagccggggtccttgctttttggctggtgtgttggggggagtgtctgcgcctccccgcccacagggctcccaggactgctatctgggtctcgtccccgcccaacaggccaggctggggtttgcgagtctcctgctcggaagggtcccccgagtcctggatagtgtcctgccaccgtccaggtggaggagtcagggccctgagaccacccccaagacacggcacgtcctcttggggtctggagttcaggctcggtcttgagcccctcttcagctcctgcattggtcccagaaccccgcccccttcccgacaccgtctctcacacgccggagtgggcgcttgggggaaggctgggccctccctttccctccccataggatggagttcggaccactcttcttggtcacagaccttctttattctcctttttttaatcttaaatcctggactgtgctttggtcctacctcgttcctctcgggacagaat

SEQ ID NO: 66808 - DNA, 2408 bp, Homo sapiens
aggagaatcgcttgaacctgggaggtggaggttgcagtgagctgagatcgtgccactgcactccagcctgggcgacagagcaagactcgtctcaaaaaaaaaaaaaaaaaaaaaaaaaaaagtaggtgtcttgcctattcccattgagtgatgccaatctatagtaataaagtgtactccttcctgggatccggagggcaggagggagccctgggtctcaagagccctggctagaacctgacctactccttgctgctgcctgttgtgccccacatctgagccacctcgggtttcttccttctcacactcaatagactgaagacttctttagtgtggggactggcaaactcctactcatccctcaaagccctaccttgaatgcccctctacctttcctaattcccaaagacctggctcccctctgggttcctccagccctaagtccctccctctggcaccagctacagagctggtgtccctaactttaacccctccttggctctgttgccctgagggtcaaggcctggcccttggcaaccagacccctaccttatctctagccttgctgccccactgaagccaacagaacgtggtaacttgctaacagaaccctggcctaaccaggtctgttaccagcctccaggcctctggtttactgatcaccttctgcaaagcccacggcaaggtctccgggctgccttgcccagatctggcacagggccggggtcacagaggggatggcagccactaggtttttctagaaccgtgcagagactccccagatgagcctgggaggcccagagagaggaagggacttgcctggagctgcacagcaggccagagggccacgcagaggcggggtgggggcggaggtatccctagtttcatcaccccgagccccagcctgggtaattatagccccggccaccacaggccccacttactcaacgccctgctgtgactcagaggggcctcgggctcccaggcttttggagggtggaggtgctggtgtcctggggaggggggaccagagcacggggtgggggaaaagaggaagcaggtgggtctaaattggggtgggaggaagaggtctccacaattgtccctctctaagcctcagtttctctgactgaggggatcagccccgggtcgggtgggatagccagcagtgcccgagtcagaatgaaaccgggcctgtggcctgcggccagggaggcagggtgggggtcaccaccttcgctcagcctggtcccctctgcagaccccagttctctgcaccccaccaagctgctcttcctgagctcagagacgaacccacagtgacccctgcctggaggaagaggagccccccaagacctccagtaccccaacctcaccaaggagggacaaaccaccagctacactgcctgcctcccaaagtgccctttgccccctgcctggcactcctgggcgccggagtccaggccgcaccttcctctcctggcctgctggggagggggccggggtgctggggaggggtcagtcccagttcctgtccccacggggtggggttgggaagctgggacaatggcctctttcttcagcctcggtgggcgtggctgggggaaccccagggcgggcggggggcagggggtggtgctgagtcacccagcctggccaggtccctgcctgccagccccctgcccccaccgctacagcccgccccggatctacgaggcccagccagccacctctggactcctgagaccgaattgcaaactgcccgggcctggccttgaactcctgctgtttagggaccaagtcctgtggctcccaggggggcacagtgatctctcaagctgagctggcctcagggcctctgcactggctgttccctctgcctggaacgccctttcccacagctgctcctcccctccttcaggttccggcaaggcctgtccccggcgcctagaacaggcctggcaccagcagacgcttcataaatgttggctgattgaagcaaatgacccaggctcacgggaaactcagaagccgctccacggcctgggctgtccctccctaagcctgagggcctgtcaccctctcccaaagcagaaaaagaaaaaaatccaaaagtgcagaagagaagaaccagccctccaggaaggaagaacgactgtgccttcccgcccacctcccgcagctcaaccctgtccggcacgctttgcatatgatgtggctgtcatcttatgtctggcctgtgctgtcacccaccgggatgtccacccacaagggcagggcctggtctaggctgttcttaacagccacgtgggtcagggaagcgttcgttggctttgggcccaagaggtggggtgtgtctgtttgcgtgtgtgtgcatatatgtgtgtctgtgggtgcatgtttgcatg

SEQ ID NO: 66809 - DNA, 4489 bp, Homo sapiens
gaggtggaggctgcagtgagccacctagatcacgccacagcactccagtctggtgacagagcgagactcgtctccaaaaaaaaaaaaaaaaacaataacaacaacacataacacctacttcccgccagttccacccgaaccccaccggcagcacccactccgtcgtgagctgaggccacttgcccgaggccccaccatgaggacacagttgcgtccaaactcaaacccagagtggacctaagagccgaccccttggcctccccaaccctgactcctgcctcctggtcaggcctggttcttttcaggggggctctgagtcagcaggaaggggtgtggcagcccaggcacggggacccagtgccgaaacccagctgaggtcaaggccaccgtgggtgtgccccgtccggacagggccagtgactccgcaggctaaaccccttcctgcccctcagagcccccagcatagggctcagccctggctgtgagtaacagagaccgggctacagcccaggaggagcagggagccgggggaacccctgtccacctcctgcctgcccacaggactgcctggcagcccctccccaactctcagccaccccagctgagctgttcagccccagccaaggccttggccctctctgggcctcagtctccctatctgtcaaatgggcagaggtttcgggcagcgccgggccctggggggactgtgtctgtcccacccctttctccccctcccttttttccgccttcccctcggctgtgactcatccacccactcggagcttgtgcaaccctctggcccctgtccccacccctccgccctctcctgggagcccctggcggccccgagtcacccagcacagctcacattcctccaggccggccggtggctctcgggccagagcccctgggcaaggcccctggggagagggcctgagctgggcctttcatggcctcctccgggccaccagaccctcctgtcccccagcccagcagctcaggcaggctctgacgccgacgggcttgagccaggccccacaagggaggcatggtgtcggtccagccggacccaaagcccagggccctcagcgcggggcctgagctgccaggcgacacagaggcctttgtgagcttgctcagtgccaccacgctccccaggcccctccacccgccttccttccctccttccagcctcggcccagggcccagctgctcagcacccccgtctactctaaggcctgtggtggggcggtgggctcagatgtggctgctgggagcagggagggtaggaggggagcgaccccacccaaggctcggccctgggaagcctccgaggagtcccctttggtggtgtccaccccctgccaccatctgccgtctggccctgggccgcggggagcgtgtgagcagatggagctccggatcagacgggcccgggccctcctacccaccccagcatggggggagacctctgacccaggccaccaacgccccaagatggctatccctggcctgctgggccgttcctcccctcgggtgaccagggtccccgctctggagtggctgggaggtgtctttcctggggcctggaggatgggcccaaaataatccaggtggctcagcgacctcctgcaggtccccgccagtgtgaagatcccagttccaggttgggtccgggggtcccagtctctgccctctccagcctgggaccctctcttgggcccctgttcccccctaaatatcactgaggccctccctcaaagcagcgaggcccggggtgatgtcagccaaggaaagcccccgtgagaggactgtggccgcgttttacagatgagaatgccggggcccagagagggctgcagtcctggcctaaggatgcccggcagggctgactcccaggggctgggggccaggaaatgatggaggggccggtccccccacccacccagggcaaggccctgccctcgccctggaaactaaactcgctctgagacaactgacccacgccctcactccaggaacacaagccacctgccggccacgccctgcgccaatgcccccacctaggcctcctggaggcctcccctaaggaaagggccgaagaccctgcctccgaggtgggagaggggaggccgggcccagccagagcacccccggcgggggccacaaagtcttggcaataaaaagtccccgagtgctgaagccccactgtgcgcccgacacacggtacacgcctccggaggtggcggtttcgttcccctcctccaggaagccccggccccacgccagccaggtccccacccctgccggccagggtcccctgggctcggcccacacccacccggggccccatctttcatcacagctcctcccccgcgctggcctccgtgggatttccggggctgcttggtgctgactcggcggccgaggggcaggccctggcaggcccctcctgggctggaggtggggcgccctcctccccccgggccactcccaggcccctaagcccaaccctcccagggtggcgcatagtaggggcgcagcaaaccgccggataaaccagagacagcccacgccccggcccacccagctggctgccaggcatacccagaagcagggggctgtgcagcctgccggtcccacctcccatctaacctaagggtcacttgctgtagtgtttgtcgagagccacggcacccgggccgcatttcggccccctctgtgctcccaaactaactgggcaccttcacttcgtcttccccaggtccctgagaggctcagagaggtgaggcggcccagtcgaggtcacacagcagccctctgatctgggcagctgccacttcccagctgcgggggatgtgtcgtgagctcggaagcaccctgacgtggctcagggagcagcagatgtcgcctaggaaggaccccggcatcccaagaagggcaccccagcacggggagcatcaggaactgaggcctggaggtgggcgaccggggaagggggaccggcagagaggaggctgcatcgctagtgcagggtgtgggagccaggggcctccccaaggtcacacgacaaggtgagggctgggcaggtaactgccacccgccaccttcccgaaggtcacttcctggagcagggggccgtctaatgaggggatcagggcccccacccaaccctctgcccagggagagcagggaaggaggccaaagggacctctcacccctcatgtgctgtgcagagcagctcgggttcaagcctcggctcccccacctccaagctgtgtgaccttgggcaagatgcgagacctctctgagcctctgtctcctgggggatgggggtcgtaacagtggaaaggggccccccactgtggtcagggtcccgctcacatccattcagcaaacttagcccagggacctaatgtgcgccagagccagtccccaaaacacattgccaggctgttcaccacccctcacggatgggaactttgctcctgaatgctattccgggaattcagtcccctcctcacctaccaagggagtgagtggtggggcctgaggaggaagctggaaggggagatcaggcccagagagggtgggcggccggcccaaggtcacactgtaagcctggtgtgcaggtgcggctgccaggcccgcacccggcagcccccgccccctccccgcccagcggcctgtgttgcaaggttggtcccgacgggtaaccccgccctgacctggtgccaagccccgcctggcccagtcctcggcctgggtttaatgggacaggaatgcagtgtcccgatcggggggcaccaacggcctggggtggctgccagctgccagcccgccccctgcccgcctgccctcgcccgcaggcctccctctgggccagacatggagcaaacaggccctcggccattttacgtgtccatttattgccctaaatggggaggggcttcctgcctgggccttaaagggccagaggcaggaaggccgtggggacccagtgggaagtgtgacagcggggatgggggcagcgatgaggaggccagggggatcccatctgacgcccaactcatgggcgggactgaggcccaccctgttcccacactctgagatgtcatgggccaggaagcccagactacagcccgagcccaggttccaagaggaagcttcatgacgacagtggaggggctgagcttcccgtcactgggggcaagcaaggccagactctcggaagcccatccttgtccaccctgccatcagcccaggctgcacctgcttagctgagatgcctgtgagaggccgaggtgacctctctctccctcccctgagggaggcctgcttgtcacctggagatacctgccccacccccactctcgcctgagcaggtggaaggctcagcctgggagcctggcggcctgcagaatccggccagatccttctctcaggcatcctgataggtgggatgggccttgttttccagtcaaaccag

SEQ ID NO: 66810 - DNA, 5375 bp, Homo sapiens
gctgatgaccatctccccactgtctggatgggaagactgaggctggcagagggggagtgactgctggggtggacccaagggctgggctaggactggaccatgctcacccccacccaaggctcacccccacccaagctcgttcctcttgtccttgttgcccagggctactgcagggcagtttatggtctggcaggtgacaggtgggggtgcaggtgtctcacgcagttctgacccacaccccacactcaggtctctgccatgccctgagctgacctgggagtttccgccgcggaggagaaaagacaccacgggtggctttgcaggcagcagctgggggaccctccacagccccaggaacacagcgcgccccggctgcaggggtcacggggctcatccaaggtcgcagagcaagcgtgccagcattccaacccttgaggagccctccttggagcatctgggctgcagtgggctggctctggggaggtgacctcggtctcctctggtcataaaacccagagccctgcccgcctctgaggaccaaggtgagacgagtttgtggctcggcaggattgcagaggggcctcgtatgcacgtgcgccagccagggcctgcccggtgaggcagggaggcgagagggctgtggctcgtgctgtgtgaccttgggagccatgctggccctctctgagcctcaatgtcatcttcggacacagggtttaataagcctcggtgacactccatttgcaggcaggtgcctgcagttgagcctctactgccaacctccggccctgcttaaagacaggtgggcaggcgcccctgggccaccacacagtgggaggggactttggacaggccccgagctggaaggatggagcacagggggcagctctgaccccacctgagtgaccttgggccgctctctgcttccccctacgcttcagtctcccctgcctagtaccggcacctgctccgaggcttgctctaacctccggagtttccaggctcacatttgacctcccctcccggccttggtttcctcctcatatggcaacggggatctgccaccaggtggacccagctataggtcagagggactcaaggaaagaaaaggaaaaaacaaacaaacaaacaaacacccagcagggatttgtgatcgccccaggaacctttccgaccaggccccaggctgggctctgcctcggccgcgcctcagtctcccgcacagagcaaaggacccatccactgcctgcggccgcccgcgggcctctgccgatgcgtggctgcccgcccgggcccaggtgctgactggccgccacgcagccaatcggaactgaataataaataccccccggactgacccacgaattaaaatttcagtgtcccggttggctcttctttccttccttagacttcgcttttccagcggccggctcctgcccccccttctcccccaagctctgtctccacagcgatggctggtggtaaacagaggccccggccccgccgataggtgctctcggggccccatggcgggtggccctcgcggacaaacgcccccggcctgaagccctcaggccctggcagcagcagggctgggcttaggcctggcctggcctgggcccctgccccagcctggcctccccgggacctctcccagaccagtttgccaataggaagtgatcggccggtggtggggaggcacccccagtgtgggagcggcacgctcagggttacgccctggtccagttctgaggttggggcggggggcactgacacggaatccccacgccctctccggaggcagctggcagggaggtgggggggcccaccgagcccgccacccatgggtgagccaggtgggtgccgcgggtggcaggggcaccagcacctctgtgacttccgccgcctgactggggggagaggagttgctgcctccccccgcctcgccgccaactcctggctgcattccgccaacatttagtgggcgccgactgggtgtccgggcccgggtggacagcaacctcccgccgcggcccaccgtgcgcccccgccagccagcccgggcagcgcctcccagaacccgcagaggcccggtccctgggggggcacccgctcctccgctccgctcagcccccagccaggctcccaggccgggggggctgggtctcccgcccgggaggtagggagcgggagggagggggctggatcccaccagctcccccctcccctgcccgggctcaggcttcgcacgtggtggtggcgtcaagggaaaggagggggggtccgggccagaggagacggggtcacgcgctttgggggcgcggacggcggggactggggtgctctctccgccccctcccgcgggtcggagccggacggccgtccgggcagggcgaggggccaggccaggccccccacccggggctgagtcaggcccgggcgggggcaggaagcggccccctcccccgccccggccgcagcgcgcggcccccgcccggcccgcggtcccccgccgcctcgcccgcgcggggggctcctacctccttcccggggcagcggcgagggggcccggccccggcggcggcggtggcggcggctgcggctgggctggctccctccgaggggccgggaggcggcagtgagcctggccccgcgccaccccccgccgccggcggccaatccccacccgggctggggggagggcgatgcaaattaccccggatctgggtccgcccgcccgcctcccccacgcccgggcccggcctgcgctaggccgcgcatccccgggctcgcctgcaccgcgcggccgcccgggccgccgccctccccggggagcgcggggagggtgaccccccccccacgggcggggggccgaggggaggggggctggggacggttacacaaccaggcggggaggggccccggggcggggagggggccggcccgcgggccgcgcagccggaagccgggaccgccaccggcccccggcgaggggagcccggctccaggccccgccccctggcgggctggccccgcccccgcgccgcgccgcgcgatcggcccgcgcccattggctctccggcccgccgctcaccgcccctcctccgcaccgcccctacccgcaggccgcggcgggctgtcggcgcggggcaccctgggacttgtagtccaagccgcttgccacctgccggctgcaaacggcggagggactacgaagcccagaggtccctgcggccctgcccgcccacccggacaccccaccccttccccctcctttccgaagcccccctccctgttttttcagccccctcccccccatcccccatggagctcaatcctggccaactccaacgtatgcacgcagcaccgaataggcccccggggggcgagagcgcccctcgtcttcagctggaaacttagcaggcgacgcgcccccctatctccccacgccggctccccccaccctcaatgcagccctgcttcccctcccccgctccccgcgcgcctgggagccccgaaaagccatgcacccgggttggggggggctggcgcacaagctcatgcacttagcccccaatccccccttcccgggcggcgccccctccccgcgctcgggatccagggcgcctccagcctccgggcagctgccaaccaccccttcctctgaaacttgggggaacgtccccggctccccggatctccccttcccgagggggcagcggtggccgcagcgacccccgcccgtccccgccctgcaccccgtgccgggggccgcgccgggcgctgacttacctcgcggggccgggccggggcgcgcggggccggggcccgaagttgggactgggctccctcggccgctcgcctccggggtccgcggcgctcgctctgcccgcgtcgcgctgccctggtcgctccctcgcgcggcggcggcggcgtcactgcccctacagtaactgtacagtacagccaaagccccgtatgatgctcgcgactcccttcctggtttctccgagggcaagaggggtcctcccttgtcttaaaggtgccgcagccgccggcccccccacgcccagcccgccccccccagcctggcctcggaggccagaacaggctcggcaggtcccctcttgccacgtctctgccctcccgtggggcttcgcccgctgcgccggggagaccgggctgttattaggttttgtcaagtcgggggggggggtccggcccgccccggcgcgcccccccgcctctgacctctccgccccgccgcgcggcgccgtgccagcttgccagcttatctggccccagagctccccggggcgcggggggagcgggccccccggggtggagggggggtgggggcctccagataaacaggcccccagcctctgcgcaggggcggggtgcgggggggcgcgggctgtgcccccgacgcccggggcgtggcaggatggcagcgggggcggggagcgcggtgcgcacagcgaggagcgacgcgggcgtgtgggtcgcgcggcctgggctgccgggggtgggttgggggtgaggcggtggggatccccccgcaaggccaggccctgggcctccccgggcctcagtgggacttgccgcgccagggaccccggggggtggccttgccaaggacagcccgggtccgcggggctcccgggtccctaaatgaaaccaccaacctgccctcccgcgattatataaaggagtcgcctccaccccgctgcgctaggggcgtcagcgggggaaggggttggcgaggggcggggagggcggttgttttcccggcttcgcgagttcccccacccggctgcgggccgcggggcgggacggggaccgggccctggacgcctggtccgcgcgggccgctccttggcacaagggggtctgcatggctcgcgaggggcggaggtggggagtggggaggcgttggttcagcgcgacttttttttttcccctgtccgtttctcccacttcctccccggtcgtgggagaggtccggcgggggacagggaagggggagcagggcacgagtggtgagaacgtcctggcccggcccggggagggctggctggtgcgaccgcgcgcctgggggggggggggagggctccaggactcagtttccccttcctcattcctccagacagagagagtactgacagctgctttagctgccgtttagtgagcgcttatccagtgggtgaccctgttccggggctcactgtgccttcattctaacacctaatcccagggtcattattatgttttattattatctggcattcttagtaccaacaccacctgacagcgggaaccaccaccggcctgggtgtagtgtacccagcctgtcctctgacttcaaagcctctcct

SEQ ID NO: 66811 - DNA, 1543 bp, Homo sapiens
caactgagaggcagcctcttgccccaccccctctcttccagactggatggctgcctcccaggcacctctcaggacctggccacagagctccaaagcccagggcctgctgccttttgggtcatggctcagggcccagtctctacctctctctgtggcccagtaccctttagctcaggaggtctcatctggagtgactctgcctccttccaggcgatactgggtgatatctggagacatttttaggtgttgtgattggggagggggtgggtggaggccagggacacagctcagcaccctgcagtgcccaggacggacccaccccagaggttgatcaggtcccatagtgtccaccacaccgaggggctgaaattctagcctgggtctaacttcagtcttgctcgctgtagaaggcacccacacacttctctcctctctgtgctctgcagagaagaaaagccactggccagtgacccctggacaaggcaggacttcagccatccactgccctccaccaccacccctgggcacccccttgtccaaagcagacagtctctactctgggataagggggggaccctggccccaggctttacccactttggggtgattcctggaccctggagatggaccccaagggtcaccctcaccccacgggacctcccaacaatggacaaggccagtctgtcctctcccccagcccccagttgtgcagaatcctcaacatggcacccccagtgtggagctgaagactccagacttcaggggtgggggcggggctgtgggaggggagatcatggctgcggttctggtccagccagacctcctgggtttgttctttttttaagaaccaccgcaatttaaagagcggagtcctccctccctgcagcccacctgccacgtgggctggcccctgttcccctctccttctctccgtctctgcctgccgggcttgggctgcgggggccggagcttccgtttcactttggtatcaccggtttcactttcagggctggggacagagagaggagaagagggacagagagatggacagagccggggagggtggccttgttaagtcgggggccggggaggggtccaccacctgccgctccttttcctgaccttcctgaccttcttctggcctggccggggcgggggggggggggggggtcctggaagtcaaggtcatggggtcaaggtcaagttctccctgtgtgaccttgggtgggagaagcaacttcccactatccctgagcctcctttcctgaacccctcagttacccaaaagtggggctaagaatcacgtacaccccacccggcgctgggaagttcaaagattcctccagcaccgcggaccatcccataatgtccccgtgggagggggcggggccaactcccaggcagaacaggatgtcggccgctcctttggccagggagagacccttggcccagaaaccaccgggaaggaggctccgggctgcccgagtcccgagcccgggatgagccactgtcccccagaacccccagcggaggctggagctct

SEQ ID NO: 66812 - DNA, 2041 bp, Homo sapiens
cagggaccccctcaaccccatctcacaattcaggggccctgcaccccatcttctctctgcaaggacatctccttggcctgatctcacgacttagggattccaaaccccatcttttcccaaagggatctcccctcactccaatctcattactcagggaccccaccatctccccgatttcactattcagggaccgttcaccccatttcactactcagagacctaccaccattctgctactcagtgactccatgccctgtcttttcccacagggacctcccttggccctatctcattattgagggacccttaccccgtcttttcctaccagggaccctaccccatctcagtctcattactcagggacccctcaccccatcctctcccctctggagcccccttgcccagatttcctcctcaggggctgcctgacctccccacaccccatcctctcctctcaggaatgccctgcaccccgatttccctactcagggtctcccctcaccctcatctcatgactacggcaacctttactccgtcctttcctcttaggaactcttcaccctcatttcactactcaaggaccccacactgtgttctctcctcttagagatacccctcaccccgatctcactgcttggggagcctcatcctgttctctccttggggacacccctcattccgattttcctactgagggactcccctcaccccagcttcacttttcagaagccccacaccccatcttctgcactgcagggacctcccctcactcaacctcgctgctcagggacccctgtccccatcctctcctcttagagacatccttcaccccaacttcactactcagagactcccgttatcccaattccactcttcaggaaccccacaccccatcttttccaccacaaggacctcccctcgcccaatctcactgctcaaagacccccctgccccgtgcacccttcgccccgtcctccgagggccccctgccccgtcctcccccgagggccccctgccccgtcctcccccgagggtcccctgccctgtcctcccctcgagaaccccctgccccgtgcaccactcaccccgtcctcccccgtgacccccctgcctcgtgcactcctcgcgaacccccgtcccctcgccccgtccttccccgagggctccctgccccgtgcaccccaagcctccggctgacccctgcccactcactcggaggcgccctcgctggtaggggatgggccctcggcgatggtagggttgatggtgagcgccggcagcaccggcttcctccgggccagcatcggggctccgcgggccggcggcggcggcgcctctagccggggcccatagggggcgggccgggagcggtcggcgcctacgcgagcccggggctgcggccgcggcccaggccggcgtcggggcggccgagggcgggcggcgctgcgggcctgggccgagggtagccgaggggcgctggggctgaggcgagcgagccgctaccgctgccgaggcccgaagaaggctgacgccgcagcccgagtccgagaggcagggggaggggaggggcggccacaagatcgcggaccggcttctcgcgataacgggatcgggagccgcgatggaccccacccccagccgccgcgcctgcgcagcagcacaaggccgcctttcggaggggaaaggggcggagaccgacgcgaggcggtgccgggaccgggcgccctcgcttgccttaccacggcgcgtgtgcccaagcgcttggggcatgaggcgcgggagcaggggaggagacggagggatgaaggctggggtgatggtcgtgcacaggtgggcagggtagccagactcctgagagcctgtggtgccccaggctggggctgagagaacccgtaagaccccagaacagtggacgagacccacccagagtccatttaatctttttggcaagcgtggacacacgcccctagcccccaccgccttagagtgtcagttactccccctccttcatcagaacaaggccactctaaaacatttttaa

SEQ ID NO: 66813 - DNA, 812 bp, Homo sapiens
cagtgcagcctcaccccctccacccattctctatctttactaccaagcatagtttgccctgtgacctctctctgtgatatattttctacttatcattgcttccaataacactttttctgagtacatctgtctcttggtcccagagacgtgggtgtctcctaaattgctcctcccaggaaataaatttctaatagctttcttgatagattcaatccaaggtgacatttatcttgtagaggcatatgctggtgttaatatcacatgtgtacattgtttccaactagcaatgtcctgtgaactttatctctgtcacctgtgcaatggattaactgacagaacagcgaactgaaccctttggaaagcaatttaaccctatcgtgagcgcgctgtgactcagcagttgggatcgtgggcatgtgacttagagagactcttgcctgtgtgcaaacgggagactcacacaataatgttctcaatggcaaaaatttggaaagtacacagagtccattgatgggagaatggaaaaatacgtcctagtgcagtcccacagagaaatatgatacagcagaaaattcctaagtgacaacagcataaaagaatcttagttagtctcagctacttggaaggctgaggcttgaggattatttgagcccaggggttccaggaagacctgggcaacatagggagaccccccttctctaaagaaaagaaaaaggcgggctgggcgcggtggctcacgcctgtaatcccaagactttgggaggctgagatgggcggatcaccaggtcaggagattgagaccattctggcta

SEQ ID NO: 66814 - DNA, 593 bp, Homo sapiens
ctcaggaggcggaggttgcagtcagccaagattgcgccactgcgctccagcctgggcaatagagattccgtctcaaaaaaaaaaaaagaaaaaagaaaagaaagattatacataaattatagaaaaggaaaagtgcaccttataacgtttagggatatgaacacatgattaattgaatttcgtgaagtctgtgagttcctggaatgccgggaactcatccatcttggcatccctggctgccagcaccaagcctgacacacgggaggtgtttggtgagcacagatgtgagcaatgaatgtggctgccttggggacctcgtggcatggtggcagtgtgcaacctgcaggggtttggggcaaacatacctggctcaaagcctggtgccttggatcactggatgttctcatcctattccagtgagttcccgatgaaacctctcttgctctcagcctgtggtggagctcccagggtagttctaatctgaaactttggaagaaaccaatctgagctttcttccagagctgcagctgattaacttaacaacctggggtgcagtgttcaaggaggaaaacaggatgctctgagagaagctt

SEQ ID NO: 66815 - DNA, 496 bp, Homo sapiens
tggtctcaaactcctgacctcaggtgatccgcccacctccacctcccaaattgctaggattacaggcgtgagccaccgcgcccggccttaccaagttctgattgaagtgaaatgcctggaagaaagataaagttaaaatgaggttttcacaacatgtcgaaatcactctgagcaaagttccaaacccaaggttctagaaagtgcaatgacttttttttttttaaacaggggcaattaaaaatttcccaggcttagcaagatcaaatgggtgtgtgcagcgctctctctgacatgcaatttatggaattattgatttgtcaatgtgatctctgcacttcctgtgaggaatttgaggtcctgtttggagaatttggtaaatagggaatctcgcagaaacatggggtcttgagaaactcatttcaaccctctgagcctcagtttccacttttctttttttcttttcttttctttttttttttttttttgagacggagtc

SEQ ID NO: 66816 - DNA, 1947 bp, Homo sapiens
cctggttcaagcgattctcttgcctcagcctcccaagtagctgggattacaggtgtgcgccagcacgcccagctaattttttgtatttttagtagagatagggtttcactatgttggccagtctggtctcggactcctgacctcaggtgatctgcctgcctcggcctcccaaagtgctgggattacaggtgtgagccaccgcgtccagcctatttacttcttatacaggaatggtttcattcagcatcttcctctcgtgggtggggagtggggaatgtctcctcagtcttgctccctgttggatcccagcacccggcacacagcaggtgctcaataaataacagttacaggaatgaatgaatgaatgaattctcaagcacagtgtcctccattctttaagaagggcagagcgagtcccccaaactcacaggatttggaggccctggctccagtgttctgtcttcacccacccctctgagagcagaggctggaactcctgggatccacccaggacatcagaggagagttggatgcctggagggtcaggtcctaatcaatgtcatcgcccgtgaggccggccagagtccccctgtggcctcccagcctctggctggcccctggcacacccacatcacaagggttttactcactgcctggctgtattacaagggagggaaggggaggagggggaggaaaaggaggaggaggaggagggagggaaggggagacgggagaggagaggaaggggaggagggcaagagggaggaggaggaagggaggagggaggggggaaggggaggagtgggaggaggagggagaagagaggaggagggggaggagggaaaggaggagggagaggaatggggaaagaaggggaggaggggaggatgacgggggagtggaaggagaaggaaggaagcacggaggagtgggaggaagaggagaaggagaaggaagggaggagggagaggagaagggggagaagggagaggtggggaggaggggaagagggggagaagggggaggtggggaagaaggaggagggtgagagagaggaggagggaggaggctgaggaggagggagaggagggagagaaaaagaaggagggagaggagtggggaaggaggggaggatgagagagaggatggggaggggaaggagaagagggaagggagcagggaggaaggggaggaaagagaaggggaagaggagagggaggaggagggaaaaggccaaggaggagggagcagggaggaggaggaaggcaagaggaacagaatggagagggaggagggagaggaggagtgggagctgctgccctcctggacccactcactttttccaccgggaactggcccacaagggtggtgctcaaggaccccagggcaagtccccccgaccccgcatctgtagcaggggacctgggtgttgtcagttctcctgcctgactcatgcaatggccaagtgagtcacatccccttatcagctcctctgtcctcctgtgcagaatggggactgtccttacgatcagagctgtgcagaggccaaagggctaaggcaaccaggaagggacagccgggcatccgctgggcgtcacgggactgcagtcagatagatttcttttttcttttttttttttttgagacggagtcttgctctgtcgccagtctggagtgcagcggcaaaatctcagctcattgcaacctctacctcccgggctcaagcctcctgagtagctgggattacaggcatgcaccactgcgccctgctaattttgtatttttagtagagacggggtttcaccatgttggccaggctggtctcaaactcctgacctcaggtgatcctcccacctcggcctcccaaagtgctgggattacaggcgtgagccacctcacctggccagaagtccctttttagcgctttccgtgggaatgctcccacat

SEQ ID NO: 66817 - DNA, 645 bp, Homo sapiens
tgccagcactttgggcggccgaggtgggaggatcacgaggtcaggagattcagaccatcctggctaacacggtgaaaccccgtctctactaaaaatgcaaaaaattagccgggcatggtagcacgtgcctataatcccagctattcgagaagctgaagcaggagaattgcttgaacccgggaggcagaggttgtagtgagccgagttcgtgccattgcactccagcctgggcgacagagcaagactccgtctcaaaaaaaaaaaaaaaaattaaataatgatgaactcttgctcgtttgatgacattgtattttttgcgcaatgggaaactcctgtggttcccgggacagcacgctgttgtatgttctgctgggtgggtttatgagaattgacaacagtgtgcaaacacattgggcaatgcagggctttatacagggacgtgttccattgtcaagcttttattgactttaccacttggctcaaaacatgggaagggccaggtgtggtggctcatgcctgtaatcccatcactttgggagaccgaggcaggcagatcacctcaggttgggagttcaagaccaacctgatcaacatggtgaaaccccgtctctactaaaaacacaaaattagctgggcgtggtggcg

SEQ ID NO: 66818 - DNA, 686 bp, Homo sapiens
agacgcggtttcaccatgttggccatgctgcctggctaattttttaaacttttttgtagttatgaggtcttgctctattgcccaggctgatcgggaactccagggcttgagcaatcttcccgcctcagcctcccaaagggcttggattaccggcatgagccacggtgcccggctccagcaggttttgataagagaagggggagtgatctctctcgagggcactagaactcccaagagtgataaacggggtgaggagaggcagagaggagtccagaagtcaaacatcacctacttgatccacccactgtgatggccctggaaaaaagcctccacggcaaatgctgaataaatattatgactgggatcactaaagccaagccaaggcaaacaacccctctaaaatccaacacagagcagataaaaggagatcagaaaaatgtagaggtcaagggcgagataattctagtagcacccagacagggacaggtaccgttatcggggtctcttcttgggccccgtggagcttggggacccggatccttctatggggtggggccatcctgggcactggaggttgctgagcagtgtccctggcctccacccaccccgcgccagggccacccccctttgttgtaacaaccacagatgtcctcagacatcacccagtgtcctcgggggagtgtaaa

SEQ ID NO: 66819 - DNA, 1407 bp, Homo sapiens
aaaaaacaaaaaaacaaaacagggctcctctctcttggtagggggtggaggggaggtcagagacacctctcagccacccgggctgattcacaaatatcgaacattcactaaaatgtcaatacagtgacctagagccagaggggaagagggagggtacaagaggagagttccaggcagaggggcgagcaggtgagtaggtgcaaaggccctaagcaggaaccagtttggctccataaatatttgttgactcaatgaacgatagaagattctagagagaattgattgcacagaatcacccatggggactcagaggcggagtccaagctggtttcggagggggctgggggccggaggttggcaggtggggtgaaggatgggagccgctagctgctggcaggaaaactggcttcagtgaagatctggtctggtcctcttggtttgtttctgtccagggagtggacaggacccatgtaagggccctgggctatcccagaacccatctgggaattctgaagagaaaaagtcctgtaactggccgggtgcggtggctcacgcctgtaatccccgcactttgggagactgaggggccgatcacgaggtcaggagttcgagaccagcctggaaaacatgatgaaacctcgtctctactaaaaatacaaaagttagccgggcatggtgatggggacctgtagtcccagctactcgggaggctgaggcaggagaatcacttgaacccaagaggcagaggttgcagtgagccgaaatgagatggcaccactgcactccagcttgggccacagagcgagactccgtctcaaaaaagaaagaaaaaaagaaaaagtcctcataagtagggcagaggtcacggcagagtggaggtaccccagacttcgacctttgctcactgagggctggaaaaccacaaaacacccagataacggtcttccctcccctgctcctgcctgccccagtgtcactggccctcaaccctgtctctccaccctgtccaccaatcagcacctggaggtgggctgggagctgcctgtgaccgcttcagcatcttttgggagtggtgacagagccacagagggctgtgagcttgcccggccccaggtaacgctggcggtgggtgggcctccagcttggagcagagaccccccgaggcatctgcagacagaactggatggacccatgaatacggatttagctgctggaaaggtgagccctactaggtccccagggagagcgggagtctaggctgggaaagcctacccaagctgccagagctggaaggaccccatctccacccctattgtacagatgggaagactgaggcccagagaaaggatgcaatgagcaaaactgtgtgcctttgccccggggctgcccttgtctttcttccaggtc

SEQ ID NO: 66820 - DNA, 1379 bp, Homo sapiens
gcagtgagccgagatcgcgccactgcactccagcctgggcgacagagaaactccatctcaaaaatataataataataataataaagtgactaacagcagcagtgaagagtggggcttctggacgggcgcacaccatcagcgctcattaaatgcatgagtcagaatgcatgggccagccttatggaatggggccatcttcacctcgtttgcagaaagtttggagatggagacccaaaagggaagtgacttccccaaagtcccacagtgcgtggagggggcagccgatccctccacttcccctctgagtggctggagggatctttctggcacattctgtccagtcccctcgccagggcaaaacccttccccatcaccctcaggataaagtgccaactccccagcctggcatttgagccccgtcctggcccggctctggaaacctcccaggcctaatcgttctccaggtgtgtttattcccacctccctttgcgcctgtcgtcccctcttcctggaactacatcccctctctccccgatcagccccgacagggtgaccacagagttgggcgtgttggcgtcccccggcgcgcaggggcgtcacttcccgccccttcctcactgggaagtccctcccattgtctagcctcagtgccccctgatattcccacaatgcccccctgccatccggccgctcccagcccgcggccctggggcgcgatgctcgggaccctcagacgcgctcacctccgggaggccgcacttgcccttgtccgcgtacggcgacagccccgccgcgtaattcaccgacatcctcgactgccccacgggaacaataaagtttcccttgttgaggccgcttccgccggaagcggggcggggcggggaagaaggaggaaccgcgttccagtcctgcgcacccggcctcccacggcaaggcgcatgcgcctcttgctgacgccgcaggcgacatgttatctgctgtcagaaggaagcctgcctctttgcatgcaggtgtttgcggggcttgggaaggggctccccgatgacccgggcgggaaattggggcggccgcctacgtgagagttctccagtcacctctaaaatgcgggacacaggctatccatgtccccacaaccccttttacggattagtaaattccgtaaggacagagccggacagcagggaccccagcctaagggttttgaatgccacgcagagttacctgaatatctcatttgtgtgtgtgtgtgtgtgtgtgtgtgtgtgtgtgacggagcctcgctctgttgcccaggctggagtgcagtggcgcaatctcggttcactgcaacctccgcctcttgggttcaagcgattctcctgcctcagcctccctagtag

SEQ ID NO: 66821 - DNA, 720 bp, Homo sapiens
ccctcaccttacccccacccttgccctcctcaggtggcctgtggagaggagaaacacagggcaccaactatgaagactctcagggcgcgatttaagaagacagaggtgagtgtgaggccctagatgcccgatacacccctgcaacttcagccttctgtctcctggggcttggctgaagatccaccctttcattccagtacccacctcttctcctttcctctctgctgccccctagcgtcatgacctccccactgctccccgtacaagctttccagcccaggcctttacccaggccctagtccgctctccatggaattccttctcgccgcattgccaccaatcagaccctcctaattcctcacaatttggccccagtaccacctccccgtccaatctccgctctccccggccacagtaaccccttgcttttccaaggacccactttcccgaggatcctgatcttttgctttggtgtgtgtgtactcagcacatatttatatagcaggcgctgttccaggcacaggggaatcagccagggaatagggcaggcaaaaatccttgccctcgtggagccgaccgctgagtacgggagatgaacacgaaacaagataaataagtgacaatgtgtattttgtgtcgcaaagacagacaaagcaggaaaagggaattgaagcattcagggcaggggaggtggctgcagttttaaagagggtggccagg

SEQ ID NO: 66822 - DNA, 1302 bp, Homo sapiens
ctactttctaaataaacttgtttttgctttgcactgtggactcgccctgaattccttcttgcacgagatccaagaaccctctcctggggtctggatccggacccctttcctggaacaatctgacacagaggaaacgtccatgaaaggtggggaggaggctggggaaggaggctggggaaggaatgggatgggaagtcctcgttaaggggaaggcacaggtgggcaatggagggacatttgggagacactgcgtatgtttaggaagttggtttggagcctgatctttaagtcaatgtctgtgactcaagagtcgtccagggtcctcttaagtcaccctatgtgtggccccaaccccatgtgagagttgcgggcccaggaacgatgtgtggattcccagagcccagaatacaaggcaggcgcataatacatatttgctgaataaaagaatgaagaacaagaggtcacgttacaaaattttaacgagccgctgcccgcttctagggggcgcagcgcactatacaaaattctccaattccacatggctcccggaatccttatttcgcgctactcaggttgcaactccggagggaagacgctgggacttccagcttgataggcggggattggaaccaatgaaagaggtctgctgtgtatgctgcagccaataatagcggccgaaggaagtgacgtttgcggaagtaaggcttccgtcggaaaagctcgataattacccagcctaaccatttctcaggtgcttgcgaggtgatcagaaggcaaagatgtcggagcgaaaagtattaaacgtaagtgttgggcgactggggcttttcaatcggagcaggacatcccggaactccgggagagggaggagcttcctgagatctcttctttggaacccttctttcccagcggccttccgcgagatggggcttcccagactcctccctagactcctccccatcgccttccgtcgggggggtgggccttcgctaagtctcccttctgggctggggtgtagttagtcacctgcggggcgtggcttgggcttttacccaatcaccaccagatagggttttttttctgggggcggggcttccttaaatgctggcggccgtgttttgccctcttcttgaggggcgtggctctgagaagccccgccccacttggggactgtaaccaatcgtgtactttgggtggggtggggtggggtggcgcgtgtgtgtgtgtgtgtgtgtgtgtgtgtgtgtgtgtgtgtgtgtgtgtgtgtgtgtgtgtgtgtgtgtgtgtgtgtgtgtgtgtgtg

SEQ ID NO: 66823 - DNA, 2505 bp, Homo sapiens
ttttaataatatagattaaagggtcccttctgttgcagttaaggagctggaggccttttctacctgcccctaactctttctcaaggcggcttcctccattttcactcgttctctcaagtacattgagcacctccttgtgccaggaactgtttgtggcaccgcagagccagcagtggggaagacaggagctcacggcagagttggggagagagttataacagccagcagagggcactgtgagcgtggacatgcagcctgcatgtgagcttgaaccatgatgggcttctcagaggaggggtgtcttgtgttgggtattgaagggtgagtaggagttcaccaagcgagtgcatggaaaagggggcatccctggtgaagggaatagcatgggtaaaggcgtggagatgagaagccatggtgtgactcaggaagtgccagaccaggctatgtgggatggagaatgggcagaggccttgagtgccaagcctagggcagtggggagccatagaggagtttagagcagaggaggaatgtggtcagtgcagcagtggaagagtgggcatggggcagtgagcaggggttgtggcgaggggccagactgggccctggatccgggccagacccccacatgtgtccccatcacctgcaggccccaaagcccaagaggaaggtggaggtctgggagcagagcgttggcagcctgggcagccggcccccgctgtcgaggctggtcgtggtgaagaaggcaaaggccgacccggactgcagcaacgggcagcctcaggcggcccccaccccaggtaaggtcacagagttcccagagccgggcgcggtttctatagtggcctgtaggtggcagcagctccctttgcagttacagagacttcatggggtgggtgggggcggcctgcgacccccacaggaccaattagtggagtgagcagagaaggcaggcggcttctttttttcttttttcttttttctttttttttttttgagacagagtcttgctctgttgcccaggctggagtgcagtggtgccatctcggctcaccgcaacctccgcctccctggtttgagcagttctctgcctcagcctcccaagtagctgggactacagcaccacgcccggctaaatttttgtattattagtagaggtgggatttctccatgttggtcaggctggtctggaactcccgacctcaggtgatccactcacctcggcctcccaaaatgctgggattacaggcatgagccaccgcgcccggcctgtttttgtcttttagttgccttagtatgatgtttcctaaggcgattaagtccacagtgactggactgtgaactttgcgccatttccattcttggcagcgcacgttgcctgcctgggcaaggtttgcattggccattgttcagaagcggagctgttgagtcccgggtgtgcagatgtaaatctgcaatgggtcccatcaggtgccatccagaaaggccaggccattcacatgctgtcacctctggaccttgcaaacctgcagaggtggccggccccgtgccttgtccctggcctgtctgctgtggagctgagatgagctaactctcgctctcccaccaggagccccgcagaacaggaaggaggccaaccctacacccctgacgcctggcgcgtcctccctgagccaactgggtgcatacctggacagtgacgacagcaacggcagcaactgagccctcccaggaccccctcacggggtcaaagtcacacgtccagcttcagccacattgaggccagcattgctggtggtcagggcaggaggccttggcgtgactggaggccggacagacaagcgccagcgtgctccaacacatagggccaccaggggcctcagccccaggaggtcccttctctgtgccctcaccagcctctcaacacctcggggacccctgctgctcctgcccccacctgtcactgtgcttagggctgcaacatccctggagcagcttccaacactacttcagggtggcagtgtttggggcactgggcgagcctgccggcctctagatggcctcatctcttccttccacaaactgtctagaaccaataaaaggaaacctgccaaccgcctgggccccttctctctcccagagtctgatgaggaggtcccaggacctcctctgttagcacaattcgagggtcattccacagaggtttgtttgtgtcttgagacaggatctcactctgttgcccaggctggagtgcggtagcgtattcttgactcactgcagccttgaacttccgagctcaggtgatcctcccacctcagcctcgcgagtcgctgagacctcaggtggatgccaccattcctggctaactttttgtatatttagtagagactgggtttcatcatgttgcccaggctgatcttgaactcatgggctcaagtgatcctcctgcctcagcctcacaaagtgctggggtcacaggcataagccactgtaacaggcatgagccca

SEQ ID NO: 66824 - DNA, 655 bp, Homo sapiens
aaaaatgcaaaaaaattagtggggcatggtggcggatgcctgtagtcccagctacttgggaggctgaggagtgagaatcacttcagcctgggaggcggaggctgcagtgagcagagatcgcgccactgcactccagcttgggcaacagagggagactccgtctcaaaaaaaaaaaagaaaaaaaaagccatcctgatccaggggaatcccggaggggcggggagaggctggctgacgggtttaactatcaccattcactagctgcttttgggctgtaatcagccagctagttatctgtaattagcatacatggttaatcatgagcacgctaactgcagggggaaaagtcatcagcctcaggagctgcaaacagccattggcttatcctttgcttgagaatcaaaataaacacaccccttttatttgttgtaaataggattcctcaaatccctcctccaagtgcccccgccttttggttttgttttcttgtaactttgtattttgaaataattatagatccacaggaagttgccaaaacaactaaaacaaaaagtacagtgaggacccatgtagtcagcataaaacccgggaaatggacacgggtgcagtggactcacattctaccttttttttttttttttgagatggagtctcg

SEQ ID NO: 66825 - DNA, 1644 bp, Homo sapiens
gaatcgcttaatcgtttgaacctgggaggtggaggttgcagtgagccgagatggtgccactgcactgcagcctgggtgacagagtgagactcagtctcaaaaataaataaataaaataaaagccagaagaggcagtgcatgcctgtggtcccagctactcaggaggctggggcgggaggttcacttgagcccaggagtttgaggctacagtgagccatgatcgtgcccctgcactctagcctgggtgacagagcaactctgtctctaacaaaaagaaagaaagaaaatgaatatgcggcattgggaaggagagatagggcctcacggggaacggaggggctgggactttattctgagggagacataagcacacacacacacacacatgcacgcactgtccatggcaactatctgtcctgtggaatgtggcccccgctagctcttactgtcctcacatgtcacctgtcctggccttcgccccagcagctgaggttcacggagtttttcctgggctgggagcgggaggaagctcgggagtcagaggactccccatttcctggaggaagtccctgatcttgtttgtattcaagagagtgaacgagagacaaaagcaaagattgagacaaagagagagggagactgagacagacatcgggagagacagacggggccagggagagagaaagagaaaaagaaaccaaattcaaagacacacggagacagagatagacgcacagagaggcagatggccagaacccaccccagtcccccagcacgtgtcctgccccatccagcacccaccccgcccccccttggcgagtggggagacagggactcagagaggtgccgcagctccccacggtggcccagcagggccagcccccgcctccccaccttacccggtcacagggccccttcttctctagaaagctctcatagtagtgtgaaggcaggacacccttaggcttggggacacggggtggcctcagggcagaggccatgacggagccagggtcttccgcctggcctctccttccagtgggtgccccagctgggccgggaagctgagaaacaggtttcaggggagtttcctgtgtcagcccgtcaactccctcccctgccagggctgggcagaggctgatcccagcaggtccagtgatcctagggaaatccccgcctctccggtgtggaactgagaacagagagaatgtataagtctacttgaatgggagaataatcttcgctatatctgcaaagacagagacatggtctgtctctttatttatttatttatctatttttcctattttgagacagagtttcactctgttgcccaggctggagtaaagtggtatgatcttggctcactgcgacctctgcctcccgggttcaagagactgcgctgcctcccgggttcagagactgagtccaagctcagtctcctgactagcgtggattgcaggtgaccgccaccacgcctggctaatttttgtatttgtagtagagacgaggtttccccatgttggcccaggctggtctcgaactcctgaccccaagttttctgcccgcctcagcctcccaaagtgctgagattacaggcatgagccaccacacctggccctttctcttactttgatggaccct

SEQ ID NO: 66826 - DNA, 2050 bp, Homo sapiens
aaaagaaaagaaaagaaaacaaaataataatatgggagggaggtggtaataggtgcattttagaaagagccctctggggcaatggtggaagaccgacagggtggggcatgagtttggaggcctgagactcactgcgatggccaggatttgggtgcaagaggctggaggtgtggctcagggttttggaaggcaggggacggaaaaaaagccaaagagaaagtgcgtaaggagttggggaaataaactgaggccggtttgggctatgctgagtctgcaggccttggggatgcccgttgttggctggacagtcagggtggggcccctaaagggtgcctgggctggacaacaatagttcacatgtacccagctcttgctctatgtcaagtcttcttcctgagaacattcccgagcaccctggagagcctcccccgcacccctactgtccagttcccacttcccgactgcggtctgggcaaagccacccgcacttgagcccatcccacggcgtcccggagctttaggaagtccccatcccggactttcaaccctgccagggactgagggaaatcccagagcctgggctccgggacgaaggtcccaggacagggtcggggatgtagttgcagaaacagggtaggggacaaaggccggggctgcactgatcaggcgcgcaacgagcccggccctgcctcctgctccgcccaagggtatggagggccggactcggctggccttatacccggagctgattggctggtgagtccagtccctgcctctgatggtttgcgctcataactaagggtttctactgattggtttacatggacgtctgcccattggtcaaatccgagttggtgtaatcagatagttgacacggattggttggtgcgggaatccagtagcttgctatcgattggttgagggtgaaataaatgggactcttatcattggctggcgggctccgcaacggtccaatcatgtaatcagtcgagggccgcccgggagggtgggagttaattctttagcgactgaggccggcttgggctctttggctccacctgtgtctgcgcgaggctgttccctattggagtccgcattgttcccctggacctgagtttctcccctggtcctaaaggccgaggcctctgagttcctcaagtgcggtgaccgcaggtctcaccttctcctctccttgcagcaggctgagccactcgcgcacccgccccaggcttccaccttgcaacctctatccctggacagcgaggcctcagtttccccattcgcaccaatgagctcccggtcaacaccccgtcacgcctcagtttcccgaatgttcccagagggctgagttcccgatctctctcccgcgtgggcatccccgaggcctcagtttctccgcccaccccagcgcgccgagcccttcccccgaccccggcgacggccaatggttggggcgcccctcccctccccggggcggggccgcgtgacgtgccgggaagccggagtctagagctccgggcgcggggaggcgcggccatggcaggtacggcgggcccagcggggcggaggcgcggggcgcggggctgcaggggcgcggggctgcagagccgtggggcgagcggcctccctgcagcctctcgctgtccgcagctccggagccgctgtccccggcgggcggtgcgggcgaggaggcgccggaggaggacgaggacgaagcggaggccgaggaccctgagcggccgaatgcgggagcgggcggtggacgcagtggcggcggcggcagtagcgtcagcggaggaggcggcggcggcggggccggggcggggggctgcggcgggcccgggggcgcgctcaccaggcgcgcggtcacactgcgggtgctcctcaaagacgcgctgctggagcctggcgccggggtgctgtccatctactacctggtgagcaccccgcctccctcgtcccatcgcggctcgggcaggaaggggaaactgaggcctggagttcccttgctgcaggacaagcttcagtgtagggaggggacactgaggcc

SEQ ID NO: 66827 - DNA, 565 bp, Homo sapiens
agagagggcatggtgggtgttggtcctgggcccagccagctgactgtcactgcaggggaagaagttcctgggcgacctgcagccagacggaaggatcatgtggcaggagaccgggcagaccttcaactcacccagcgcctgggccacccactgcaagaagctggtgaaccctgccaagaagtcgggctgtggctgggcctctgtcaagtacaaaggccagaaactggacaagtacaaggccacctggctccggctgcaccagctgcacacgcctgccacggctgctgatgaggtacgtgctgcagcctcctccaggaagccgcccaggtcactgtggaatgaggggtgcccagcctggcacagctctctccggaggaggtattagtaatatatacaaacacggatggagcccttaccacgtgacatgcctcctccatccctccagggctggggcggagagaggggacatgggagcttgggctttgagggatgagcaggagtttgtcagagcaagttgaagggaagagctttctagaaggatggaatggcatacgcaaagtcatgt

SEQ ID NO: 66828 - DNA, 2629 bp, Homo sapiens
caggtgccaggtgatcctcatggcccggcggcgaggaatcagacggcagaaacccactccccagcccaagggaagatggagggagcctctgccttggggctgactgggtcatcacccactgtgtgtgatgcacggagggaagggtcccgacagccggggctcccctcagcatctgggagttctgagagccctggatttgccactgtccttcgagcctccagcctctcagtagagatctcccctcctgtccatcaaggctgaatggtttttaaaaagcagcctttgggaacggaggcactgaaaacaatgaatcaagacaaagtttctgaaattattttctcacggaaaccccaaaccagacgctgccaccatggccagattgggcacccggggacagccacagacccacctctgtggcgggtcaggcgctcctctgggaaccaagctctggcagcaaaaggacagtggctctggaagccccaggcgtcctctcagccaaaggggcagtcccttgggcctgggctggcaaccgagataccggctctggactggaaccagaatgggctctgcctcagaccaggccacagagggccccctgagagcccggcttccccacggcccccaggctgtggggacaggcctgccacagacttcctggccagaggtgtggctgggtgccatggtagggaaagacagccagacattgggggccatggtgcggcccggccaccgcagtctaaatcgccttgggggtgcgtttctgccaactgtggtgctggccattcatgccgtctctcaggctgtcgggccctgccctgcctgactcctggctcttggagctggagaaaggactctcagattggcagagagcgataaatgctttgttgtgtgcgcggcagcgagccgatgtcatttgaagtcacagcacatgaaaatgagggggagaaaaaaacttaggcaagagaaatcctccagatgggccctggaggccccatccaagagtctgaggccaacacatcaggggaactggaagcagagagggaatcagccactggaaagaagtcacgcagacgaagtggtgacagccacgacaggaaattgctcagcggtggccacaacagagtggcagccaggggccaggggccagctctgtgaccatccccgagagagaaaggggacattcaggcctggtctatgatggtctggtggccggaggctccgtgagggcagccccagggccagaaggacctctcctgtgctgacagcaaagtcaccagcgggagtccagcccacactgcctttctgatgaggcctccagctctggctgctgactttaaaccctaaggaaccctgtgcagggcctgcatcccggaaggcctccaccagcccgaacctggcccgtccgccctagatggggcaatcggcgtttctcccgggacagcctcctccctggcctcctggccctcgtctgcattgagaggcttggcctctggtccgcatgctgcccttcccgtgctgtggccttgcagcccggcctctcccctgctgtcccccttggctctggcctggcccctgggcccctgagtcacccctgaggtgactcagcagtccttggaaacgcatgccgaggacgcaccctgcctggcccagctccacatgggtgtgggggaggctgcgggctgcgcctggtggccgtatggggcctaggctggccagtgctgcccaatggtgggggctccctcaccgcccgtctggcagaagccatgggccacacgctgtcccagcacatggtggcagggcggtgacctgggctcggctctaatgaccggcagccctggggctcccatcaccactaccagtctgcccaggaggcagcagagcactgagcccgacctgctcccctcgggcacctacgagacccacctgcccctccatgcgtgggggagaaggggtgccctctgctgtggaaagctgggacctactgtctgtggtgcgaggctgaccccacagagctccaggacaaccccgagaggagtggacagagccagccgggccctccagcccccacctggcccagctgccgcctctgggcagatgtctccacttgataaacaggacagctaagggcctaggagagacatgcctggcccaaggccagacagcaggagtggctaggaaggtcaagggatccccactgcaggccccaccaaccctggctctgcctggaatgcagtcagggcaggtggaaggggaggggcaacgccccagggctgggcgaggaatctgggagcaggtgggaagctcatgctaccttcccaggagacgggaggacaggcctgccaaccagggggctcagctatgtgggacacacgctcccacccttgcccttgcacagggtttcatccaaacatggagatgccagtgagtgcctggggctcctctcccaggaacaaaccacacccagagctccagcccgagcgaacacatctacatgaaaatcagcctcatgcatcatgcattgtaatttctcatcttggggaccaggcaggagggctgtgtgacatacaactggtaaaatcagtttccgatgaaaacttataaaaggaaaaagccaacccacaaacaaatg

SEQ ID NO: 66829 - DNA, 4288 bp, Homo sapiens
atctctaagatcccttccatttctgaaggacttccatttctttgtgactgtgggccaccatgggcatgagtcacctgtcaccagagcctggtgtccctgtgcagctgtgccaggtgggcagaggagacaggtgaaggcacattcctcagcgcccgctcacagctctgcccaccgtgcattctgtagagaacctcagcgccctcctccctgccggcagccaggcagggatttaggtggtttctgtttggcctccagtgcttgcctctcccgtgtcctatccgcccagacctcagacctcagagaagcctcctcccacaggaagctctcctgattgatccccatcactggtctcctcaccttctcccaacacaccactgatgcctcctctctcgtgcgcctgccccttcacacttcatcttacacccccatctgcctgggcggcccccccatctcccctcagagcttttgctctcgctgttccttctccctcactgagcctccctggatcttcccatgctgggtcttagccaccagggctctgtccatccaaatgtccccatggctgcaaggctgccccaccctcctgctatcctcacggggcctcgcattcctcttgcttgcttgttttcgggtcccctgctgtcccgtctcagacacaggaagcactctccaatgcttagcgccctagaataaaggaccccgggcaacctcttgggggtcctcgccacatcccaccccttgacagcagctaagctccgggggcagcaactccccgcagtgacccggaaggcagccagatgatactcctcccatcaccttcccttttgtggctcgtggacggttcacctgggctgacactgatggaggccgccaggcccattcccagcctggagctggctccctccccagagagctgcaaggttgggaaaatttgcaaagaacaaaacgtgagctaggcaggcctagcctgactcacatcctggggacccagctaccacatttgggcagtttcttatccaggaggatgcccgggaacagtgacaggtctgaggtctgggcggataggacacgggagaggcaagcactggaggccaaacagaaaccgcctaaatccctgcctggctgccagcagggaggagggcactgaggttctctacagaatgcgtggtgggcagagctgtgagcgggcactgaggaatgtgccttcacctgtctcctctgcctatctggcacacttacacagggacaccaggctctggtgacaggtgactcatgcccatggtggcccacagtcacgaagacaggttttctgaggtgtggctaccaaaagcacccaggccagaagtcatcccgggtggcacggggcagggcagggggtggtgagaggcggtcagcagctctgcacagccagccgcgcctgtgcactggggccctctgcgagcattaggtgccagcagctgtcaccttgcagtggccactcctgccccctcgccaggtcacgtgcactggctctggcgcatgggtgcccctggccgctcagaggcactgcctgctccttacacagtgatgtcggtggtggaaacccgggctgggaatctcagaattgctgaccacggcctcagcacagaggaagcaggcaaatggcccgagtccccccaccatctcccctgcagcgagaagactgcagcctctcctgtctgaagactcgcgtttgggtcccgggcctgggagattctggcgggtgcagcctgcttcccagggccccttctgccccgctgtggctcatcgtccttggagggacaccactcgggacaggctctcgtcgccaacccaccccaagttctctgtcctcaaacacaagcttcctgccagcagggccaggcacagggacaggggtggcagaggcagcacagggcctggcacccaggtggcgtcagtcactgagtatatggtgagataataaatactagttgttgagataacaaataaataagaagcagccctgccctcgggagctcaggtgtgccagtaacacatcagagcaaaggtgtgccgtaacgccacgaggcaagcaggctgacgtgggattagggtgcctggatgggcgacaccgggactggatgtggttccagctctgccgttcggggctgtgactctgagcaggaacacaaacccctctgagcctcggttttctcaaccatctcaggcgtggatgtgctttagaaactacacaccaccaggccaggtgcggtggctcacacctgtaatcccagcactttgggaaaccgagacgggcagatcacctgaggtcaggagtttgagaccagcctgaccaacagggagaaaccccatctctactaaaaatacaaaaattagctgggcatggtggtgcatgcctgtaatcccagctacttgggaggctgaggcagcagaatcgcttgaacccgggaggcggaggttgtggtgagctgagatcgcgccattgtactccagcctgggcaacaagagtaaaactctctcaaaaaataaaaataaaaaaaacagaaaccatacaccaccctacgatcctaggctactgtgcactgagcaactgagtcccgaggaatgatgggtgtggggccggccaggggtttcacctccgccccacgacactgcctctgagcccagtttttctggagcaagaggcttcatgcaggcccttaagaagaagaagaaaaggaacacaccttacctgagtcacacccatctccaagggaccctggtgaggcactcacaggaccacgcacaccaggaaaaactggctacagctggctgatcgtgcacgaaatctcatgttgcgcccagagcgcctccagatcagccacagagtcaagtcccggttccaaaatgctcacagcacgggacatatttgtcaatggccgtgacacaaattctgaggttctactggcggacgagggcgggaggaaagaagcaaaggactgccaggcttggtggctcatgcctgtaatcccagcactttaggaggtcaaggaagcagatcacctgagattgggagttcaagaccagcctggccaacatggtgaaaccccaggcatggtggctcatgcctgtaatcccagctacttgggaggctgaggcaggagaatttcttgaacccagcaggtgggggttgctgtgagccaagatcacaccactgcactcctgcctgggtgacagcgcaagatgctgtctcaaaaaaaaaaaaaaaataaagcagcaaaggaccaagagagaaaatgactcaacttaaaaagaaggttggtagaaaattccccacatccctgacacacacctgctgctgtctcacaccccaggcagctgccacagccgctgcgccctctctcctgtttcccaatcaacctgcattcctgtcttcctaccagctgggaacttggcacagctgcccatcctgaacgcaactccttccctggggatgtcccgccctccctgcacctctgcacacccacgctcttcctgccttcgagaacgtgcctctgtgcatgggcgagcctgtggccgtgactgtgacccctcactgccaggatggctgctgctgcgacgtcaacacaaagcacgccgctctgccttgtgcttacttgtattttggggggaaagcagccctgccccccaaggcttgcttctctgttgtcatcgccccaaaggacaagggactggtgctgccacttcctgagctacgagcagtaagaatattcaaatctctcccaccctgccatcatggtctggtagccaggctcctcccagggtggcttccacttccctggaaggactggccccacggatgctgcatgggctcaggttggaggggaaggacacggcagggcagacccatgctgctggggccccagtgctgggggcctccctccaacacctgcctaagggatgcccagggcagggctctctccctgcaccggaaactctccctcctttccttgcttcttcctacatccaaattctgcccattcttcaaagccacggtctggagccatcactgaggtccaagtcaggctgaatgagtatttacctgtgccaggtacagtggaaaaggaaagacacgtaacccaggctcgcacacacacaagaacctaaggccctatgacagacaggacgccagcggggaggggccgcttcctccttgcggggagggagccagggtgaggcaggaaggaggtggccgtggccgtgggcttttaaggatgggtgggatctgggagcacgcaggagagagggc

SEQ ID NO: 66830 - DNA, 4548 bp, Homo sapiens
ttcaagcgattctcccgcctcagcctcctgagtagctgggattacagccatgcgccacccacgcccagctaatttttgtatttttagtagagatggggtttcaccatgttggccagtctagtctcaaactcctgaccttgtgatccacctgcctcggcctcccaaagtgctgggattacaggtgtgagccatcgtgtccggcctattccagttactgttattgagcaaggaaaaataccacgatcccctttaaaatacattttaaaagtgataaaataaaagtaatttaagaggaaagaggccgaatcagctaatgggttcaagctgaaggacaggcgatgaaccctggctgtcatttcagggcatcaccgctggccagctgcctgctgtggtctgcgagtcgtgggagtgtcacatttgaacgctgggacaggggacgcaggcttagaagacaggtacagagaggggcagcggaagcacaggagacagcaggctcagagacagaaggggccatccacagggagaagtgggaggagccgcagggcctattgtggcaatcagagagaagtcactgcagcaactgggcacagaggccagggagagagctgcaggatgggtggccaggcccagccatggcaaaagtcctaagaatcttggcaaacagggctggggagccagtttctggaggctgggagtggtttagtttggggaagcattcaagccagggaaccaccaactctgagcagaccggcccagccgggcagcagcaggtgcatttcagcctggcctcgatcaaggggggaagcaggcgtctgggcttggcttcttagggaccctgctcaggcaggctctgggtcagagactgcctgtgacacagtcaggccctcggacctggccaagttcaggtgactgtcagctgcagccctggagctggacacacaccctaaaccacaggagacactctctgagctgttgattttttcagagcagtcggacctgttcccaaccgagttctccgaggccttgtcagccacctgcctccctggtgctgtgacacggcctggtcagatgcctggccagcggaccaggggctgctgttgagccaccaccagggacaccacaggggccctgtggaggacagcccctcactctgagaaggagccctctagctcagcctctgtagggggcgtctctggcaacctcatcagcaggccagtgcccagcagaacatggcccatcacacatgcccgagcacagcccagcctcaggagctgccgtccgatgggaggagagcacctcacacgaacaccagcgtgtggcatctgggtgggggaccccgaggccagaagctccaagggctgagaactcagttcccacatgcatccccggaagatgccaaggataaggggagatagaaacgcgttcgttatagggcagacaggaagtggagagaaaatgaggttgggaggtaggagaggccggtgacatggacaggaggcaggagagtacagggccccacacagggtgggcgggagggactgactgtgtgagttcccatgcaggggaagagtagcatttaaacctgggaccaaggcaggggctccagaagctcccgaaattcggctgagagcttgaactgtaccctgggccaggtggagacctgcttctcttcctctagggcgtgctcacacaaactcgacacgaggccatccgctgtagggtgggggccacggtggcccatccgtccttccatgtgatatttaccggctccctggggcaggccagccagtaaaccaaacactggggatgcagcaatgagcacaaatgcctggctccggcggcaatgggctcatattccagtggcaacggcaatggaataatcactcccattggcatgaaaccatgtggggagctgtccacttgggggccagggcagaggagacgcatgttcccggcccagggaggggagtgggcccactcaccccatgccctcgcaggcctgatgccatctggattctgagtatctgccatgaccaccgcccctacagactgtgtcacacgcggcatgacccctgctgggtgcttcgtccccttacccaggtgtggaactgcggcccgctaggcgggagccccctcccaggcggtcagtgggccgctgctgagtcaggtccaatggaggaaactgtccgtctatcttcctgctgtggtgaggaggtctccccgtgaccctgctctcagggcctggtcagcaggtttttctaggagtggagaggaaaaggaagacagggccgtcctcccagagcctgagttcagggagccctgggtactgcttaacaggaaatgagcagaaacgcaccaagctgcagtgctcaggaaaagtgcttgccaaatccagccctgcaaaaggcgagagatagagaaagagagagacaggcaggcagacagacaggaagaaggtgtggagaggacagacagagagagaggaagaagaggtgagagggcaaaagaagggagagacagagagaaagacaagggaagagtgagaacagaaagagaggaagaagaggggggagagatagggagaggaggggagagaagggagagagggaaacccgctgcagccctggccaccacattctttcatccgctttccagggacagcttcgaaaaagaaccagaagagaccgccccctgacacttcagctcacacattaaaaagccattagagttggagagctcaggtcctgctgagatgcctccagagcctgttgagctcctgacacctaccccacccccaccccggggcaatgcttccccttccaaccctcccggcacttaaagacctcaggggcttggaaaagagaaacatggaggccgctctgagcttctcctctaagctctgccccgggcagcgccgaaacctgcggctgcctccgaaatcctactggggacgttggcagcatgctccaaattaaacacgacgtttccccagatcagatcagttgcaaaacactggaaacaatcacggaggaggaaaagggctaaggcagcagtgaaggcttggctgtaccctaggcccctggattaaagtccactggacacagagacacaggcaggtctgagcgggacgggcctcaacctgcaggtttctcctttgaggaaaaaatgcaacagacacacacacagacatctgaggggcccagctgccagctcagacctcaggtgcactgcgcacgtgacagcggccacccctgggtggccaggggtggggtgagcagtgtcatgttctctgtgtgcttgataggtctggggtgtcaaaatgtgacagcccccaatttcttcaactgagcggcataaggtgagacacctcatctcgcactcacaggctgttattaggggcacctggaatataattaagtactgcagagctgggctttaacacacacccagataagcagggcgatcagcacccacggagccccaactggtctttggtgaacacgggattctgagtcagagacaaacttttagccgaactttcagcccttgacttgttctgggacctactgtacagcagtcacgggtggcagaaatcggagtctgatgaccccttggtcctggtttgttaagaatgggaaaacgtaggatgctgcttggttacaaagtgcccagtgaccaccaacagccaaccctgtgaagggggccaggtgagccaggtttcacagacaggcccggggagccgtggggtgtaaggagcctctagcttcctttggggaaaggcagtctcaaacttctgtgtctgcacagcccagctggcacacagttcaggcctccacacagctgctggttccacccgtctgcaagccagaaacagagtgagccctgcctgtcctggggtggcccagggtccacgccgccggctccaatgccggctccaatgcctcaaggcacacaccagtacatgccgcacgttcctggattcagtcaccagagcttcctgcaagaacggacttaactccattcccatcatacgtggacatcacaaagcaaagtcccttcctacatctgttgccaacacctccccgagggagagggggcttccggaggtcagcctgcagctgctggactcaccggccttgtcccgggcacagcctctgaatcaccaacgccggcccttaccagcccacacaaaagtgcctctcaactacctgtcactcccagcacaagggtatacacttttatctgtgccaaggtgaaggggttatgaaccccatatttttgtatcttaagattattcccactggctcacgcctgtaatcccagcactttgggaggcaaggcagggagatcactaggtcaggagttcaacaacagcctggccaacatgatgaaaccctgtgtccactaaaaatacaaaaattggccagctgtggtggcgcacgcctgtattcccagctactcaggaggctgaggcaggagaattacttggacccaggaagcggaggttgcagtgacctgagatcggcccgctgcactccagcctgggac

SEQ ID NO: 66831 - DNA, 1649 bp, Homo sapiens
agattgcaccactgccctccagctggggcgacagagcatgactccctctcaaaaaaaaaaaaaaaaaaaaaaatccaagaagtgtggagtatggtctagagcagtagtcctgggggacaggaaaggaagggaggaaggaaagaagagaagggagggagggagagaggcaaggagggagggaggaaggaaggaaagaaggaaggaaggaacgaagggagggaaggaggactgattctaaggggacacacggtgatgtctcaagatatttttggttgtcacgacttgggggtgctcctggcccggagtgggtggaggccaggggcgctgctcagcaccccgcagtgcccaggacggccccaccacggagaacaatccagccccagatgtcaacagtgccgacggagggggagaaatcccgctccagtgtgatctccaagcaatgaaaaacacagcacacaggattctgtggcatatgctatcacagggtacgtgtttttaaaggaaaggcacacacgtatcttaggaaagggacatacggagtcgatgacagtcgcttgtctctggggagaagggctggctgcccgaggagcagagaggggaaactgacttcttcctctaccttttcaactttgtaccttgcccatccagaggattttgaacgtaactgctctagacgcaacttttccctggctctgggttatctggcaagagtcctgtgtcgacagcctcgggactcctctcttccccttctctccccgcaccccgcctttgcagcggagagaaggaggggagaggtccgcgtccctgggcagcccagggtgcctctcccctcctcccaggggctctgtccccgcttctggagcccgcatggcgggcagggcctgggccacctcgtcgcccccgtccgtcccttggtcttcccacctggcaggggacacgcgccaacgtccccacctcggtccccccggccccctcccgggccaggtcgggcctggctccctcatccgggcagcccggggcccggtactcggctcccgcctgggcctgcgctcacctggctcgccttgtagaactgcttcttcagccccgccaccgacatgctgccgcccgccgccgagcctcccgcccggaccgcgccagcgacaggctcccgggcgccgccgaccctctgcgcgcctcagcagtccccgtcggcgccgcctccgccacccgcttgccagctccgcgcccgccccggcgccgcctcagccgctcgcgcgcccgcgcggccaggatattacatggcaaccgcacgcttccggtgccggcccccgcgcgcgcccccggcccccgcgcgcgcccccggccccgtctgcgcacgcgcgccctctgccggctgaagagcgcacgtgcacattgtctaccgcgggagaggccgcctctgtcagtgagttgagcggggcgagcctagaggggccgtagcagttgcagcgccccctggagtcgtggaggtgaccctaacgtcttggaaaacgcgcttagtttaaacctggccagggaggttgggaagtagaaggggcccctgcttacgattcttcagattcctgtttactcatcttagctaaatccagttcgtctaagtgttcagccccctcccatttttatttatt

SEQ ID NO: 66832 - DNA, 773 bp, Homo sapiens
tcaaaactccaggttcctcatctaaatcccactttcaagttgtcatctgcgccttgcgtaaaatgttctggtgacgtaagagcctgggcctccctcctcttagggactatcccacgcgatcagccagtcgcagcgcagagcaatgagcttgacacctccttcctccaatcgcagggcagctcctcccagccaatgacaggcctccgaggggaagcccagtccctcgcggatatgtcaatgggcgagccctgggaggaatggaagtcacggatctcgcgaggatgcccccggcgcccctcaattcccgaggcgggccgtcacgtgacccgggctcgcccaattggcgcgcggactgcgggggtcgccgcggttcccgccaaatacgagcgcggcggccgcggcggcagcagcggcgcgggcgggagggcgaagagcagcggccgcctgaggggagcccgcgcctccgccgcctgagaggaggtcgagctgccgccggggcgatgctggaggagctggagtgcggggcgcccggcgccaggggagccgccacaggtcggttcgggcccgcgccgaggggaagggggggcgcggcgcgcggcctggacgggccgaggcggcgatgggaggcggacgggcctccgggcgccaagcctggtcctgcgggccgggcgttcaccccctggggccttctcatccccagcgagggcctggcgtccccaagggcacccttgttgacgttattgttgtagccgcgaccatattgtttgtttccg

SEQ ID NO: 66833 - DNA, 1178 bp, Homo sapiens
aggcgacgcagccaagacccagcagaactcaagtctccccttccgccttctcaaggctagatccatgggacttggaagccagtgtgacgcgacagaactgtgcctcacactctggctttagaactcgacctcagtgctgagatccatcaaggccaccgccacttacagaacctcccgccaccatggacgccccatccctcctgctctcgcagccccatgatggacgttctggaaccactcccgggcctcatgtttacaaagagaccgagaggcccatcgtccagggtcacagggatggcaggtggcagagaggacacaaatgagtctgcaaccctcaatgtctgaaactcaatagctggaagacggatacccccagcccctgcccctccccgaggtcccacctatccacctatgttaccgggggaggggagaagtcatagctggaactctgggggtttcccagaaccagccctgctgactgcgaacagcgtcccagcatggagaggctgagaacagtacgtaccctaagacctggaaaagattggggcacaaatccacgctcggcacagccatcacacacggccacacccagagagccacccatggcctgggaagcagggctgccacccgcacctccctgggctgcccagacgagggcgggtgaacagaagggcagcccagggccatgtgtcaggattcgggccacctgcccaggcagcccagagctccacccaccaccccccaccctcaactgcacagcagggtccctcagcagccccctgcgtcacacggaccaatgacctacacactgagccggggctcatgccaactgaaaattgggacccggcccagtctgccggtttagttgctgagatgatgtggggagcgggacagagcacgtggatgcagagaggcagagctgccagatgggcatgtccccaagacaacagcttccttgggatcagagcgcccgggacagcacaccagccaagggaagcgtgtcagctccaaaagcgggcctcgggcgttttgggcgactggctgccaggcttaggtcaggagctgggtacatgcacagacaagggacgaaggaacagcagccaggaaggggtccaaatccatacaggaatgtactttgtgagaaaggtgggatttcacagctgtaagcaaaagacagg

SEQ ID NO: 66834 - DNA, 1565 bp, Homo sapiens
agagaagcctcgcagagaagctctttctcccagcctgctaagacgcgtctgtctcacccgtcttctcctctcaggcccctcccgggtaagagtccatctgtcagaatccctcacctccactctcctcacacaccttcctcagcccctccctctcaattcgccaggacatcccaggtcactgacgacgctgcccaccccggcctccctggccttccagactctttctagtctcccatcagcctcccacgtgctccagataccaaatccagaacccctcttcccatggatacctcaaaacaactcttcaccaccccaccccacagctgtgcgtcctcctccaagctcagctcccatccatggtcacctagattgccccaaatcatcccggcctcttcggccagccgggtccccagacagagctctccctcaccacccggctcaggactcatgatcccgtttttccccaaaggtcgttccactgacccccaactgcctacagccccgtcgccctaatcccccgccactgcatcggaccctcctgcggccccgcccccgagacctcccctcccgccccgccccctgcgctagttcccctcccctcgcctcccccgccgcgcccccgggtcatacccgccccctcctgccccgcccccagatctctctcccctccccctgacgcccaccctcggcccgacttcgtccgcccccggcgcctctccccctcccctgaccctcgcgtgccgctcccagcccctcatcctctccgatctcccgagccgcccaaggccccagatctctctccccggccgtccccgccccgcagggcctcaagcccctgcgttcctcacgcaccccacggactctttgagcttctgaccgggtcccgcgctcttgaacttgatgtcggccttgaactcctgaaagaatttcttcatggtggcggctggcccggcggcggggggccgcgggggcgggggggcacggggcccagtcggggacggggccgccggagaccagccaccggaagaaaattaaaaaaaaaaaaaaaaaaaaaaaaaaaatttacctcgccgccggaagtcccgccttcccctggcctgccacgtgacaatcgactagacgtgcctctctagcgctcggtgccttgctggcccagggcggccgctctgtacgctggagccgcgtctctgtggttcttccggactccgttgccagggcgacgagtgcacctctcgattggagacagggcattccgtggcgctccccaaacggtgacaaacggtgataggacagggacaggccaactgaacctcgcagagaaagcactgggccctatccctttcgctgctcaacctaaactaggcgcggtggctcacgcctgcaatcacagcactttggaggctcaagcggaaggattgcttgatcccagaagttggagaccagcctggcaacatggcaaaacctcgtctctataaaaaaaaaaaaaataaaataaaataaattagccgagggtggtggcgcgcgcctctcagctacttgggaggcagaggcgggaggatcgcttg

SEQ ID NO: 66835 - DNA, 1840 bp, Homo sapiens
ccgacgttcccgctgaagccccgcctcttgtgatggccaatgcctgctccctaccttgaggcgcttctcttgtggtatccaatggcttgcatatctactttaagcctctcctcctgagcgggagaggctgtcaatgacccgcccattgcgttaagtgattggccttcttttctgcggtatccaatgttctgccctccttatatccccttctcttgtggaggtctatgtcctgcctctttcccttaagctccaccccttcactcccttagagcgtctgttcgtctcctcccacctttccctttcacctcccataacctcccattagagtctctgggttacgccccttgggtctgtccgttatccaatcccgttaactgctgtgctccaacctctgttcttattggtcgcctcccttctctgtcccctgcacgtggtcctgatcgacggctttgccggcccgtgacggccggagggctgaacttccgttggcgcaacgcccaataagcgcgcgtcggcaggctgcccagacagcctcccccgccccctcggcgtcccgctcccgcccccggcttcgcctcccgctgccgccgccgccgccgccgcagccgctaccgccgctgcagccgctttccgcggcctgggcctctcgccgtcagcatgccacacgccttcaagcccggggacttggtgttcgctaagatgaagggctaccctcactggcctgccagggtgaggccgcgcgggagatggggccggtgggggggggggggggggcagcgggggccccgggccggaggcgggcactggagggccggggttgtcctgggcctgaaggagctgcgccccgggggtctggggttcatggggtctgggggtgtccgagacccgcagcggccccgccctgggggtctgggggtcctgggccgcagggagctgcgccctaggggtctggggttgtccggggcctgccggagccgcgccccggggtctagggatcctgggcctcagggagccccgccctcggggcctgggggtcctgggctgcagggagccgcgttcttgtggtctggtggtgttcggatcctgcaggacccgccgtctgggcctgcaggagcccctcccggggtctgggggtcctcggcctcagggagctgcgtcctggggttctgggggtgtccaagccctgcaggagccgcgccccggggtctgggggccctgggcctcagggggccgcgcctaggggttctgagggtgtctgcggcctgagagactctcgcccttggtgtatgagggttttggggctcagagagtcgctccctgggagtctgggggtatcctgggcccgagggagtcgcaccttgggggtttgggggtgtttggggcctgaaagagccgcgcgccgacggtctgggggtcccgggcccgaggaagcggtgccctgggggtctggggcctgataaattctcactctgggggaatggcggtcctggacctgagggagctgcgccgtggggatctggggggtgtccagggcctgaaggagctgcggcgccaatggtctgggggtcctgggcctgaggaagctgcgctctgggggtctggggcttctgtgcctgagggagctgcaccatggggatctggggttgccctggcccagagggagccacgcctcgtgtgtctgggggtgtccagggtgcctcagggagccgtgcgcagggtgtctgggagggtctgggacctgagggaccctcacctgagggcctggggatcccaggcctgagggctcaaggttcaagtttgagcagaactgcggaacttgagatttggggtcagatatggg

SEQ ID NO: 66836 - DNA, 3186 bp, Homo sapiens
agggggcacccccagggctcctgccacatcagaccctgccctgcacatcctctcaccttttccgaaggttgcagctccttctccgtccatggggccgtctgctctgggtgggcagccactgtggggacaggggccggtcagggagagtgagggatgcagttagaaccatctacccggctgcccattgcacaatagccaggcacagcctaaaaggtcaggaatgtttcagctaccccgccagggacagcaggaggtgacatccacggctaccagccagacctggtcaccccccaaccccgctgggggctccccccaagcccagggccgctgttccctgaagtagggctctgtggaacttcctctgctgggtggacacccaccctgagtcccggggttcatatagcctggcatgggggaacagccccttgcccagcccgccccgcccccaccgcagctgcctgctgcctattgccaggccaaggcatgtggagcagaagtcagctgcctggggctctgggcccagagggaggcccagctcaggcggctgccccaaccctgggttccctgtcaccgtccctgatcgcccaagctgagccacaggaggctggggagcccctgggctgtgtgaccccaggggagctgttgctcctccctgggagtctggatctcactctgatgagctcagatgggcagagcacccagcctgggccatggtgcatcagaaacggagtgcagggtgggggaacggccgagggactgagtgggggggcattgcagggagacaggctgggttgaaagccaccttcggccactcaccccccatatttatgcctcagtttccccatccaccacaagatgtcctagtgtctgatgagagcacacagacaaatatggaggactccccaaatggctggaagtccctgcccggggagctccttctcccaggtccatgtgtagagtccccccacgcccccagctgggccagccactcaccctgagcctgtggttgggcagcctcggcagcaggcgctcctgtggggtcagcggccggccgggctctcgccgagctatgtgcgttggccaccaggttccgggcagagctgaagccaggcagggacccaaagaagctgcccagggtctgcatgggggcggggggtgtgcaggatgagcaggccaagcctcggcaggaacgggtcagaggaagcatcgattgatcagcccaatgccgccccggccccttgctcctgggtgacctcaggaaagtgtttcagccactcagcctcaatttccacacctgggcaatgggcagactcagcctgcctcccatgcacagaggaaaagatcgtctacccgatctccaaagaccttttccttccaggatccccactgcacagatggggaaactgaggctcagagaggggcggagctgaggccggcccaaggtcacttgctggggaaggtgtcgaggtctgcgtgggtcccccgcctccagcttgggtcagaaaggaagggattggcatcatggctcccagaccgcccccaccagcccaccagggaagcacctctccagattcgagaccccaggactgtggaggtcaccttccccggctctggggcatctccaggccccagcaagaatctgccccatttcccctctttaccttgcccttcggtttggggggatcccgtctcccttcgtctggagcagacatagtgagaacgtgagaagctggaagggggcagagaaggtgcgtgaatgggggttccctagcctcccatcccacacccactccccactgaaagcctgagcagcccgacacccacctgcaggcctggcctcaccctggtgtcaccgaagcagacgcggccccgctcacctggactgcgcggggtcccctggaggacggaccggcccggctggcagctggctctaccctcagctccctggccttatagggtccggggcaggcgcaggcccagccagcagcggcaggcggccaatgggcccgggggaggtggcctggacggtcacatggctacctgcccagcccagcatgggcccaggcccagcacctttcccctgtttcctgcccacagcttgcatcaggctgagtggctcacaggccagatgggctcccctcccgggcccctgagcctccagttccatccacgaggtgggtgtagttcaaatctctgctgcaccaggatgccttggccagttaccatctttttgcttcaggtttctctctcgtactccgcaccacgtcccgtaacatccagcttcttctctgctctcatctcccccagcttcctccttcgcttgcttcatcccagccacacaggcctcctcgctatgcctccagcgcacctggcacggtcctgccttagggcctctgcacgggctgtgccctctgcctggaacaccttccctgcaggttcccacagggcaccctcttccgcccacagaacagtgcctggcatacatttggcgcttaatacacgtttggctcaatggagcaacacagagagtggttgtgagcctctgtgagatgaggtcatgcactgaacaaatgctgccttcgcgttacccaggcagaagcggggtctcggggtctcggcaaggagcagggggtgtcctcagtgtggaggggagcccatcactctccggaagggacttgggccaaaacgcagaccaagatggagcaccagccaagctgggggcaccctaggagtggaaacccagcctggggggcttgggccaacccagggaggctccctggaggaggcgtcctgttccagaagtggtgaggatgggattcaaacccagaccctcctgttccaggaagtggtgaggacgggattcaaacccagacccaggaccttcgtgctgagcccagcctatgtgctgggctgtctgtgggtgggtgggcagaggaatggccgtaacgcccaccctgggctgtgtccccctcctacctgcccctgagacagggttcctagccctgtgttattgggggtgagagggcagaccccatgggtggctctgggcactgggctgggaggagggagggtacagccacaggatctgatgattcccaggccgtctgtctccttggagccgacactgtgtttgccaaacagtgggggaacagaagggggggtgtcccccaacctcttctaccagcc

SEQ ID NO: 66837 - DNA, 879 bp, Homo sapiens
gttccctctgccaaaatgcctacccctatgtgctgttctgatcatcctcaacaggcctggccctgccaggagcccccagcctcatgtgggaagagagagcaaggctgcctgtggctataaagtcaaggtggaaagggcaagaaaccttgagaaggtggcctgtggaggaccggaggagggaagtatccggctgggatggagtcctggaagccttcctggaggaggaggcattgaggctgggccttgaggatgtatgagatgtgtccgagggacggatggggggtgggaagagtattccaaggtggccgcacagcctcagcaaaggcccggaggtgggaatgtgcccacttcaatggtaagagagcaaagtatccaggtcaggctggaggaggaagctggaaggtgaagagtttggtctgtgggcagtggggacctgtgggagattccagaacaggagcagggaggtagatttggctggtggaagtggtcggagatcccagagctgccctctggactatgtcccagggaagtcaggggccaccctgacctcaccataccaagctgtggtttcccaacaccccgcccagccccaggggagtcggaagagcagccaggaatgcggtcagaggacaggaggaaacccccgagaccagcctatggcccttgccctgcctctgtcttcccatcctggccagtgcagctggagagaccacagcaagaccagctcctgcaggaccaggaggtagagagagagctgccccatctgactccttccccatcttttctgctccctgcaattccatgaaattcacctgtaccaagatgagaacagcttccatgcggccaaaggggcaatgctgttgtttatttttagagaca

SEQ ID NO: 66838 - DNA, 958 bp, Homo sapiens
actacaggtgcccaccaccacgcctggctaattttttatatttttagtagagacagggtttcaccatgttagccaagatggtctcgatctcctgacctcgtgatccgcccacctgggcctcccaaagtgctgggattacaggcgtgagcccccgcacccggccaaaggcaggattatttgttaagcgggttgcagtgttctaccagaccccccaccctcaacccaagcccctggtctcactgggacttggccactgccaggagcgtctggcccttcacggcttcaggcccagcacagcgcgtgtcattctgggaaaacatcttgtctttttgggcctgaagccaacgatagaggtcgctcaggttctggtcacagatccaggggttgccggagatgtcgaagccatcccgcatgtcccagtttggctgccctagggatgcccagagcccctcgggcacgctggccagtgagttattggagaggtccagcatgtccagctgccgcaggccctggaaggcaccggctgccaccctggccagcttgttgccgttcaggaagaggtagcgcaggtccggctgcggcaagaggagatcttttcccagtacttgcaatttgttgccttctagatgtagccgttctaattgcagcggacccctcaggaggtcaggtggcaaggtctccaactggttctccccaaggtcaagggtgcgcaggagggtgaagttggccagcagcccggggggcagtttccggaggcggttcccagacaggtccagatgccccagagctttcaggccgtgtagccacgagacctccaggacctccagctggttttctttcaataccagggtgtccagggtggctgaggcctggaagaggcccgggggcagcccggtcagggcgtttcgggttagatccagcaccctcagctgcggcactggccgcaggaattcgggcg

SEQ ID NO: 66839 - DNA, 1721 bp, Homo sapiens
tagtttcttctgatctggcttattttctgggtcagtccttgtctccctggctctgtgttttgatgtgaactcctattcatccttcaaagccccagctccaatgccctcttttccatgaagacttctctgctctgggatcctggtctttttgtccactcttgaccaattgggtgcttggaggaagacagacgttcaggttcatgtttttgagacagagtcttgctcagttgcccaggctggagggaactggcatgatcacagctcactgcagcctctgaacatgaaaagtgtgtcctgctttggccaggtctgagggtgggcatttggccttgggaagcggtggtttacacttagcaccacaacccttggaagcctggggcttcccctcctcctccagggcttccctggcccggcagccatcagacatgatctcgacagccttggtcactgtggccccaggcctctaacaagaagcctcccccggctccctgctgcccatgcccacctgggcttctgtaggggtgtgtgtgtgtgtgcacgcgccagtctttctgtcacagataaggttgatctgtgccagccaccaggcctgtatctgctccctgtgacttctatgggttagctggaatgtcctgtatctccgcatggtctggcgttcaaacctgcctaggacaggtagtgtggggacctacctttttggtcgctgtctgctccaagaggacatggtagctctgctcttttgcttctgggttgtcctggcctgcggaggtggccttatacctgcctggactgggggcaggggaaccaaccctggggaagtccccacccccgtccagttcctgataggggctgagcctaagccaggcaggggaaggggaggggtcaggattacaaaattgcttcctggaaattgtttcctgttcaacccctttttgaccctgcttctagaacacaggtttttctttccttgcttcctgatttttggggggcatccaagagtctctctagttgcatcctcacttcccccaacccggagttcaagggtcaaggtttgcaaggcactattcctggagacagggacagctctctgagcaagaggagggatttaccataaacttgagcaacccagaagctcactgaaaagaacaaaaaaactcgtcttgatttcatggtatgttgatattgctttttttaaaagaagtcattttaaaaatacagtccaatagtgagtaatgccaaacgtctctacggtccttagacagtggcttgggaggaaccaaacctggttctgaattccagctctgtcatgaacacctttgctttgtgacctttggcaagtgacttaacttttcttggcctcagtttccccatctatgaagctgaactcaaatctccaagggctccttctgcccttttttctcttcatctgaatctgacatccatgctattgtttccattcttcctcatttcctattaaatgcgtttggaggctacaaatttccctttgagaacagctttggctgcatctcatggacttggctgcagagtgcttgcattcttgttgagttctaaatatttaggtatgatggtgtcacctttatctgcagctatgactattttttttttctttttttttttgagacagagtcttgcactgttgcctaggctggagtgcagtggcgtgatctccactcactgcaagctccgcctcccgggttcac

SEQ ID NO: 66840 - DNA, 839 bp, Homo sapiens
aggctctcactatgctgtgttgcccaggctggtctcgaactcctcggctcaaggagtcctcctgccttggcctcccaagtgctgggatgacagacgtgagctaccaagcccagtccctcttcttaatagcaacttctggagtccttagaacaaatctgtgtgcagggcactgttcactccccactttacagataagcaaactgacgctccagaaagtaaatgtttgcccaagtggcagagctgagatgggagcccaggcatcgtgccagaggctgtgcccttggactcggagctactgggtcattgttgcaataacggcgggcaggaagcagggtcctccgcattgacggctcacatggagtgcaggcgtgtgccagcactggcatgcatcctagctttcctcccattttagagacggggaaacagcctccaccctggtccctggttctccttcccctgcagtctcctcctggcagcagccaccagagggcacctgtaagcacctgagtcagggccagtccctcctctgcctgcaaccctacatggctcccatctccttcaaggtcaaagcccaagtcctccccgaggctcacaaagctctgcacaaactgcctcgtcctctcccatcccctccccgtcctcccctcctccctcactcccccttgctcactgtgctccagccacaccggccaccttgctgttcttccaacacaccaggagtggtcctgcccgcgggcctttgcacgggccatgccctctgcccagctcaatgaccaggacatcattgggcttttgactggaacccagctgtccctccctgtgcccatcctcccttgctt

SEQ ID NO: 66841 - DNA, 769 bp, Homo sapiens
tcatcttgtaagtattattattggtggagatgaccagagatgttggctaaatttcccaaggccacacagccgggcaaggccagagctcggagttgaagcaaggtctttccagtgaaggctgggagcagtgcccgggctctctatggggtcaagagggatggcatcgggcctctgaggacccggcgcccaggctccagggttaagcctgtgtggcagctgaacttccgcggacctgtccctctaaaatccctgggaagcaaggcatcaggcgttccggaacaggcgcctgctcctgtcgggctggcgcacacttggagagacagctggcaggggactgacgggccagggaggaggggcctgggggggggagggggccttggccaggagaagaggtcaggagctgctccaacccacccacctccagatgggagccaagcgcctcctctttcgcattctctaacgcctctcaattccttcatccacttttgacaaatattattcaacacctactatatgccaggtgccctcctgaaccctttagttgagtaatatgtcaggagtcccctttacagatgtggagatcaggctcagaaagcactggccacttgtcctggacaaacagcaagaaaatggctaagctgggattgccagccagggctcttggtcctgactcagggcctttgcactggctctttcctctgcccggagcacaggcgtgagcctgccccgccaatggggtttttttttgttgtttgtttttttgtttttt

SEQ ID NO: 66842 - DNA, 957 bp, Homo sapiens
cgagctgattagagcaagtgctctatgaagatctccagggaacagcatcccaggctatgggcaccatgcatgcaaaggccctggggcaggaccacacctggcatgttggaggaatagcaaggaggcccatgtggctggaatagagtgagctaggggtagagagggaggaggggaggggaaggaggggacgggacaggtcgtgcgggccgtcatgggctgcaggaaggacttgggtcttgaccttgagggaggtgggagccatagagggctgtggacagaggaggaacaggacctgagtcaggtgctcacaggcaccctctagtggctttgcagagaatgcactgaagaggcagggcagtggccaaggagagaccagtccagctctcagcacatgctgtgtgtctccggggcaagggaagtcactctatgggctcattttccttatcagctaaaaggggaactttaacagcaggcagagactcagaaaatgagcagaaggagctcgctgcctgagattcaggccaggcgtggggctgctgagttaatacttttaacaggtcaggattctgctcaccacactccgggaggtgggaagatgaggtcagccacacccccagctcaggctctgatgaagtcatcgtgacagatgggtaagtgtgaggacagctgtgggaatatttcccacctgtgccctgtgcctcctgcaaagatgtagatgagcaaatcaaccggcatttcacagtcagacacagctctcagcacaccgcgctgtctaggagcccttcctgcaggaagccctcccggattgcctgggccctgtggggtctccctggaagctgtggcaggggtggggggcatttcagggagataaggagcagagaggctggctagaccgagccatggtgaggaaagacagggcggacgacagaagtgctccacgggtgaagggacatgctg

SEQ ID NO: 66843 - DNA, 1362 bp, Homo sapiens
gcgagtggagggcgtggcctgccgaggggcgaggcgagtggagggcggggccgcgctgcccgccccgccccggccccggccccggctccggcgctgctcccaccgccgcggcaacggccccggcccacggaggcggctggacggacccccgacggttggacgtacggactctgcttcgagagtaggtgagcgagcagtgccggggcgccccccatttcagcgcatctcgggggccacctggccgccctctgtctctcccgccccttaatgcttctgcaccccaccgcctgtccgtctacattcctgcctcagtttccgtctgtctctctgtcactctcgctgtataggttagggggagacagattgagtctcaattgccccccttggcgtggggctctgctctgggaccagcacccccatcccccatgtggactctagtggactctgccccctttaactgtagggccgcaggtgctcaggccagattccagaaccctgagggcattccaggcggtgggcagctgggccagccgtgcggaggtgggcatgactgtagcttctagctaaaccaggcatcggtccaggcatcggtggcggggagccaggcctaggccagcccgggcccacccagactggcccctaatgagctcccaagtggcctgtggggacttggcctcagttttgccagctgtgaactgggaccgtcgctgctaaggtaattggcaggtgatctgaaggacacctgccgcctcctggccttttctgtgaagtcgaactaggcccatttcctgggatgggaaactaaggcctagaaagaggccaatgcttccaatgtttgtccagggaagtggggacagaggcaggacagaatctgttttctctgcatcctcacatttcccagcaccttctctatggaggggggaagggctggtggaggagcagccccaggtgtaaacaggccgccagagtttatttcctgagccagtcccagctcagctggaggcgatgaacgccttgggaggccccaggggggccagcccagtggtggcggagcttggaccaatctaggtttgagctctgccacccgcatgatatcttgaaccagtttttcaattctgcggagcctcagtttcctcatctgtaaaacaggagtgggtcgtaactccccaagttgagggctgctgggggatcagatgcaggaatacaggccctgctcataacctgcctgactctcgctgtggctctgccccagtcacactggcctcctcctgtttctccaacaccccaggcgaggtcctctctcagggcctttgcatgggctgtgccctctgccactacggcaggtccgagggcgccaacttt

SEQ ID NO: 66844 - DNA, 912 bp, Homo sapiens
tgtagacagaaggtctcaccatgttgcccaggatggtctcgaactcctgggctcaagcgacctacctacctcggcctcacaaagtgtgcacattgtaatatcgtgatttcatatttggagaatcagcaaccaaccagccaaccatgttgcttttataagacagagctgagaaagcaaagcttggctgtcgtcttggctctggtaccacccacgagatgcgggcgattctcagctcagggcgtggaggcgtggtgtgggggagtctatttgccatttttgtttgtcagcagggggcaggggttctcaaagattgcaaaatgctgctgcaggtcaggaaggttattttgggtgcctgtgggggaggtgaaacaaggtcccatgactgttttgcagaaccttgtctgtggagggtagaggttgcggcaggggcctgtgggccttacttggtgagaaggtaggtctagctggctccattcagtatttgagacatttggaatttgtctgcatttaaaaccaagagatcacacacacctgtctggatttggagtttctcttgaaaactcgccagtccggccgtctgagcctgcactgacgcctggtgaagctgtgcaggggccgcccctctccctttcaccacagtcctctccactccctttcgcctctccctggcctgctgcactcactgataggaaattctgaccccagactcggagcagccttcccgtggttcggtttttgcttccgcgaaaaagccaaaggccttggccagagagccagctgttcctacctctaccccacgcttccaaggcaaccttctccacttatcttaggccgagagacagctcttcaagaacgtacatggatcctgattttctcacgaagtcccgatggaaccctgtgctgttgagacat

SEQ ID NO: 66845 - DNA, 1271 bp, Homo sapiens
agtgaggctccatctcaaacaacaacaacaacaattatccgggtgtggtggcacacgtctgtaatcccaggtactggggaggctgaggcagaagaattgcttgaacccagaaggctaaggatgcagtgagccgagatcccgccactgcacgcaagtctaaaaagaaatagtcaaaaaacagtaaagatactgttattacaggcggggaaagggaggctgagaggggaaaggactttgccgacaagctgagtacagggctgagggcccggcctcacaccctcggtgaggggggaccttgtgcaatggaaggaaggagcacttcctccctcttcggagctgcagcgactgatttccttcaggcccaggagggcagatgccctttagcctcctgccgctcccatcactgacccctccccacctctgcgtctggagggcaggggtgcctggacactccaggcaggcgacaggtgacaggtgatcacgccccctcaacgccgccggggcccacaaggccccgctccctatgagttcagtcctgccccagtgatgaccccggcctcacggtcccgcgccccccactcagcctccgaccctaacaatccgcaccccttcttcagtacccacctccgcggtccgcgccccctcctcgggccccgcccccaatgctccgcgccccctccccgggcctgccagcactcaaatatccgggacggcggtggcacgtacccccgggcccacgttatgggagaaggaatgcacgacgccgccgggccgcacgtcaaacgccaccgtcgtgggctcggacaccgcctccgccggcctcagcgccacggcccctaggagcagcgcggcccacaagctcgcgccgacgccgttccaccctccgctgggcgccgccatgttggactagggtcctcagggcaggggcgggtagacggggcgcggcgagggacacgtggagcgtccgccggaggccacgtcggcgtcggctgtccacgtgacccggcacgccccgccctgtccaccgcccggggccaccatcttgggggcgggactttgtcgagggggcgggacttttgccgagggggcggggccgccgagggggcggggccgccgagggggcggcctcgtaccctagggaccctgcgtagcccggcgatccttggagggtccctcaggtggtaatggagttcgttttggggtctcagggtccctcaccagccgtgtgactgactgcagctctttcagttaggagatgtacagggagtgag

SEQ ID NO: 66846 - DNA, 3766 bp, Homo sapiens
cgggctcccggaccaccccacctctctatccagaagtgacccttgggagctctgtcccatcccgaggctgacactgtcagtgtgcaaggacacctgcaatcccaccaggagtctcggttccctgagctccaggcacgggaactggcccatacagcatctccactaccgggcacctcaacttgaacacatccaaacccgactctggattttttctctcctagaacagtccctctctgagtctgtcttagactggacctgcggagccctccgggcatccatgccgcctccctcctctctgatcccccaccctttccactgcaaacggtgtgggctcagctgtccaagcacatccagaatcagacccaccaggacagctcagccactgccatgacagcaagcctgtcgcctctcccggcccctgggcctgtgtgcaagctgcaaccagaggagtcatctgaaactgaggtgagggtgacgacttcctatttctctcggggtcaaagcccaagtcctcctggagccccagcaggccctgcaccatctgctttttctctccccaccctctcctccctctctccccctcctccctgtgctccagccacaggggcctcctccctattcctccaacatgccaggaacagtcctgcctgccccagggcctttgtacgggctgtggctctgcccagagccgtggtgtggacccctcacctccacagcatgctctccagagacgtcctcatgccctcccgttgtagaaagaaggcccctcaccctcaagcctctcgcccgactgcatttccttccaccacgcacatcacaccagaggcagcacctctaactgtttctggaatactgcctcctccactagaaggtcccaagagcagggattttcctttttctttatttacagtgaacaattccatcacagctacctacagcaggagctggcaaatgtttctacaaagggctagacagtaaatcttggccttgcacaacagtttctgctgggactacccagttctgctgctgcagcacaaaagcgaccacagacagtctctgtaaacaagtggctgtggctcagtgccaataaaactttatttatgaacacaggtggtgggccggatttgacctgtgggccgtaggtggccaacccctggttgtgctaagggcctggcacaggggaggtgctcagtaaatctgctgcctgaataagccaacagttgggtgctctaagccctgccagatcatgcagtcactggggaaggctggcttcctgccgatccctgttccttctcccgcagggtgtgctggctgagtgggggggccgaccaatgaacaaacagcatattgaaccacacgtgactaacgcgatgagtcgacagcattcgtcaggctctgctcaccttccccggggctgaagggctcactccaatcgtagccctgggattttaaaacggcggtgactttgtacaaatggcagaagccggtcttgcattcattggcgcggagaaagcagagctcgtcctctccctctgattgggggaagggatagaagatgtcatgaacctgtccggaaagcagatagaagatgcgtcagaaggtgtgggtggccgggcatggtggctcacaccagtaatcccagtagtttgggaggctggggcaggagacttgcttgagcccaggaatttcagagaccagcctggacaacatagtaagaccccacctctaaaaataaataaataaattagccaggcatggtggtgcaggcttgtggtcctagctactctggaggctgaggtgggaggatcacttaggcccaggaggtcaaggctgcagtgagctatgaccacaccactgcactctagtctgggcaacagagcaaccctgtctctaattaaagaaaaaaatagatgaggggagaggctccaatggctgccagactcaccaacccccctagaccctcttccctgccagccagggatggccaaggcctgagctcacttctccacacaagggcaaacaccacctgccattggcgctcagccttctaggacgtgggggtggggacagtgtgactccagggcccaggcgggcatacagccagcgcttgccccgcttacattgatccagacgttggtgacctcctcgtacaccacatacggctggacattcctggggacagctctggcagaggctagccgctgctcctcattctctgtgctcgggatgaacagggccggggggaggaggacgagctggagccactgctggggccggtccaggaacatggcccaggcgctaagggggaagatgcgggggaagatgagagggaagctgggagcctcagtggcctgcacagagaagctggggacgcagcgtccaaacccgtgtggaatcagggctgggcttcctgcgctggcttcacctgcacttggccaagtaaccctgcagcacccacaggcttccttcctggcacatgcttaggggaggacaggatgggtgacaagatttcatgatccaagtgttccggaaacaatggcctaagtctcacagcggcaagctctaatagtttctcctcttcactgactcttcggcccacagtcgctatcctttatttcgtagtttgctttattttatttatttatttctttatttaattttttgagacagagtttcactcttgtccaggctgaagtatagtggcacaatctcagctcactgcaacctccacatcccaggttcaagcgattctcctgcctcagcctcctgagtagctgggattataggtgcctgccaccatgcccggctaatttttgtatttttagtagagacaaggtttcatcatgttggccaggctagtctcgaactcctgacctcagatgatccgccagccccagcctcccaaagtgctgggtttacagacgtgagccaccgcacctggcctaaatgaacaatttttaaacttgaatttattttaagaggagatgttagtattctacgtggaaaagcagcacctccacacacagaacaacgaaaaccaaaccaaagggaagcatcacagggacataaaatactaactagagtgggtgcctgggctcaggcctgcaatcccagcactttaagaggctgaggtgggcgggtcgcttgagcccagaagttcaagacctgcctgggcctgggcaacatggcaagaccttgtctctacaaaaaaaaaaaaaaaagtccaggcacagtggctcacgcttgtaatcccagcactttgggaagccgaggggggcggatcacaaggtcacgagtttgagactgtcctggccaacatggtgaaaccccatctctactaaaaatacaaaaattggctgggcatggtggcacgtgcctgtactcgggaggctgaggcaggagaattgcttgaacctgggagtcagaggttgcagtgagccaagatcataccactgcactccagcctggtgacagggcaagactccgtctcaaaaaaaaaaattaaaatattagctgggagtggtgactcacacccacagtcctagcaaatgtacatatggcagcagcacataatagaattcattgttaacattccattggaggcattaaccaatgcaattagaaaagtgaacaggctaagaggcataggaatgcaaaagcaagaccctcatatctataaaaaatacaaaacattggccaggcatagtggcgagtacctatagtcccctctactcaggaggctgaggtgggaggattgcttgagcct

SEQ ID NO: 66847 - DNA, 7409 bp, Homo sapiens
ctggcctggaagaggaagaggccactctcgctgtggaagtcgtaggaggtgatgccgaagacccccaggcgtttccgctccctcagcagctcctcctcccgagagtagaccccatggtggggcgtggcctggaaacatacaggggacagggggcagcgtcagtgggcaaagaggatctcccgctggccagggcagagatcctcgggctggggcattcccagggaatctgacttcgggcctcgccagagagaacttcctgtactgggcagaattggctgccggagcccttgacacagtgggtggccaaagattgccagcgaacctggccctgcaggactggctgagtgtcctaggaggtggcaggggagactctggggccagaagcctcctcacttcctgagttccctccccacagaccctctccatagcagatgggggcccctgggaggggctgtccctgccccacaccaccggagtactctctccgggtccctagtgccattcttacagactccccaccctcctaccctattcacaatcccttcccatcaagagctttcaatttcgtaatcccagcactttgggaggccgaggtgggcagatcacgaggtcagaaattcgagaccagcctggccaatatggtgaaaccccgtctctactaaaaatacaaaaattagccgggtgtggtggcacgcgcctgtagtcccagctacttgggacgctgaggcagaagaatcacttgaaccgggaggcagaggttgcagtgagccgagattgcgccactgcactatagcctgagtgacagagtgagactttgtctcaaaaaaaaaagcagaatcaaaagcaaaattacccctacactctgtggaaagcagtgtaaacacaaggacactggcttggggactcagagacaggccaaagtgagggccagtgaaccagtggtggagaaagtgggagtgtcacgatctcagccactgttagatatcattattgttacattgttatgtttatgttgttactatgttataatgttatgttatttttattgctatattgttactattttagagactgggattcgctgtctcccaggctggagtgcaatggtgagatcacggctcactgtagccttgccctcctgggttcaagagatcctcccatctcagcctaccaattagctggaactacaaggcgagtgccaccaggcctggctaattttattttttgtagagacaggctcttgctgtgttccccagtctggtctcaaattcttgggctcaagcaatcctcttgcctcggcctcccaatcatcaaacacaaaaacacgccaatcaatgcaaaaggcatttttcctccctcaactatccccagagagccaacactggatgagattgatgattaaccagtctctctaaaagggcctcaagccaagttaattcccaatctttggtgatgccgttaaaaggaagagatgcttttggtaagagtttctctgtcgcttgagtacaggtggtcagggggaggagggaaggctcacccgccagagtccacaggacggagggtttgtgggaactcacagccggtggggcagagaggtgaccgaaggcatgtatggcctgtggggctggcctttgccacctcctcgcccacggtagggcccacgcctaatagcacagcttacctggaaatgatccagcatctgcttccaggacaggagcagcagagcctctttccggaccttcttgggaatctcagagtagaggagggagttctctcggctgccatatggcattcctaaagggagaaaggaaacacccagaacgggtaccctggctcaggatggggagacgccctcagcctgcagctgggcccagctggttccctctgcttctagaacattctgccaggccgccggcgggacagccctccccggaaagctatggatcctgggtttgcttaagtaggcagtagggccttccacctgagatatttctgctgaatctcacggcctgaattaccgaagaaacagcacacaagaggctgggcatggtggctcttgtttgtaatcccagcactttgggaggccgaggcgagaggactgcctgagcccaggagtttgagaccagcctgggcaacatagcaaggccccgtctcaaaaaaaaaaaaaagaataaaataaaagaaaaaagaaagaaaaataaatcgcacacaagagaacaagaagggcagtcagaaacaaacatccaactctcaacaggttgggttcggctctccaaggccctttatcaaggcttttgcagacgacaagaatttaatataggattagagggagggcaaaaccatcaaaaaggaatgagggccaggcgacatggctcacgcctgtcatcccagcactttgggaggccgaggcaagcagatgacttgaggtcaggagttcgagaccagactggacaacatggtgaaaccccatctctactaaaaacacaaaaattagccgggcgtggtggcacgcgcctgtaatcccagctactcgtcaggctgaggcaggagaatcacttgaacctgggaggcagaggttgcagtgagccgagattgcgccactgtagtccagcctgggtaacagagcaagattttgtctcaaaaaagggaatggggaagcgtgcacctggtccagtatttcccaacctcgcccctaattacattcgggcctggaccatcctccggggtggggctgtcctgaccactgcgaggcgctgagcagcatccctgtcctccgcccactccatgccaggggcaccccacagtcgtgacaaccacacatatccccaggcatctcccagtgtcccctgcaggggcagaatcaccccgacctcaaaccactgatttaatcgaagcttctgtagaaaatgacggtagtgagagctgccaagcgagggttttgggtggattacatgaggtaagaaacgtaaagctctcggcacaatgtgtgtgaccctctgtgaaatcagcgtatttcatcagtaagccgcggctttccacctacgcatgtctctgggcttgggatgggtcttactgcggaaggcgcaatcaggtccttagtggcaaataaaataactgtgtattttccaaatggtcatgtcttagatctgctggatgacagtacaattgtcattagaaaagggaatggcagaagcaggatggtaacccctgggaagcctcggtttcccctctccatgcgacaccactgaaaaaccgggacagggctcctccaagcataaagctgtccagtagcccacaaacgtgacatgactaacgacaagtcacagacagcccggtgccctggcccctccttgctctactttcaaccctgagtttctccaggacgaagcctcggattggtgctgtcctgtcctcttttcaggacctcctcatactcgctttttttttttttttttttttttttttctgagacacagtctcgctctgtcgcccagactggagtgcagtggcacgatgttggctcactgcagcctctgcctcccaggttcaagcaattctcctgcctcagcctccagagtagctgggattacaggcgcccaccaccacacccggctaatttttgtatttttagtagagatggggttttaccatgttggccaggatggtctcgaactcctgacctcaggtgatctgcccaccttggcctcccaaaatgctgggataacaggcatgagccaccacacccggcccttgcttgcttttaagaggagaacaggaaggccacaagctcgccgcctctgggattagtgcttaattagtaatatctgtgccatttttatttcttgttacaggcagccgcagggtcctccagttcctcctgcttgctttctgtgtcctgactgaaaatcacagactgccctgacctctgtggctcagccagctgcaggtttttccctacaggcttgaaccagagcctagaacattcccaggcactgataaataccgaaagccagcccaggccctgagccaaaatccttaaaccctcacataaactccataccctgacccccttgccgaggacacacctggctgtagaacacgccttttctctgatgcccattgcaaggacactgaagcccaccctgcaccgaagaccccctggaaaatgctttggactcatccccctggcatttagggttcctttctttggaatcccaaccagccccatctggggacggttcagggcactcccttgtgggaactcctctgctgctgcttttggggtgactgtagctgtgggttcagtgggatgaaacagaatcttctcactattcacaacagcaaagacatggaatcagcctaaatccatcaacggtagactggataaagaaaatgtagtacatatacaccacggagtactctgcagccataaaaaagaatgagatcatgtcctttgcagggacatagatggagcaggagaccattatccttagaaaagtaatgcaggaacagaaaaccaaataccacatgttctcactttataagtgggagttaaatgatgagaacacatggacacatagagcagaacagacactggggcctattggagggtggagggtggagggggagcagcagacaaaataactatcgggtactagcctgggtgatgaaataatttatacaacaaacccccgtgacacaagtttacccaaagaacaaaccggcacatgtgcccttgaacctaaaagtttgttttcttgagagagagtctcgcactgtcacccaggctggagtgcaatggtgcaatcttggctcgctgcaacctccacctcctgggttcatgcgactctcctgcctcagcctcccgagtagctgggattacaggagcacaacaccacacccggctaattttttgtagttttagtagagacaggggtttcactatgttagccagactggtcttgaaattctgacctcgtgatctgcctgcctcggcctcccaaagtgctgggattacaggcgtgagccaccacacccggccagttgtttgtttgtttttttttttaaagaaagaaacagcaacttctagttgtggcaaggaacacaggtttcccacgcatgaggaagcgcgcttgtgaagtacagtagtgacggaaggatgtacttaaagaaaaagattagattaacagggttccttttaaagtgtatttatgaaaaatgcaaagttcagtgagatgtgtgtgggaaggagaaaaatcgtgcggagactcaggggtgagcaaaagaacgcaagtgctggaaacacgactcaatctctaagagcccttgaagctgccaggaccctgcccgtccggccgcccatggggatgagggtcaagtgatgtgtgatttcgctcgtgtgaaatgtccagaacaagccaatccacagagacaggaagtgggttcatggttgcccggggcttgggagtgatggttgatggggttgctttttggggcgagtgaatgttctagaagtagacaatggtgatggctgcacaactctgtgaatgcgtgactaaaagccactgagtttcacaccttcaaaagtgaaactgtgcaatgtgaattacatctcaatttttaaaaagcaccctgggccaacaggaggggtgggagggatgggagggcctgggcagctagtccacagggactctccaggagagctggagctttccaaacaggaaatcaaagccacagacttgccaaggacaccagggccacctccttctaggctgattaatcaatgatcaccaaatggcccctgccagcacattcctcgggcgagctgctgctggcactatgatggtgacaactggcctttgaggcaagggctagaggtgaccgccaagggctgtggatttctgctgccccatccctcctcggacctccctcaccagctctgcccctgcaaacacacctgatgccaacctgtcacccacccatgccccggtgacccaggcctgcgcaaacaccatttcccgtcactgcacgctgtggcctcgagtggctggcctggtgggggatcgtgatccacacagggctagggctctcccctggatctcagcctgggacgtcgggagacaggaattcttgctttccctttcgagggagttccagaactgtctggaaccctgtggcctcctccagccacagaagtcaccgtttgcagtggggagaggctgatccgcgtggggcgggagcggggtcgggagcgtttcccaatgctgcagtctgaggcctggaacctgagccggccccagcccatcttcccagcagcaggaaccgcacgttcccccgctgctcctgctagcctgacgctgggggctttatcatgtggatctgaaagagcctttccggaggggcccagtgattagctccacatgccccacagcaaacctggtgcctgctgaggggacaggtcccatgctttgagcagcaggccaggcctggccttgaagtctggacactgggctagtgctaagaagtgttattattactcaggggctggggggaggcctgccccgagaacctggatgtgacgtgagctcagtgctgcccctgacagtgtgaagtgacagcctggagtcgttgaagggtgaatttcaccccgaaaggggcagtctggtttttgagctactctaggtacgttctggggtttctgccaagttcatgcccactggggtgggccctcagcacctcctgtgtactgtgaggacctgcctgtcccagccccagacacacacacgagccacaggcgacccgacgatctcatctatgcggagtcaatctgaatctttgtcccggaaatttggagaaagttcctccgtttctgctggtggctagaacctgaggcatggaatcccaggcgctgtggaggggttgcggaggacaggtgggcagcgaggtggggtggacccaggcacggacagatgcctggcttctggaaggctctggttctcaggcgctgcttcctgaggtccactgggctttctgctcttgggttccatgagatgcccctctacctttactccaggagtacttcatggctcagacgagcttggagggtttctgtcccttttagcagctccacggagatttgaatgatggccctgacagagaggtgtccacatcctggggctcgggtgtggaggctacgttacacagagagacaggcctgtgcggctgggattaagtgaaggctcttgagctgaggagatgatcctggattacccaagtgacccagatggcatcatgagtccttatcagagggaggcaggccaggcacggtggcttacgcctgtaatctcagcactctgggaggctgaggcaggcggatcacctgaggtcaggagtttgagaccagcctggcc

SEQ ID NO: 66848 - DNA, 4054 bp, Homo sapiens
actgcactccagcctgggcaatggagtgagacctcatctctaaaaaaaaaaatgaaaaataaaaggaagacagtaaatgttttcagctacgtgggccatatgacctctgttgcggtgactctcctgctgtagcttgagaacagccaaagatgtcaggaaagtaacagggaccaggaaaacctgacttctgaagacggctgtcacctgccgacccctgttctggatgattcttccttttaaattctttgtttgccagaccaccatctgattcccacacaagtctgtctgtggagagggactgcgctgatggcggaagaagacagccacctggtgtccacctcggtcactgttgttagcatgtggtcagcctcaggcagaggatgacggccgttcactggttccaatgctggctgggggctgcagcacacgcgggcctgggctcaggggctgaggacaccaccatgagtcccatggatgagtgcagcggtctggacaaggatcccagcgccaccccacccccaaggaacacttggcgatgtctgaggacatctgtggttgtcaccactgggatgtggctgctcctggcatggagtgggtggaggccaggaacgctgctcaggaccctgcagtggccggacggccccaccccagagaacgatctggccccaatgtccatggtgccaagcgggagagacgctgcctttggtccccagccatgtgtcacgctgctttcaaagacacaggcctggctgatctctccaaggtgtccttcctcccagctcttaaggcctctgggtgcagtgggcaccatccgaatatccgctgcccacctcacgggagccaggcccacagtggctgcagaagctgctggaggacatgcagcctaacccgtgccctgaaggcactcgtggtgcagaggagcccagtcccgtgaggcactgcagacgctgcaggaggagctgcgtgcaggcacacgcccagaggaggaagtgtggatccagagcctgcagcaggggctgcaagcgcgtggcaagccgcccctgtgctgtcaccggcggcaaaccaggttctgccatccgggcggctttcccggaacctcgggatccttcttgacgcacctccacggcgagctcctcctggagttactcccgactccctctgggaatggttcagtccagtcctgtttgtcacgagccccacccagcccggaccaggtggctgggaagtgactcagggggtggacccggctgactagcactggaaacaatctccgggcttggagccacagggccggcttgagccacggcatcctggccacatggaggagcggggctgccctgtgcatggctccctgcacggctgaccctccgggggccgccccacccaccccgcggcagcccttccctgtagtcagagctgtctgtggctgagcctcgaaggacagcatgcccagggcccagccatccgagcagatcttccaactcctgtggacctctgggaacagagaggaccagggaactgtggtcccagatgctgtccccgcccaagcagcctgcagggcccggcttacccaggtagtagaggcggtgggagtggggcccagactcatccgtcttctgcacaaactggaagtcgtggggcgccttgttgacaatgaggcccgagtacttgcggctgccgtggatgatgctccggagcccgtcccacgagtgcttctgcacctggaagcgggcggccgggtcatctgtggcggctgcgtcgcctcggtcggccgttggggtcccggtggtggccatcctctcagccccctcggaattcagcgagaagctgcggggaggaagcaaagactatgagaaaggagaactgttttacctacgagctgccccaatgctgccccttgcgaggcactcaggttcttccagacgagccccacccctgccgctttccccactccctaaacacttcttgggttggtctacctctctccatgtcactaatgctgctaagattcaagccaccatcacctctcaaatgaatgatctttaaaaacattcttctttttggagatgggggtctcaactatgttccccaggctggtctcaaactcctggccacaagcaatcctcctgcgtcagcctcccaagttgctaggactgcaggtgtgagccaccatgcttggctttggctgaatgactgaaaccacctcccaccaggatgttccacatccactgccaagaccccatcacttaaaacccttcctggttttccacagtccccgggataacaaccagttctcaccaccacctcaaggctgctgtcgacccctgccaagcccttgaatctcatccttcttatccctgtgacccagccaaatgagccttcactcagctcctcaaacaggccaaattcctttccaccgcagggcctttgcacatgctggccctcctgctcggagtgcatttttcctcactttgcttaacttctttgatatatgtttatatatatatacttttttttttttttttttttttttttggagacagagtctccaaaggctggagtgcagtggcgtgatctcagatcactgcagcctctgcctcttaggatcaagcgattctcctgcctcagcctcccaagtagctgagattacaggtgcctgccaccatgcccaactaatgttttttgtatttttagtagagacagggtttcactatgttggtcaggctgctctcgaactcctgacctcaagtgatccgcctccctcagcttcccaaagtgctgggattacaggcatgagccactgcacccagcctgcttggccagcttctaatcagatctcagctgaagtacttggcaggccgtcagaaacctttcacaccatccacgctgaagctggtctttctgctcatctttcacacgccacctggctgtcccctccctccaccttcatcacagcggttatttgtgggacccctgtctcccccatgtctgtcccattcacagctgtgctcccagaaccttagctggtggctggcacgtggcaggcattccacggagcactgtggaatgattatctctcagtgggctcgcggggagacatgctgggtctcgggagaggcccgggcgtgaaggaatgaaaatccatcctggtcacctgtgctgttggcttgctgtccagccggggagatgcttggccttcactggaagttccagagcctcgggatgtgggaggtgcaggtgaaagggtgaatggcacgcccttccccaaagaatatcccactctctcctcccactcaggacactctgggtccgcaaagcagccaccgtgagtggccgccgcggtgtcacatctcccaccaccccactcccgccctcgtcacttagcacactccttgacctgactggactggccaggcaaatatttgttttacagaaatctaaacatggccgcagtgacccagttctgcgagagccagtggtctggaaagggtggcaccggggctggtctcgcttccctttgtgggctccgagtgactgccgaccttgccagaagccctgtcctccgggaccaacagcttggcttggggaagtcgctgcttgcttggaggaagtgggaaaacccgcgggagtggacagcagggactgggtgtgagagaagtaaagggcagagatgagtgggccgccttgactctgcagtgtgccagttcccagaagactctgcctcttgccaagaggagaccccacagggtaaccactgcaagagaaagggccccagcctgctttgagagggaaggggagaaagagctgcaaggatgtcaacgagcgcctttgaaagatcaggacttggccgggcacagtggctcatgcctgtaatctcagcacttcgggaggccaaggcaggaggatcatgagatcagcagatcgagaccatcctggctaacacggtgaaaccccatctctaccaaaaatacaaaaaattagccgggcgtggtagcgggcgcctgtagtcccagctactcgggaggctgaggcaggagaatggcgtgaacccggg

SEQ ID NO: 66849 - DNA, 2977 bp, Homo sapiens
cccagcgagaacatggtatgacagtatctacgcctggggccaccaagggaattgaatgagactgcacacatacagcttttaacacagtgtctgatgtagcacaaactaaatgacagctagcattgtcaactaaacaagatactcaaaaccacaggaagggggagactcaaactaaagtcctttcagggccagaatccacaccatttactgaccgggtcaggcagtgtaggtggatccaggcacccctccaccaaatcctgctgaaatcagcactctccccttcctctcctcaaagccttcaaaaagctccttccaggggcagctagagggggacaggggtggaaagaaaagcctccagcaggcgcacaaaaaactgcagccactgccctgcggaggacaaccatccagggccatagaaaaccatttcctgcccatgtctatattctagagcaggcaaaggaatcccaccagcccacaccccagccttcctggctgccaaaccccagcacaactgaccttctaaagggtccagagagcctccattccagctgcaggcgtgggacacagacctttataggataaacatgtcatgaatgtggcaggttaatggaagcaccggccagccgttcagcctcccccactcaggagctgcagactgtcaggcccgattctacctggctagattctagctctgccttgaagccctgcagcactgtctgcatgccctggacagaatctgggagagaagccatcccacgggccccgattcccctgggacccagcagaggaatgcagggattggtgcctacggtccacaccccctgggctttagtcccagctcctcgaaagcaggttggttcttgcctgggaggcaagtgacttcctcctggggcccctggggaagaccagggggtgggggccaagggaatagaccacttttgatggctcagaggcagcgtgaacagggaagtgtcagggctggcctaaggctgtgtgggaagaaggtaggcggttggacaggcctgagaagggaggctgagagaagggggctgaaccctgtgggctggacccttggaagacagctatgctaaccactacaccaccaacgcctcggcaggaaaaagagtctctggatacccttaatagagggatcaagtagggttgaggatcaggactggattggggagaccaagcctcggggcgaaggttggaggaagtggtaaaggagtgaggacaggatgcaggtcgagggaggtggcctctgtgcatatacagcatttgcatggggagagggaggagatcgggacctccagagcctgcacgaaaggggagagggtgtcaaggtctgcagctacgaggacgttcttgggtgcggccacctccggaaggggtcagagcctggtggcctgggcagcaacgggatgggtggggaagcccatcagggaaggggagaaactgggaggtggcctggccagcgcaggaatcggggagggaaagaaggtggaggagggcctggggcggagaggaaacgaggcagggggccggagggacccacagacgggtgcatggaggctccggggtgcggggaggccaggcgatggcgagggcagggtcagggccgaggcggggccggtcaatggcgggttcagggtcgcggccggggcgggacgaggcgcgcgggcgctgctcaccgggacgtggggcggcggccggactgggcaggtcgtcccgggtccagcggcgcctcacggtcgcggctccatgcccgggactgcgaccccggaagtggcgggagcgggggacgacagccgcggcggacacaggggacccgccggctcaggcacctttgacccggaagttgagcgacccaggcggcggcctgggattggacaccaccaggcacgtaccaaggcgtccgcggcgcttgggggggagcccgcggcgcggcggcctaaggtgcgtaacgccccatgaacgacatcttccggtgggttagggagagacacccccctgtgacttggtatcactcagtcaaacccatgatcccccactattaaggatatccggagaggatgctacctatcagggcgttggtggtatagtggttagcatagctgccttccaagcagttgacccgggttcgattcccggccaacgcatgcggtaccacttttgcgagtttgaaattttcattttagttttgagacggagtctcgctcggtcccccaggctggagtgcagtggcgtgatctccgctcactgcaaccaccacctcccaggttcaaacgattctcctgcctcagcctcccaagtagctgtgattacaagcgcacgccaccacgcccatctaatttttgtatttttagtagagatggggtggggtggggcggggtggggcggggtgggggggggggggcggttcaccattttggccaggctggtctcgaactctgacttcaggtgatccgccctcttcggcctttcaaagtgctgggattacaggcgtgagccatcaatcacggaaaatttttttaaatcccataaaaatgtctaaaaggcaggaggaaggcggaagagaaagaatgggactagaatcgttctttcggtgaatttcaaatagtattactctccggttaggaaaaacagctgacctgtttccgcccgggatcgaaccggggacctttcgcgtgtgaggcgaatgtgataaccgctacactacggaaaccggtaggcgtcagggttctttaaattctcctatagagataatgttgcagtgatagttgcgttgtcccaccaaagaaacactggctacagtcagctaaagcaatatccgctcttcctgaatatctgttattgtatttgatacagtagagaccgaaagaaggaaaataaggaagacaaaaagaaatccaataaacaccctttccaacacacccacccacccacacacatgtttatcactttatcataaatccac

SEQ ID NO: 66850 - DNA, 1572 bp, Homo sapiens
catagtggctcacgcctgtaattctagcactttgggaggctgaggcgggcggatctcccaaggtcaggagttcgagaccatcctggccaacatggcgaaacccgtctctaccaaaaatacaaaaattagccgggcgtggtggtggatgtctgtagtcccagctactcgggaggctgaggcacgagaatcacttgaacccgggaggcagaggttgcagtgagccgagattgcggcattgccctccagcctaggcaacaagagcgagacgctgtctcaaaaacaaaaaccaaaaccaaaaaaccccacaaagttattgaaagaaataaataaaaataaatacgtaaataaaagaaggaaattctgacacatactagaatatacataaatgtatgtaaatgaataaatgaatatatgaatgtgagaataagaagtgagcgcgtcattttttaccgttctcccagctcaaaacgttttcgccccgtccagcttttcggcctcctccgggcgccccctgccggtgggccgcttgcccgtgctccaagcccaaaacagacgcgtcccctctagtcgcttttagccttcggtctcggtcctgattggctcagagtcgctcgtgatcccttttgggaaatgtagtccttaagggtatcgcgcctgctttttctatacgctctgacgcagagatagccacgggaagtacgtcaccaaatttcgccggttcccacaagctaggtcgtgtgacgctgcatgacgggaattgtagtcctcaaattgctagcttccgatgccatgcgctgcgactggaacgccaattcccaccatgccgcgcgctcacagctctcaggggctgtcctgtggcctttggggaagtgtagtcttgagcccccaagattccttttctgttctatggagtgggcccgcgcaaaggactccatttcccggcgtgctgccatccgtcgggtcgcggcagccattttgttccgcccgaggagaccctaagatggcggcgagggggacggtgaaggttgcctcccgcccgtccgggctctgatcctccgtctccccgtcccccggcggccggcccatggcctggcggaggcccgaaccatggacctccgcaccgccgtgtacaacgccgcccgtgatggcaagctgcagctgctccagaagctgctcagcggccggagccgggaggaactggacgagctgacgggcgaggtggccggcgggggaacgccgctactcatcgccgcccgctacggccacctggacgtggtggagtacctggtggaccggtgcggcgcgagcgtggaggccggtggctcggtgcacttcgatggcgagaccatcgagggcgcgccgccgctgtgggccgcctccgcagccggccacctggacgtggtgcggagcctgctgcgccgcggggcctcggtgaaccgcaccacgcgcaccaactccacgcctctccgcgccgcctgcttcgacggccacctggaggtggtgcgctacctggtcggcgagcaccaggccgacctggaggtggccaaccggcacggccacacgtgcctcatg

SEQ ID NO: 66851 - DNA, 2405 bp, Homo sapiens
actatctcagggagaagcaggggcttgaacccgctgttcctgctgccgaggccagcctggctgacctgggacaagtgaaggttcctgggccgaattctttttcagtcactttaaggaacaggaaagggtcctctgaactgggcaggccctgaatgtgcccacatctcctctgctcttgtctctacctggtccagccccagccaacatcactcacccagaccagtgcagtcgcctccaccctggtgccccagcatcagccctggcccaccaaggtctgtcctccctgcagcggccaccagagggcacctgtgagcactggagtcaggtcctgtccctcctctgcccacagccctgcatggctcccacccgcctgggggtcaaagcccaagacctccccatgacccaccaggccctgcttaacctgccccatccccttttcgccctcccctcctccctctctgcccgtcgctcactctgctccagcctcctcgctgttcctccaacacaccaggtgccatctgcccccagggcctttgcatgggctgtgccctctgcctagaaggtcattcccactttcacctccagctcttcccatgactgactccttttcttccccccaggtctcaactccaacaccccctcctagagagccccttcggccacccctgctgaaattctttctcctgagacactcccaccaccacttctttttttttttttgagacggagtctcgctctgtcgcccaggctggagtgcagtggtgcgatctcggctcactgcaagctccgcctcccgggttcacgccattctcctgcctcagcctcccgagtagctgggactacaagtgcccgccaccacgcccggctaattttttgtagttttagtagagacggggtttcaccgtgttagccaggatggtctcgatctcctgacctcatgatccgcccgcctcggtctcccgaagtgctgggattacaggcgtgagccaccgcgcccggcctgttttttgtttttgagacagagttttgctcttgttgtccaggctggagtgcaatagccccatctcagctcacagcaacctctacctcctgggttcaaatgattcttctgcctcagcctcccaagtatctggaattacaggcgcgtgccaccacgcctggctaattttttgtatttttagtagagacgaggtttcaccctgttagccaggatgatctcgatctcctgacctcatgatccgcccgcctcagcctcccaaagtgctgggattacaggggtgagccaccgcacccagcccgaaggctcttcactttctgaaactattttgctttcttcttttataatttgtttactattccttcctctcctcccctacggaaatgacagccaatgactaatcacttctgtctgctgtctgggacaactcccagcacacagtaggcgctggatgaacgttggtcaaatgaaggaatagccagttcactgcccctgctcaggtatttgcagctggttccggcctggatggtccgaaaccctttgttgggaacaacctcactgcaccctggaatctcatctcagaactccactccccaggtttcacttctgggccgctgcggctgccaccgggaccagagctctgacaaagtctgagtcaacaactaaaatagcaagtagtgcatggctgctgggtgattcacaccagcctgcttccatgtggcctggcaatggaggaaggagcctgcaaagtcaaatcaggttgtcaggagggaggggctcctcagcttcccagctcagtgagtccagtttcaccttcgaggaccctcctttgtttcctcccttggaagttcagctccttccattgtgattccccgtttctgatctgtgtgagttttggagtcagaattaatctctttaggcctcggttttccccatctgtaaggtgggtccataatagaagcttctaccttgaggggtcattttgaggatgaaaatgtgtttgtttatttatgtatttaattttttgttatatagatgaggccttcctatgttgcccaggctgatctcaaacgtctggcctcgcctccttacacgccaggacaacgggcctgcaacaccgtgcctccctatttatttttattttattattttattgttatttttggagatggagtttcactctcgtcacccaggctggagtgcagtggtgcaatctcggctcactgcaacctccacctcccgagttcaagcgattctcctgccttagcctcccaagtagctgggattacaggcacccaccaccacacccagctaattttgtatttttagtagagacggggttttaccatgttggccaggctggtctcgaactcctgtcctcaggtgatccacccacctcggcctccca

SEQ ID NO: 66852 - DNA, 698 bp, Homo sapiens
ctcaccatgctgcccaggctgcaccctccccgccctcaacaatatcttttccctccacctttcctggtattagaaccccgactcgggaggcacacggccgttcagaaaggactacatttcccagggttccttgcggcaggagcagggccatgtgattatattctggccaatgggatgagggcaaaggccggtctatgccctccaagaagaggcgtgcacttcccgcttcctgttcccttttgcgggagcgggagccacgtgttttataacaaatagccaggcagaaggtgtcccagaagacaatggcgctgcggaagcattcaataaatatttattataattaaaagaccgtagcaatacccccaccaccaagacccttcacccagaaatagagagattggaattgtaaacaccgtatccagttctgaccaccctgaaagccagggcatcatcgcgcccgttttgtcctaaatgaagggctcccggacaatgtcctgaaagtggcagatgacctcatcttccactgtccacagggcacagggcagaccggggtgctctatggggtcctggccgatgcctgggtccaggggtgttccccaggtggtcaggcaaggacacgcggtcattctgcctcctgcgtcttgtcctcgggcgcctgggaccctctctggttccacatgtggttgttcagccccagc

SEQ ID NO: 66853 - DNA, 902 bp, Homo sapiens
tctcaatctcttgatctcgtgatccgcctgccttggcctccaaaattctgggattacaggcgttagccaccacgccctgctagtttttgtaattttagtagagacagggtttcaggctgttggccaggctggtctcgaactcctgacctcaatcgatccgcctgccttggcctcccagagtgctgggattacaggcatgagccactgcgcccggcctgtataggactcttaaagcagtgcctggcacacgcatgccccacaaacattagcatgcaagactgaaacctccttgcaagaaggactcaggggagttttgcagaaaacacgacaaagccagccagacttagaatcatcaaggcaggaccatctccacctgaatgcctggcaaatctctaaaatcacgtggtctttcttctcattctctctgcccccccgggcctgaactcaactctatttcagtgactgccccagcttcccccgcccgcctcccctgcccactgccacctccaccttctcgagacccagcaagtttcatttctcactgtccatggctgggacaaagtccactcctcactctgaagagcaggcgcctggcgggacaaaaacacccatggggtaggagggttctggctctgccacctgccggcttgtgtggtctgtttctcagcctcagcttcctcatttataacacccacatgaactggtacttaggatgaatgggagtctgttttgaagctttcatgcgaaaatatggttaaaaagtttagatcagtgcccagcaaggagcaagagcttgatataataatattagtgtgacaataaatattggcagactttttctcttcctcttcctttttaaaaaaatttttgatttttaatttcatttcttttttttttttttt

SEQ ID NO: 66854 - DNA, 2144 bp, Homo sapiens
tagagacagagtctcacccatgttacccaggatcctgggctcaagcaatccacctgcctcagcctcccaaagtgttgggattacaggcataaaccactgcacccggctaactttctttttgaatttttttgtagaggtggagtctcgctatgctgcccaggcttgtcttgaactcctgggctcaagtgatcctcccaccttgtcctttttaaatgttttaaccacctctcccactctccttcccacactctcatgcagcctttcatgcatcgaatatgcatttattgagcacctactaggtccaggaactgttcaaagtgccactgcatatcaaggcaggcacatctaccctcacagagctcccagtctggttcagggagaccaacagtaagcgagaaaataacccaagatcatttcagagaatgaaaagtaacgtgaaagccatgagccgggggctgtgtggctctgagagactggctgggaaggggctacaggggaccacggtggtcaagggaggcctttggggacaggaggtaacattgagctgagacctaaaggagctgagggaggaggctgggtggagatcagggaggaaagcttctggaaggtgaagccacctgcccaaaggccctggggcaggactgcgcctggtgagctggaggaacagtaaggaagcccatgtggctggataaccgttaggagggggagaaaggaagaaggtgtgtggtggtacagggtgtgaggttgggatcctgggtgtcagggaagagtttggggtgtcagggaggaatttggggtgtctgggaggaatctggggtattcgggagggatcctgggtgttggggaagaatccagggtgtcagagaggggtcctgggtgtcacggaggaatttggggtatcagggagggaccttgggtgtcagggagaaattcagggcgttgagagaaatatggggtgtgaggtaggaagcttgggtgtcaggaatttggggtgagaaggaatatggggtttcaggtaggaatcctgggtgttggggaggaatctggggtgtccgggaggaatctggggtttgggggaggggtcaggctgtcggggaggaagccagggtgctggggaggatcccgacagtgggggaggatctgggccaccagcgcggggagctggaggttgaggggaacgtcaacctcccaacgcgcggcgccaggccccctcctccgcaccggggccctaagagggaggccaggtggcctggagccctggcgagcggcacgggctcagggccaccccccacacccccgacaccttctccacctcaggcccgtcctcgccccttccccacctaccagggatccggggctgccggctgcgccactgggtcctggggtcctgggggctggggcttctgcggagttgcccgcggaccgtagcgcgctgagggcgctggctccaccccgcggcccgcgccctgggaaggaagcgcgccgccccttccgcgtcccgggtgggtgtgggacgtgaggtcacggtttcggagtcctgccccgcagcaccgggaaagtccccgggtcgccccgcacccatgcgctctcttcccaacccttgcggtcacgttcagcaagtgtgagcacctactgtctgcagggggccagaagaactcgcatctgctctcggggagcccacagtcatctgggcgggggtcccagatgagaaagtaatcacaattgtaaagtgggatcatctccgttagtgataggtgctttccaggaaataaatgtagcagctgtttttattttatttctcttattttatttgtttgtttgtttatttatttttttatttattttccgagacggagtttcgctcttgttgcccaggctggagtgcaatggcgcaatctcagctcactgcaacctccgcctcccgggtccaagcaattctactgcctcagcttcctgagtaactgggattacaggcatgtgccaccacacctggctaattttgtatttttagtagagatggagtttctccaccttggtcagcgtggtctcgaactcccaacttcaggtgatccacctgccttggcctcccaaagtgctgggattacaggtgtgagccaccgtgtccggcctcccttttttttttt

SEQ ID NO: 66855 - DNA, 704 bp, Homo sapiens
aaaaataaataaataaatcaaattagctgggcgtggtggcaggtgcctgtagtctcagctactcgggaggctgaggcaggagaatcgcttgaacccgggaggcagaggttgcagtgagccgagatcatgacattgcactccagccagggtgacagagtgagactctatctcaaaaaaaaaaaaaaaaaaaaaaaaggcacacactgggaggtagggttttgcccagagccctggcagctggaggactctggacttgagcgagggattacgggagagtgcccacgtgagagagataagatctggttttttcatttgaaaagtcattctggctgctgtgcttagcagtcggggaaacaggagacagttttaggcagcaggtggtctagttctgcctcccgaacaatttgcatttatagagatattcaccatatctttatgcatgtcacttttgtagcccttactatgtgcttttgatatgatctcatttcagtttttaaaaaatcgatctgggtccgggcacggtggctcacgcctgtaataccagcactttgggaggccgatgtgggcggatcacctgcggtcaggagtttgagaccagcctggccaacatggcgaaaccccgtgtctactaaaaagtacaaaaattagccgggcgtggtgacgcatgcctgtaatcccatctactggggaggtggagacaggag

SEQ ID NO: 66856 - DNA, 1891 bp, Homo sapiens
tgagtcatcctgcccagcccagaatgggttctaatcccagcttggcaactcactaggaataggagtttgggaaggcagcatcccctaggagtcttgcttgccacatctgtgaaatgtgtataagtgtttcacaagagcctggagtccctgtggactggaggagacgctgctccggggaagctcagatccgtgcccggcacatagtaagtgctccataaactatctcaccgcactctggcttccacggacaaaggggtaaagccagccaggaaccagcttcctgctaggtacaaaagtcccccaactgggaagtcaggtgagaagacatacctacctcccagtgatcattgcctaaatctgtgcttctcctcacctcctttggagcctgagctcacctgggcagggggccaggtaggcaggcatcaaactcctggcctcgaccgattctcaagtcccacttaggactcaggcagcttcctcccgtcccctctgtccaccatgacttcctggaactggtttaagcaagggtggccatggcagatgtcaacaccctatgaaacccctgggggtcagtgacctgccttgccgctggctccagaaggggagctccaggccagacccagccatccagcaacttcagagcatgctaagactggacttccaaaattccaagggccccaggtcccactgccaggcctagccgggacaagaaccccaaagcagttaacggataggccttcctacttttaagccacctcgtcgccacgcccacccgagggaagtgggcaggctttgcccaagacctccccagaatcagttgggggcgccaggagctggggcaacccccacccccacccgtggcaaaaccatctgtaggggagggggctttgcggtggcggggggtgtctctgaaaaccccagaagggagggcggagattctgcccgcaggaggaaacttgcctgcaaatggcgtttccaaaagcaaactgttcaaaatttagagaaaacctggtgggcggggggcggtatttagcccacccccttcaatatcaccccttctacggggctctttcgcccctcaaaagtcccaggaagtgagaagagggtttcaaagtctgagcttcgttgcagaagttggatttttctggggggaggggtgaccagcctgggctgaagacccctccccaggccgcagagtccagcaaatcccaccccgagaaaggccctccccgacccctccggcccctggggtgccccaggactccatggacaccgccccccagctcaactgagacgcccccgccactcaccgcggtcaaccggacgtcccaggaacagctgccgcgacttcaaaaccagcttggaaaccgtccgggccgaggcgggggtggcttttactgcgtggtaggttgggggcgcactggagtgacgggcgaggggaccaatcaggttgagggattgcccgcgccaggcccgcccctctcctccctgccccgcctccactaggccccgcccctcgccaagtcatgaagtccgggaaggactccacgccctgcccctgaaggggagggagcactcttggaccacgcctgtcccagccacgggacccccgctccgcagctggggaccctgtgaagttggccctgggaggtgagtgcgatcgggggcgccgcacaggtgctgggattccccaggtcgcccatttcccctatggccaaactgaggctgcgagaaccctgggagagttgcagggtgaccctcgccagcgcgtcaggggccacgccctccaccatgggctccgactcagctatatgtacacacacacacacacacacacacacacactttttttttttttttgagacacagtctcgctctgtcgctaaggctg

SEQ ID NO: 66857 - DNA, 597 bp, Homo sapiens
ctcgaactcctgacctcatgtgatccaccagccctggcctctcaaggtgctgggttataggcatgagccaccacacccggtggggccgcagtttttagtagggaggtcagaggaggcctttctgagtgacatccaagaagagaagagagagaggccaggagggaaccatgtccagttagggggaacagcattccaggcagcaggcacagtccgtgcaaaggccctgaggcaggaccacaccctgcctgttagaacagtgaggaggccccagtggctggagtacagtgagtgagagagagggaggaggggagggctgggatggctcagagaggggaagtgactcatccaagattcaaggtcagtgggagatttgcctgttaacccttaacttcttagtggccttgagtaacaaaatagctctggtctaggggatgagccctggtgattttgccccacaccgttttttgttgttttttttttttgagacagagtcatctcccaggcttttggttcttcttgatggcaacatctgcccaggagtccccgcctggcctcccacagccctagggtgagaggtaagaaatagctactgttggc

SEQ ID NO: 66858 - DNA, 590 bp, Homo sapiens
cccagccaatttttgttatttttagtagagacagggtttcaccatcttggccaggctgatcttgaactcctgacctcatgatccacccgcctcacttggcctcccaaagtgctgggattacaggcatgagctaccacgcctggctgacatttctctttatgcctgcatctcccccattggatgggaagtccctccagggtgagaccttgtctaagtgaactttgtgcccatcaatgtctgcgtgacccaggcaggatctggctcagccaggagtgggtgtggggggtggaatcaataaaagtttgttgaatgacttaatgacctctgagaatgtatcattttgcaaaagggaaactgaagccctttgcactctaacaattattcctggcacctgatttgcacatggtctggtgcctgagagggagggacattgaatcataggaggggctaggaagtacccattctctagcctggcaggccttatttcttgtcttggctgtatcttgcattattttatgtgatagcttttgtgggcattggcctcttatttccctaagtcaagctcatccaacccctgacccacgggccac

SEQ ID NO: 66859 - DNA, 1608 bp, Homo sapiens
cgaacctccagcctgcacgttcccggccggtgctgatgctgtgctgggtctcacgtactcagccgccgcctgataaccagggcggggcccggagcttgcgggcagtgattggcacctgccccagcctgtccgcgcctcgggctggcccctcaagccaatactggctcctctctgtgcggtcgtcgggcgggccctgaggctcccttgtcaatccaaggcccagctgccgtcgggttggtcgcggcagccttggctggcgtgcgccccctccaatgagaacagagccggtcagcgggcacgtgggtgggcgccggcgtgtccccgccggtctgccaatgaagaggcgaggccggcgtttgtccccgcccaatcgcggcgcgcggtgggcgggccgtgcggtgttgatgggcccggcggaggggaggggcggagctgtcagctccggccaatgggcgctcgggcgtggatccggcagccaatggcagtcggggcggagctggcgcgcggccttataagcccccccgcgagcgcttgcggagggctcggtcgccagcaaccgagcggggcccggcccgagcggggcctgggggtgcgacgccgagggcgggggagagcgcgccgctgctcccggaccgggccgcgcacgccgcctcaggtgagcccacggggaggccgcccggccgtgtccgagcgcggaccccgccgccatggccgcccccgcgtcgcggctcggggctgcgggcgcgcccgggactcgaggcccaggcctcgggcgcggcctgctcgggccgggcctcgcgctttgtccgggccggcggggcggttggggcgttaaccgcccggcccgggggcgcccgctggttttcgggcgggggcggcggggccggacaatggcggggcgcgcccaggggcgggagcgggggccccttcccgggccgggggcgcgcgggggctgggcacagacggccccggcgccccgcacaaaagatgacagcgtgggtggccccggccgggcccttttatcacccgggacaagcctcggcctattattattattatttttgaaagaaagcaagaaaaaggaaaaagaccccagcccctgggtaacccccgcctgcgtttctggccctttgggcgccaggggggctaaggggaagccccccagctggacacccagggatgccccctaaatgcctatcattgctcctgcactgcccccacctccggtcaacctgctatgccttggtagcttccaaacttgcccccctgtacgtacccgaaacccccaccccgccataagcatatgcaatctggattttagaaaaaaatcatcttgctatgcaacggcagcctccacgagtctctccgtccctcccccttccagcctgatcgccatctcgaacgaagcccctgctctagagaaatgaattgaggagttgcttccgccgagaccccttttctgtgtcccccgtggacatccccctgggagctggggacggactcgctctgaaatctgcttgacctggggtctgccagggcccaggtctgcgctcagtggtggccatgacaatcaggcaggacgggggactctgtccacctgggcacggt

SEQ ID NO: 66860 - DNA, 1087 bp, Homo sapiens
tgccggacagaagagcaggggcccagcctgggctccgttctcatctggtggtcttgacgacgtctctggatctctgccctctgtcccatgccccacacaggcttcagagttggagagacctggattcagatccctcctctgaggcagtcacttcccctctctgggccttgctttcttctctgtaaaatgggtgtaatgggaacacctccctcccaggtggttgtgaggatcaaagcgggtaaaaggcgctgaagcttgcagggtgccaggagctctgagttcggagccggtttattacacagcaaggccctctgccctgtcagggtctccccacctctgccctatccacgttctgggctgggacattctgtggcggggctgtcctgggcaccgtagggtgagtgtgaacaatatccctgaccaccacccaccagatgctagtagcaccctgtcccctaagcggtagcaaccaaaaatgtcccctgggaagcactgtcaaccccgcagtgagaaccttggacttggccttcagccctgcagtagctcatggtgtgctgtgaccgtgatgggcctcagctccctttctttcctccccactcaccctttagcagtgagtgactcctatttgcaaactgtgtcccggacacactcctcacctggttgttcaggttctccgtgactgtccttctgcccttccagggtggcagcttccacctgagaggacaggagcccccacggggtcccctgcacgccctgcaatgaggggcagcccggcatctgtggggtcttctgggctgctctctggcctctgagctccgggtcttcctgggctgctctttggcctctgagctttggcaggtccttgcccaggcttgcttggctgcccccaggggtggcacttccacaccctcccagtcaccatagccctgacctgtcgatttgccagacagttttctttaagtccatttaaaaatgactcacctctttgatcttggcctcttcctgaacagtaatgtccccagagttgtggaacgttaatgtgctagttgcacatacttttatttatttattttgagacagaatctca

SEQ ID NO: 66861 - DNA, 984 bp, Homo sapiens
acattggtggaagggtatcttcatggtagattttcgtgagtgggattgctgggtcagaagtgcagacatattttgttagcttttatgctaaacacccatgtaagtcctgttccgccagctgtgtcgtctgggagggcctggttcccctgcctcgccagcagggtgtgctgtttcatgtctaaatacttgccaatcccagtgctgagaaatgggggctcagtggagttctaatgattgttcctgtagttatgagtggtgatgaacatcttgttgtgattaaagctgtttttgtatcttttctgtgagctgtatcttcatacttttcacttgcttttttctattggatatttgactctttcctcctaacttgaaactccaatatgtgaacctctgtggtatgtattgcaaatatttcctttgtgttttttttttctttttttttctttttgagactgaatcttgttctgttgcccaggctggagtgcagtggcacaatctcagctcattgcaacctccgcctcccaggttcaagcaattctcctgcctcagcctcctgagtagctgggattacaggcgtgtgccaccatgtccagctaatttttatatttttagtagagatagggtttcgccatgttggtcaggctggtctcaaaatcctgacctcaggtgattcaccggccttggcctcccaaaatgccgggattataggcttgagtcacctcacccagtgcaaatattttccctcggtctctggattgccttttggctttgttattggtgtttggttttcttttgccctgcagagtgtttttttttctttctcctttcctttcctttctctctcctttctctctcctttctctctactttctctcccctttctctctcctttcctttcctttcctttccttctttctttcctttcttctttctttcttttcactttctttttctttattctctttctttcaagacgaggtctta

SEQ ID NO: 66862 - DNA, 1308 bp, Homo sapiens
caggtgtgagcccaaccctttcccagttttaaaactggaagtcccatatcctggaacctgctcagatccagtgaactgtgatgctgagtcccctgagagagagagaatgtgtgtgtgtgtgtgtgtgtgtgtgtgcgcgcgcatgcacatgcgtacacatgtacatgtgtttgttagagaaacaagggtctccagtcacatagtctgtctgggagggagtctggccccctgggactctgcccagaagacgagacctgggagtctgctgggtaactgagaactggactttacccacttagctgcgagaactcgggccaggagctgagctgccagcagggcattgcagccgtgtggcctagagcgtggcgtgtggcgctggtgccgtgcttgggtaagtggtccaggctgcggccaggagggccggcacatgggagctatgaatggcagctgtgttttccctggcctggtcccctccccagccctcatcatcgagccctctgcctcgctcttgtcactaccactctgtcggcctgacgccatcagcccaggcctgcttatcaagactggggagtgaactgagcaccagaagctggctttggcgttcaaaaaattaactcgtgatgctgcaaagacctttgagcctcacactggggcgtccacagcgaggctgggattgcatctctgcgcctggcgtgtggggcacaggtgccagaatcacagcttctccggctggcctgatcagcctcctgccaacctcactcacgttaagcaattgcggcccgattgtgcccccaggacaggcagggctctcagctgtgtctcgtgatggtgtccccaaggactgggagaacacctctcggccagggtgaccgggaaacccggggcacatcggggcactcaccggggctcccaccgtacctgtcagtgggatctgtcccagcaggctggctcctggctcttgctgggagctggcagggacagacacagacacacttggtgtttgttcggggactgcagagcaattttcatatcgccttttgctgtgtgaaaatcgcactccaagctctcctccagagccgtgccactgagctggggacttccggtgtttggatggtcgattgccctgtgtgtgtctggacagcaggcaccgttgcccatggatttgggaaactggcttcttggtgagcagagatggtggccgtgatgggggccgggtgggcaccccgcagcaggcgagtgtcaggcggtgggcccgtgatgggggctgggagggcgccccgcagcaggcgagtgtcgggtggtggccgt

SEQ ID NO: 66863 - DNA, 817 bp, Homo sapiens
tggagcgtattggaactgatgtcagtgagaaaatggacaccctcacaccccccaaaaattagaaacagaagacctcactcctcaggccgtgcctcttctcttccccagaccctgggcaggtctcagcaaacccgggagaaccagagcctgactccaggtcccaaagttgtcatttcagggacctgaattgctgttttctcccatgtatgagtgtctgggctcattaagataactggggccatcccagccggaatgtgcaaagtccatgggctccgggagtttggagctgggtcaggtggtgaggccgggagagtcgcaccccctgggctccgtccgggcagcaggatccaggtccccatgaggctgaggtgcaaatggccccgctccctgagctgcccctgagttctgggggcagcgtgcccacagtacatggctggcttgggctgatggtgcagagggcacaggacccagagcggggcagagcaggaggccaggactctccatgcctggagccggactgcttcccggcaggggcagtcagaggcccggaagccggtagtggggcgcgcgcagctgccacgctcagtacaaactgggactgctgcccatgtctgcaacagacacacctgcgattgctcccagagtgtgctgaagctggtctgtgggacgtggtgttcaccccgatgctgttacactgcgagttacactagaaaagttacttcatgacttaagtcaggcttcagcaagctttttcttttgagacagggtctcagtctgtcgcccgggctggagtgctgtggcatgatcacagctcact

SEQ ID NO: 66864 - DNA, 829 bp, Homo sapiens
tgctgtgtcttccttcatttatacagatggggaaactgaggcatacaagctgaagtggctcagctaaggttatagtggataagtgatcaagcggggatttgaacacaggtctgttggactccccataaggtgctctcactgctgtgtcatgccttcttgcccagcccttggtgcttaaggctgggagtgcctgagtctagctctttctctccctagcctaggatccctccagagggctgggctctgcactgagccttagcagaatcccagcatccttggacccggggaggtgcgccagtcagcaaagtgcccaaagcaagctccagaatccaccttgccccctcctccagggcccatccgggaaggcagccagttaagcgcaaatcaattaaacaaactccatgctgcctgccgccctcatattctgacctcagccaagaggctcgcattccagcctggcggacttgggtccaagcaaatgcacttgtgggaggatctgagaaggggctgcaggatcaggaatccatacaaagaactccagcctggccccctgggagcctgtgatacttagtttgtataatctgatcccccttggggaacatggtggggaggtactgtgtgagcaaacgcggggaggggggaacctgtggaaacaagagcctgttctgcagaagatgagctgctcagtgtgacggagagtgcaagggaacagtgagaaagaagcctataatttgctcattgtatgtgtcaatcaagcgatagaggttgctgtttcttcgttgcatgctatctgagagatttgacacctgaaaaggaagtatcaaaatgc

SEQ ID NO: 66865 - DNA, 608 bp, Homo sapiens
tgtaagggcctgaagacagagcagagacactaagaaaagggggcttctggatccagccattcctgaagtccatatacccctggacttttcactttacaacctgacatttatgtatatggtgtctgcatggtaattaatagtggtcttgtcaaatatttcttgatctttaccttctgaaacatagaagactagattattcttcagcaaatttcattcaacctcttcccaaagtttacgggagaaatgcccttccctgacccactgaggccatcccagctacgtgacttgctttggtcaaggcaatgtgagggaatgtgacagtgtgccaattctgcacttaggtcttcagagtcactgcatgtttctacatgacctctcctgctccaacctttagccctgggtcaaaaatgccttgaaaagccactaagccaaggaagataaaaaaacacatggacccggcctgacccaattcacagggtagaactgagcccagctgatctgcagatgtgagaaggagaaataaatgctggtcaggcacagtggctcacacttgcagtcctagcactttgaggggccaaggtgagaggactgcttgaggccaggagttt

SEQ ID NO: 66866 - DNA, 2722 bp, Homo sapiens
agattcaacaggtccctcagtgcctgccacctgccgggtccaggactgggtacccacaagctccctccctatgctcaagttgtttgttccagttgcggaaacagacaattcccaaccccttaatattttgcatttagcccctgctttcagcgaggtgcgacacaaacgcaggatgagctggcaaggaggtggggcagcgcattaggaagggcgctcaggaaggtgatgtctcaggcagacccaaaatgacaacaaggggccggccacgagaagatctgggggacccgggtggacagcttcgtaaaggccaaagccctggggcaagaacaagcaccgccccctttcctgtaaatgctctggagtccgccagacacccattctccggaggaggaaactgaggcacagagagaaaggcacctgcccaaggtcacagagccaaggctcgatcgggagccccaggaggggtcccggggccaccctggtagcggagaagaccgcacgctgagcgcgcttgaggagaaaaggtggaaagaggataggaagggaggcacagagaggagcggtgacgggccaaggtcacacagccggccccctgggtgcccgacacctcgaaccggggtcggccaagacgcggggcgaacccagggcgccccgggtccgggagccgcggtgacaggtgcaggcgggggcgtgcccgggcctcctgcgccacccccgagccccgcgccgcctcaccttcttgagccgctccatcaggacgctcttgttgccgcccgtgtccaggttccgcttcttcagctccgcccgcagatcgatcacccgcagctcgctgagccgcctcgtcccagtctccgcaacgcccgggccgagagaagccgtgccagggcccgagtcgcccgacccgggcagagtctccgccatcgtcgcgttcccgtcttcgccaccgactcagtcgcacaccgccggcagctatagcggctctgaacacaaaatggcgccgcctaagaggaaaacgcactcgtttcctcccgccccgctttgcggccgcgcacgcgcacgcgcaccgcccccactagcgtacttagcagcaaggacgctcgcgcgtccaccaaccgcgggttccccggcacaacgcgcaagcgctgaatctgcagctcgcatgcgtcccggcagttcccggcgggaggctgacgagacgcaacgcgtctgcgcacatccccgcgttgttctcactgcgcatgtgcagttgcaaccgggatactagaacctacgcttggtgcgcctgcgcagaagcgaggcgcgctggggcgactggagcggttccctcgcaggcggcgccattttgtgctaggagcctgataaaaccggcccggttctgtggaaagtgggcggcggagccagggtccctggaatggcggagactctgtcaggcctaggtgattctggagcggcgggcgcggcggctctgagctccgcctcgtcagagaccgggacgcggcgcctcagcgacctgcgagtgatcgatctgcgggcggagctgaggaaacggaatgtggactcgagcggcaacaagagcgttttgatggagcggctgaagaaggtggatttggggccccgagggcgggcacagggtgggtctggggtcctcttggccgcgacggtggctcgcgggccctggcgtccgcccccggccgcgttcgcggcctcgccggacctggcgctctcgcgtcccccggctcctccgaggccccggagagagttccttggccggctgggcctgggttcaaatcctaacgccgcaatggggccaggagaaccacaaaaacggcacgcgtgcaggagaaacggtgacgggtgacatcgtccactgagaggagggttctcccctcgtctcgtcccctcctccgtacctggaggggagaccctgaaaccctcacttcccaggcgaggggaagggactcggccaaggtcacacggccgaggacgggcagcgtcgggatttgaacccaggccctgggattcctgattcggctgcttggtttccccagggaagatgctttgtgacccacaggggaccgaccagcctgaatcggggctgatttacaaaggaaacacccgtaggacatactcaaagggaaaaatagaaaaaaacccaccacaatccagttttcacggtttgccggtactcgctcggtgaagtaacgtggcaggaaggaaaagtggtgttgacggtagtgatcagaaatgtgaaatgaggggagaccccgggtggactttaaaaccagcctcagaactgcccgggaggcgggcagagcctgggctcccccagctccgtcagtctctctggacttggggaccctgccagctctcggtggcctgatcttgggcataggagaccttgaaccccttctgagtcctcttttctattctttttttttttttttctcctgtaagaagcaaaaaagcaataggactttgatttggggattaaataagtttgcgtggagcaggcttggcgtgctgcctggcgcatgtaaacactcggtgtgtggttgccatcacgattcgcttttcctctctgtgccaccacgagtcctcatttgcagatcgggggctctaacgcctcccttgggggattcaaagggatccctaggaaaagcagagaggcaagtaaaggttagccacctgcggtttccttattcctgtagctttttttctctgc

SEQ ID NO: 66867 - DNA, 1760 bp, Homo sapiens
gatgggcagaaagaactggtgaaaaggctcagcagcccatccccagaggcggagggaggaggacaggccggagaatcaggtcagcatcaatatggaggacaacatcgtgcagggctggagggacctcccagagctgaccacccgccaaaccctggcctcgttcccggcccgtagtacctggggtatctgcaggcctgtctgctgacacacgtactggctgaactggtacatggcgggggggaccacctccccagccttctgtagggctgcctggctcttgtcgctgggccccagcagctcctggtcgtacaccaggtagacggcgcccccagccacacttcccttgatgaggaacctgcgggcagggacgggaggagcagaagctcagcggacactgacagccaccctcaggggccaaggcccacggggagagtgagaccctcctgagggctcaccgtccacagggtgacactctgtagtgcagcaccgtcgacccagacccctattatatacagcactcgttttacaacgtgcaaggcagggcggctggacgccacttgaactgatgaactgaaacccagagggggagagtgggtcactcaaagtcccacagtgagcaggggcagtgaagacgtaagatcttgaccttctagaagccttccagccctggagaaaccaagtgtccctgggcgcctcctgcccgctgtcactcgcagctccgagcacgcattcacttctcatccacgccagcggcaggattcaccggcattcccacctcacagagaagacaactgaggctcggaggcggaggctgacaccgcgaactgaacgccaagggctcgctgggaagcaggagggaggggattggcgacctcgggaagccccgcccctctgaagcctcagtttccctatctggcccataggcggggaacgaaggggaagtgactctaagggaagcgaagagcagatcgggaccagactggagacagggatgcccacaaaaatggactttttcggggactcgggtcccctccggcgcccccacgcacctcatcagcgaccacacccgggccaccatggtcgctcggatccacgcgcaaggacactcggctcgcccgccgcttcctgtcgcggcgccgcagaggcctctggaaggtgtagtctttcttgcccgacgcaaggtcctctgggagtcgtggtgtcttgcggctctgagactccagagaagggctgcggtctcgcagcggagggccgctgggaaatggacgctttaaggcccgggccgccgcaaggctgtctgggaaatgtagtcagcacggcgctgtttgcacctggccgcggagcctcctgggaaatgtagttcggcccggccctggcaccgtgaggggaaagaggcgtcaggtgcctggctgaagcctgaaggtgacccgaaaacaagtcagagcccgagagatccacccgcgcccgcgcgggggaccaagggcccggatttaagaagagtgtgcctacaaggcggttgtcacggcaacgagagggcgggattgttcgagcgctgcggccccctcacgtgatcgattcggaggcggggcgtccgcccagtgggcggggccgggcccctgctgggaggcgaagaccaggcgggcactgttgcccggcgacgctccggcgctgggtccccgaggcccggcccctccccgggaggaggtgggcttcgagtcacgtgacccgtgccctacgggagggggtgcggtcggggaccc

SEQ ID NO: 66868 - DNA, 1522 bp, Homo sapiens
catgcctcgacctcccaaagtgctgagattacaggcgtgagccaccgcgcccggcctaatgggcgttttaacagttcatacagtttggtattattattcccgctctacaagtgaagaaattctgagaggtgatgtcgtcgatgcagggtcggcccgaaataggcggagttgggattcgaactcatttcacaggcagagggaggagagcagccatagccacctccactggttccgactccagctcccgggctcgcaggagtaaacgcgcatgctcagggagctcggtcgcgcatgctcagcgcaacggcggggaagactccagccgccagggggagcgcgtgccgttcttgcctctctggcctgcgcctcctgagccgagtagatatcccggagttccgcgcggcgccagcccttccgccacggccgtctctggagagcagcaggtaagtggtttcccgcactgccggtatccgccgccatccggactcccgggtcctctgtgcaggttggaggatggttggttgtggcgagcgaggctgaaggagccgggacgcggggctctgggcctcgggaactgagccggtactcacctccgccccttctccccgtcgctgtccgcagccatggccctacgctaccctatggccgtgggcctcaacaagggccacaaagtgaccaagaacgtgagcaagcccaggcacagccgacgccgcggggtgagtgcgggtgccgcgcggaggttgtcgggggtttcttggagggcggagggcatggcttgggcaaaggctctcgacctgaaagaacgcgcgttcgggcgcagaactaaggggggcttgaatggaagagatggggtgggggagtgggacttcctgcctggtgctcgaaggcgggcacccatctgggtttttcccaaccgtgcaatccacgctggggcagagggagcaccttgagagcggcgcggggcagcgggtttggggttctgacgcaggagtaggagttcgctcatggagctggcccgaggttgcggtgtgtgaggttgagggatttcaggtgtgtcagtgtattgggcgcctttattaagcgggcagcgggtttggggttctgacgcaggagtaaggagttcgctcatggagctggcccgaggttgcggtgtgtgaggttgagggatttcaggtgtgtcagtgtattgggcgcctttattcagcaggcagcccagactccaggtgcgtcctgccagtgttgcggagactgggacttagggaggatgggagctgctccgggcgcggcgaaaagcgctaggcgttaataccttggttctcacagctacccacagaggggaggaagtagccagggaaatcgcggcagcgcgagagaagctgcttaactagaatgcagggatccccctaccctgacggccgcccctttcccccctagcgtctgaccaaacacaccaagttcgtgcgggacatgattcgggaggtgtgtggctttgccccgtacgagcggcgcgccatggagttac

SEQ ID NO: 66869 - DNA, 3868 bp, Homo sapiens
ttctagagcaagttggccagacaagtcaagtacaaactgaagagtaaatcaagctttgctaacaatttcagaaacatttattgggtcccaaagaagttgcctcccaatttcccctctgccaacagctgatagctgcatccttggcatctgcctcctggccttggcaggatccatttttatgatttacaatgcatcatcaaccagaaatacaatgagaaccacctgccagtctcccaaatactatctgcagccactcatttaactctcctggctagctccacgtgggccgtctgaactctcttagaagaatcatctctctgctcaggcaccgggagcaaggggcatctgtcgctctgcagaacggaggggaccaggcctgatgaacaccatcctgggcccagaaacctgggagggtaaagagaactgccaggggtgaagtcaaggatgggaaaaaggcctccggggcagagtcctgaaatgtcagaagtacaccaaagaggaaacagcatcacgttattgctgaggcagggcctcattctgttgcccaggctgcagtgcagtggtgacaccatggctcactgcagccttgatctcccagtttcaagtgatcctcctgcctcagccttccaagtagctgggaagacaggtgcatgccactgtgcccggcttttctttctttctttttttttttttttttgtagagacagggtctatgttgaccatactggtttcaaattatgctcctgcctcagcctcccaaagtgctgggattaaacatgtgagacaccgtgcccagcccacatggcctcatttaaatcccacaacaactctaataagacactaatatgtccaggtcacagatgagaagagggaagccaaaggaataacttgctgaaggttatggagctaggataggaccccacaaggtcttgctctgggggcctgcatcagtaaccagtactcaacatcaaggaaaggccttggggccgggcgcagtgactcgcacctgcaatcccagcactttgggaggctgaggcgggtgaatcacttgaggtcaggagttcgagacgagcgtgggcaacatggtgaaaccctgtctcttctaaaaatagaaaaattagccagccacggtggcgggcgcctgtaatcccagctactcagggggctgaggcaggagaatcacttgaacccgggaggcagaggttgcagtgagctgaaatcgcgccactgcactttagcctagatgacagagtgcaacttggtctcaaaaaaaaaaaaaaaaaaatcttggagcagcgttggagaagctccctctgtcccctctctactggctgctgcccctctgaaatggcctttcccttcccaacagatccttgagatttgtttagaagagtctggagagtgagcgcagaggctgactcactgcgtgaccttgctctgccagttaggagataaccttcccatagatgccactttccacatcagtagtttttttttttaagggaaggggagctgggggagaaggcttttggggccttcctactgtaaaagctcaagttccttacactcactgctttctctctattacatcatcctgctccctccccacccccaaggctcttagtctgaaatgatctaatttctaccaccggaatgacttgttctctacagtattctcagaacttgctacgtggtaggaggtcaagaacacactgaataacccacctcttcccaccctcctaagcctcctgtcccatccatgctctactatttctcgtaattattgccttctaatacaatatcgttactaaacatctttattgcctgtctcatcctgccaaaatgtaagctccaaggcagatttattttttaagagacagggtctcgccatgttgaccaggctggactccaggtttccaacaatccttccacctcagccgccagagtagctgggagtacagcgcgcgccaccatgcccagcttcaaaggcagaaatttttgtctgttttgttcactgccatatccccagaacctagaacactctctggcaaataataagcaatcaagaagtatttgtctaagaaaggaatgaattctgatcccagtgaggctcgtaaccagacggcagagcgcctggggcgaggaggtattacaaaactcgtgccaagtaaggagaaaactaacagcgccgtaacactactcaggtccctcccggccccggatttctatgaccggcgttctaaagtggataatcctaggctcatcgggttcaactcctctcatctaacggatcctaagaaatccgaaagggagaggactttggctcaaggttcccaagctagtggtgagcagacaaggattcgaactgcacccttcgagaaacttcatgtctgaaaaagttgcgaaacacaagggcgctcaagtgatcccacggttcagcccgctgcttgcacaggtgggaaacctgaggccgaggcggggactcccattacctcgataatcttgataaagcgcgggaacaccgggttgcgggtgatggcgatgagcggcaggtgcggaaacacatcggggatcgtcatgggcgtgagcgccgttatgaccgggccttccccggcgcccgcgctgccccccgcgccgccggctccttcctccgcgccgccctcggaggcgtcctcgccccccgagaatgcgcctccgccgcggctgctcgcttcccaaaacccccgccattggcccccaattgccgggcctcggccccacagtgcccaaggaggagaggcgtcgcaggtccgctggcctcggagcaaccacgctcctgctgcagtgggaacccgccccccggcggcggccagcatcggccgccgcagcacccagcaccgcgccgctccccacagtcgcacgtagccagtgctcgccgccatagcccggccatactggcggctcacacaactcgcgtcatttccgctcgccgcgaaacgcacgtgacgcccggcgcgtgcctcggtacccgatgggcgcgtggctcgaaacagccgcttcagggagctgggcctacgcggagaagagggggcggagttcgagcatcggatcgtctccgcctcttccggtctcccactttatgcgctgaaggccttttccggtcacgtggaaggctgtgagcaggcgccagcgcccgtacaaaacactggtagtgttgcaaacgcaacgtttaggaactcatgagcagcctgtgcacatgcttaggcgcgcggacaacatgcgcatgctcagactctagactggccacgggtggccgggtgcgcatactcaggctctgagcgcactttggggtgcgcggattcgggcttcccgggattcgtctgcgcatgctcaagattcaggcggagcgccgggctgcagtgcgcggaggcccgctcccgggactcattgatgcgcatgcgcagggcttcagcctgcacgtactcggattgtgcagcgactccccgtggcggttgaggggcagtggtggcggcggaagcccaagtcgatgctgatgttgatgctggtggcggctgtgaccatgtggctccgaccgctggtcacagctcagctctgtcggtggggctgccaggactcctggggctggggtgctgccgggggtcgggagggtgctggttcatcttggagccgaggcctgctccccaacctcactgaggctccccttttactctttttaggaatcgaacttgacgcctcgctcaccctactccaccccatcctcccagcccgatattaagctctcctacctctttttttttttttttttgagacggagtctcgctctgtcgcccaggctgcagtgcagtggcgcgatctcggctcactgcaa

SEQ ID NO: 66870 - DNA, 592 bp, Homo sapiens
tgcagtggtgcaatctcagctcactgaagactcaagcctcaagtgatcctcccacttcagcctcccaattagctgggactacaggtgtgtgccaccatgcccagctaatttttgtatctttttttttttttttttgtagaggcagggcttcagtatgttacacaggctggctttgaactcctgggctgaagcgatcctcccatggattataggtataagtcaccacgctcagcctcagtgtgtatttctatcatacgagtgatgtcctgtccctacaaagagattgcatcagtccacgtgtatcttcccgggacacaatgttttgtatcaggaatgcagtgcatgcagcaaagccaccagcagatggtgtcctggctctttttttgcatttgctttttttttttttttttgagacggagcctcactgtgtcccccaggctggagtgcagtggcgcaatctcagctcactgcaacctccacctcccgagttcaagcaattctcccgcctcagcctcctgagtagctggacttacaagcacctgccaccacgcccggttaatttttgtatttttagtagagacggggtttcacc

SEQ ID NO: 66871 - DNA, 1102 bp, Homo sapiens
tacttaagaaccagccagctcccagcctgggagcccctcacggcctcaaaaaagacctattttgtccctgggtcctcactgtccaaagtgttgcgcgaaactattatcaggttcagtcaagaacgtccctgcgcacgttaggctgcgaaaaactacaattcccagcatgccttgaagcggagtctaagccaccacatttcccagcacgcctttcggcccttcaaacaccgcaggccccagcacgccccgcggcactcgcttcaaccccaagacccgccagtaacggccgctggcagagcacatgcgccgtacgtccatatgcagggactacaatccccagtatgcagcgcgggcctggcctcaaatcccacctgccctagcatgcacgtggtgtccttcgcgcatgtgacaggccccaacgtgcacgatctcaggtacctccgctgaccaccctgcaggcggaagaacggcccggaatgaagagccggtggcttctcgccctcagccgctgcctaatctcccggcatgcacagctcggaccgcgctatgggtgccggaaaaggcccttcagcttccctcctgccccggcgactcactgacgcttaatgggcgccactcctcgttccaaagctccggctcccgagtcgccaccaccaccattctctagaggagcctccgccgttccctccgccatcggcgcccctcacatccgctctggagtgtggcgggaagaccttccgggtcacgcgtgtcttccctgattgtgctggggaagtgcgcatgctcatgtcgttccaatgacgccattgctcgctcgtgacgccacgggggcggtgcctgcacatgggtggagcctcaggtcctatataaactagagcctggccaattgcgaactggactgcaatcagcttctggactgaggaaatttaactgttagggtgttttggaggtttttgtctttgttgttctgttgaaacggtttcgttctgtcgcccaggctggagtgcagcggtacgatcacgactcaccgcagcctcgtcctgggctcaagctatcctcccacctcagcctcccaagtagctgcgtctacagacatgcacca

SEQ ID NO: 66872 - DNA, 1017 bp, Homo sapiens
ggaaacagaccccataagctcagtcaccaacacactggaggctggggtggtgcccagtgtgctgggatggccagtgctccagccaggggacacagtgggcatccagccacctccacccccacagggctggtccccgggggtcctgaggtgcagcccaagcccccagaacctggcccaactcctggcgctaagatggaaacttctccagcagccaagtctgagtcttggccagcggcccccggcctcccagaacctctgccctggagtctccacccaagaacagatcactccctttgggagcagtggcctcctggggagggcagggggccagcctccgggaggacaggggtggagcgtggtacagtcatccagccccactttgcagctttttccttacttgtgaccttaggttagtggcttgacctctctgatccctgagtttcacaaccaccacgtgggcagagagcaggtggaggtggggtgagtgttgcagggagtggaggcagtgaacgagcagaactaatttccaggcaaacaccagaaagggcaggcaggctttgggatatggttttcagccaccgctgcacggttccacccctgcctcggccttgaccctgatgccagcaggcttgaatcagtcaaagaggtcagctgcctgggccagacacggtggctcatgcctgtaatccgagcactttgggaggctgaggtgggaggattgcttcagcccaggatttggagaccagcctgggcaacacagcaagaccccatctctctaaaaaattaagaaattaactgggtgcggtggtgcacatctgtagtcccagctacacggaggctgaggtaggaggatcgcttcagcccaggaggtcaaggctgcagtgagctatgatggcgccactgcacgtcggcctgggtgacaaagtgagaccctgtatccagaaagaaagaaagaaaacaaaaggtcaggtgccttcctgctcctctctgagcctcagtttccccatatctgtgctc

SEQ ID NO: 66873 - DNA, 887 bp, Homo sapiens
aggcggggcaggtgggggggcagcagggtacgacggggacgacctgccccatggacggggcatggagggtgctgaggactccgagtagaccaggggattccctcctgcagcagaaccagcgggtgtatgagggtggggtcagagggacgacaggtcagcgcgtggggaggggcgggggcgtgaagccagatcctaagcggctctccaagcccgaatccagccgcggtgtccctgtccgacggggcgggcgcactcctgtctcctaaaacctccaagtgtgcatctgaggaacgcacggtgccctccccagaatccccttagcctctaggagggcgagacccagacagccctttagccatgtggtctccaaggggccgttggggggcttccggatcctgcagagcccgggcggggggctgccgtcgcggtccagctgcgcacagaagtaaacatctgtcagtggcgcgttccctgctcgccgccgccgccgccggggacacggtgtcctccggtgagggccgggccctctcggctcctggagcagcccgttcagccaccagagggcgtgaaaccctttggtgttgggggtgggggtcccttaagggcaaagcctggatgtgaagtggcgggaggctgtgcctgcctttcctgctttttataaaaggtgtctcctgcacggggatagccccgaattgtcccaggaggtggtttgtggattaggagttattaggcccaagggggctgcagacagattagtggggaggggggtgtgctggagagagaaatggctctcccagggtgaatgccaccactgtcccctccccagaacgcatccgacctgcccacaggcctgtgattacctgcagggctcgtcattggtccagatt

SEQ ID NO: 66874 - DNA, 558 bp, Homo sapiens
agccaggtgcaccagcccggggggcaggtggggactaaagatttcctctcccaaccacaagcgtgactgccacctgctctggggctgggagtcccctgcctgcaggtccgccagcagcgctgcctgtcattccagcgtctgcagttctctcccggggcttccgagtttgggggtggagccaccgcttgggtaataaatttaggctgccaggccctgggaatcggtgacttgggcacctcctggcgagtgtgggagaaagcggctggacctgggccaaacttgggtgaacgatgaaggcaggaagaatgacctttaagcccgcctctgtcgctctctctcggccacctgctaatgatgtgaccttgggatggtccgttttgtcacctgtcacatgggggtggccttgacagtagctgctgccactccatggagtggggtccccacacaggcttcggatgcagtaggctgcggtacctgctgctcctctgcattctgagaaacccaaacaccccgattcatttcttggatagggaaactgaggctccactgcacagcggg

SEQ ID NO: 66875 - DNA, 1733 bp, Homo sapiens
ggaggtgcgcgtgagcgagctgggcctgggctacgcgtccgacgagacggtgctgttccgctactgcgcaggcgcctgcgaggctgccgcgcgcgtctacgacctcgggctgcgacgactgcgccagcggcggcgcctgcggcgggagcgggtgcgcgcgcagccctgctgccgcccgacggcctacgaggacgaggtgtccttcctggacgcgcacagccgctaccacacggtgcacgagctgtcggcgcgcgagtgcgcctgcgtgtgaccctacctcactcggccggcgcggcggccactccccccgcctcgacggcaccactggccggccccgcgaaagactgcgcgtgcgtagagcacgccggcgcggccccgggactctcgcgataactgtactgagataaagtgtggcaactcgagctggctggtgattcatcctcggcgaggggctcgcgtgtgggccacgtcgccgtctccaccgggaaagcggggaccagtggggggggcccagctgcagggtagtgggaggatgctgtttgctttgggggaagggtagatgcaaagtgggtccagtttatggcggacaaaaaggaaaatggggtgaatggggctatgttggcagggaccgtccttcctgcctccctacgggtccctctgcccgtcccgagcgtgttccggtccgcacctcttcgctgtgtgggcttctggggaggggaaagggaagctacgctcggatgaagagaccgaggtctaggtggaccccgtttccccagcttgttcccttccgcacctctccgcggtgcgggcttctgggatgaagacactgaagtctaggtgggcccagtttccccagattgtcgctgactgcacctctcgcttctgggatgaagagactgaggtctaggtggacccagtttccccagcttgttcctgactgcacctctctgctgtgtggacttctggagagggggaaagggggagacactgtgggtgaggagcctgagatccaggtggaatcagttccccagcgtctccctgtccgcactgatcccgctatgtgggtttctaggaagggggagccactctgggggtgaggagagtgaggtccaggtggacctgggcctcccttatccgacggcctcctcgggccggtcttcgcccaccagggtgagctgaaagccactatctccttccaccagctactaaaaatacccgcacgctgcccacctcccggcggggagaggcctggggcgggcgccagccccatccagcccgaagccggcgcctgctggtgtagagctgggtccccagagacctgggtcctcggcccataaaagccctggccgggcctccacgggggggatttacgacgagcccctgcggagtatggaaaaagcccggctcggtgtttagatttccccacggtgtcaccttgatgcttggcaggcctcgggtgttgggttgccagagcgcgggaggggtcggcgggtcccacggtcggtctgaggggcggggaaggggcgggcactgcgagcccagagcaggcaccggcgaggcgagactcctcccctcctgcccctcagactgggggttcccaaggctacaacccttctccttagctgggccccctcccctccttcccacacgtctgcccttaggaccaccctctaaccacagtgtcccttcccaggctcagcccgcatccccccaccccccgcaaagctggaggg

SEQ ID NO: 66876 - DNA, 884 bp, Homo sapiens
ataaaataaataaactgagttggtctaaaccttatggtgcatagcggagctccaggcatggtgacctaggtgtgatgagaagggattgagagcacaagcgcataccaaagttctggaaaaagactcaagagacagccctcgagggacactcagagcccggactgggagggaggttgaattttaaccaagtattcctttgtgctgtcgggctcttgggctgccagtgaaaggttaatgtttagagatacatttaatattaatatattatcatgtggcccctgggtttatggcgacctcttcctaggagacagtgaagtctttgccggtgaccttcaggaggggagattgggggaaacggggaacgggagtccaggagagagatctcacccaaggtactttccctggaaaatgatcgatccacgccacaaagatcaggatgcaaaaaaacaaagccagaaagcaaaccgcattctaagccctcttttaccaccgggagtggcagaggcagagaaaatccggggccaggaaggatgaaggggtgtaggctgctgatggggtcggggggcacgggattctaccgcagagctctgcaagagagacagacagacacccacttcctcctggtttggcaaatcagccagacctcccatatcctcagcccacctcggtgcatccagaaagacccctgcctgcgactaggggctgctggccaaatgccaggccactgcacagcctgcagaccctcccccagggatcttgtgccagcccacccgcactctgaattacagcagacaggactgaggctgaggggaggaggctcggagccaggaggcctttccctggacccatgcgatccgggttgggggtgaaagtgggacaagagg

SEQ ID NO: 66877 - DNA, 705 bp, Homo sapiens
ctctactaaagatataaaaaaaagagccggcatggtggcacatgcctgtaatcccagctacttgggaggctgaggcaggagaattgcttgaacccgggaggcagagcttatagtgaaccaagattgcgccactgcactccagcctgggcaacagggcaagactctgtctcaaaaaaaagaaaaggagcgaggctcccacacaggccacagcgtggatgaaggctgaggacatcacattcaatgacagaagccagacacaaaatgccacacagtgtgtgatcccatttctgggaaatgtccaggacgagccgatccacagagacaggaagtagaacagaggtgactggaggctggagaggggagaatgtttgtttaacgggtccagagtttctgtttggggtgatgaaagttttggaaagatgctggagtgatggttgcacaacactgcacgcgatgccactgaattgtatgcttaaaaatgcctaaatgcgccaggtgcggtggctcacgcctgtcatcccagcactttgggaggctgaggcgggaggatcacctgaggtcaggagttcgagacaagcctggccaacatggtgaaaccccgtctctactaaaaatataaaaattagctgggcatggtggtgcacacctgtaatcccagctactcaagaggctgaggcagaagactcacttcaacccaggaggcag

SEQ ID NO: 66878 - DNA, 564 bp, Homo sapiens
cacgttagccaggctggtctcgaactcctgacctaaagtgatccacccgccttggcctcccaaagtgctgggattacaggcataagccaccacgcccagccgatgaagctgttttaaaatgatgtagggttgccagctttctctgttgggccaagttggtcttaaccttgcagcaggtgacctgggtgtgatgaagtgatccagacacccagtcccaagctcatgccaaggttctggaaagagattcaaaacacaagccctcagggcacagtccgagcccagagtgggagggaggttgaactttgaccaattactgctttgtaccattggactctagagcctcaggcacaggttaatttttatttttaagacggagtctcgctctgttgcccaggctggagtgcagtggcactatcttggctcactgcaagctccgcctcctgggttcacgccattctcctgcctcagcctcccgagtagctgggactacagggcccggctaattttttgtattttagtagagacgggatttcaccgtgttagccaggatgctcttgatctcct

SEQ ID NO: 66879 - DNA, 1138 bp, Homo sapiens
cctctctctactaaaaatacaaaattagccgggcgtggtggtgcacgcctgtaatcccagctactcaggagactgaggcaggagaatcacttgaacccgggaggtggaggttgtggtgagccgagattgtgccattgcactccagcctgggcaacaagagtgaaattccgtctcaaaaaaaaaaaagatcttgtttatttcttggtttgtcagtgtcttccccagattgggcggctcatggggcagggcttgggtccccagtatgacctggcacccagtaggcactcagtaaacaggtgctgaataaatgtccttgtctgtgatggaagcttgaactcccacttggagaattataaacgaagactgaagatctttggactctggggcaggagtgaccctccccctgccccttccccaccccccaccgaccaccccagagattacagcctgcctcaggggaatctgcaggtgaggtagtcctcacccccagtgacacagggcaggacctcgcagggctggagatggaggaggccgggtggcaggcacaggcaggcaaagaatgctgccgcagacgagaatgaataaacaggctccttggatgtcagaggctgggggtggggggacactttgaacctcacgcctggctggggatgtttggacaaggcaggcggccagcgggtgtcatcagggctaaaattaacctccacttcccgctcagcccctccccctgggccaggagggaggctggggccccggccatcacttaagtgagcgctgtatgccggacaaagctccttgaagaaatcaatgcacgtggtcctctcaacaaccccgacagctgctatcagtaatggcattgtgatttatccccattttgcaggtgaggaaaccaaggcaccgagaaaaagggaggctgatagccacaaaactcaaaagcagcagagtcaggactcgaacctgggattcagggagtgtgttctcacctggaggtctccctgaaagccaggggagatgaaagagaccctgagcgatgagtccttggcggaggcgggcatgcggcccctcattcactctcccctagggacctctccagaggtttccagagttacagtaactttgggtctttttgtgcaaattc

SEQ ID NO: 66880 - DNA, 2404 bp, Homo sapiens
tggccaacacggtgaaaccccgtctctactaaaaatacaaaataattagccaggcgcggtggcgtgagcccgtaatcccagctacttgggaggctgaggcaagggaattgctcgaaccagggacgtgaaggttgcagtgagccgagatctcgccactgcagtccagcccgggcgacagagcaaggctctgtctcaaaaaaaaaaaaaaaaaaggagaatgccagggcttgcgggtccccttcattcccctgcaaggctaccctcatagtagctcctgatccacctcacctaggacctctctggcggtcccagtaaaagcttcaggtgtccctaaccacccagcaccccctgaccacagaaagacctcatcccaccccaaaactttctcaaacatctgtaccgccctcagatgccccaatcatgactcatgatcccctctaacaatctctaccccgttggaaagtctcgtggtcccttagctccttggacctgataatagccctgtctcactccacaatttccccgagcctggcgatagcttgggaccgcctcagatgaccccagggactagcttgtcgcatgtcacgacctcccagtgctccccaaccctgctggaccccctaccaacatccatttcacacaagatccccccctacgaccgcccaagacaccccgatgacaaccacgtgcgtacccgcgagactcccagacccgttcgatccaaacagcccccagtaaccccacgacctccctgcggcctcggccctccaccctcggggcccggccggcgctcaccagcgacgctggcaatactggtggtgctgtaggctttgcggtggcaatcggtgccatcggggatatcccagtactgacgaaaaaccttcggcgccatagcccgcaatctcgatcccgcaccacggaccccgccagctcgggaagcgcaagggcagccgcggctggctatcgcgagacttctcgggctgcgcgcgcaacctttcgggctagcgggccggcaacaagtgagcaactttattgataggcgcggacatggacatggatcgcgcgcacgcgccggggaccggcctggaggaagagagtagcacgtgcatccccaggccgattcctagagggtgaaactgaggacgactgcgatcagtgcagacagatttcgctagtcccagctcagggagtcctaggttagggactactagaggcggggactatctactaggggaggggccgggctcagactgggacgggcgggactccagttgataggagcaagacatgacgaaacaatgactggggggcggggcatggcggggatgtggccacacccagtgtcagaatctgcatagcgagtggtcatgccctgtggtcagtcaccaagctggagtctgagcagcgtgctactgttttgggccgtggacaggatcaggggcggggattatcgggaaagtgaccaatgacaatacgagaagctcagcgggacgtggcctctgttcaccccgcggctgtcccacgccctaggccggatgaagtacacaggcgcttgacttgggggcgtggctagaattggaggcataacctaaaagggacttgaccaatctgagactgtataagggatgaaggggcgaggccgtgcctggatctacccctgacaggccacaggttcggggggcgtggtcaggcttgctgtttcgcggagtccgggccaatcctggtgttagcttccaagtagggaggggacagtatcgaaggtgtgaccaatcttgtttccagagcctgagttgcgcgagccgccaaaggatgtggccagcctgggggcgtggctgtcaagatcttgtccaatcctagagtgagcccaaactcaggggcggagtttcatgatcccggaaccggtggtagtgtttgggtttgaggagagcacgacccagccctctggggtggggtctagcggggtcagcgaccaatcgcgccgaggtctagtggggcggggccctcccgggggcggggcctgtgccagttccgggccgcctgggggcgtggccgggcctgtacagcagcctgggccatgtcggcgccgccggccctgcagatccgggaggcaaacgcacacctggcagccgtgcaccggcgcgcagcggagctggaggcgcggctggacgcggcggagcgcacggtgcacgcccaagccgagcgcctggccctccacgaccagcagctgcgcgccgccctagacgaactgggtcgcgccaaggaccggtgaggcccggggccggccaggtggacttcaccgaggcggtaggcggaggcagagccgaggctggaaagcgaggaagggcagggggaaccgtgtgcacttgtatagacgctagactgagtatcggattgataaaaacac

SEQ ID NO: 66881 - DNA, 792 bp, Homo sapiens
ccagcccacctggggcatttttgttgctgtacaatagaaacaagttctctatatgttccccaggctggtccaaactcctgggctcaagtgatcctcccacctagacctcccaaagtgctgggatttcaggcatgagccgcagtggccggtcagaacctggggcccttttgaactttgattcctcagcaattttgtcagccctggctcgggctgagaagcccctgtgaagccagagagggaaagggacctgtccagggtcacacaggaatcatgcgtcaagcctccccagccacggacttgtctccatccagggcatttcagcccctgcagggcagtggcctgcccctcctccttggagccaggaagggatgcagtgccacagggatctggctctgtcccaggccctgtggggctggcagttgagtaagcagtcaggctgggcgcacccatccctcccccactccccactgcccagcacagtgcattcatgcagctgggccccaccccatctccagaggcaccttccactagcaacagtctccccaggcacaacacagctaacacaaggccccgcaggcaggactctgggacagacgcaggccaggtgagcatctgaacaaggggcagtcggccagggtgggcttgcgggagtccccaccttgacctctctcccttccagctgcccagagcccagaccaagcatggacgccgtggatgccaccatggagaaactccgggcacagtgcctgtcccgcggggcctcgggcatccagggcctggccaggtgagctg

SEQ ID NO: 66882 - DNA, 1978 bp, Homo sapiens
gttgagaagtattacatcacttcctctctcagatgggagaattaacaatgtcattccagcattttctactcaggtcctagcatttctcctgggcaggaatcgtaagctctaaagaactaaggtgaagcctggagtttttcaacatgtctggtaaaatcagacatcaagagtttgccagcctttgacctcatcctaaaatacacatggctggcaaaaaccacgtgcaccagggctaagctcatcacaccaacggtaagcctcaaaagcaggtctaaacaccctacgaccacattttcagtgatactgtactttctgctaaatagcatttctgtaactgccttctttttaccaaatggccattattctgctagtacaacctcaaagcctccccacttcagattaacaaatgctctggagagagagcaactgaaagaaatgtttagtctttacaaagaatggaacagcctacataaggatatttaaattctcttcacattaaaaagaaaaagaaagaactctatctccatccaaggcagttaagaaagaaaggtttcatttttgccccggaaacaatggtgcatgtaaacgcaggcgtttcgatgagacagcacgcccctccccaggaagcgcaggcatgggaagggagtaacatccctgtgctgccaatctgaccatggcttcgttttaggccctaggactacaattaaaaccacacatggctttttctatcctggaacgataggatttggcaacctcacccaaggctaagtgatgccaccggcacccacacgcaggccacggtcccaatccgtagtgtgctgaagtgcaatctgacacatcaacgggacccacagaaaaccgctgtgtggctttgccactgaacaaaaacaaaaaattcctcggctggcagcttcatgtctttcttttcaactccaaatcatgctgaatcatgattcagcaataaaacctgagcataaagagctgtctcctttgaatggcgtgagagggatggtggagacgaaggggctcttttacttgcaccccatcgggtgtggtctgagatctcgtttactgaaaggtaagtcagctggtcccacagttgatgagacttcttgatctttgaggatcaagaagttgttaaagtcactataagtgacatctgaggggcaattaggacaatttaaaacatggactatatactggaggatattactgaattaacattttcgtaggagtaacatggtggtaaggccatgcaggagaatggcctcatccctatgagacacccgtggaagaatttagggcagaaatgtcacatgggcttaacttccggtatgagaggtgagggcagcaatgctaacagagagggcaggggcaggatacccaagtgtttgcagtgtcactcttttccaaggatttgaaaattttcagaataaaatgttgaagcaaaaagggtggggcggggggaacctcctcggaaaaacaatggcagcagctctaaaagctcggtcccagctcggcttctggagagcaagacagggatgggttgatggcctccgcaagagagaatgaaaccataaaggctctcaaaccctcacttctgacacacactgcagctgctccctgcaggccctgaaccagaaagccaaggagaaacaaagccagccgcccgccctgtgtgtttactttccacctcactccccagtggcagaaaggactctagggccatgtggacactgtcctccgacagcgaagcaaacacgctcctcctgctcctggcctcagcacagaggtttcccacatgcctcttcagcgacggtgccacagaagtgcgagtgacagaagtgggcagcccaactcccaaggctggagggcagttatttttagaagtccatttagaattggctgtgagccaatattttgataagaactatacttggcattttatttttaatttttatttttaattttttttgag

SEQ ID NO: 66883 - DNA, 1588 bp, Homo sapiens
ggcaacaagagtgaaactctgtctcaaaacaaaacaaaacaaaacaaaacaaaacaaaactgcagtgtctcccacagactagaggctgagcaccttgagacaggccacatccagccactcaccctccacctcccactgtggtggcactgaaaagcccgctgtcgctgcacgtcccacacttagggtgcacttctggacttctgcttggtttagtcccactaccaagagcgcgtggttccccttgttttccatggccagtgcttactcctgcacagacaccatctccttcaggaagctcccactgtgagaggcgtgcctgccctgctgcactccctcccgagcaggccttatatcctgccacggggcacgcggagaccacggccacagcagctgaaacagcctatcacccagcgtacaccgcatcaacaccctgcaatgagtgtttgaactaggccctctctctgtcattcatctacacaacaccagctgctacgtactcacaaatatttactaagccctcattctgtgcagggcgccacaggaagagtggagaacaggaagctgagggcagacgcttcaggagaaaacatctgactgaaagggaggggcgtgtttgcacttggtgaccaggcactgtggagccctggcactcccagaggggtgtgtggtgacagcatctacccctagatgtaagttctagaaagtggggcctcgtctgttccgtttctctctgtattctcagtgccaaacacagagcctcacacttaacaggcactcaaccggcagttagagggtgaatgaaatgtcacacgccgcaaggacaaggacccagggagccatggtcagggctctccagaggaacggaaccaagaggatacagcaataggagatgaacttggcccatctcggcccattgggacccctgctgatggcaggtctggcattcatgactgacccagccactgcactaacatgtagaaatgagctttagtcacatctgcacccaaaacacagagcgtcagttactcacgctgcatttctactcaggccaaaggttgatcaactgcaaatcagcacggctatcgcaaacagacaagacacacaagccccattccaggcaggaccgccccactgcccccgaccaccagacacacgggttgctgttcgtagccattccctatcaccaggctgattctggctataccagtgaggaagcagcgtgtgaacaccgctacctccaactcaagtttggggaatggacaggcggccagaagtagggaggcttcaacaacctgcttcaattcctagcccagcttttctttcacaggtcaagggaagatcaccactgcagatttctagagacccaccatgaagacctttaatattaaaataggagtcaaatgcagactatttgacccagaatctgtcaaccaagtggttgggttttttgtttttgtttttggtcctgtaacatgctccctgttgaaacctagtttgtaaaaaatgcagtctgtctggagattgactttacacatccgtatattaagagattagaaaaccaatacgaggcacagtggctcatgtttgt

SEQ ID NO: 66884 - DNA, 458 bp, Homo sapiens
aacccaggaggtggaggttgcagtgagctgagatagcaccactgcactccagcctgggcgacagagtgagactctgtctccaaaaaaaaagaaaagaaagaaaaaagaaaaaactgcgtggagagatggaggatccagctttaacggcacttttctgttccgccactaggtggtgtgacaccaacacagctgaggcaacatgcaagtggctgaagactcgggaaagttccagtagagacaacaggaatcccctcctctctacacggaagcttacaggaaggaaatccaagaactacagaatttatgctgaggcagcagagcaaaactgatgatactggagagcgcgggctctggtctttgtgtgtgttcaaacctgccctggccacttacttgcggttgggatcccagataagacaatgtacctctggcacaatgtcttcatttgcatatcagggctg

SEQ ID NO: 66885 - DNA, 2023 bp, Homo sapiens
tggtaactaccctaaatgctccacaagaccaagcacttcctatcatcattcattcattactgcaattcggtagggaaaaccctccagtcacagggagcaccgaatgggggaatcagagccagacaggtagagagcttgcctgcatttgtgcaactagaaaagggggggagctaaaaataggcctcagaagtcttgaagctacagcgatggcaacacgactatggatggaagcagacatcagccttatggtgccttctcgggggatctggaagtgtaaccttgtcaaaaacactcaggtgggctgtcagcgctccacagaggagggactcgcacggtctcttgtctggaagtgcagcaaaaagggccaaagagcagccagggttttcggcggcccagatcctgcggcggggcctaaatgagggggagacgaagcgccccgaaggatccggggggaactggcgggaagtgggggccgaagttcggggcggggacggggtgaaaacggcctgggcttcctccgtccgcggtgtgcggctggcccgcggaggacgagggcctcacgggcttaggagataggcagccaggccggggaaggggagatgccgggtggcggaggacgagggggcggggagggagcgtggcgcgctccgggccacaaccaggccctaaggtctatttacatccgtggccgaagcactggggccgcgcctcccgcccccttcagccccgagcttggctgcgacgcagaggggccttagggctgcgatcccgatggccacccggctcctctagccagacggctgcagtggctggggttgccgggagtgatgggccgggccggtgagcccggcctgaggggacgcaatagggggcggctgcaaggcccgccacggcgctagcctggagcggacgaaacccttgcactctgcggtgctccccccaagggcttgtggcccctagtcctcccgccgcccgttccccggccgccagccggtccccaacggcgcctcccctaccttcgttcgccaggtccgccattttacttccttaagccctcccacaaggccccgcgccggcccaggctcgcctgctttctgccagaaactcccgcgcgtgcgcacttaacaagccgactccgtgtgaggcggccagctcgcgcctgcgcgctgaatgccgcgcggaggcgagccccggatcgcctgccctgcagagcagcctgccctgacgagccgcgctcctagcacgcacctgcgcacgagccatctcccgcctccttttcccgccgactgagagggcggggaaagggccgggaagggcgcatgcgcagtggcagcgactaaggtttagtgaggcggcaccgcgcggcccgaggcgggtcttgaagcactcgttttcccactcgttttccggggttcccccgcggtgggacagtgagcagttcagggcgccgcagccgaggccttcctccaggtaaatcgccgggcctgcgggggcttcccacacgcgcgggcgggagacgcgttgcctcctacctcagtttacccgccttaggagccggtaccttcggcaaacgctttcctgaaaccacgggggaagtggcgagagggcgcggggtgcttgggattggggggtaaatcagagctcatcggcgggggcgggggtcgtggtcaggctctaggagggggcgcagccctgggacccaggtgctggcgttgggggcggggggagccggcgcgagggactcgacccctcggagctacgagaatcaacttcacaagctcatgggaggggaaccgcgcgcctccaggttacccatctgtaaaatgggaccatcagcctcactcacaaggctcatgggagggtcctggacaccctggagttgttctctactcacctgctatgaatctctcagcaaatccttcggacttggccttgcctccaaaatacagcccagagccacccattgtcacccccaggctgtcaccaccctaggccacatcgtccgtatctatctcatggaaga

SEQ ID NO: 66886 - DNA, 711 bp, Homo sapiens
gaacttgtgacctcaagtgatctgcctgccttggcctcccaaagtgttgagattacagacgtgagccaccgcgcccgtccaatcgcttgctttaaatggtatctgccaggtgactttttcccattgttatgttggggggatattttgggcctttgtaaacaaataggaaatattcgaggaagagaaggggaggaggagaagggaaggaaggaaattagctcactcactcacttgtttttgatctttcttatcatgcatcgttgcaaataagtaaacaaatcagccaggcttctgggcaaaatccaactttgtgtcccctgtgaaaaggaaaacgctgtgtcacagagtgaccactggggggcagcagagacttgagaggaatcaaaacaactccaggaaaaagggcagttggctaccttctgggaaactaaacttaccggtaagctccgcatctgctggggttctggtgtcttccatgagccaggtcgtggaagtggaggtagggagtcttagttgcacctcgctcccagcctgctgctgctgttgccaagccgtatggatgccccaccttgaaaactggggctgtcacctcgggagggcttcacgaggtctgagaatccccttctgagactggctagaaaattcctgggtgctgagggtgtacctgtttggagactgattgcaaccccccgaaagcagttctggaagatg

SEQ ID NO: 66887 - DNA, 811 bp, Homo sapiens
cctcttagactgggttacaggagcctcggaacagccaatataaaggggaggggccgcaacacgacctgtcacccagcctggccctgcctggccaacgggcttggctggcccaaagctccctccctcgtgcctcagaaatatgcccggagtgctgtttataagctgagcacgtttcatttaccatctggtccaagatcagggcgggcatgaaataaaggggaaaagcacagaaccagcggcgcaatttcccctccttggccggcaccagcctttggaatccacgaaacgctcatttgaccttgaacgaacattcaagtgaaccagatgcgcacttgaccttttggagccactgctgagtcaaacgcgccagtgggaacatctcccgtggcttcctgacttcatgtgagggggcacaggagagacgcagctagaagcagccctggactacggccgtgatgaatgaatctgcctgggcacaaagggaagaggcttctgtttacagaaaaatactcccatcacctagtaaccagcaatgtcaggaaaggaaatgcagaaaacgctgagagcaatttctgggcccgttcctggctgagccgctgactcactgcgaccttaagcaatctctcttctattcctgttcctccatatgccaaatggagctgtcacctgcctcacatagttcagatcagtatttagacaatgttttgtcatctttggtgataattggggcagagttagctgagtggttttagttaccttcattctgattggctgatgagcctcggtgtttgggaggcacgtggcctcctcc

SEQ ID NO: 66888 - DNA, 737 bp, Homo sapiens
ccccccggcccccgaacggggtccccgccgccccccacactccccggccgggctgggcccggggcggtcgcatcggtcacctggagttcgggccgggagttcgggcagcggctcccgcggcggcggcagcggctgctgcgtgttggtccccgttggtaagtaacagtctccacggctacagtctctatggcggcggcggtggcggcggcggccgctcctcctccggctcccgccgccagccagcctcgcgcagcccgcccgcccgacggggcggggcgttgttaccggcaacggttaccaggctccgcgccccaccttcctaacggcccgcccacgctcgcctccaacgggcccccaagagggcggggcgcgagaccctacggcgttccattggctgtctgcagagtctgtcggaaggaggaggcgttcccccttgaaaaagagtgcgagactcggccaatggccgcgaagaggggcgggtcttggcgggaggcgcgcgcggctcagagggttggcgaaccggtcgcgcgcgcggcgccgtgggttggtggcgcgttttgggaaagtccagttttaggggacccaagggactccgtttaccccacaggaggagtgtgggacatgtgggaacagtctgatcaggggtcagcaaactctcgctcgccgcctgtttttcacggacccccagctgaaaatttaaatatatatatattttttacatggttaaaagaaactat

SEQ ID NO: 66889 - DNA, 1193 bp, Homo sapiens
gcatccccttctgtgcctcgctggtcatctttctcccttggcaatccacttcatacaccacgcctcctccgtctgccatctctcagtgccacgctcctgcctgtgctcccatctctccctggttttgcccctgacacgccacctgctcgcctctctctaggtccatctgggggtctccggccgccgctgacccgcctgtccgcaggctgagctactcggaccacggagcgcgacggggaggcgcgactgcggctcagcaaggactaagttagcaacaagacactcctcactgtgcacgacatggtcgcgagcacggccatcaagtacgccaacaacatcgcgcccggctccaacagctgccacctgctcacctacatcgagtaccaccagcagtgtctcggcgtcgagaagtctttcttcaaagtaccgccaggcggtccgcgcctgcgcgcccctcccgcccctcctgcgcctgcgcgcctcttctgcacccaccctcttgcgcctgcgcgccacttatttcacctcctgcgccagcgcagcgctccagggcctttcttcccccgcccctccccgcgtcctgcgcctgcgcgcctttcttcccccggtaagcctgcgcgccgctccggcccacttgcttctgcgcctgcgcgccgctgcagggccttcctcccccatctccccccgcctcctacgcctgcgcgccactacatcccttctgcgcctgcgcagtgttactctcctgtgactgccacttgtctgactcgcatgtttgttttaacggattccctgaggctgcctgagagccagaaatgaaaagctgcagacttaggggccctggttcagatcccagagcagccattagctacgttttcttgcacgaaaactttgtgcctttgtgcctctgtttccctatatgaaaactttacatataaatatatatatatatataaaggccaggcgcggtggctcacgccttaatcctagcactttgggtgtccgaggcaggcagatcacttgaggtcaggagttcgagaccagcctggccaacatggtgaaaccctgtctttacgaaaaatacaaaaattagccaggcatggtggtgcatgcctgtaatcccagctacttgggaggctggaggcaggagaatcactccaacccgggaggcagaggcagtgagcccagatggtgcc

SEQ ID NO: 66890 - DNA, 512 bp, Homo sapiens
ggtcaggagtttgagaccaacctgggcaacatggtgaaaccctgtctctattaaacatacaaaaaaaattagccaggcatggtggcacacctgtaatcccagctactgggaggtggaggttgtagtgagccgagatcatgccactgcactccagcctgggcgacagagcaagactctgtcacaaaaaaatattcttcccagttttcatcatcatggctacaagttaccaaggtcatttgtttatttggtcatttccttgagggcgagaggccagattgccttgttgttgtaccagcgccaaccctctgatgtttgttgaattaatgaacacccatttttcagatcaggaaaggggataagagacctcctgtgacttgttctgtcaatgtaataaacaagtaaattatgcaataggtaagacagtgttcagtgattcagaggaatccaaagcacgtaaaggagtaaactgttgaggtgggggcagaatttaaaagtatggcggctagccaggt

SEQ ID NO: 66891 - DNA, 812 bp, Homo sapiens
gcagagctctgggcccggcgtcctctgcaccctctttattctcagccctttccccagcagcctaagctcgcaggtgtacggccacaccctcagtcctggtgagaggggacagaccaaggggctcgaggtgctgcagagtgccgtctctccccagcctgcctgcagtgccggacggctcacacgggtggcaccaggctccgcaagctccggggacaggcgcctcctgggagtcggggcccagctagtaacacagttggcagcggcagctcctgcggccgcccaggagtcccaagtgcacctgcatgggaaggagcctccagaaccacgagtccggtcagagcagacaagtgaacatgaacaggttcccgatccaaggccagcgggtgtggccgacagtgaccttgtgtggggaaagccctgatctcagaaaagtgggtctctgccccagccccaggcggggaggtgtgacctgtctgggccaggctagggctccctccccttgtccgaggggacatgtgacaggcttgggtaaggacatggaagggagggcggcctagggagggctttccttcccaagtcataaacaaaactgcagggacaaagtttctcaccacctctctttgtcctgccaaaacgcgagaggtggtgcctgtgggggcggcttccaccacaggactatgtggagggatgccaggccctggcgcctcttgccttcttgtcctgtaagaagaccagcccctacaggaagcccctgctacacagctggtccgagcaactgaatgtatccctaaccgacacgccccccgccaagt

SEQ ID NO: 66892 - DNA, 754 bp, Homo sapiens
acgcagccagaaaccccatcttatggatagacaaactgaggcccagaggagtgtcccactcacggtgacacagccaggctctgagattgaacgctggcgtgtccacctccaaactgcggtctccgcagctctctccctacccagtctggacacaccagcgcctccccaaacccaccccgtcaccaacctctgtttactccttattccacttacctgacctcccaccgaggagtaagccatggctaaccaccaaacgcgagccctggctacaccaggtagaaaaaccaccagcaaacccatgcactatgaccctgtccctaatcgtgttccaaatcctgcagccatgacacactcctatccctggcaccaaaactcatcaagcactgtcattctaggtcatgcctgtctcaggtatttggacaactggtgtgtgtttacaaagagctggttccaatcctagctctgccaacttctgaggcttgaccaagtgactcgggatccaggatctcctccacctgtggacagcacacacaccactgccgctgtgaggaggacctgcatccctggaccttgccgtggggccactggtactcccggtgtaggaccctctacaaccaccccaggaagagagggttcccaggcaatcgggcacatggtacactgaagcggctggcctctgtcctgagagagagggagcgctgcgattctcagcacaggctcatggcagaactccgggcccagctacgcggcttct

SEQ ID NO: 66893 - DNA, 7866 bp, Homo sapiens
ccgtttcacacagacctgactttgagccttctctctggagtggcccagagttcaggacatgggaaacagaagctgaatgaagtcctgccgtcccaaccagcctgatggtgacagcgtcaaacatgtcaacgccgcctactgctagttcccaactcttacagtcaatctataatcggggagcgaaggtcttggtcttcgtcaataagcttaacaacgtccattgtagcctcaaaaagaggggtgcagcagggtcaaaaagagacagggtactggtggccttgccctcctcagtggagagtcagaaaacactaacaaaagctgaccaggtgcaagggtccatccagtcatcaaacacttagtaagcacctactgtatccctgcaggcaccgaacatgtagcagcaaacaaaactgacagaaacctctgacttggggtggggagagggatggacaagatgaagaagtcatatgtacgagatgttaagatggtgctaaggagaaaaccaaagcagaaaacaaaaaggctaagaagcatatggctgtgtgggtgtattgggcaacgaaaccgcgattgagcccaggcagccagaggactccctaaaaagggtgacgtgggactcttctgtgaaggatcccaaaggtaaacaggctcacatcatcattcaaagtcacaaagacaaccaacgcaaaagcgagtcactggactattaaaaacttagagaagacagtggataaaaggggtactttgggataaattctaacccttcaagctggtaaatcagtaagtattgtctacatttaaaaaatcaagaaataagaagcaaatgagctggtattaagaggagtccagagagggctaggaagacagccccggggagggaggactaaggaggccaggaacagcaactttgtaccttacatgtttctaccctatttgatttgtgataatgtaagctggggcggaagtaaaagatactttttaagtacctcaagtatcaatccagaggctggagtgctctaagaggttcactccctctctaaagttttattcaatgccacagagtgtgagctggaaatttactttctgatacatttgatggggccgctatctgcctccaggccccacagacagacagcaacaaacagggctcagctactaatttaaaggccgcctgcaaactgacactgaagcctggcatggtggcacatgcctgccaggagctcaagacaagcctgggcaacacgacaaacaaaaaacaaaacaaaacaaaaaactaaaaactaacccttaagagtgagccccactcactaccccaccttccaggtacttggagaaggtgccatgtcaacgtggtggggaacaaaggtgaaatcaacagcctcaaagtggatggaaatcagcgtccggggcccatccctgtgctccagggacagagaaaaggggaggggtgagggggttggtgaagaagtggagtggatgccaccagagaaaggaaagagggcctggtgcaggaggggcagccaggctcctgctctgccaacgtggcacaaaagcagccacaggcaacacctatgcgggcgggcatggccgtgcaccaataaaaacaggctgcactggcagtggccagacccagcccacaggccagcctgcccaccctgctctaagcacaggtagcggcctgccccctggacccgtctccccgtctgcagaagagggctgtggcgagaagaaaacgcgatcctgcgcacgaagcgctggccaggaagtgctcgatagatggcatgtgtccccacgattaggaagcggtttataaacatctgccgctgtcaggagcctccgcggccatcctctaagaggcttagagagggaggaaggaaaaggggaaaaggtgaagactcaggaaaggagaaatgcagagggaaagagaagccgcaggctgagggaatcgcaggtgggcatcccttcagaatgacaagcctctactgctgtcaacgcccatcacttccccactaggctgcaaaccacttacaggctcagggccagggtcctgggtcccgggtcccgggaagctcttgcttcaacctaagcacacccacgcttgtgcacggctcacctcccgtggcccctggagctcccgggacccccgtattgcagggtagaggggtcaccagcccagccagggctcttcccaccctgaagtgcttcctacagaaagtccctcattcctttatcaagacatcacccaagaagcatttatcgaacccctgtgatgtgccgggctccgggcttcacactggcgactcagcggtaagaaaagtagacgcggccccagccctgatggcgctcaccagaccaccacctcactctccgattccccaccacagcctttccctagggctcacttccccaggagggcatccctgatcataaactgggtgacttcctgcctgtgccccgtcacactgcaccctccaggaaggccagggcccccacgccacaggtggagacgctgacagaatacacgactgaggcactcgtgctgaatcaatgacggcctgaggcttgaagggagagggaagacacggaaaagacagtggtgacatgagctccggcattctttctgccccaaatattgggaattcttcacatggcacacaaacaaacataggcccggtcggcaacttcctgatcactcaccagccggctgacttcacctgtcccacccatgccaacctggctgtgctccctggctgcttcccagagcccgggtctaaatcacgacacaacagaccgccaccacctccttcggttcttcctacgactaactcaacagctggaggtgacacggctccagtgcccccacgccgagggacgcaagctggaacctcatggttggaggggtcctgctgctcctgagggaggggtggagcctggccttgggaggagtgaagacagatgggtccgtgctgtgggcactcagggcttgaggccactcaccgcgtctgggcttggggaagctgtcgtgcagccagaagaccaccttctccacgaagtgctggatgtcacattgctcggggccgcggacaaacaccatccagtcgtgagtgaacccctccgtggtgggcttcttgcgcagttgggcgcgatgccccagctctaacctcacctggacggtgcactggaggagagagaggtggggagatgaagtcagcacacgcctccaagcaggggactgtccccttacccacagagaactttcgataaagacccccagcagtgcaatacgctctcaacccagtgagcagcacacagacggcttcctatcgcgccagcaccttgccgcagacgtcccgtgccttctcccctccgtactcccacacagaccccgtgtctcctctcatccaccgcctcatcctcaattccacccgcacagcctcctcaccggtccccagctcagcccagctcactcctgcctcggggccaccacactggcctaggatcctctgctcctgagacttcccacactggcgcctcttgtcactgggctctcagcttgactgtccctctgcagggaagcctcccctgaccaccgatccaaaagcatccaccaccgctcccatcactctatcatagaggatgctcttccgagcactttcactatcaaaagtcatcttgctgatggctgtcggtgtctctgccacctaagcttgttgactccagcattttcattcccaagcacgcatcacagcgcctcccggaggcccctctcctttccctaagtcatcagctacaacactggctttcagtttcaaaagcagaatgggaggttcccaagaagaaggcagaggccagcctgcggccccctggtgaccggtcccaggtggacccgtggcctgggcagcccagctccctccgctgagcacatgtcgtgtctgacactttgctctgaaatacaaggcagctcaggccagttccatgccactgaacacaaagttgcatgccttcaaagcactcttcatacctaggttggccaaaaccaccaacagggaacctacagtaaatatccaccctgctttgtaaaaacctccccagacttttcacagatacggccctgacacccgctatcaaatacaagaatgttacaaaataaagcagcagccaagcgcacacttgcttctaagtgctgagatagccgggagccagccagaccatggcctgagtcccacaccctcccctgacagagccgccctcccgggccccagaccagacagctcccatctgcgcctttccacgccatcgctcggcaactggccaggtgtgtcccagtggctgcaatccctccagtacctgtctcttctttggcatttcgaggccccgttcagaccccgccacctggctgagtgccccggcgcctggccggcttccctccctctccgtccccctctgagctctcagttgtcacgcgatggagccgctggggcaggcagatcctatcgcccccacccccgcccgccatgttaaagctttccacggcttgtcactccctcagaaggaagcccgagccccgcgcacgtcttccacgcgtgtatttcctcaagtctgagacgctcgtctcttttcatgtcctaacccttttgaagtcagagtccagcctgcacacaggcgcacacgtgcacacacagacacagaagctgctcctgagttggtggcgctgtcctggtatctcagagtcccagaactgaggaaatgcaggaaacgcgcacattccagctcaatcctacagccagccccagacacaccaggaacagccaccctatctctcttcatctcttctagtgccgcagcctgggtgccctaagctcgtttcaaaaccctactcatctcaagtcctggctcacacgctgccctgtccagggccctttctggtagccacgctggagaccaaccttgagtccccacagaagcctgtggacagctccacgggagccccttcatcccatcccccgctcctgggttgctgacgcagcccccagggcccctgtgaactctctgagagcagggactacatcttgttcgtcctcttagcctctatcttgaaaccacgggacaggaggcctggacgatgctggattaattaaaccagagagcctctcaggtcagggagttctaaatgctgcttttggagacggcagggccatggtggcagataaggacaggccagttccagcatgtggaagaactggccagagaggctgagggtctgtgcgcacagcaagccaggtataagaaatgaggcggaggcgtgcaatttctatttggcaacttaaaaagtaaactgaaacatgtacatgatacagatgtacaatttttatttgtcaactaaaaattaatttttaaaaggaaagggggcagaggggattcccttggctcaggacgactgtccctctggagttccctgggaaaagagggcagggactccctagggaccaggcacactgcagggggtgcctgggatcaggccggagacaaaagaaataacccgtcgtcataagtggctgacagatatgggaaacggtctcggagtcaaaagcccccggccctctgtgtaaggcctggggtgcaggcagaaaagggcgaatggcaaactaacagcaaccccagcccatgaggaggcaaccagaaggagtggctggaaaaaggggtgaacacagcccaaagccacagaactgacaggacccgagggtggaggacattcaggtaaccccaagatccgggcagcagggacattcacgaccccagtgtgggaagaaagtggggatggacggaagatcaggcgcactcataaacccccggcgctgcggattcatgaggatctcaggtaaaagtacccccaccaaacacacgaggtgagggctgagcaccggcatggcaatactcaggccaagcacgagtgtctgcctgaacaccaccgcattccaacaaacccaaaacaacactgacattagccccgagcggccatgaccaccctctatgcttacacgcctgcgcctctgcctttttcgctagaaaacaggaaggcaacccctgtcccgctgggagcattacaggtgaaaactaaatgtacatatacatcatgggaacagcaccaggatgcgggagaacgacccctgcttctgtggagctgactcccacacaatgacagtgtctcctcggaatcgcttattcactgacccggccactcagacctcggccgacttcccggcatttctgatgacagggagttcctacccagggcacgcaggcggcagagcagttattgtgaaagagtgaaagaccgcggttccactggagagggggaggatggaagcaccagaactccaccgcagtggccaaagtaaacaggaaggttccgaggcagcgatgggtaatctttgcagccggcaggccgggcccaaagtgctgcccaggcgacactgatgccctgggggctggcgccaacttgagcctcaacacccactgttaaggacacaccccagacttggccaacagatgcgaagttcgggtgcccggcctgctgcacccaggggactgtggagcgctgaggggggcactccccggaagggtggaataacagagtctctgctgttgtagtaaaaaaggaatcacagattcagtaagacgctcaagccacgtcaacgggaggcaagaagtggagccccggccaacgcgtttgacttgtcaggtcatgataatttattagcacagctaagccaattccatagccaagggtaaccaccccccttcccccacaccacctggactctttccttggccattaggaccaaagaattgaagctaatcaattagctgtctctctaggaagggtgcctggctgcagaggttaagtgacaggctctccagaatgtcttagagtgaataatctgattggtcagtggctctcccccaactttatcccagcaagttccttcaaggcaccaggaatgcctgctgctgggaggccacttttttggaacctctggaatagacggctggaaatgagccggggggctgtggtctcagggatttccacttccctgcacctctgggaccaccctgacacccactccccaacaaaagcccaggataaaggggaaccttccaggactgtcccggaaagagctgtccgtctcacttctgggaaaccatctgaaagacagcggacggagggatgggcacgagcgctccaagggccatctggggacagttaggcttgggcagagggcctcagctgggacactgccctctctccaggccagctggcagagggcacttggaaccaaagggccaaaatcccaaatcaggcaaaccaggcagcctctcgagggcagcttccccggggctttctcaacgcagcgtgcggttctccccaggtgtgggctacagcggccgccgcctggcaaagagccgcgagccagccttgttccaacagcttcacacaattccttcagccaatgtaccccacttcctgcaagccctgaaggcaggtcttcaacaaccagttcatctgaagatttcccctggtcttctggtgggaattctcaatagatgcccttcctctgggaacttggacttcgcccagtggtggaattacacctggagttcggctactgcatctaattccctcggaggcaacgatcccctcccatcccaggagaggagaacactgaggagtcgtttcccccttcagcctaaattgattttgaggtcctcctgggctgaacacgtgcacgtgtgtgagccacacatgcacaaacaggaagaggtgacgaggcttgggcgatcccatggagcgacggcaacatgaga

SEQ ID NO: 66894 - DNA, 1671 bp, Homo sapiens
gagggagagtgaccagggcctgaaactagaagggggctgaggcggcagggtgggtcaaagaaagaagtctgaaaaagcaagtacaaagagaggggacactccaaacaggcctgagtccctgcagcagaagaccgaaggccagggtcctagggagtcagaggagctcaggccagggctggggttgggagagaaagggatgccctggctgcagccggggcaggatcagacgggagagaaggctcaggtccaggtaggggatgggtggagataaagcttaggctgggccggggttcaaggaagagagacgccgcagagcagggtcccagggggccggggacgcctcatatctgagctgaggttgaagggaagacagacagcaggttggggactctgggagtttgaggcgactcggggacaagggtccagacaggaaaggagacagtgactggccctggacctagagacggaaaggtctactgggcagatccgaggggccccgggaggggtctgaacagggcccagatcccaggaagtgcctggaaggagctctgggccaggctgaagtcccgagagctgtcttgaggtccctaagccgggctggggtccccaggggcgtcccaggtggatgcaggtcggactggcgttccgaggggtctcccgggggtctccgagccaggctggggggtcaccaggggcgtcccaaggggctccgggcccggcccgggtcccgaagggtgtccgaggcgccctggccggggtcgcggatgggggaggggcgcccccgccccacataaaggcccgaggagcggcgggcgcgcacaaagcgggcgggcgggcgcggagcggggaggccgggaccggggagggccgggcgggccggcgggcgggagggggccgggcgggctgcgcaggggcggcgcggccgctcctcacctgattgtccatggctggcgccccgccccgcccccgggccccgcgtcgctcgccgccgccgccgccgccgccgccgctcaacgccgccccgccgccctcattgtctgtcaagcgccgccgccgccgccgccgccgccgatcccggccgcccgctcgcccgccagccccgcggaaccggaaaccaccgccagcccgggtcgcgcaccgatcacgggcccccgccgccgactagggcccgccgcatcgactgacagccacctgggccaatcgacggcgcggacggccgcttgtggcgcgggacttcctgcctggcgggggcctgccgggctgcggccggagggacgaagcccgcagccaatgggaggccgggaccggaggggcgggaggagggagggagggaggcgcgaggcgagcctggcggaggggagcgcgaggtgtgcgccgcacgtggaggggggcgggggcgggacgggcgcgcggcgcctgcgcgctgcggcccgcagggggcgctgcctcgtggctggagcctccagggcgggagcgtcccgggggctggaactgaggttacgggttcgagccctgtggagggatcccccagcccccccggtagggacacttttgtttcctgacctcatgatgctgctatgtaatggaacgagccctgggctctggaactggagattaattttcttttcttttttttttttatgagacacgtctcgctctgtggcctaggct

SEQ ID NO: 66895 - DNA, 1585 bp, Homo sapiens
gaaggcagaggttgcagtgacccaacatcgtgccaccgcactccagcctgggtgacagagcaagactccgtctcaaaaaaaaaaaaaaaagaagacgaattggtcggtaaggggactcgaactggagactctaaaacttctccagccctgcccactcaatttacttcattggctcctccctttcaggctccgtccctatccccgcctcacccttaatggcgcccgcccagactcctggaagtgagcggcctagcgagcgagctcccaggcgcaaagcacgccggaagctgtagttccgccatcggacggaagccgaccggggcgtgcggagggatgtggcccggaatattggtagggggggcccgggtggcgtcatgcaggtaccccgcgctggggcctcgcctcgccgctcactttccagcgcagcggccgccgcagcggacactccagaacggcctggccctgcagcggtgcctgcacgcgacggcgacccgggctctcccgctcattcccatcgtggtggagcagacggtacggcggccgggcggggacacggttcgggggctccgggctgggtggggatcggctggctgccccggcccctcacctccatctttctacccccagggtcgcggcgagcgcgcctatgacatctactcgcggctgctgcgggagcgcatcgtgtgcgtcatgggcccggtgagcgccccgcgccgggaccctccccaggactctcccaagcgcctgccgacactccctgcgcccctccttccctggccccagactttccctcaggctccgctccccttctaacccccttccctccccttctgactcccctcctggctcccggtcccccaacccgctcctcaccccttctctgctcctcggctcttaatctccgacttccttcctgacacctggcaccgctcccctcattcctacgctcaagactctccccagccattctcaccccttcctttcctgtgtccctagccccctgactccccccttcctgtgctccaaaccccctgggtcctctccactactctctccccatccccttctggggcctaaattcttccccatcccttttactttgggctctggtcccccttcctggttccctgacccatccccagcctcccttaaaactctctccccaccccgaatctggggacacccctgccctctccacctgcagatcgatgacagcgttgccagccttgttatcgcacagctcctcttcctgcaatccgagagcaacaagaagcccatccacatgtacatcaacagccctggtgagcagggtctttcctgggtgccaggggcactcgtcagggcacacgggtgactcaggggaccagaatcccgggtcagggatgttctctctctgggaaagggtgcagagcgtcagagttccagaagtggctttaaaccaccaaaaggtgcctgttgctggcttttgagcctcggttcacaagtcaggatgtggcctctttgatcctgcacatactgttctgccaacctgacccggctgacatttaaaaattggtagattttaggccgggcacagtggctcaca

SEQ ID NO: 66896 - DNA, 1638 bp, Homo sapiens
gtggcgggatctctgttcactgcaacctccgcctcctgggttcaagcaattctcctgcctcagcctcctgagtcgctgggattacaggcacgcgcgccaccaagctcggctcattttttgtattttcagtagagacgggttttcaccatgctggccaggctggtctcgaactcctgacctcaggtgatccacccgcctcggcctcccgaagtgctgggattacaggcgtgagccaccacgcccggccgaggaatcaaaaagacaaccataatgccattttcaaacctaaagtaatagtgatacggagacggggaaatgaatgatacctcgctctgacctttgaccataagccctaactctggatagctggccccaccacacacataatcgtggccttgacgtcagtcccctgaccccggacccttatctcggcctgactgtactctgcccttaacctctagccctagtcgactccataaccgtggccttggccccagtccccctgacttccggacttcagaccagatactgcccatatccccttatgaagtcttggccaggcaacccctagggtgtacgttttctaatgattaaagaggcggtgctaagctgcagacggacttgcgactcagccactggtgtaagtcaggcgggaggtggcgcccaataagctcaagagaggaggcgggttctggaaaaaggccaatagcctgtgaaggcgagtctagcagcaaccaatagctatgagcgagaggcgggactctgagggaagtcaatcgctgccgcaggtaccgccaatggcttttggcgggggcgttccccaaccctgccctctctcatgaccccgctccgggattatggccgggactgggctgctggcgctgcggacgctgccagggcccagctgggtgcgaggctcgggcccttccgtgctgagccgcctgcaggacgcggccgtggtgcggcctggcttcctgagcacggcagaggaggagacgctgagccgagaactggagcccgagctgcgccgccgccgctacgaatacgatcactgggacgcggtgagaccggcagcgccgggggcgagggacgggggctcgtcgggggcgcggcctggggacgtggagcatcagatggggcggggacacgctgggggcggtacctagagcggggatttggagcggggacagaggagacgagcgccgggaccgggcagggccacactgggggcggttacagtaccgtttagcgtgggggcggggctacggtgctggggttgtggggccaggggggtcgggcgcagggatggggcggggccacgctggggcggggacaaaggagacagcgcagggatggggcgggggcactctgggggcgggacaggaggcgagcgtagggacggggcgtggccacgctgggggcggggacagtggggaccagtgctgggatggggcgtggccacgcttgggggcggttacagcgcagtcgagcgtgggggtggggccagggagtcgggtgtagggttggggtgcgattacgctgctagcagttacagtgcagaagaacgtggcggctgggattggggcgtggtcaggtcgtcgagcgcatggatggggcggggccaagcttggggcgggg

SEQ ID NO: 66897 - DNA, 1102 bp, Homo sapiens
caaagtcctcccattctaccgacccccacccctccaggccatggggaggctgcaaatggagctggagaggtcagtcctagcagcatgtgacacttccttgtcattacgcctcaatacacgggggtgggagaccctcccttctttcccccaaagagacagaccacgctttcaagccaccaaagcatccaagagccagtccccatgctcgtcttccccatttcgcccaagtgctcagccctagacaggtccccatccactttcccgactgaagaggaaggactgtccctcccacccccacaatgtccctttctcctagagaggggacagaaatgggactgggttgggggcaaacactgccctttgccctgatatggaggggagagtaaaggccctccgcccgggaaggtggacccctgcctccaggcatgtcctaaggccggggggctaaggggggggtcccaaaagtgcgtctccgagctccggggcgcctgcacacccaggcgccgctcctggtgacccccagtgcgcccctactccctgcaggggggtcacccgttgggatcccactcgaggcgcagcgggagggccaggcccccgcctaccgcccacgtgaccccgcgacggccccggcccccctccgcgaccctgcgcgcgcgcgcgcacgtgacccccgccccctcccccgcctgcgcgcgcgcgcgagcgcgcccctcaggccctcggcctcctcacctggcgggcccgctgcacggcgtcggcgaaagcgtccttgcggattcccgggccgcctccgccgggtggctgagaggggcccccggccgaccccccgcccgggccgccgccgccgggaccgccgccgccccggtcccccgcgcctggcgggcccggcggagggcctcccccggcgcctccggctcccccgcccccgccggcgggcggcggcggcccgggcgggggtcctcccgtgctgtagtccgacatggcgcggcggggccgggcctggcgcggaggctgaagctgaggaggcggcggcggcggcggcggctcaacgcgggaacaaggcctcgctccacacggccgcggagcactctgggaacccagc

SEQ ID NO: 66898 - DNA, 1315 bp, Homo sapiens
ggggagagagtcgcccctcccgccgccgacgtgacggacgactccggcgggccaatgggaggcagccgccgcaccccggacaccaatcgcgagctctgtaggaggtggccaatcggagtgcaatgaggggcagtgggcgggaggctcagagtgactgacagctctcagaggcaatagctgcgagctgcccgtgctgggcgggcaaatgaaggagatctgagaaggcaggaggcccaatgaaacgcgagtgccagattcgcggggcggcttcagaattagattgacggttctgaagagtcacgtggactgtaaggccgggcctagtggaagactcctatggaccggctgggtgggcgttaggtttgatagtcgtggacacaagccaatgaatgcacgtgagaggtggtgcttgtaaagatgggcagccaattaatccaattcctgacgagttctgggtgatgaggttggctttggactttaattgcttcccttgttaaccagaatccttttctatccctgacttctaagccaatggctgagcgacatgggtgggtgttcggtgactgacactggtctggacaaatgggaatgaaggaaatcaaagcgcccacttttggtgggagccagtggaagcgccgctgcattggggcggagtcggccaccagacagcgaggggattagcgggaactgtagtgaatggcagccgacgtgggcggtggcaatcggctgcccgaactcaggcctgatgtctgggttagctcaccggcagcctggttgggtaggcccggcacgtggcccgcttgaagccttagagatcgagcgcttccggaggtggggaggccggaaagcaggaaactcgggatcccccgggccttcttctctctcgaccccccatctagagcgtccagttctcttgcaggactcaaggaaccagccccactcacgagtccagaaccgttccaacaaccgggatcgagggatcacagcctcgatcacacccctcacttcacacccctcactcccttcgcctaaggccctgggatccaagcctcaagctcctatcctaggtcctcacttcctctcctggacacaaattcccattcaggacccagaggcccaaggtccccagctcccctactgggtccagggatctcatgcacccagttccactcctaggcccaagtatccagacacgttcagcaaaaaccatctctttattccttgttgtgtgacatgttcaccatttcgccctggagccaggacgacccacaaggggccagactggagtccacgtttcttgtctcaggctgcaccc

SEQ ID NO: 66899 - DNA, 2185 bp, Homo sapiens
tgctgtggttctcttagagcgatctggggctacaggtgtgggaaggacctgcaaagtggaggtgggggcagcgggaggaaagtcttgttataggtgcattcccagctgcgggtgaccgcagacaggattgggtccctggctggggcagcccgggacagtgagccaggcccgtgaacggcccatgaaagggcaggccagggaatgtaaacacagggatcggggcagctgcaggccagggcagtaggtgcccagaggatggagggtgtgtctcctggaggtgagagcagggcacgtcatgggctgtgcagtctggaggagggtgtgtcccgggcagtgggcaggaaagcgcccccatctcttcccaggcagacgccccctgccccgcagcagggggatcgggtgttggccgcggaactgcaggcttggggcctcggcgtccctgtcttgagcgatcccgttaggccaaacacgagtgggtagggggaacgagacagagacacaggttctggagtccagccacaggtagtccctggtggctccggccgcccagttcaggggcttgggtaaccgggagcgggcggggccgggaggggaggaggtccctgggggtgggggtacctgttgggcgccggggtctgggttgcccccgcccagcctggccagcccctggcgcaactcgtgcacgtccacgcggccatccttgttactgtccagctcctcgaacaggcgaccccagcgctgccgccgctccgcgtcgcccgggctcccccgcatggcgcccgcccgggggggaggggaggcccggcagcggcggcctcagtgggggcttcgcggctccccctccccccccgggaccccgcagggtcagctcccgcggccgccggctccgcagcctccgcgcagtccgctcggctctggcacttgcgggaggtggtgacggctagccgtcgccgcccgcgccagaacttgcgtctcctcccccgacctgcattggggggaggggaccgagggcggagctgggggcgtggggagggaatgtctgggatggtctggtattgcacagccgaggaacaccagagttccttctgggaagacgggctagggagctcagtggtctcaggtctggtttcagagttccgcctctgcgtgcctcagtttaccctttccccctttgcccaagggggcaaggtagagcgctgtcggggattgggtttcataatccccttccacttgacctccccgccacacccactaatcttcaggaactcaagttctcgcttttcccagacgcacgcaagaaccgtgcaccatctcgctcgctctctgcccgcccgcgccttacaccttccccgctcggccgcagaaacagaagatccaggagcgatgctctcccactgtcccttcttcccgcccgcgcgcttcctttctcggttcccactctgactgggaaacagaaaatcaacgcgcggcgcggctgcaaagtcggtttcctattggtcagcgcctcctgggctgagcccgcccgccccgcctcttctcccacctaggcggggcctccccgcagacccccgactgcctccagcccgcagtcccaccgcctgccaggagatcttaaaggggccgcggccgcaatcagacgctgagcggcgtggggagggggtggctcagtgacccgggcgcggggttgaggatcccagtggtcgagcgctggaggcagggccccagcctgtcgcactcgctgcacctgcggaatgtccctactgctagtttcgggcgcagtttctcgatccaccattagggggaagggagcccagaccacttgacagcgaatactcgataacaaatctcactttgattcagtgctttgcacatgccagggcttttactcacctctcgagtcgtctttgccaaaaccctataaggtaggtggtactggcgttcgcactttgcagataaggaagcggaggttaagtcattctccccagtcctgatgaccactaaggggcaaaacagggtttaaagagatctgggatccttaaccatcactctataccctagaaagaattaattatcttttttttttttttttttttgaaacggagtttcgctgttgttgctcaggctggagtgcaatggcgcgatctcggctcactgcaacctccgcctcccggattcaaacgattct

SEQ ID NO: 66900 - DNA, 1184 bp, Homo sapiens
cgggtacatacataccccgtgcgtctccacacctgtgcgctcccacagatatgctcgcaatgcaggtgtaaggtccccctcacacctgcgcgcttccgcggtctccctccccgcatccccattaagggactggggtcccgttacaggtgcgcccacagcgcggccccgcccccttcttgactccgccctctcagcgaggctcaggtgcacaagccggaagtgcgctctcccaggtgagtgactaaactttccgggtcacgtgacagggcggagccggtggggtcggacccacagaacgaccgacggaccgagggttcgagggagggacacggaccaggaacctgagctaggtcaaagacgcccgggccaggtaggaaggcaggacgcaccgctaggcctgccccctcgcccgtccaccctgcccgtcccgtcccgtcccgtcccgtccccttcctttccccagcccaggaacgcgctcctgggagttaatctttaatcgctgacctctggcggctggggcggggcgggactcatgggtgccctggcgccagttgtctctcctgtgggcctgcgccggggtccccaccccgatcccaacgcctgggcctctccttctcctgtccccaggtgccccgtcgcaggtgcccctggccggagatgcggtaggaggggcgagcgcgagaagccccttcctcggcgctgccaacccgccacccagcccatggcgaaccccgggctggggctgcttctggcgctgggcctgccgttcctgctggcccgctggggccgagcctgggggcaaagtaggtaccagctgagagcgctgggggggaggggtctggattcctggatctctgctggggacgtggcttagaagcgctgggtatctggggcgcagagagggtcaagaattggggagcggggaagaaataccttggggaggggtctacagggttagggctcggggggattaagatttctagtttcttccttggacactgggagttggtctaggagacctgagttccccagcgaggtggaattgtgtgttggagtgggggctcctaagtaggacttggggggaggtaagggctgcgtacctgagtcttggtatagtgcaggtgtttttgggtgaactgggagctgggaggaggcctgccgagccgggtcgacctggttggctg

SEQ ID NO: 66901 - DNA, 1225 bp, Homo sapiens
gacaggaaagtgggaaggactgaggagtgggcagagcctgagaggcaaacggatgggtacgagggcggggcctggggagaagctagggaggtgggaggcggatgacagcggaatggggcttcggtagactgacaggatcagtcgtggaaggggcgggcccatctttctcttgaacccgcgagccaaagccacgttggtgctggtgatcatccaggctgagcgctgggcattcccagtctcgggcgatttcttggcgttacttccaggctgagagccatgactaggcgagcttcggccgtgggaccgaagacctcccaccctcagcactctaacctccccgaccctgccctcgctgtgcctcgttgggaatccgcctccggggtcttccgcggtccaggagccgcacctgccgggtggagacgcggggctggctggggtgcgggagtaggaggtcttcggtccaaccgcctccaacccattcctgcttccgacgttctgttcccgcgcttaatgccctgcccgatccagttccggcctcccatctccccttcccgcgtctccacgctctttccttccccggttctgccgtgaatgctcccaagtcctagagcaccggaactccccgcgcgccttggctcctgggccccagctccgtgcagtcctggactggggctccaggtccaccagggggcgcccgctgcccaagctgggtatcgctgcggagaaaaggggcccagagtgattgttcctcaggggagggagggggaggtccccagagggaagggcctgagtttcctcttgggggatggatcctaggtggtctgaggggtgagtcctgggttccctggcgggagtggatcttgggtggtcctctgtgggtacagggtggaacttgggtgttctgaggggtagtccctggggactcctctgggagcggggcagaccttggatggtcgtaggattggacctggacctctgtgtgtgtgattgtgcatgcccataacgtgtgttcttgcgttatgtctatgactagccatggtgcctgccatgtatgtgtatctacgattgtgtctttgggtgtctgtctcagtgtgtaaccgtgtacgtgtgtgttgtgtacctccatgtctgttttggtatgtgtgtgatggtgtgtctgtgttggtgtgttctagtctcggtgtgtttggttatatgccctgaatatatgtctcttgtgtccttg

SEQ ID NO: 66902 - DNA, 814 bp, Homo sapiens
acacacacacacacacacacacacacacacacagacacacagtgacccacaatgacacaggggagcccccctcacctccacctgctctcagccccccggtcccactcacaggcaggcgggtgaccatctctcctagacgccagtgcagctgcaggaggaaccagccttggacggccagcccggcccccatcagcaacagcaagagacccagacccacccgggccacactgcacgactgtctccggtggcttcgtcccagcctcgtgaatgggatgtcggtctgtccatccaccacaaacactgagggccgtacgacactctcctccatgcccaaggtgtctggagcagggctgacacgcctgggtccttcaacctcagaggaaaccgaaattgctcaacactcctgggctgtgcacgctgcggacaggcacccgtgggccgcctttagagctggggttcagccccaccccttcccccactcaccctcctcttcttccggtacccgccgcccccggtcttggccctgtctcactctcactcatacagactctcacactttccagaggcttctgaaaatgtgactcaggtggcaagtgcagtggggagcccccagctttcccttcttggatgcttcattcgcttggggccaccaaatatcgactgaggactttctgcccatgccaggctctgctctcggtgtgggggatgcagcaatgaacaacagcaagaagggtccctgctcctcttctggtggagccagagagacaagaaacctcgtaaacaagaaaataatacgttgtgggtttttttgttc

SEQ ID NO: 66903 - DNA, 3081 bp, Homo sapiens
gggaggggcttagaaggagaggcgactccgaaggggtggagtctcagggaagggcagggcttagaaagggagaagacagaaggggaggggctcaggaggagggggggagtgggcgtggctgtgggtgtcagccgggtcctgcgccagtctgcactcaccgtgaaggtgacgttgcccatgtggttggtggcaggggtcagcacagtcttctcactggacagcactagttttttgcctgggaagtcgtggacagtaacagtgactggaacatccccttgcgcgtcgtgggcctccagcaccatggtctcctcgctctccagccgcaagatgttgggggtgatgatagagtacctgtcggagtggggcacgggagtgggcttgtcattccacggatgtgagacgccagtcctcactggagtcagcgcctggcaggctgtgtgccccagcctctggtcctggagaggatccagtgactgccggcgcacttgccaatgccattatcttctctgggcactgccaccgtctcaaccacatgggcaggacagcagccaccatgactcccactctcagccagctgggcctggcctttgaaagcctgggcaacgagggggccacacatcccaccaaaccctgaaccttccaaccagcgtcagcaactcctccaagtctctggacttccagacccacaatcgcctaaacccacacatgccccaaaccctaaacctctacctctctaaacactccaaatatgtaaacactcaaactcccggacaccctcaactctacctacccaaacccacatacgccaaaacctctaaacctcaaatcttagagcaccccaaacccagcctaaacctccaacaccccagtcctaataaatacaatcaattccaaatgccccaactatacatgaacccgaagtagccaatctttaaacccacactgaaaattgcaagtccccaagctgcaaactcccaaatcttgtaaagtccaaacctccgagtctccaaacacccccaaccgcaccatcaatgaacaccacatacaccctaaaccaacagatgacctcaattctagaaacatcccaaactccaattccaccatacctggattccacaaacacccaacccataaacacccaaactctcaggcagcccaaatgtatataaactccaattccacgatacctggattccacaaacacccaaccacaaacacccaaactcacaggcagcccaaatgtatataaactccaattccatgatacctggattccacaaacacccaaccacaaacacccaaactcacaggcagcccaaatatatataatcattcccaacctgctaacccctgaatccacaaacacccaaatgcaccctgaattctacagggacctggacccccaaatgtctgcttccaccccagaaccagccctgtttgtgggtagagtcataaccactcacatgggactccccagagccagggggaggtgggttagtagcaggagcagcaggctgggacctgaggtgggtcccatggtgctgggacagtgcagggtcagagggacagagggacagagggagaggatggggaggagtgagcagcgcctgctggagctggctttttatctggctcctgcctttcccccactcagcccccccttctccccatggcctctccccttttggggctgccccagatttctcaataccatttcctaagcttttcagtccctggggccaacatgtccatggggtgagtaacctgagggcatgttccccagcagcatgaatgcagctgcaccctgccctggactctcccagggtcagggccacctggtgaacacagacctttctctgttggacccactttgtagtggaagaacactaaggtctggagaaccccccaccgcagatgtcttggacctcatccccagttcacttttggccatgcgtttatcagtcgaacacttcctaggaatctctctgtaggctgggagtcagagccccacttccagaggcttccatgctgagggaggggaagtagaatgggggagggacagagcccagcacagaaactcccagtttcatgaaatgttttctagctcatgtgcagggcagggaaaaaaaagaagaagaagaaatgttttccccagtgaaatagaactctgcttcttggagggtcagggaaaacttcctgtaggaggggacatttcagatgggctttgaggtatgtgcaggagttcactatccaagtgagtttattttccaaggaggctcccctcacttacccttgtcaggatgcctgagtgactttggtggtgaaaaaagtcatcactgaggaaagtcctcatttctagagcttttgtacctgtctaatgtcaatatcctcttaggatattaaattgtattgtttgtgtgtgtgtgtgtgtctgtgtgtgtgtctgtgtgtataatatattcatattgatcaacatctaaaaggtacaaatgtgtatagcagtaaaggtggtcttcctcccatccctgttgacagcatattctttttgtgttttcctttaaaaaaatttttttttcattctgtcactcaggctaaattgcagtggtgcaatcacagctcactgcagcctcaacctcctggggtcaagtgatcatcctggctcaaccacccaagtagccgggactacgggtggccgccaccatgcccggataatttttttatttttgtggagatgggggtcccacgatgttgcccagtccagtcttgaactcctgggctcaagtgatcctcccgcagcagcctcacaaagtgctggtgtgaactactgtgccctgtggacagcacatagcacatactattcttcctggtctcttcagttaaatcttgggtttcgttttgtttcgttttttcatgaacaatatacctcagaggctatttcacctcagtgagcaaagaactgcctcattcttacaggttacaggcctcttgttatattgtgagaaagtaaccagcctcctactttttgggggatattttgtttgtttgagtgttttttttttagagtcttgccctgtcacccag

SEQ ID NO: 66904 - DNA, 1338 bp, Homo sapiens
ttggaattacaggcgtgagccgctgtgtccagccaccagcctcttcttgatggagagactgacatctgtggcttcacaccaggctctctgcagtgaataagcttgaacctgcgttattttctagctctgaaactagctgtgatctttgggtaagctactgattaccgccctgagcctcagtttgttcatggaaaaggaaacccttaccacctgcttcatagagttgtcgttgcaatgaaaggaaatatgttgggtcaatctctgaatgcactggtaatcttgctagatattgccaaattcccctgcacagaagttgtattgatttacacacttatgagccctgcatgaaatgaattgtcagtttcttccacagcctcatcacaagggcatgttgatgaacttgaagatttttgccagccttatgggtgaaaactggtaccctggtgtcattttttttgttttgttttgtttttttaaatggagtcttgtgctgtcacccagggtggagtgcagtggcgccatctcagctcactgcaacctctgcctcctgggttcaagtgattctcctgcctcagcctcccaaagagctgggatcacaggcatgcgccactacacctggctaattttttttttcttttattttttattttttgtatttttagtagagaaagggtttcgccatgttggccaggctggtctcaaactcctgacctcaggtgatccgcccacctcggcctcccagagtgctgggattatagaagtgagccaccacaccccggcagccggtgtcattttaactggcattcctctgacgttctgcagcattgctgcccaggcatacgaggtggatggtgagggcaggagaagggtctgtgggtggggcccccttatccctggagaggcggtttctgaaaccccactgaaggggttaatggggagttttctctgatttcctgtaaaccacattcttttccgtgccaggggtagggggaggcgtggagcatgagaacaaacctggcgtctgtctgcactgattgcgacacactctttggaagaggaggaggaggaggagagagaatgaaaatacctgcttgctctccagaattggggttcagcttttgaaactgcatccccttgccaggcgcagtggctcacgtctgtaatcccagcactttgggaggccgaggcaggcagatcacttgaggccaggagttggagaccagcctggccaacatggtgaaaccccgtctttactgaaagtacaaaaattagccaggcgtggtggtgggtgcctgtaatcccagctactcaggaggctgaggcaggagaatcgcttga

SEQ ID NO: 66905 - DNA, 709 bp, Homo sapiens
cactgagctatgactgcaccactgccccccagcctgaatgacagagcaagacaggaaaaagaaagaaaataagaggaaggaagtgggaatgatttctgggtgggggacccagatgcccccggctcacacctgcctgagttcactcactgtcccctatatcccatccctccccttccccaacaaaggggcagccaggcctgggagcagctgggaaacccctatcccatcgtctaattccaggctgaggtggctgctttcctagaatttttctccagaacccacagcaaggccatccccttcttccaccctattactgattaattcaagttaaccttgacctgactgactgaatcaatctatctgcctggcaacaatggctctttccctcctctccctctggtacactcagcagaaacaagctggggccctatagactcccgccctgggaaaatggagagcagtgggttttgattccagctctgcagggcccctgggaaggtccaacccctcctcccagcctcggttcctaatctatcaactggagatgcacagcctacagcctcctttctagtcttggagtggaagtcccaagtggcacccaggaaacaatccttaacccagcgccctgcgcatactgagcgctcagtacacttgaactgtactttttgtttttgttttttgagacagagtctcgctgttgtcggcctgg

SEQ ID NO: 66906 - DNA, 1465 bp, Homo sapiens
cctgggcttgagtgatactcctgcactgacctccgagtagctggaactactacaggcacttgtcactgtgcccggttagcttctattattattatttgttttgagatggagtcttgctctgttgcccaggctggaatgcaatggtgcaatctctgctcactgcaacctctgcctccctggctcaagcgattctcccatttcagcctcctgagtagctgccattacaggcacctgccaccacacccggcaaatttttgtatttttagtagagacggggtttcaccatgttgaccaggctggtctcgacctcctgacctcaaacgatccgtccgccttggccccccaaagtgctgggattacaggcgtgagccaccacgcccagcctattctttcttttcctctgtagcctgagccacttgggggccttcaaatccccgttctcccctcgcccccagctttcatgcccgcggttccctcatctgggcatgagctcttccgccatgtttctactgacctttcctgacccccaaggccgggtcagagccctgtgcagttcccgtcacggcgctgatggcccagtgatggtactgccaggtgacatgtccctctgcctgacccccactctgggcactgggagcccctttagggctgggaccaggtgggtctttgtgaccgctccgtcccagcgcctggctttgggccctgcatgcagcggttactgaatgaatatttattgaatatacaaagacacggaccctgtgcccgcgcccccgccacacacagcgaaaacaggtttctacattgtaaacacaacctccgtgtagaccccaacccccaaaaaggcaagacaacggcgtagccaaacagattggtcattattgtacacatagctggaagggaggggtggtcccggggtaaggacagggctgcccaatatttggggggaggaagggactcttcttccaaatgggcttgtccgggaaccggggtcccggggagctgggcgcctggtccacatggaccccctccacctccccacatacgctgtggaagaagggcaggagtgagaaatgctgggggaggacgaccctttggtctgagatgtggaggtgatcataacagttcccgcccgctggctgttttgttgactttggagaggccttcccggaacccagagtccgtcattctgggggcagacagcgaggaggcgtctagcgttgcagggcagcaggccccacccactctacccggaaccactcaggccccgccccactccccccaaccacagcagccctggccttgcccactctaccccagactcacccaggctgcacccacctcgctcccacagcagcgcaggccctacccttctactccaaccacctaggccccgcccccagcagccctggccccacccactctacccgtaaccactcaggccccgcccaccttactgccatagcag

SEQ ID NO: 66907 - DNA, 4553 bp, Homo sapiens
ctgagactgaaccccacctggtgggtggaaaaaaaaaggggagggtgtgagggacagtagagacctcccagctatccctttcagtagcaatagaaacctaacctcacatttactgaacacctaacatgtgctagatcccacacgctctttttcttttttagagttggggtggtgggtggacctcattctgtttctcaagctggaatacagtggcaggatcatagctcactacagcctcgaactcccaggttcaaacgatcctctcacctcggcctcccgactggctgggactacaggcacacctcaccacgcccggctaattttaaaaactttttgtagagacggggttctcactatgttgcccaggctggtcttgaactcctggcctcaggcaatcctcccaccttggcctcccaaagtgctaggactacaaagcctgagccaccgcgccccgcctgtcccccaagtcttaagaaaagtgcctagcacatcctgtgtaagacatcattactcccaggtacagatgacgaaacaggctcagagagatgacgggacttgtacaagatcacatgggtagcggcagagctgggaacccagaaccgggggattgcaccgtgctctcctccagcaaactcctcaaggtccctcaccagcagggacttctcttctgcctcccggaggcccagccgcaggacgctcaactccacctccagagagccattggtgtagaaaccgaagctgttcagctggatgtccgctcgcttctccccctgccggagaccaaggaggcagaggcagttcagacctctttccgcctgcccagccccaggggtctggcacgaggacctccagaagggcctcctggtacccctctatttaggacaggcccagaggatgacaagagaaagttgagagggacttcctccctgcaggggaagggtggtcctgcattctccgacctctgttctgagaacccaggaacagagatcctgcggcacctggaagtctccccactggggtgagcaccgcccggagaacagttattcacctcggcgtgcctgaccttcaccttcccgaagaacttttacattccagttgagctcccagcaatatttcaacagaaccccccaaatcccattaagtgcccagaggaccccactctatagccccccaggaccccgctgtgcggctccagggtctctagcgccccaaaagtgattccaagaatttaaaggactaagacccagttggggggaaggggggtgtagtccccaagagatggagcctcgcccccgaagggagggggccgaccccagcgaggcggacccggcaactccatccggaggaccgaaggggatcccgggacgagaccactccgggcccggaaacggggggcgccggaccactccaccgcctcggggacgggggagggcggacgagaccactccaagccagggggcttctccgagacaaagttgcgccaccgaccccagaccctcgcgcggcgggcctcaccgtcagcgccagctggtggatgcgcccggagcagccacccagcagcagcaccagaagtagccgctgcccccactccgcggggctcccgcggccgagccccctcctctcgctcactgccatctctggagccacctcctccccgactccgcctctggcgcccaagcccgcccaccgatgagccaatcgccgcacggcggggcccggcctttcggagtttccagtccgccaaccaatcagcaattgcctctccgcaagcccgcctgcttgcgtcaccgacggacagcaccggttccgaatgggagagccgataacgcttaacccccagctcactctcaccaatcgctataaagattgtccggatgtgatttaatgagcagtttatctaaccaattgtcatggatctgatatccggcccttaaagcggaatttctccacccactcttaactgtccgggactacattacccagaatgcagcgggagcagacaagggccacaaagcattaaataaactacctttcccagtatccccaaggacggacttcctcttcttgagccagggatgtggctcccagccagagctgaggcttttggtaaacacacgcatctgttcaggcctgacctgttttcctaatcttcctggtccacagagaggcctaaagctggcctcaggttaaagtttgaccctaggatgacctatgaccccaggctgagaccccagccttaggctaagccttttattccagagtgaggcaattggagccccacccccagattccaggctagaccggactccgggctgaactctgaccccaggtgaactccctctctgcaagttgagtcctaacttcagcctgaaactctgacaccccctcgtcccccacaccacacactgaggcttaatctctggtttaggccaccgatctggactagccctgactccagattggacctgaccccttaccgggttgctaatccttctggttaagcctctggcctctatcccctatccccacggtggtgctgacctggactgaaccccaattccagtttgagtctctgagcagaggtgaactcagaactttgctaggctgagcccccatttgagactagccacagaactcactgggttcaattgcccaactgcaatcagacattttctagctcagaagccaccagcaggtggggccaggtctcagcagagacatcagtcccagtgtgggctcccaaggctctcctcctgggctcagctgtatctctctgttctgggagcctgggtgctctgtgtaaggggaacgtatacccaagggcccccctgcaagacgcccagccttgtctgaggctgcagagaaagcgccaaagcccggagagaatgggagtgggaatccccagtgcctcctctcctctttcattccagcacctcaaagggatttacaaggtgtgaacagacttttatgggagaggtgacagacttcccttctccagggcccagatggcccagatgtctgggggaggggcggagtcggaatctcaggggcagtactgagaatgaaaccaggttaaactggaaaatgggcagatgcaggcgcgaactggaaggcagctggggaaaggcctgggcctggcgccccaaggacggcctgtcttcagtttcccagcggagactctgggggagggaaggcaggatgcggtgcgggagttaatggacctggccttggcgaaggcgcgtcctgggttggatcgaaaccctctcatccgccctgtggccggagggaccagaccattagtgggacgaacctagacgcctggagccgggccggctcgcaagaacggggtgacctcaggttgcccctgcaatggggttgaggaaggacttcttgagtttggggttttagtgtcttggccctttaaggaataattgcggggaaaggggaaaaggagatgggaagaaccgtttggagcggggaaggaagatgagaggacgagagggaccccggggatttggaaaaaatgggtgggggttctttaaggggtcggtccagcggcgtcgagtggcaacgttgctttaaaagggggcggagcgtccgttgggccccgcccccgaatcgcagtgcttgggctccgcgcgggtgggggcgtggcagagcgtgcaggggggcggggaagagtctggggtgggcggggccgggcggggcggggcggggccaggcgcaccgccctcggctgagtctccccggggagggcggcgggcggcgggcggcggggaccgggtgcggtggtggctgcggcggcggcggcgggagcagcatggattggggcactgagctgtgggtaagtccaatcggcccgcctctaagttcccctttgctggggtccaggcaccccccttttgtccccaatgtatcttagagggggctccgcgcctttcccttccaccgacccctgggtccccgccctccaccctccgctctctctcgaagtttatctgggagtctcagcacgctcaggggcgaagggcgactttgccggaccggagtggggaaactgaggcacagggttgcgaatgaggcgggcagaaggaatcctggggccaggccggggcggctgagagaggtcacctattttgggcgccctggccgggcaggcggcttatcttacggcccctgggtccctgcccgtcgtccgcctgtccggctaggaggggggaggggaccctctggtcaccctcatccccacccacgtgggacctagaagtcctgaccgccctttccctcgcctttaatcaacacctaggggctggggacgctcatggaggggaagggggatgctaagctcggcctgatccccctccctggcttccccctgctcaccccaggcccagggcgggaccgccccctggtcgcctataacctcagccctggaagccccagaaatttccccctatcctagccggacctctgacccctccccttgctgggggcggtggaatccctgagttcttagtgcagcgggggtaaccagactgccaccccctcctcca

SEQ ID NO: 66908 - DNA, 1801 bp, Homo sapiens
cttattgaagacctactgtgtgccaggcattctccacctggggtctcattcctggccacaattcttagaaagtacacagcctcaacttttacattttttaaaagttttttatttttcagtttttgtagagatgaggtctcaccatgttgccctggctggtcttgaactcctggcctcaagccttccttccgcctcggcctcccaaagtgctgagattacaggcctgagctgctgtatggctatgattttgttaaaggccgacacagaggtgaagtcaactgctagaaatcacggcttttaagaggtggagtcacatttgaactctggcctctgatgccagatctgcaggtcacatgttcaccatggtccaggtgaccctgactgcggtccccacctcttctgtgaggcacagggcaggattccacctgaggcgcgaggagcctgggacgactcctttggtctcttctggggttcgcaaaaacctgggggtcccgggtgtgaagaagggtgtctgcgctctcagcggtcaggctccaggcgctgcgacaggacgccgaggacgcgctggaacttctcaaagcgttcagcgcgcggagctcccgcgccccggctaccccagagcagcctccgcacgaagccggtggtcagggcctccctcagctccgggttaggccggaatcctggaagcaaggtcaggtgggctgggggcggggcccaggcgcccgcctcgcccctcccaacctcccggcaccttcctttccccagaggactttgacccaacaggggcccgggagggacctgccccacctgcgggatgactaggcggggtcagaggggagggggcttccagctctctgcaggaatgggggtggggtgcctgaggggctctaccgcagtgcaatggggtggcctgttccaggtgccagatcctggaggtcccgccttaggggctgtgcctggacgtggggctgccccgaggacgggatcccaggttgtcggggaaggtggggggatcttgccgggtgggctgccctaggataggacggaggagtcgttttggagggagcagggcgttcttggggatcgagatccctgggggacgggatcgtcttaggtgggaagggggagtggggacccgcggaggtggctctgggggcaggacagcccgttttgaggtggacggccctgttcctatcaataccgctggatgcagcgtttgcttggggtgagaaccttcctggagtggagccgtcccagtttgggtggggctccgggaggcgtggcgagaggctcccctcctgggacaggctgggtttgggggatccggttagaacctgcagggtgctctgaagtctgcagtccagcgcagagggaacgctcacctcgcaggcgctgggctgccaccttgcggaatttgggtgcgtcccggaccatgtgacgcgccccgtgcagggtgcgcaacagccgctcacagctctcgtccagcggccccgcgacttcctcgccctccagtaggcgaaccatgggtgccacgtgcggcagcgccacctcgccggggtcgcagggtcctgcggagggggagggtctgatcagggtttggggctgtagatggggcatagggcagaggtggaacctaggacaaatgcaggggcggggcttaggactgagcgacagcggggtctgtggagaggggccaggaccacacgccccgtatggagggcggggcctatggcgaaggggcgtagcctagggaaaggggctgggaccaaggctggtgggggcgtggcctaggaacaagtct

SEQ ID NO: 66909 - DNA, 991 bp, Homo sapiens
tctcctgtaccaccccaaagccttaccaggtgcctcctgcatttaaccaggtcccatagctctctgtgcttcccggcacaccctctcaccaccctcatcatcaattattcaccttgctgactgcttagtgtttgtctcctggctggattacataagccctgtaagggcagagctctgtttgtcttgatcaccattaggttctggtgcttggcatacagtaggcattccacacatgcttgctgaattaatgcatgaccgggtctggggtgctgggtttcacaccaggctctaccgcaaacattgggtcaagtattttcattcccgacgtacagatgagtcaattgaatcaacggaaagcaaaatgatcccatccaagctccctcaacttgccgggctggtctgggagtcgaaccagatctgcctgaccctcccaccggtgctgaaaagtggagtgtgtgctggggtggtaggggatggggcagaagagagacgggcttcctcacagaagggtttgagggctaggatgaggcgtgcacactctgcacccctgcttcggagctttgaaagggtgcacagcacacccgccctctctgggaaccctcgggagcttgaggttgcctgatgaaggggctgatgggttgaacgcaaagggcccctccacccacccttttttctatctccccaaccaagccctggtaacaggcatttccggtttccggccggctccctggtgctggggtgggggtggggagttgattgctgccgtcgtgcttggctctgggtccccttctcccagaccccagaggcctctgtccctgcacactgcttccccgaaggagcgtggaaagccagccgacctttctggctctttcttcatcttgggcaggggttttgttgatgggaggctggctggcaaatggggaagaatgaacctcagggttcaccgcagtgcgcctgggtgctgatttgcatatgggcacgatgccagcac

SEQ ID NO: 66910 - DNA, 1333 bp, Homo sapiens
ttgggaggccgaggcaggtggatcacttgagctcaggagttcgaaaccagcctggccaacatggtgaatgtacaacggacagcccccaatacagacagacagacacacacacacacacacacacacactcactcactcctacccccagccctaagaatttacaaacactgataaagacaaatgaaatcagcggatatagacttcaaacgccgtcagacagacacccactagatcaaacagggacattcctaaacatcacacagacacatcgccaggcagtcccaccgcagacagccacaaattaaagccgcgcttgccccctgatggacagcagcagtagtgcgccacctcgatagcgcaatctcccagagcgctggcattgcaggcgtgagccaacgtccgcagccaaacacgttcatattgttgagaaggcagagaaatacaaagtaggtggaagggtctccacctacagctgttttctgtggtctgaggattcttcccacgtctttaatttctagtgctttctaggggtctcaacttgaactatttaatattttctggaagagaaacattttttgtggggggggcgggtgggggtgggaccgagtctcgctcttgtctcccaggctggagcacagtggcgcgatcttggctcactgcaacctccgcctcccaggttcaagcgattttcctgcctcagcctcccgagtagctgagattacagcgcccagctaatttttgtatttttagtagagatggggtttcaccatgttggccaggctggtctcgaactcctaacctcaggtgattcgcccgcgtcggcttcccaaagtgctgggattacaggcgtgagccaccgcgcccggcccagaggaactttttttttttttttccagaggaacattttttatccaaaggaatgactccctaatggtggaattccaggcaatgaagtgaggcgcgaggcagattgtcacatagggagctgtcatatttcatgggtaccattcacgcaaggcgggacttgttcttaggcagccaacacttccgcattgtcctggcatttgagccgcggaaccaagttccgcgtatcttgcccattgtaaccccacagcaccaatttgaagctatgtagtgccctctggtggccttcggtgatttggcttcagtgtctcaaactctctgattagactgtttccaaagagaaggctgttagggggcctcagaagtcaggtttggatgtttgagctctaagctgcaggatttggggagccgtggtgtgggggtgatttatttatttatttttgagaaagagtctcactctgtcgcccag

SEQ ID NO: 66911 - DNA, 1326 bp, Homo sapiens
gccttatcttgtccacatactcgcccaccaaacctggtattaacccacagcaagatccgcccatcaaacctaatgcccgcccacaacctcgccccggaacttagtctctgtcctgacagccccgcccccatgcctggtaccgcccacggtcccgccccagaacttctccccacccccggagctgatctccacccacactcagccctgcctccaggcctggtaccgcccacagccccgctccagagttggtccccgcccccggaactggtccccgtcaacactcaggcccgcctccaggcctggtaccgcccacagccccgctcaagagctagttccgcccccaaccctgccacagacccgcgccaggacgaccctgcctccgcggctgtccctagccagggcccaacctggttctattaataactaagcaaactagaacacctcagccggaggctggggtgcgcggctgctgcacctgcagcctgaacccgggggtcctgacacgccgcattttgggctgggaccagctggagccggaagcggaggtgcagtgtggctagccggagaccggaagcggaagcgcgcttgtgtcttgtgagaagagccgcgcttgcagcgtctgggagaatctttcggtctccgcgagaggtgcttcattccgtgagtccgagtccagagaggggccccagccgcgggcctgcgtccctcccgggagccgggtttccgcccctgaggcctcgggctgtgcgctcagttaagcccgaagctgctgtttcctccggtgtccgggccccgcgcccctgtcatcctcactctgtcgtcctcaccctgtcgccctcacccggggcgattctgcgccccaggggacttttggctatagttggagacggtttgggatgtcacaaaatggagggtaggagggactgtgctactactgtaatctagagggtggaggccagggatgctagcagctcagcatcctgcagcgcgtaaagcagccgccgccagcaaagactcatccagccccaaatgtcattagtgcccaggttgggaaaccctgctggagggcattaaaatctctgcagtcctgaatacactgtagaaattatttagaattcagccgagtccacttataaggcctaaagtgacgaatttaaagcatctggagtcaccatacaatctccagccaaatgagttaagcaagtcagatgaaaacagctttaagcttcttgtcccattttagggaccagatggctggataggaatctggtgaattcaggcacagccagtagcctgggttcttattctttaaatcaatttttttta

SEQ ID NO: 66912 - DNA, 1150 bp, Homo sapiens
ccactaaaaatacaaaaattagccagttgtggtggtgtgcgcctgtaatcccagctactcgagaggctgaggcaggagaatcacttgaacccgggaggcagagtttgtagtgagtcgagatcgtgacactgcactccagcctgggcaacagagcaagactgtctcaaaaagaaaaagaaaatgtggtatactttgcctcaaaaataaacacataaaataaaataataaataaataaataaaacagttgggatccacccaaatggagatttgcaaagtgggaaacataccctgtgataagcacgtaactagagataattccagaacttatgagaagagacaggaggctcttgggaataagaccatgaaacctgcaagcatcgagcccaaaactctgaaaagttttcgacacagttccaagctaatagtgcatgcagagaaccgggctggaacatttaggaggggggtggagagtggagaagagaaagaaatgttaaaaaaaaaaaaaaaaaaaaagccaacaaccccatgcttatcgtgtgacaataacagcaagaaaacaaatcagtctggtggcaggggtgggggcagggaactccagtccaaagtttcttccaagtggaatgagtcaccgagtagagagggacaaataagcaaatatagaaacccaaggtagctgctatccaggacaaaggggaaatgcatcttctttttttttttttttttttttttttttggagacggagtttcgctcttgtcacccaggctggagtgcagtggcatgatcttggctcactgcgacctccgcctcccgagttcaagcgattctcctgcctcagcctcctgagtaactgggattataggcgtgtgccacaaagcgagactccagcctgggcaacaaagcaagactctgtttgaaaaaaaaaaaaaaattatctgggcatggtggcggatggcgggcctgggtgacacaccatgactctgtctctgaaaaaaaaaatttttttaacgggagatactgaaaatgcaattaaatagctagaggtggctttgtttatgaaactagcaaaagaaaaaaaaaataccttccaccagctgggcacggtggttcacgcctataatcccagcactttggaaggccgaggcgggcag

SEQ ID NO: 66913 - DNA, 965 bp, Homo sapiens
taaatgatttgaaacaggctttcatgtttatttgtacaatttaatatatcagtaacactttaaaacgtgttcctttataagtcattctagatggggttattatgagttgtgctaaggttttacggcaattttgaaagggatcttttcccttattttatattctaattattgcttgtgtatctacagtctttttgcttatttctatgtacctactttcccaaactctaactcatttaaaaagtttcataattggctttcctgggttttcaatgacacactagaagaggggtcaacaaaattttcccgtaaagggctagataataaatattttgggttttgcaagccaaatgacctctgtcacaactactctgtcattgtagcttaaagcagccctacatgatgtgtaaacaagtgggtggggttgcattccaataagagttcatttacaaaaacaggcagctagcccatgggccatagtttgcctacccttgagctagacgctctgcaaatagcaatgactttatttcccacattccattctttacaactctgatttctgtttcttgtcttattacattggctggatgcccagagaaatgttaattagtaatgatgagatggggcttccttgttttgttcctaactctgctaagaataattttaagaatgatgttagcttggctgttggtttaacctaggtaatatttatcttgtagaagaaatattctattatgagttttatgaagcctctttttttcctcccctttctctaagttaggaattttaaattaaggttattgaaacagatatgatcttccttattgcacctcttgatgaactagatgatgttatcaaatcttctgatcttaaaccatccttgcattttggagataaacaatattgccagtgcagtgttttatttgggacatttgaatctaacatcacatattagcttggcctgtggc

SEQ ID NO: 66914 - DNA, 775 bp, Homo sapiens
gtcatgggcctgctggtacattgaccacagggccccgcggctctccctataagtgtgagttttataaactccttaaagtaatttattttgtttccattcaaggcctttctctcccacactggccccagaccctgacctcagaggttcgagtccccggagccaaattcctctagttggaatctagtaaatgatttaatggcaaaggggcaggggttgggggcagccaaggaggtgaacttttgacagcttcgtggtcagcagcgacgaccgcaggagcgcgtgtccttgaagcggggaagcgccccttttccttgcctgacaataccgccccacacgcgatgacgcctttggaatagaactgcgcagctctttggagacatacggcgcatatagaggctagaaagggaacagagtaccagagggccttcccgcttcgggagccgcaggcttcttctcttcggagagagagtgagtgagtgagtaagcgagtgagtgagtgagtggggagggagtgagtccgtccacgggggcgggccctctccatgctgcggatctcttaggagatatactgcgcacgcagaggcccggaaggaggcggggtcccaggggtctcctcgctagagcagccccaggattggcaggttccagagtgggagtgggggtgtgtgtgtgtgtgtgtgtgtgtgtgtgtcaggttccagagtgggagtgtgtgtgtttgggtgtgtgtgtgtgtgtgtgtgtcagattccagagtgggagtgtgtgtgtgttt

SEQ ID NO: 66915 - DNA, 3142 bp, Homo sapiens
aggttccagagtgggagtgtgtgtgtgtgtgtgtgtgtgtccccaggattggtcggttccagagtgggagagagagcgagagagagagagaacgagagagagagagagagaacgagagagagtgtgtgcgcgtgtgtgtctgtgcagccccaggattggtcggttccagagtgagagtgtgtgtgtgtgtgtgtgtgtgtgtgtgtccccatggtgggagtgtgtgtgtgtccccatggtgggagtgtgtgtgtgtccatggtgggcgagcgtgtgtgtgtgtccatgatgggcgtgtgtgtgtgtctgcgtgtgtgcccgtgtctgcgtgtgtgcccatgggggcgagggagggagccctaggcgctcaaggctccgccccctcgagccggaggcctcagcgcagcacaaagcccggggcgcactccgctccggggaatccggccccggcggttgcggcggccgcagcgccgccctcgcgctcagccaatgggcgggcgtgctgcaggggcgctggccccgccccccgggtgcgccgggctccgctccccagactggcgctcgggcagtggccgccgccgggcggtcccggccagaggaaagggcgccctgggagggcccctcgtggctgcagaccccgcaggtcgagtctgccacggatggaactttggaaaaagctagggaaaaggagaaaccgagcttgcaagggctcatcaagcatccaccggggtggcttaggctgcgcgcggcgctgggcgtgtgcccgggaggagatcgggtcaccgcgtggcagctcccgggactgccgaggggccccctgaccccaggcctccctcgggaggggtccagaaaggtgcagcggctcactagggtcacacagcaaaattcctcacattgcagggggggagggtccgcatctccgaactcgccgggccagtgcaccctctattctcacccaccactcacccagaaaacgagaaccatactcataaatacattcttaaaatccacaggctacgtttttggggtaacctccagccagtattccgcatgcatttgaaaacttgtgtgtccccattgaatttgcagttccagtaaaccaaggcagcgagtggacattctcatttaacattcacccccataaatacactttttttggggggggggtctcactctgtcgcctcaggctggagtgcagtggtgtgatcatcgcccactgcagcctcaaactcctgggctcaagccatcctcccacctcagcctcccgagtagctgggactacaggcgtgcatcactatgcctggctaattttttctatttttttgtagacatggggactcgttgcccaggctggtttagaactcctggcctcaagtgatcctcttgcctcagtctaccaaagtgttgggattacaggcatgaatacactttaaagtgtgtaatctgtttgcagcacacacggtccaatccatcaatgaggtcatattaactcaattattcaagcaatcatcaccattagaattggagaaaccgaggcatagaggggctactttgccaataaccagctctgccagaactcgaatccaggtctcccagagagaccaggagagggtgtggtatggagtttgggggagtgggagtttgtttgattttttaaatttgtttgtttgtttgaaacagggtcttactctgtggcccaggctggagtgcaatggagccatcatagctcactgcagtctaggactcctgggctcaagtgatccttccgcttcagcctcccaaggagctaggactacaggagagtgccactgcgacagcttttttttttttttttttttttgagagcgggtctctctatgttgcctaggctggtctcaaactcctggcttcaagcaatcctcccactttggctccccaaagcgctgccatcacaggcgtgaggaacccagcctggctgtaacacggcatcacactgtgagttatgtttacctgttccctacctcgacccacccagatctgacaccctcttggcattggaatgcagaaatgaatggagaccctgtccctgccctcccagtatgcacgagacacatacgccccgtgaagggaaagatgtgtctgtcttgcttattacagcatcccagagccatacacacagtaggtgcataataaatcttgtaggaaaaaaaaaatgcaacggaggggcggggattaggtgactgtccctttatcacagcaggagaggaacagtacatgcaaatgtgtgaatcactcgggctatgttcagagaactataaacagttcagagttgatgaagggcaaagtacaggatgagaggaatagaagattagaccagagaggaaagacagggaaccaaggggcttggactttaccccacagcagaagccaaagaaagatgtcaggcagaaagaacaccatcggattcacatttgggggtcatttttctggcttatggtagatggatgaggaagttgagaggcagaggaaacagaaaagaagaggctggcttctgaagccatcggggaggtggaggtgtcaggacttacctgctggatgacgcccaactttccaccttgggcaactggatacaactcacgagagaaacagcaaaccaaaaagacaggtgctcacatgtggacaatctgggtttgaggtgtggagttcaagatatagaggctgcactttggaggctgaggtgggaggattgctggagcctaggagttcaagaccagcctgggcaacagagcaagaccttatctctttaaaaaaataataaataaaaaattaaaaattagctgggcatgatgatacacaagtgtagttccagctaatggggaggctgaggcaggaggattgcttgagcctaggagttcaagaccagcctgggcaacatagcaagacctcatctctatttcttaaaaaaattaaagattaaaaaaaataaaacttagctgggcatgatgacacatgattgtagttccagctacttgggaagctgaggcagaaggattgctcgagtccaggaagttgaggctgcagtgagctaggatcacgccactgcactccagcctgggtaacagagtgagaccttatctcaaaaaaaaaaaaaaaaaaaaaaggc

SEQ ID NO: 66916 - DNA, 981 bp, Homo sapiens
cgtgagccatggtgcccagcccttttcggtttttttgtttttgtttttttggttttcattttctttttaattatcaagtggtaggagtctctcttacatgcttgttcagttaagcttttaaaaattaattccagttatgcttacttgcagccagagattagaacccgtacaatgtctgcttttttggaatgtattggtttggggtggggttttgttgttttttttttttttttttcagatttaacagatgattgatttttctaactattccaagagcactttaaaatgtatattgtttgcagagtgcaaagttcagtcctatctgttaccacaatcttattaaccatgttattcaaactttttgttacctgagtctcatctcccagatccaggctgtgttggagtcttctccgaagtttctccttgcatttccaacaatttgctctctacagtttaattctattctaggtgaccctcaactcattaaagatcatcccttcaaaccatgcaaaagctctccctctctccctgaaaacgcctcgcgccttgaattctttgcttatttttctctgttcaaatttagccacacgttgaagttttctgtgtcatttttggaaataggtatgacaatctgtaagcggcacagagagagagaaccgcagcctccatgggaacgaggaagtgggaacgggatgagagtttggaatcgatctccgtggaaggtctgaattgcaaggcgggtttccctggggacaatctcaaccataaaaaagttctgctcacatgactgatggcttttcaataacaagtatatggcggtcttgaatgtgcacaggttgacagttttcccgggagcttctacatgcacgagctggcagagtctagggacagggacaaggaatggagaaaatttcctcaactcctgaaggacacaggtgcccatggggacgtactgaatttctgcagaggcaccgtgaaaca

SEQ ID NO: 66917 - DNA, 560 bp, Homo sapiens
cttgacctcgtgatccgcctgcctcagcctcccaaagtgctgggattacaggagtgagctaccacaccaggccaatttttttttttttttttttaaagacaaagtcttgtgacatgctcaaaccagctcatgcaaatctccgtttcagtctttctccctcaacctcaagccctgacaccaagcagggctgttttccaattggcttttcctctgccaagaatttccccagagcacaaacagaggcgtgcagcgaagtaaacacgggaagctctgaaaacccattcatgggcaactcaaaggtgtcgagacatcagggtgtgtggccgagctttccgccatgggggcagcgagcctccacgaagcccaggcgacttgccgacggccccactccaggtgaccaagccacatctcgaccagaggaaggagaacatacaaagaaagacactgtctctgccggagggcgatggtccaggcagtgcaccctgggcgaaggggccaagaagccgtaagatgtgcgtcccgaggaaatgcaccgtggttataaatacagcaaagagtgt

SEQ ID NO: 66918 - DNA, 3070 bp, Homo sapiens
ctacaaaatccaatcatctccaaagtgaaaagtttgtttaaaaaatttcaatcaaatttttaaaatttattttattttaaaataaaataaaaatgaataaataagggctgggcatggcggctcacgcctgtaatcccagcgctttgggaggccaaagtgggaggatcacctgaggtcaggagttcgagaccaccctggccaacatagtgaaaccctgtctctactaaaaatacaaaaaaaacacaacaattagccgggtgtggtggtgggcgcctgtagtcccagctacttgggaggctgaggcaggagaatcacttgaacccgggaggcaggggttgcagtgagccgagattgcgccactgcacttcagcctgggcaacagagcaagactccatctcactaaataaataaataaataattccaatcctggctggcacagtggctcacacctataatataatgcaacagtttgggaggttgaagcaggtggattgcttgggcccagcagttcaagaccagcctgggtaacgtggtgaaaccccatgtctacaaaaaatacaaaaattagccagcatggtggtgcgtgcctggaattccagctactcaggaggcggaagtaagccaagattgcgccactgcaccccagcctggacaacagagttgagacccttgtctcaaaaagaaaaaacaagaaaaaaaaatgccaatcatctgagtgaaaaatgaattacaactactgtggaatttttttcagtacagttttttttgtttgtttctctcctagattttttttttaaagatctttgacaacataaaagggaagaaagacgaatgagagattcaagtgggccatcattcacgttacatgctctaccctacctttttttttttttttttttttctttttttgagatggagtctcgctgtgacacccaggctggagtgcagtggcacaatctcggctcactgcaacctccgcctcctgggttcaagcgattctcctgtctcagtctcccaagcagctgggattacaggtgcccaccaccatacccagctaatttttgtatttttagtagagacggggtttcactatgttggcccagggtggtctcgaactcctgacctcagttgatccacccaccttggcttcccaaagtgctgggattacaggcctgagccaccgtgcccggcctcccccaccttatctttttctttttgttggatccccgtgtgcaggcgttacactttcctgtcttctgtatggacgacagtgacatcgccacaagggaatttatcaatattccctgttatctagagaacatcatgatttccaggtgctctgctccaaacacgtctagaagcacgggttcgatgactcactcgaaggggaaaggcggggtgggaggagggaggagggtggagtgggggccttgccttgtacatatactgccctcctccacccaaacagagagctccaaaaaaaaaaaaaaaaaatgctaatcatctgagtgaaaaatgaattacaactactgtggaatttttttcagtacagtgctctaccccacatttttttttctttttttcttttttgagacagagtctcaaaaagtaaggaaggaaggaagaaaggaaggagggaagaaagaaaaggaaagaaaggaaggaaagagggaaggaaggaaggaagtaccagcaaagggcagctgggctgtatggcctcaggccgtggtgctcccaagtcccactgaaacagcctctatccctgaatgctgaatgtccagctcatatatagacagagtctcaccctgtcacccaggctggagtgcagtggcgcaatctccactcattgcaacttccgcctcccaggttcaagtgattctcctgcctcagcctcctgagtagctgggattacaggtgcccgccaccacgctcagctaatgtttgtacattttttagtagagatggggtttctccatgttggccagggtggtcttgaactcctggcctcgagtgatctgcccgcttcggcctcccaaggtgctgggattacaggcatgagccaccatgcccggccaaaaatgtgaaaaagcattcttaagccaggcaagcacagtggctcacgcctatagtcccagcactttgggaggccaagaaaggaggattgcttgaacccaattgtttgagaccagcctgggcaacatagcaagaccccatctctactaaaaaaataaaaagaaattagctgggcgtggtggtgcctgcctgtggttccagctactgaggaggctgactgaggtggcagtggcctatgatcaccccactgcactccagcccaggcgacagagtgagaccccatctctaaaaataaaaataaaataaaaaattcttagctcataggtcatacaaaaatagcagctggcggactggatttggcccacaggtcgtagtttgctgatcactgggcaaaggccttacgtcagacaagtctgaagtcaaaccattccccagctaggtctcctagagcaagtctcataattcctagccatgcctcagttccctcttctgtaaaatgaggataacaaaccctcataggctgtgatgggatcccctaaggcattgcttagcacatagtaagtgctcagtaaacactagctattgatgagtgttaaggatgtcattgtcaactgtgagccaggtactatgacaggtgcttgagatacaacaaagtccctgccttcaggagagcttagtctgataggagaggccctaagtcaagacagaatgagaaggctgataagaagaggcaacacacatgttggcaggggcaaattctagatttcctctccagtttcttttccttctttccttccttccttccctccttcctttccttcttccttccttccttccctccttcctttttttctttcctccttccttccttcactccttctttcatttctccttccctcctttccttccctccttccttcctttctttcttccttcctttctccttccctccttctttccttcccgccttccctccttccttccttcctttctttc

SEQ ID NO: 66919 - DNA, 1573 bp, Homo sapiens
ccaggctagagtgcagtggcgcaatctcggctcactgcaacctccacctcccaggttcaagcgattctcctgcctcagcctcccaactagctgggattacaggcatgcgccaccacgcctggctaattttgtattttttcagtaaagatggggtttcaccatgttggtcaggctggtctcgaactcctgacctcaagtgatccacccacctcggcctcccaaagtgcttgggattacaggcgtgagccaccacacctggcccagaagtattcttaacagaaattaacacaagagaggcctgagagaaaaaaaaaaaatctcattatatacaccagttatattttgggttctagatacagggttgagagcatgaaatcctcattcaatgccaatatagctgtttaaataaatacacatggctaagtaggcaacatcacggtgatttttctcatccttggaatccgtatattcagtgcagcaaatgacacacgtttctttaacatctcttgcggtgtaaagagaaagacatagcgtttcatttcactcacttcattcgagttgtaccagggactgcacaagctattaggcatgctatcatgaatgaaacctcaaggcgtctgttccagatcagaggtcagcaaacgctgttctgtaaagggccaaagtgtaaatattttggccatggaattcctgttttaactactcaacctgccgtgtcggggcatttttgcgcagtcatagatgatgagtagacaaatgagtgtggttgcatgccaataaaactgcatttacaaaaaccgtgggatttggcctgagggccatagtttgctgacccctgttcagatgaagaagtcggaatctatgtaaatttcttagctgggcgcaatggttcctcatgcctataatcccagcacttgggaggcccaggagggaagactgcttgaactaggagttcaagaccagcctaggcaacatagcaagaccctgtttctacaaaaaaaaaaaaaaagttttaattagccaggcatggtggtgactgtctgtgagcccaggtacccaggaggcggaggcaagcaggttgcttgaggccaggaattcaagaccagcatgggcaacatagctagactctgtctctacaaataaattttaaaaattagctagtcatggtggtgcctgcctgtgatcctagtttctcagaaggccaaggcaggaggctcacttgaggccaggaaatcaagaccagcctgggcaacatagtgagactctgtctctacaaacaaatttttcaattagctgggcatggtggcacctgcctgtgattccagctacttggggaacctaggtgggaggactgctccaggccatgacttggaggctgcagtaagctaggactaaacctctgcactccagcctgggtgacagagcaaaatcctgtctctaaaaagaaataaaaattggaaaaaaaaaaaaaaaaaaaaagggccggacacggtggctcatgcccgtaatcccagcactctgggaggctgaggtaggtggatctcttgaggtcaggagtttgggaccagcctgg

SEQ ID NO: 66920 - DNA, 2474 bp, Homo sapiens
acacgtgggagaggggcccatggggtcagggggaacgaaaggctcactcaaggtcaaaggctccttcatgaagcgcagggctgaggggagaggaggggtcaaggagacagcagacaagggacagtagtccagattcttgggcagaacgggacacacagaggctcaagtcctggctctggcactgactttagggcaagggagttatgcgtcctacatgagcctcagtttactcctctgtgaaatgggtgcataactgtatctgcctccgggggccactgtgacagtccagagagataagatagactaggctgtggcgtgcggtgataccaattacaataaatagggtaaaaaaccgccactacttctgctacaattgctgctgttgctaaggctttagaatttgcctccggacatctggaaacagaacccaaaagggtaaacatggacctagagtccggggtggccacgggcctagatccaaggtagttgggtagaggggggctctgcagtccctgaccccaggcagcgtcacccaccggtgaggcactcagggcgcttggctctacctacaccatatgcgctcgggggacttggctgttcggggctgtccagacccagtgaccccacttcccggccgcgacccaaagatgacgcgtgtcgtgtctccggagcgacttgggctcggaggggccggggcacgggtcggaggcgcgctccagagaggagcccgcggcggggcgggcaccggggcaaggttcctcgggctcaggtcgggcacgcagggcgcggaggcgcgagcccgggcgggcaaaggccaaggtcagaggcttcccgctccccctacgcgatgcaggagctaccgtcctggccaccgccccccgcccctggggagggttctcagtccacaagcgggggctcgattttggcttgggtggggtcctctccccatcgcggcgctccccgcccacgcccgcgcccccagactcaccctctccggggtacaggtggcccgcggcgcccagtagcagcgcggccaccgccaccagcagcggcgcggccgccgccccccgccggcccccggtggccatggctgcgggagcgcggggtctcctcggatcagagcgcgcggcgctggcccgcgggggtcatgctccgaggcggccacccaagaggcgctgggggccgcgcgtccttctcttccacgcccgcgacccgcgggccgcagcccccctgccggggagggcccagaggcagccccgggaagggcgcgcgcggcttcgccagctacaaatactgagcggaggcccttgcggtggtggccccgaccccccggccgctgcggcccgggccccgtcccaggatctcggggcccggagctccgcgctgcgcccgggactgtctctcggctctcggccccgcgcgctctgggtcgcgatctgcgggctccgggacagagggacgcgcggaccgacggactagctgactggcgggcgggcacctgggctggcgggtggcgggcgggcggcgggagagagggctgctcgggcccgtaaacaacgcggcccgtcagctgggccccgtgcgggccgcgggaaaaggcggcgcggatctggcctaggaagggactctgcgcccgggagaggcccaggagagggagggaaagcttgcaggggagggaggtgccgcccggccccgccccgccccgcccgcctccccgcctccctgtgccgggccccgcgcgggaggccctgggcgcgccgggaccgagggcgcgccccagatccgcgcgccctacagccccgagtctcctccagtttcagacccccggaggcgccccacaggcccgacgcagcggcacagatcctttctctaccattttgctattttgttcatagtgggctttggaggattcctgttgattttttaaaaaatactgcattaaaatgtttattttggtgactcgaggtggttttggtttctttctttttttttttttttcactcccttaaattttgcaccccaggcgagtagtgtctcactcgcctttcctcagtccgggcctggccagcgacactcgtcccagagcgcgtgggcgcccccagatgtcccgcccgcgagtgcgccccggcccaggggcgagacccaagccaggcccctggggacagccacgtgcccgcgtgcccagtgcgctccctgtgttcaagttggagaaatgacacctggaaaaatgtgcagacgcttctgaaagggcaaagacgacgccaaagaagacgccggagacctcgaatagggcgcaggtggacatctctgattttcagcagaccagcctgtatgtgtctgaagtctagcaacgacattcaccaacaaggcgggacagcggttccacctaccttactgcaggagaggaaggggctttcagtataggaaagccagaactcaatgggaggagggttcctccacccctcactcctgtg

SEQ ID NO: 66921 - DNA, 528 bp, Homo sapiens
tttctttctttttttttccttttgacagaatcttgctgtcacccaggcaggaatgcagtggtgcaatcctagcttactgcagccttgaactcctggcctcaagcaatcctcctgccttggcctcccaaggtgctaggattacaggcatgcgccaccatgattggccttgaaattcttattcgttttctgtgtcttctccccttcccgtgaaggcggaaatcttttcggtcttgtttcactgcttaaacccagtgcctgacaaatctgttgcttaataaatatttgttgagtgggagaatcaacaagcaataagtaataggggatttttcagtgagcaaaataaacatgacccatttccttatggagttcacaactgagccagggagagagcccttaaaataattgagtgtgtaatgagctgagggaaatgggaggtgcatagggaggggtttgctgaggacatggggttttttgtttgtttgttttttgatggatcttactctgttgcccaggctggagtgcagtggc

SEQ ID NO: 66922 - DNA, 1741 bp, Homo sapiens
tcccacctcagcctctggaggcatgatcatagctcaccgcagcctggacctcccaggctcaagtcatcctcccacctcagcctctggaggagttgggaccacaggcaggcgcctccatgccctgctcattttaaaaaatgttttgtagagatggggtcttgctatgttgcccagactggtggtcctgaactcctgggatgaagtgatccccccaccactccctgatgctgcttcttttttctcaggtgacagaccctgccctctccatttcttggactctccccgctaggactccccaccactgggagtgccccccttaggtacttccaatcctaacgagcccgtaggagcccactgacaacccctccaggcatccgttgattcttccaaaacacccccagctccactgtcctcccttggggtccccttaaccccgctatcctccctcggggtcccccaactccgctgtcctccctcggggtccccccaaccccgctgtcctcccttggggtcccccaaccccgctgtcctccctcagggtccccctaactgtgctgtaccccccttgagattctccaaaccgctgtcctcctcaggactccctccccagccgcgctaatcacccaggcttccgttaaccccacaaaacgcccacctaaccctgctgctctccctctggatccccgcaacccagctgtcccctcagagcccccggccctactgacagccaggctcgcattgctctccttcaaaaagccccccaaccccgctgacccgcccctcaaaagtcgccctcaccctcgccgcgagcaccctcccacttcggtgcccgcgcccctctcaaggccgagccgacgccccctcaccacggctcggggagcagcagccccaggtccccgggagcgccccgccctcgagggcacgcctccttccgggtcacgccctctgccccgcctccgaggcgggatcgcgcatgcgctgctctcctcgcgcggcttcccgcttccggctcccagctgctagctactgtggatctgggggggccggacggaggcatcggaggcggctgcgagagtggcagaggagctggcggagagcggcctgcgggcgatcgggccgaggtgaggacggcggcggggcggtcccgaggaaaacggggctcaggagggggccctcggtctcttcagggggtggcctggggcgcgggacccccggggctgcctcgggcctcccgccggctcctgggggacttctccaggcaggcgaacgggtgctggggtgcaggctgctccttcaatgcatggaggctctaggcggcgattgcagggtgcagaggtgcagacgatgcccgcccgctccgtccgagccccagccagtcctggggtgctacggcttactctcctccaggagaggagaggaggggtcacttgggccccagcctctgctcctcgttcaggagcgcccggggcaggaccagggatggaatggaacccaccacaatacccagcaccgtcgtatttcaggcctcccgggagaaccctcacaccccggagcagacagccctccctggcagggagcgtttgggtgcaaaaccgtgagaactatctgtgccatgggttttagtttcttgtataagaactcagttggtgctttcattgcggacgggaacgagaagctttcccctggtccttacatgtttcgttttgttttacgtttttaaatttcaacttttatttgagat

SEQ ID NO: 66923 - DNA, 1277 bp, Homo sapiens
tcatttttaaatggcataccttagagaagcagaaaagagaccgggcaccatggctcacacctgtaatcccaacaccttgggaggtcgaggtgggcagagaggccaggagttcgagaccagcctggccaacagggtgaaaccccatctctactaagaaatacaaaaattagctgggcgtggtggcctgcgcctgtaatcccagctacttgggaggctgaggcaggagaatcgcttgaacccgcaaggcagaggttgcagtgagccgagatcacgccattgcactccagcctgggcaacagagctagactctgtctcaaaaaaaaaaaaaaaaataaagaaagaaagaaaagagattctttggttccttctctctttcttgcttaaatcgacttgagaatgtccccactttgaaaggggaagtagcacatacattgtttctggcatagctgtagtataattttcattcttgtcacacagtagcaattacggcttcaaggccattgccctttgtgggccagggccgtggtgactggctgtgcctccctgggtgtttacctagcacatgtttaacatagctcagatcgtgtgtcaagatctccctcattctcactcatcctgggtcatgtttctatctcttcaaactctatgacttacaaaacatttttgctgccacctctctgaaaatcatttaaaagcccagagaccttatatgaagtccagccaatcgctgtttctttgttatttgttaggtaaactttactttccccctgagacggtcaagaactactgtgtttgaaaaccctctctctaggtgcaaaacagcaccagtggaagcctcgcagctgcctggaggaattttttgaggggaggattgtggctgactgggtgagggagggaaactgggtaaaataatgtcctccgagagcattcggtgacagcagttgttctcatttttgtgatgcaaattaagttgtatgtgaactaaattaaatttgcttgcttctctgcttttgtcagagatagattcatagtttcaactgagtatagagttctagtctgattatgttcaatatgttcaaagcagtagatacactaatgtttttttttccttcttttttttttttgagacagagttttgctctgtgccccagcctggagtgcagtggcgcgatcttggcccactgcaagctccacctccgggttcacgccattctcctgcctcagcctaccgagtagctgggactacaggtgcctgccaccacgcctggctaattttt

SEQ ID NO: 66924 - DNA, 1381 bp, Homo sapiens
aatacaaaaaaatagcagggagtggtggcgggcgcctgtagtcccagctactcgggagtgctgaggcaggagaatcgcttgaacccgggaagcggaggctgcagtgagcagagatcgcaccactgcactccagccaaaataaataaatacataaatgtccaatgctagggcaccgcatttgagcctagctcggacggggcctctgcgacggagtatcctgggcgaccccgtcccctctctggcccgtttcccagtctctgagcttgggccaaactctaggacctccggccccggtccgcccctgcctcaccaggcggtcccggcccctgtacgactccagcgccgacgccaggccgctcagcgacgccatggcaactccgtgacgtcaccgcgacgtcggcgcgccgcgccagggggcggggccaggccggggtaccgggagcgccccaaaggcttgcgcgcaggcgcggccgcaggcctttgtccccctgaccggctttttgtccgctgtaggggagggacagagtttgcagaggtggggccgacacgtgtgtgctctccaggcctgcagaccctggatcatcctcggagtttgctgcattctgccccacggcggtttggccaactacccacgcacaaaaaaatatatttctaagtttaaccaactacccacacgctccaaaaatattccaagcaaaaccaccaacctgttcgcagtggttcaaggagagattttcctttttagtttttgtgcttcaccttttctgcactgtctgcctgcccgtagtgagcaggaatgactgctgtaatatcacaacaaggcatctttcgacgttaaggaaagacgttatctttggacgttaagaattgttctagaatacataaataaaaaataaaaatgcacaattcagtgacattagtacatgcacatgttggacaaccatcaccccttgctagtttcggggtatttttatcacccccaagagagacccccgtaggagaccagcatatgcccctctgaaatatgcgaccttggtgtaggattattttgagctgagatcaatgaagctgataccggaaaagctctctgttcttccctgatttgcctcaaagcaggacctaaaggtacaaaggtgccctcctcccctctctaccaggaaggacaaaggttgatcaccagggacacctttagactcttgtctggagacgtcttttttttttttttctttttttttgagacggagtcttgctctgtccccaaagctagagtgcagtagcgccatctctgctcactgcgtcctccgcttccctggttcaagcgattctcgtgcctcagcttcccaagtagctgggatcacagctgtgcaccactgtgcccggc

SEQ ID NO: 66925 - DNA, 1047 bp, Homo sapiens
gaccttggggaatcctcccatctcagcctcctaaagtgctgggattacaggcatgagccactgcgcccagccacggggtcactgttttcacagcagaaaaattgaagccaagccagctgcagtggcctgtgcctgtggtcccagctactcaggagtctgaggcacgagaatcgattgaatccaggaggtggaggttgcagtgaaccgagatcacgccactgcactccagcctgggcgtcagcaagacccatctctaaaaaagtaaaacaaaaaaaaatccaaagccaaggtccagacatgcagaggaaagaggtcactggccgcaaagcctgctgctgcatgaataagcagatccctcctctcaggcccaagagccttggaacagcgcaatgcatttgcccgaatgcttcctgtgtgccgggtcccgctctaggcaacagagatacagcagtgagctttgcagacacagcccagccctcccagcgtcccccatctggctaggtctgagctcgacctttgaaaaagacacaggagctggcctggtgttcacagctggccttggtgttgctaggagctggcctggcagtcaaagcagggccctggtgtcctcctgctggacataaacaatctcacatgacgccgacatcagacaaggccactctgtgaccgcggcagagcaagacaaaacaagcctgctccataatcatgtctgaacacaggcaaaacacgaacactgtccacactatcagagtaactggacctcctctgctactagctaataccagcaacggctgttccttaccaagcacagctttagtcttctgacttctttctttctttctttccttccttccttccctccttcccctccctccctccttccttccttcttccttcctttccctccctccctgcttccttccctccttctctccctccctccttccctccttctttccttcttccttcctttccctcccttcctccctccttccttcccttcgtccttccttccttccttccagctcccagcttccctggagctct

SEQ ID NO: 66926 - DNA, 1467 bp, Homo sapiens
gcaaaaaggaaaaattggaggaaggccaggttaagcaaaaatagacatgtttttagattgcagagctgagaggcttggctgtgcctatgtgcgctgcaagtctccaagaacaacatgtgtagagttttacgaacaaagatagagtcagagacatgggcaggaggcagagacagagagagagagacagacagacacagagagagatagaggcagagaaagcaacagaggcaaagagattggaacacagagaaagagatggggacagagacacagagaaaggaacagagatgggaagacagggacagagacagagaatgaacagagatagagagatagggacggagagagacagagagagggacagggatggagagaaagagatagggccagggccacagagggactgagacaggcccaggaggagactagggatggggccagggctgcgtgcgggcggggcacggtgcagacaaaggcgcggccgcgcggtcggggtggcctggccggggacaaaggcctgcccggggggcgggggcagcgatggcgacggccgcggcgggcgcgggcgaactacaagtcccagcagctcccgctgcggccctcggccggcccctctcgctccccgggagcgcctggcggggccgctgggccgagggggccgccggcggggctggcgggcggggggcttcctgcgggcccggggggagccggcggccggcgcgggcgcggcgggccgggcaggggcgaggggcgccgggtgagtgtccctgcgagcgggctggggccggggcggggggctgggtggggggcgggcgggcgggggagctccaggcgcggggcgcagcccggggcgacctctaatcgtcccccgccctgcgcgccgccggccctggcccaggcgagcgggggtcgcgggagcgatggggaggggactctgcggccagctccggcctagcgcacccatcccgccgctggggcccggggggaaagggccaggaggttgggagccttcaatcgggcggggtggggggcgcccgccagctctggggtctggagctcaggacgccccctccctaggaggcgatccaggaccccctcccctcctgattcgaggtattgttcccacctcccgcctggggtctggagttcaggaggccctgtcctcaaaagggggacctaggggttccctcttcccccaggaccctaggaagggtcccagcgattgttcccttgcccctccagtcttggggtctgcagttctggaagctcctttccctggaggtgatccaggggtccacctgccctcacccctgggaactcaggaaagacttaagtgatttctcctcccaccttccagttaagagatgggaattcagggggctccttcccctggaggcaatctaagggttcctctgcccctgatgcaggaggggtcccaggtcttgtttcccccactctccaactatg

SEQ ID NO: 66927 - DNA, 1407 bp, Homo sapiens
agagcaatgggaagccgagggcaggttctcgcaggaaggataggaattattctttgaagatgcttgtggctgctgggtagagagtggagtggagggaggctgagatcggggaggaggttgctgcaaagatccaggccaggaatgttggaagactctgggctgggggccatggggtggggataagtggttctatttgatacataattaggaaatcgtgtttgctgaagatgcgcaggagaagggtaaaaggagtttctgggagaaagaggaagacagcgttgagatagtaggcagggtcatcaccaggcaccaaggaggataaggggtcaagctctggacatggaagtcacaagcctggcaccggattcggggcatggccgggagccagggcagagctcgtcgttgccaaactcagagtcagcccatcccccgccacccagagcgcgtcggcgctaggacctagcgactgccttcgacccagagggcgccggcagaggcacgcatgcgcgctgttccggcaggggttgtcgtggcgcagggggcgggaccagaggcggtcacgtgaggggctctgggctaccgggtcacgtgaccgaggcacagatcagctgatgccggagggtttgaagccgcgccgcgagggagcgaggtcgcagtgacagcggcgggcgatcggacccaggctgccccgccgtacccgcctgcgtcccgcgctcccgccccagcatgacagccccggcgggtccgcgcggctcaggtgagggcgcgggcggcaccgtggggccccgaactcaggcgggcgggctgtgtctcccacctggggcggcggagctcctagtctctttttttctaagctccagcgctgacttttcacggtggagaaaagggcagacggctcctagaacttgggcggcgggtgggcaccagcctctccaattcttcctcctgaacccaggctctgctgggttcccaaactcaggcagggatcgcgccgggccgccagcttctccctctggggcggcgaggttcctgggattcccactgggagcctaggttccgattgctcaacttcgtctggaactcagacagcgggcaccagcttctccaacccgcacgtgagactcccaggcttcccctcctgattccaggggacaaatgctcagcttccctaagctcaagcctggagagctggagggattgcccccaggcgattaactcagttttagctttccaaaccgctggaagcgcagccttcttaaattcgggcttctagccaattctgatgccacccctcctcggggaggctggaggaagaccccttgtgttagcttccccttctggagctagctggggacccctacctgatagatgtcccggtgtcccagctagtagggtctggggtgggtt

SEQ ID NO: 66928 - DNA, 3190 bp, Homo sapiens
gaagcgatgcagatatggctggaggggagggcggacttcaagggccttggaggttgggagccactttcaggctgagcctcccggcttctctccccagcatcccggcggcgcaggcgcagaggagagcgagctgcaggcctacatcgcacagtgccaggacagccccacctccggcaagttccgccgcgggagcggctcggcctgcagccttctctgctgctgcggaaggttcgagtcccgggtctggcacattcagattggaggttagggaatggggaaaggggagcgagccagagaaaactgacgcccctcttccctgcttccttcctccagggacccctcggaggagcattcgctgctggtgaattgattcgacctgactgccgttggaccgtaggccctggactgcagagacccccgcccccgaccccgcttatttatttgtagggtttgcttttaaggatcggctccctgtcgcgcccgaggagggcctggacctttcgtgtcggacccttgggggcggggagactgggtggggagggtgttgaataaaagggaaaataaatgtgtcgttttcatttttagcgggaggagcagtccttgcgttaagcggtgtgaggccctttaaggcgcggccacactcagcatggcggcctcagtcggccttccaagcatggcgcggggaggaggggtgggagggtcgggagggactgcggtgcgactaggagtgaataatttaaaggggccgtgcctgcggagccgggcggaacgctagcggtgttggcgcggagtggaccccggctgcggcccctgggtgagtctgggtttccgttagcctcgcaggggtgtcccttcgagggtcgttagcgagcctccgctttcccacgatctgtcctccgattcctgttaactctagactttctgatgttcccataccccccacgtctcggcaggtgtttccacaccggtagccagctgtgccctgaggtggaagaggaccggccacccaggaattttccaagtaacgactcggagtctccgggattcctatctcccggcccccgaatttccattaatattctagcgatgtcagaaacatcctcagcttcccagaaaaatcccagtaatattccagcatctctcagtatcttccaaggagcccggacgccctccccaggcccgctctcataagcaccccaggaatgtgcccacccacctcctggttttcccagcagtagtattgtaatcctcagaatctcagtaactttccagtgaccccgcatccccacccactaatcccagcgtctctggttacgcctcccagcaatggcgccaccatcggtcccggagtcccagtgatgctctgtgccatagagcccccataacttcactactacgtgatagtaaatccccggcaaaaaccagcagcgccttgcaagcccacgccaccccaagcatcccaggactcttctgaaacgtgggtatcagacgccttccgcggatgccccggcagtactcccgtgcctcccagctcctgggtcttccccggggcaggcttgcgtcgggagccgagtatctaggtgcccactcccggaccccacggtttgcgggcccgttttcctggggtggggcattcagtcttcgacggagtagggggtgcggcctggggggtggggtggtcaggcttgatcaaccctgcagagggcagtgacccgggaggaagtcaccaggtgcagaggaccgtgccctgtggggacctgcctgcaggctgctgacagtgggtaccaggtcggcctttggccccggggtggggttggacaggcgggcgtctggtaggccctacgcgtaggcgaagggagcaggaagccggggacccgcctcatctcctggccagggccgagaggtcggtttgctccatcccttagtcccgcagcgcccctctagcctcgcccctggcagctggagacgcttcccccgccaccccagagggcagggcttgagctgggggcagggcttgaggcaggggagaggtgggcccagattgacgacttgcacgggttccttcgactccttgatttcccaggactccgggctaccagatcggccgtccagctggaatcaaccgatggaggctccgctgcaaactggaatggtaaggggtggggcggagaccgggtaggtgccggcgtggggcgccaagaggactacaactcccggcgtgctcagcgcgcattacgtggtctggcgataacgcgctgcgtccgctcgggcggaactacgtttcccggcatgcactgcgggccgccgggcctcagggaagagtcgcgcccccggggagggagcagcactggcccattctgcagatggggacatcgagtcacgggctggctacgaactcctcgggggcgaaggtggcggagagggatgggttccaggacgtcctggcgcccggggaaggctcggcgggacggatttgcggtgcgcagccagtgccgttcgtccctcaggtgcttggcgtgatgatcggggccggagtggcggtggtggtcacggccgtgctcatcctcctggtggtgcggaggctgcgagtgccaagtgagcacccgaggggcccctcttgggaggctgtatggtggggggcccaaatgcccgggtcccgaggcggcagagatggggatttgctggcgtctgttcgcggtaccccagctctggcagggtggagtctgcacagagctcggagtgcccctgtccccacctatccccagaaaccccagccccggatggcccccggtatcggttccggaagagggacaaagtgctcttctatggccggaagattatgcggaaggtgagtccgggacccctggggtccgccctgaccacacagaggccgcgccccttccctatttacacttcttagtgtccgccaccgctccttccttgatggagaccccctggatccgtctgcctcttctccaaggtctgaattagcaattcacccatctccgccttcattctcccaggtgtcacaatccacctcctccctcgtggatacctctgtctccgccacctcccggccacgcatgaggaagaaactgaagatgctcaacattgccaagaagtaaggctgtgctgggtgtgacctggtattaggggttatctcaggggccttttgagtaatcagcttaca

SEQ ID NO: 66929 - DNA, 1716 bp, Homo sapiens
cactcagtcctccgcaagctccctccaccatcgccgcagtccaggccgcccccctccgccccgcccctgctgctccgtgcacactgcagtgaggggcccgggcggggcgcaggggcgcgccagggtccgggtccgggttcgggggcggggcgcacctgggctcctccccggggcgggcccgacgcagcgtcgccagcgcaagcggccgcacctggctcagcagcggcggcggcggcggcggcggcagcggcggtagcagcagcgggcccggctggggcgcgagcgcggcgcagcccagcccagcccagtccgagcgcggacccggcgcccgcagccccggcgccgccatggtggaggcggcgccccccgggcccgggccgctgcggaggacctttctagtgcccgagatcaagtcgctggaccagtacgatttctcgcgggccaaggcggcggccagcctggcgtgggtgctgcgggccgcgttcgggggcgcaggtaccggggctcgggggaccggggtcgggggcggcgggccgggcgcggcaggtgctgggggggggcggggcgccgggccgggaaggcagggggccgtgggaacaatagcgccggccgccgggggtccccgggctcgggcccctgccgcgccggggcctccgagcttcctgctcggcccgggcggtggactttgccccgccggctgcgggagcgcggtgggggtggggcccgcggcccagctccgcgcgggggtccccggcgtccaagcctccaggtgagccgggcggggtctgcgggccgggtggggtctccccgtgcggacctctcgttcccgcctcccgcacccccaaggccttcccttgcacgccttcttctcttttacacacatcacgcccctgcgaggatctcctctcggtctcttcccccgccacacaccctggagacccagaccccgacctcgctggggggtctcgagcgctccggtctccaccaccgcacgacccccaggccccaacacacaccccgcgtcggccctggccgcgctgcgggcggcgaccggggagctctgggaaccccctttcgcctccatagccccctccagcgcctggcagctgcgacttatggccccattttactggggaggttggcgagcccagctgaagggaaatgggtagtacaagatcgcctggggtgggccccccgctcctcccggctgcggggccttctcccattagagcagatccttcactccctcccccaggcccgcttgcctgagagcccgagccaccctaatggggaggatgccgtaatcccgggtccccgggattagaggccctggaaacactcagtctcggctttgggcagcttcacaaccccaggccagagctaggagtcagggcctggccagagaagacaggggttaattaaggtctgggctttccagcggggagctgtgggggtacatccttttctcccactggttctgcccactggtgttggcacagcccatcccccctctccctggccttcccagatcaacctgttctgggtgtgggtctcagtgacagctgtccgtctcctggttccgccccagcctgtccctctttctcccagacagtctctgtctgcgtcgttccatgcatgcatttcccactctggggtctacctccctgcagatatttgcttgaggaagaaagagattgggcattggacagccaggac

SEQ ID NO: 66930 - DNA, 1586 bp, Homo sapiens
gactcagggctcagctcagtccccttgtctgtcctcccccacttcttgaataaaataatttaaagagaagttgaaccttgtccccccctccgaggctggccggggtcccacactccctggctgtgtttttagtctcctgttctttctcaaaccaactcctgtcttcaacccccataatcccctaatgcagcttcagccagggcactcccagcccccagccagggctgtttcgaagctgcctctgaactgatctctcaggctcgaggtgtcccactggcccttcctgtggccttggccacccccgcttgctggattctcctggtctgtgtggctgttgttactggccctaaccagcgtttggcatggggccaacttctaacttgatcttgtctcccctggccagcctggtgtttccaggcctggcatctacctctgggccagtgattccaggtttctctgagatctgtgtttgacaatccagttgccccctgccattgcctgggtgtctctctcagatgcaaggcctgccctgcaacccaggctggcactggcttcccagctgccgcccagttctacacagctcagccctcccctcctgtctcactcgcttctctccagccctgtcacctccctgcaaagtccaagccaatggcctgggcctccccatgtccccagctgcctcctgcccacacagcagcctgtgtgacccgttcgaagcacaaatctgattatatcccttgatacttaaaaccccttaatagcctacagcccgctaatggcttcccaggcttaggactaaggaccacgccctggtcctgggccgtgcacaaggtctggcgcctggcccccgtccaggcacagaaacgcgttactaatcagttcccagagctgggccagagcctgcctgactccaagacttgagggcaagggccagtccctagtggggaacagacagtgggtgccaccccagggaggcggcagctgcctggggccacagaagggctctgagaggcaggggctggcgagacctgggcagccaggggctggattgcccttcccaggctacagaggctcaaggaagtttccgggcaggacccactccaaggccccaggcagcggagggactggcctctcgagtccagaactggctctgcggggtgaggccgggcagtatctggcctggggcccagccgccccacctcccacagcagccaatcccggcccagggccaggcactcctgagctgtactccctcgggcacctgggcagcaggaaggaggctcagaccatgatgtacaaacgtagctgtattggggagggggtggggaggggggatgggggagggacgggtcagtcttccttcaggctcccaaacactgcggctggcacgctctgctgctccagccgaacctctgtggggaaggcgggagccagtcaccctcctggcgttggcctgtcccccgaggcccaccctggtaatgccaccgtccccgccccagccgggccctcaccgttgggctccaggtccatctcgtcctcgtcctcgtcctcgcccagctggatctcctcggggttgacctgctgtg

SEQ ID NO: 66931 - DNA, 2058 bp, Homo sapiens
gtcattagggctctgggccaggaatgagtccgcatcaccactcgctttctgccccagatggtcagactccttagataccaaggccctggcccagatgccagtcctggacaccagaccccacttcttcaaaacgtgcctcttcccagacaccaggcctttggcccctcagactcccactgtcaccatctgacccatctccaccccaggcccagatgaccagatctttaccccagccaccagggctctcaggtccagattccaagccactagccccgcccccaggatcccactagccagcgtctagctcaactctgccccagaaattaaaagctaggcctttatctcacaggaggagttatacaccagaagccaagcctttaactctgcacaccaagaatctggtgaagatgtcacgcctctactccagagagtaagtatttcactggccatcgcctgacaagctccacatcaccagggttcttctagcctggccaccaccccagaaactgtcatgctgcagtccaggcctagagaccgctatccagaaaaccaagccttcatcccagaaaccagaaccctggcctcgtaagcaagcctttacttcagacaccgatcttcacctctcaaggttcagttatgcgatcttcctcctctcccattccctgcacgcccccatttccgcccctggttcgggaggctagacgcttcccttcgacagtggttttctactcagacccgaagatacaacaccatatttttactcctggacagttcggtgcggacatgacgatccggtctctggcccattagggttcccagaccttggcctggcagtttcggcctaaatctccttgccgacccagcctcgatcccctgcggcgtccaggtcccaatgccccaacgcaggccacccccggctcctctgtggactcacgaagacaaggtccggccgctcgggccgcgagagtcgcgccatcaccaccatttttctggatgcccaggtacaggagagagtcgcgcgcttatgacgtctaccactgacggcccgcccctccgagccagacccgttttctattggttaaatcatttttgacggacaggcccacgttattgacttcttttcgacgacgccagcgaccggaagcagaatagaggcgccagaagatgcgccatcaggatacacattggccaatcagcttcagcaatggagcgtgcaaaacaccagtgagcttctgtcttgctggagggtcggctttgggcggaactggctttgttgaccgggagaaacgagatgggggtgaagctggagatatttcgggtcagtggacacaggagtgggttgggaggctgggcaggggatcttcctggatctgaagatgaggttggaaatggggggacttcaaaggaagagggagctccaaggagaaagctcttaagatttgagaggaacctttctggttggaaatccaggagaggggacgctgggctgggggggttctcggatttgggcttctgggtttgggggctgtgagagggctggtccgaggaaggacctcagagaggggtgagctgagaagggggctctaaagaaggaagacttaagatcctgggggagctctcgggctcgtggtgggtgggtgtctatgacagggagattcctagacttcgagaagtggagttgaagagtgacgcctcctgggtttgggggtgctcccgggatcttaagtggggatgggtaatgaggtctcgaggagatgcttttgattgtagctggggcgtctgtgtgtctgtctgtgtttgagaggaagactccagctcagagggaactttcaggaatgaggcctcctggattataggagttaggttttagggtgcgaggtttctgtacccttggtgggagttctgggattcttgggtcggccgtaacgaggcgcttctggactctgcagtaggatgggtcccccaggctctgaggagcctctgcacattgcttggggggagctcacctcacccaccctctgccattccagatgataatctacctcactttccctgtgg

SEQ ID NO: 66932 - DNA, 1162 bp, Homo sapiens
acgcaagccaggaagtgtgtgtctgaactcccatctgtgagcgtgtcgtcgaggtgtgcacctccagcgacttcgtgctcggcagcgcggacgcacctgcccgtcctccccgccagggactcaacttcctgggcctgggcgagaaccgacggcggggaggggccaggtgcgcagggggcggggacagggcccgcggggcggggtccacgtgggtgacgcgcggggccacgcccccaccttgggacacacccggaagcggcggcggcgcccctcggggaagatggcgccctcggggctgaaggcggtggtgggggaaagtgagtgcctctccggggccgggctctggcgtccggtgtgggacgggggtcggggacgcacgggctctgggatcctgggtttcatggcggctgggagttgggggccgggctgggcgtccgagcacctgaccctcgagggggcgggcggggacgggttcccagctggacgcccctgctctccggtgccagaacagaacaaaattggggggccggactccggggacccaaaggggacgggtagagtgtggcggaggctggggcccggactcctgggcctcctagggtgcctgccgggggaggagggcacagctggatgcccacactctaggatctcttaagccgggcaaagttcaggggctggattcttggggcctcctagggctctggtcagcgaccctaggtgctgtgagcgctcaggggacgtgtccaggccccacaggggtggtgtaggggatgtcttcctccttgccccatttccaggagcgccttgcagctggaggacgcaggcgtccaggcctcaccggccccggttcttgggggaagggtggagggcgcctcttcctccaccccggggagttccggcctcagctgctccttccgccctggccgtcttgataacagtggacatgacacagtggacgtggctgggcggggccaccccgttacttctctccactctctcctctaggcagggcggtctgtagctcaaacccctttaattgggggagattagaaaaaagtgattccattttacagatgaggaaactgagaccggaggtcagtgggatagcctcagctaggcatgcctcagagctgggaaccaggggtcctacattttagaccag

SEQ ID NO: 66933 - DNA, 637 bp, Homo sapiens
caaagtgctgggattacaggagtgagccaccgcgcccggccaatactcgttttaataaaaattttaaaatgtattcacgcctaactgggtagttacttgatacaataaatgatcttttctagattaagaaaaaagaaaaaaaaacatttaaactcaatttcctgggaagccgcagttttgcgccgggagtggcttgtgtaggcacgcgctgcgaacgccagggggcgctgcggcgcaatttcccggtttctttgatcttccgcgtctgtaactggagatgaggtgacccgaattagacacgacggggaagtaggtcaggggttattccgtggttctcagcggagacaaaagtctgttgcttaaaccgcctctgcctctgctccttacttatacccaggtgatgcaatgtcttcacactaaaggcaaatattgagtctacaaatatttatgtgtccctgtgggcggcggcagctgacaatatcgggtcctaacgagcacgaagtcaagctccctctgcacgctttatgcagatcctcaaaaccctcctgtgaggatcgctggagcctaggagttcgaggctgcagtgagctatgattgtgcctctgccctccagcctgggtgagaaagcgagaagttg

SEQ ID NO: 66934 - DNA, 1689 bp, Homo sapiens
ggccacatggatgcacttgagacaattgaacccatccccaaggacataggagtgcctggaaaagccaacaggtgtgtccatgtgcaagggtatacattggcccattgtcatacgtgcgccctgagcaggtgactaggcctgcaagcgtcccctccagcgtgggccacccagagccagcgagaccctggccacgcgcggagcagccatcacggccgtgggccacgtccctgggtccggctccgcggactcgcgcgcccccctgcggccgctctcaggcaccgctgcgcgcgccccgcccacacgcctggcccgtcgagcgcctgcgcacgcagcgccttttacggcgccgtaaagcagctcggccgagcagactgctgcggttcctggtgagaccctacccacccccctgcccgcgccgggcctcgtccgctccccggccccttccccgcgggcgtgtgggtcccgggctggggtctcggcgtccgcgatcccgagcccgctcgcttcggcccccctcaggaggctgcgaggagggtgggtttctccccagtgtagaggtacggggcgagggtcgcggggccctgaccctacggcagttcagctcacttcagcccccatcgcagcccggtggtggggtcttaacgatccctctcccatctcgcgcgcccagggccctcgccacggacggatctgcatgctggggcgggggcggcccggagcccctgggacacccctccccgctggttctcccacctcccacgcagacctcgttggggtcggcttagcatccacacacctccccatgcatggtgggggcgggttctcagctgcccctccgatcccgtctcggcgcccgctccccaccccatttctcttcaggagccccctaccccatctccctctccccgcaccgacagctgatgggaggaccacagttgctcagcatccagcttcctttctggagagcacgggggtgggaggctcccaacacctctgggcccctcctcccagccttcagaacccaggcccatccgcgtctcaaaggacgaagggttcctgcgtgacacatcggagctgcctgcctgagggcttggggttgggggttacccgcccctcctgcctggccccacggatcccccctgttaaagcccccaaccctcctggcttttggtcttgacacgctcctaccccactcccaccctccaccccctttactctggctttccgcagggggccggcaggaaagttcccgagggtcgtctgtgctggagcgcagggcggggcaggagcgactgcccatatcccctcgtggtgcctcatctttgtcacctccctgccctagatctgacgcccctccccccatacactagttttctagttactcctgtaggtggcggagcgggcaggaaggcgctttcgcaattgaaccgtctgcatgcccgagggttgggtggtttcggcctcctcttctgttccccctcgtgtctctcctcccaccttgtccccactcccgctagcccgctgcctgccgagggtataagactcccccctcccttgatttatctggttacgtgtaatcgaggcgtgttttacgcgcatctctttgcaagtgggaagtcggcactggagcacacaacagtggcatgggtcgagggtgtcccagggcccctcgcggttctccctcctttc

SEQ ID NO: 66935 - DNA, 631 bp, Homo sapiens
acaaaagtctgacaaattgtgagactgtttaacataccccgaggtaaaaccttccaatgatatctggctgcaggttctttattattaactgcagggatggtaaagccaaatttttcgaaatctgcctctgctaaaggaattgtaaaaaaaaaaaaaaaaaaaaaaaaaaaaaaaaagcaatcttttaaatctataataacaagcggccagtctttagggattataatgggggatgggagccctggttgtaaagctcccatcggttgaattacagcgttgaccgctagtaaatcggtcggcatgcgccatctgccggactttttcttaattacaaatactggggaattccaaggagaaaaagtgggtgtgaaacatgtcctttttctagtaattctttaactatttcataaagcgcccccaatttttccttagggatcggccactgttcgacccagacagggcgctgggtcatccatttttaagggaaattgctccttccccgtaatgaacggcagggcgagcctgaattttaattaactggtggctgagcctgaatcatccctttaccgtaattaacggcaggttttgcaacaatgggcgcggcgaaccgcgtctcaggcttccatgcccg

SEQ ID NO: 66936 - DNA, 1425 bp, Homo sapiens
aggatttctggccacgccccttctcagacccaacccccgagcccctcccttgcttgaccccgccccatctctggcctaggccacgccctcctcttagccccacccccatttcattcaacccaggcctcaagccccaccgcccaggacgccaatgctcccaccaatctcacatacccattggtcagagagtgtcactttcccgccctccttcagtagcattggttccctaggtgtcaatcttctttatggcgcccccagcagttgccagggcccaggtttgaggggcagataataatggacgtctcggggcgtctcgttattgggcagaaagcccggctctgggcggggcttagtgccaaacgcttggccgcgtctgcctggtgttcctcagggccgcagcctttcctcacggacacacccccactttccttgctattggtcttatcaggtgttgatcaataggattcctcattccgatacgcaaaactacctgtccttcaccgcttccctcatttcaattcgctctctcctcagaggcggcaaccttctgaacgtagccagggcccgcctcacggaatggccacggaatggtcagacaccccgtcactcctggctggtgggcggggccagggcgcctgggggcggcgaattggcggatggggcctcgggggcggggcagcggctcctgtcagcgggtgaaatggcagcggcggagccggcggcggccgcggtcccggggggcggctgagggggccgggccggggctgcggggcgaacggcgcggctaggatccggcggctcagcccggggcggcgaggctcggcacggagatggcggcgcgctcggcgcaggtagggcggcgcgggccgggcctcccgggcgcctgctcaggccggcggctccgtgatgcggcccgcggggaaccggcaggaccgcaactcgggccgtcgtgccccggaacccgcgctgggagcctcggcatccccagcccgggaccttcggaggaccctggcccctgcccaccctcgttgccgatccctccggacccctccccaggagctcctgcaggatccccctcccccactccgtcccctccccatgaggaccccgcaggcccaggacccccgtccaccctttgcagtgaccctcaggactcctctccgggaaccccctcagggctccccatccccccactccgccgatcagcccctcagaagcgccccccaagcccaagaacccccgtccaccttctgccctgatctctcaggacccctcccttctggacaacacttgccaccccctccccgcaccccctcacttcacgtcctcctatcttgggcccagaactgcccccacctctccccaaggagaccagcctcagggcctacccgccccccatgctgaccccacaggacccctctctgg

SEQ ID NO: 66937 - DNA, 1282 bp, Homo sapiens
aggctttggctgcaggcagtcccccattccctcccctcacgctcagtctttccattgctccacaaacactgaggacacggcgttgaggacatggcgacaccccgggcagacccgttcctgcccccctccagggcaacagggctcgggcggcccccggtggtcagggcctgcatgttggtgaccaggtgaccggctgtgtccccacagtacttccagagagtgatcccccaccagttcgacagctgcccggacaagctggtcctcaaagcctaccaggtcaagtacaaccccaagaagatgaagaggtcggtgcctgctgggcaaccagggtactggtaagaaggggggacccccgagggcatgacagtaaccacggggccctcccgatctgcaggctggagaaggagtacgcagccatgaagagcaaggagatggaggagcagatcgagatcaaagtgagtccaggggcccaggggcggggacagggatgggaggcctttgggggctgccctccgtactctaaagatcggccgctagggggcgggccttcccagcgcacaggcggacccggcggtccttggcggacaggcctccgcccacctgcgccgtccttcacctgttaggccagctgtgagcgcctcccccgcctgacgccgcggtaaccaagacagtcaaggtccctgccccgctgggccgcccagcgtcatggggaagcaatcaataaaccactgaactagagtgcggactctaaatgctctggacaaggatgtgcacgcggtgggcaaggctgacttgggcagaggctccgggcccagggtgtcgagggctaaaggcccagggcagcagcgtgccttgggggctggaggaattccaagaaggttgcagtggaggaccccgcaaggggaccgccctctggggaaagatggagcacgcagggcccagacaccagggtgtgtagggcagggtgtgggcactcacccggggcccctggttcctggggcaactggcccaccagccctgccaggtcagggggtttcctgagtgtgcaaagcttctctctccttccttgcgcattcttccctttacacgtgattttagttatttactcaacaagcatttattgccgggcgcgatggctcatgcatgtaatcccagcactttgggaggcggaggcaggtggatcacttgaggtcaggagttcgagaccagcctggctaatgcagtgaaaccccgtctctattaaaaatacaaaaattagctgggtgtggtagcacacacctgt

SEQ ID NO: 66938 - DNA, 1016 bp, Homo sapiens
tgccagggtccagccagactgcaaagttgcaaagttctaagacccctgcatctcccgccagccccgagcccaccagggcaaagcagcctaagacggctgtcttcccccaaccctgctgatcgcgcggcgcctggagtagggtcgacctgggcgcgcctgcggcgaggcggggccgagtcgtccgggggcggggcggggcggctccgggtctcctgtccccgcctgccctgactcaccctcgcggcccgcccgggaactctgcgggagtcgcggcagctccgctcccagagacccaggagttgggcccagcgtccctcccggaacggtgagtaggtggctctttgcctctggacaccccacgaggtggcagggtgggggtcgggctgggagtccccgggtctggacaaggggcagagccgctccaggtgcgccggccctgtggccggggcaggccgtcccgacacaccaggagctggggtgggggtgccggccggtgcaaagggaaacctggcccacgaggtgcccgtcctgggagccaggcagacgcggccaagtctcagagtgaagataaacaggctgaagataaacttgactttgggggtctcaaccactttcccctccccttggcatctgggaagacattgacaactcatccccgggagactctcagagctccagaacctaccacttggggtgggttcaaccaagcctgacctctggtgctcttgaacttacacatgtcccagatcttcaagtctgctggcagaggcggcttggaaaaccactcggctgggaatccgcaggcctggggcctgacccaggacgggctacaaagatgccaccctcccccaccctagaccctcagtttctcccttgcataaatggttgaggctcagccggacaccgtgccttacgtctataatcccagcactttgggaggccgaggtgggcaggtcacctgaggtcaggtgtttgagaccagcctggctaacacggtgaaaccccatctctactaa

SEQ ID NO: 66939 - DNA, 2494 bp, Homo sapiens
aaccttttatttcatgtgaccaagtaacacccgtgtgccagaatcaaggatgagtctcatgttctcagagcagaggcacagaaggctgcctggaagacggaaaggtaaagacctcagctataactctacacttgtgtgtgctccacccacaaatcgtcaccagaggagttccgacaagccggtaactctcatcccaaagtgttccctcgttggaccagaagctggaagggcacttggcagagtctgcctggccctggccacctcccgggtgtccgcaaaatcagaacttccttctcgcatctaagagcagagggaagccgctcttggggggatccctgggttccagatgggacatttccccagcacccgtcggaccacttaaaggagtggtttaggctgccgggggcccaagcactggcacctaaccccagcgcccctcctcagataggaattctccacgtccaggcgctgggctcacgttccgggtgcgagagagataaggggggtgtcttgaggttctatgtgggtctggccaacaactctggccttgaccttggccccgtcgccgagggcaggggtcacaccgctgggttcccatggccgtcccctcccccctggcttcggccaactctgagcctgctggggctggcaagaagggaaagggctctcgacggagcctaattacggtgaggaggcggcaccccgctgccagcaggaggctaggaggtaattaagcacaagaggaatcctaataaagcaccatcagtgaggaaggcattccgaagggacgcccaagccgaccgtgaaaagcgaggaggctgaggctgcaccgccgtggagaccagggatcgactgccgctttgggaacgaggttccaggaatgcgcatgcgcaaaagccacgcgggcgaacacggcttcgcctcgctaagcatgcgcgccgttttccccgcccaccgtcctcagaagaatggtgtttcctcgcagcgcctctctcaggagcgatcgggaattggcgcatgcgcactacggtggtggtggcgacgaaggcgggggttgcacgttgcctgcctcgagctctaggtggcgtcatccttcgggctgagccgaagcacgcacgcgcggaggttcgcacgcggagaagggcgggtgcgcgccgcgggcatgcgcggtgcggggcgagacggcggctcgacggggtcatccgggcgcaggcgcagtgcggtgtttgtctgccggactgacgggcggccgggcggtgcgcggcggcggtggcggcggggaagatggcggcgtcctccctggaacagaagctgtcccgcctggaagcaaagctgaagcaggagaaccgggaggcccggcggaggatcgacctcaacctggatatcagcccccagcggcccaggcccagtaagcacggcggcgtgggggagggggcgggcgggcggggcggggcgcgcgccgcgggaggccccgcccccaccacaaggccccgcccccgcttccggggcgctcgctctcctctccgccccccccgctgcgggctcgcggggcgagggtcacggtgacccggggggcgtggagccggcgagctccggggggttcgcaccctcagggcttgggagcccagttcccggacccaggcgaggcccccagctgatgacccgcccccatcgccgtgatcctctgggtcgggcttccccgactccacgcgacagtgaccacatccaggtcgccccgaaaacacagacacgtccctgttgacctgatgctaccactctcgtcatctcagggactgtctggcgcccccctcccccggcctgggggcttgtcagccccgtgcagcgacgatctacgcacacgcgcacgcctggctcggggacacctgaggttacttgaccacatagagcccctccccatctcttctgacccgaggattctccctctcgctctccctgtgaccgtgtctgaggtggggggacgggagggggtcccttctccccctcttggcgacagtgaccatggcattgggctcagcagaccccctcccacatacaccaggccccgcaaatccctgtgaccagtttcactgccaccatcttggtgagcgtgtggtgtctgacctccagaaatgcacatcgacccccagccagcccggtgactttgtcacctgtgttcaagtgatggctccccttcccttcacacccacacccacctgacctggggacacctggggccagtgtgactctaggcctgctcccgccgcgccccagcatacatccacctgctttctgatcagtcccaccacctcggtacctacctccctgacaccttgtcatcctagatcagtacctctcgcttcacacacacctggcctgggaacactgaccatatctagtctcccggctttttccccaagatcctggtctctaaatcctctgggctggaggaaattagattttcaaaccctgtgaacaccacccctgacccatgatc

SEQ ID NO: 66940 - DNA, 702 bp, Homo sapiens
aagctgtccgacacagaggacgtctttcctcgccgcgcggggccgctcgaggtcccggccgacagccgcgtgttcgtgcaggtggggaccccggggacaccaggggcggatgggggccggtggggacgggcgatccctgatggcgcctccgtcccccaggcggccttggcccgtccctccccgcgctggggcctggccctgcaccgctgctcagtgacgccgtcctcacgcccggccccggggcccgccctggctctgctgcgtgagggctgccccgccgacacctctgtcgccttcccgccaccgccgccgccgagcccgggtgccgcccgccccgcgcgtttcagcttccgcctgcgcccggtcttcaacgcctcggtgcagttcctgcactgccagctgagccgctgccgccgcctccggggagtccgccgggcgcctgcgcctctgacgccgccgccgccgccgccgccatcgcgggtgcgcgggcgcagagcctggaatccgggcgctggggcccttcgggggctgggcacgggcgactctggcagtggaaagaggatactctcggggtctgaggatctgggggttgggggaggtggggcgcaagggtccatctctgccgacagagtttctccggggacagtgtggacactgggttcccccatggacagctctggaatccttcagggctgggggttg

SEQ ID NO: 66941 - DNA, 2565 bp, Homo sapiens
aagtgctgagattacaggcgtgagccactgcgcccagcctccaggcactgttgtaaatgttttacgcctatgaactaacttaatccccttaacctctaggcggacactattataatccccattttagagacgagaatgatgaggcattctctgaattaagtaacttgtcaaaagtcacaatactgggtggagcttggattcgaactcaggcagtgggtcacccgcggcaggcgcgggctttgggtcgagccaggggcattaggtgaggagaggcactaggcgaggagaactcagcattcggacccggctcccactctcaccccggcatgcagaccgatggaagaggctagtggtctgctgggaagggaggtggcccgcgtagcgtcccctccctcgctgagcctcagccacccctcccagggatggtgcgcccccaacatggtccggagatacacccagctaccaattcgggaccaggaccaacaggaccggacccgcctccctggacctcggacctgatgaggccacgacccctgcgcttctctcctccccctgtccctcccacctgtgctcaaaataaacctctggactgaccggctaagttctggtgcagtcagtgagcgcgcaacgtgcggggtgggggataggtggggaggcttggggagaaagctgggagcaggacttggggggtattcctgagaaatcgtgacttacaggggtggagcctggggacggggcccatatgcccatatacccgtgtgcactcccaggccatgggagactgtagggcgttttgtctcaaacagaaagcgacacccggccgggcgcggtggctcccgcctgtaatcccagcacattgggaggccgaggtgggtggatcacttgaggtcaggagttccagaccagcgtggccgacatggtgaaaccccgtccctactaaaaaaagtaacaaaaaaagaattagcagggcgtagtggcgcgtgcttataatcccagctgctggggaggctgaggcaggagaatcgcttgaacccaggaggcagaggttgcagtgagccgagatcgcgccattgcactgcagcctgggcaacaagagcaaaaatctgtctaaaaaaaaaaaaaaagcggcacccaaccccacaagcgtaagtttaaaataaaccttccccctccctcctctccttacccggacacctgcccatctgcctcctgcgatctttctcaagccaggccttctccgctctccattacccccgcccggaccctgccctagctccgcttcgaccttctgcctctgctccagttccctcctggtctggacttcgccctcctcttagattgtcagtctagtctagagctccttaaatccctcctgcccgagctccactctaccttacacagacaagagtgggactatcagccccagtctacagaggaggaaactgaggctcggcaaggctaaatcacttgcccaaagtccccaggcctgtctgaccccagagcccaggctcttgaccgactggatcttcggacttgacctttcggccagaacccacccctctgcgagaagcaaagcacacagtagtagcttcatgagttagtccagcaacagagggagggcatgggatccaaggtgtcgtctccacttcatgaatgagataaagtgcaggctgagggtctccttcgccccgccccagttccggtgccgatctccccttcacttccattggggcggttccccgggcctccaaacgcgaagccacgcccccacgcgcgtccgcctccgcgcggttctttctgacctcggcggcccccgtagctccgcccatcggagaagcgaccttacagcgcctgcctctttctgagcggcatgaagccacctcccaggcggcgagcggccccggcgcgctatctgggcgaggtgaccggtcccgcgacctggagcgctcgcgagaagcggcagctagtgcgactcctgcaggcgcggcagggccagccggagccggacgccaccgagctggcccgggagctgcggggccggagcgaggctgaggtgagatgcggttctcgggaccggagccaggctggaggcggggctggggtggggcggagagtgggcggggctgcggcaggagccagcggggcggggccaggaatgtaagcgagcgggggcgtggcgtggggctgagtggcggggcgttagtgggtgagcctgggcggggtgaggggcggggcgtggacgggaagagaagacctaggggcggggcgagcttgggagctagacgtgggcggggcataagtgaagcggaggggcggggcgatgccgggggcggggcgtgcgtgccgctgaggtttggagagtgggtgggtgagtttgaggggcaggacgagcctgggggcggggcgtgggcgggttaatagcaagacttaagggcggggccgttttgggagtaaggcgtgggaggggcgtgggcgggatgagggcaagctttaaaggcggggcgagcctcggggtaatgcgtgggtgaggcgagggctaaacgggcggaatgaactgggagtaag

SEQ ID NO: 66942 - DNA, 1861 bp, Homo sapiens
ccatgcccggctaatttttttgtatttttagtacagatggggttttagtagagatgggatttcaccatgtgggccagtggatctcgaactcctgacctcaggtgatccacctgaggctgaggcaggagaatcgcttgaacccggaggcagaaggaggcagaagttgcagtgagccgagatcgcgccattgcactccagactgggcgacaagagcgaaactctgtctcaaaaaaaaaaaaaaaagagaaaaaagaaaaaacgaagagcacgagcaatatgaagtactactttctgagtgcgccttacacgtcttgactgccactgccctgtggacccaagagcctgctagggcgcgaaccacctctcgcacatccacaatgaacgttagaagaaacgagacaagaaatgctctcggtagagaacttggcatttaaccgcgagctgtgaatttcacgtttttttgccttcccctctacttttttccacgggacgccgccgccccggctaccattctctctcctgtatacgtggagtctgatcagagggcgaagggtgatcagctccctcccaggtcccgcgcatcgccgccccctgcccggtaagctcggtccccgccctcaggccacgctctgtgccccctgtcctggcctctgctacccaaagatctaaccccaagctttctaaggagcccaagcaagggtcgcgaaggccaagggtctgagaagaaagccttggtggccgaaggcccagaagacccctaagctcgccctgccagcgccgcaccgccgctcacccgtggacagcggcaccagccactccgcagggccgccgccgccatgttggagaatcgtgtgaccttctcgcggcgcggcccggttgcgtcatccgccgcttcggcctagagccgcgcaagcctgagaaaagccgctccaggagcggggtttcgggtagggagagccctccgattgggtccgtcatagggcggggcattaaaagggtagggaatgcctagagagcttgacctctgatagggcagtgttttggaaggacggggcccgtgactggatgtggcccgggggagggcactcctgggagggtcagatctgtgattgggcgcgactacgagggggcggagcccaggggcgtgtattccgtcacttgcggtgattcggctacagaacgcgccgggcgctggtggcaggtggtacaggcacgtggatccaccgaccacaaggacggattcgattggattctgattgaccggcggaccagctccagagtaattgtctatggctgcccctgcaatgactgattgattgacaatggctgagagaccagcaagtgagtcgctccgagaaagcgaaggagcccactcttgtgcggcgctttgggaagacgcctgttggttttgaccccgaataagaagaggaagctgagagcgggctgactgtggtccagtcctacttcgattcagtgtgaactgacactctgatctgaagacgctcaggcctttgtcatttcagcaccccagatgctattttccattcgaagaatgccgccaccaggtggcggtattttaacatggccatgcaatccgggtatgaggaggagggttggtcccctgggagagctaatgtatgttgctgttgctgtttgtcttattggatccttttttttttttatagagccagaggcttgctctgtcacccaggctagagtgcagtgtcgtaatctagctcactgcagcctccaattcccaagctcaagcgatcctcctgcctcagcctctgagtcactgggattacaggcgtgagctaccgcacccggtctttttgcattactaacctgtgatatgggttta

SEQ ID NO: 66943 - DNA, 1333 bp, Homo sapiens
ttggatcccacttgagtttgtgctaagtgatggctcaggatgggctccgacaccagaaagaccaagcatgtgactagacggctggggctgtgagctgggcgataccggcctgacctccagggtgggggaggggaaaggggtgctggggatggagttcgatcacatggccaaagagtcaatcggtcatgcattcgtaatgagcccagtaaacacggcagacaccaaagctccacggagcctcctggcaggtgcacaggtcacatgcagggaggactaggcacctgatcccaccaggtgcagacatgtgagctctgtgcttgggaccctccctgtgtggctcttcatttggcaggccctgagttgcaacctttataaacaaactgtcatcagaagtgtgagttccaggagtcattctagtgagtcatgcaccctgaaggggtggcgggaaccctgaatttgtagccagctggtcaaaagtgcaggggcctggggtcccccaaagggtgactggcatctgaggtgagggcggtcttgttggggaccgtggccttaaatgtgctggggctgtgctaactctgggtgactggtgtcagaatagaactgcaggacaccaggtggcatcagaccaagatgcaataaaatccaggatcagttgaacgcacaactccatccaggcccttatcacactgcacagatcagtcacctttaaactggggatggcaggggatccgaagtccctcagtatcaacgtatctggcccagcaccacactggccaggggctcagtaaaggtttgcggaatgaacacacttggagcacagaggaccccagggctgcgccgggggaactgctagaggagccaggcccagggagcctcggggagacctggggagaaattacttagggctgtcacgtccccatgaggctggcctgtttctgcagaactaggacagtggtgtgaagccactgagaagcagactctgccggcagagggcagggccgccgaaggtgaggcaggcttctgcatgcatggccgggatgacagggagggacacctgcccaggcctgggcccctggggtcccgtgaggctctggctccaaactcaggcagccactccagcctttcccaccaacatcaatcctagagaggcaagacagtcctgtttacacactgggcacccggctcctgcatctgagtaaacggaacagctgtgcaggaataatcaagcgttctgctccacacctcagcctggctgcctcagaaacaagaaccttcacacattttctaaataggggagagaattcctagatggggagtccagggccaaggataa

SEQ ID NO: 66944 - DNA, 898 bp, Homo sapiens
gatgatgatgggatcgcgagatgttcagcgaagtggaaaaatgtccagatacaggaagggaagtttatccacagcctgagagaagagcccattctgtagaagtacgtggctgcttatggccatgaatacgtaaagaaaatcatttggagggacatgtgcccaaaagctaacagcggtatgattgtgggtgattttttgtttgtttgtttctgcttggctcatgcttaagtttttttttctgtgaggagcaaacatgactcatattaagaaaaaagccatcaggctgggaaagtccggaaggacattcctgcagagggaacagtgttcagagaatcacaagcgcccaagagtagagcctgaccggggggtgccgggggggggggagggtgcagcaagtggggagagggggcaggcgcccaggggtgtccctaccctcttgggacaccccctcctccgggatgtggttaaagccttgggcagcggtgtgggctttaacccgaccagagatatacagcaagacagaagccgtgaatggggctgcagcctggtggctccggcatgacaggtcatccatgagggtagagggctgactccttctgatcccccgagggacatatggggccactgtggagagaccagacactggggcagggctgcccaggaaggcagcgggcaggaccaccgggcgctgcagtggcctccttagctggtgtttgtgggtggaacagccaacaaccaaccaacgccatatccccaacatagggaccagggccaggccagccagaaacattccgagtcttgagagcagcacatggggcagtcccttcctcccagccatcatcacgcccctccttcctcccgccaccagtgcccagcccatggctggcactcaaccagt

SEQ ID NO: 66945 - DNA, 1800 bp, Homo sapiens
catgcagaagttgtgcagaagttcttctccacctgccctgcacacagtagggaccaaaacccattttaacaagccccgcagcccagagcaccggaaaaggaaggaagggcatccatcccccattgttcaactgtgtgcagcttgtgtttccaacaggcacacacacatattttacaaatcctaacgtcccacgccccacaaacagctttgttagagatggcgctcaaaaaaagatgcagtttagattttttttttcccccaggactcccgtgtatctactgaagggtttgcacacttctcaaaggacctcgcaccggccgcggtgctctgacaacgaccacaaaagaatctgtgggatttcccgggggagcaagcccgtgggccgtgacctctgcgcgctcaaagcgttcccggcgctcccccgtagctggccccactctcccgcccccggagcccgggcttccaaggcgaccggggcccccggccgtgcagcccggccccccggcgcatgcccacgccgtatccccctcgcccgtccctcgaggcgccagaggaatccggccccggggcctgtagccggcgcccacaccggcccgccccgacccgcccgccgcggccccagcgcgcgtcccctcccccggtccggcgcggcctgggcctcggccggtgcaggcccgcgggcgccccgcggccaggccaggcgagctcaggcctgccgcggcctaccccgtcgggcgccgccgaaggccccccaccgcctcacctggatgcgggcgggcgggcccggggctgctccggggcgggcgggaggcggcggcggcgcggcgctaacggctccgctcggcctcggtagcggtggcggcggtggcggcgacggcgacggcggcagcggctcctcctcagcgcgcacgacccgctccggcccgcggcccggacacgccccccccgcgcgcgagcccattggccgacgtccgccacggcgcgctgctcattggccggcgtagctgtcgcggcgctccggggcgcgcgggagaggcgggacttccggtcggcgccgcctgcgaagtgctccgcggccggcggagacgcgggcagccagcgatggccgcggagggggcgaactgggttccggccctcggaggctgacggaaggcggtggctgaggagcggcgcctctggttgagcgctcgccgtgtgtcccgcacctgtctgtcctgccgccgcccggtaaggtaggaaaggtcagcgcgccggggttacgggtacagaacctgggttcgaatcccggccccgacgtttccgcactacgtgccgttgggcaggagctgacgtcaccttgccgggcctcagtttccttctctggtgcgctgaggaggcggggcatggaacgtggtcagcgcttcatcggtgctggctctttgagcaagccagttcccgaaggctcagcatctcattcattcattaaaatgtcattgagcgcctactgtgtgtcaatcactgtatgggcagtgagcagaaaaaaaatacctggtcttattgggctaacattctaaaccagcgctggcctagaatgccctagtagaaatacatgcaagctacatgtttaatttttttttatgtaaagatgggctctggttctgttgcccaggctggtctcgaactcctggactcaagcgattctcctgcctccgcctcccaaagagctgggattacaggcatgcctgcactctgcctaattttttcttttttttttttatgatctgaaaataatagtctttttatttttatttatttatttat

SEQ ID NO: 66946 - DNA, 648 bp, Homo sapiens
gattacaggtacccgccaccatgcccggctaatttttttgtatttttagtagagacggggtttcaccatgttgggcagtctggtcgcgaactcctgatctcaaatgatcggcccgcctcagcctcctaaagtgctggaattacaggtgtgagccaccgtgcctggccaccaggcttaactttaggaattacttcactttccccagccgcagttcgtttatttgtacaaggcaggcagtaccggtgccaccacctcgagagcctgtttaaagcaggcaccgagcagggcacttaacgcaccttcttggtggctgtccagtaaacaacgtgggggtcagcgacccagagggcagcacagacctctccaccgcttgtcacagaattgcagcctctctaacaccacgcacaagataacacgggtcactggcctcagccagctcgggacgttttccagagttcactttctggatcctacctataacccttccattcctctctctttctctctctctttctttctttctttctttctctctctctttttctctttttttttttttttttttttttttttttggagatagagtgtcgctctgtcgcccaggttagagtacagtggcgtgatcccggctcactgcaagcttcgcct

SEQ ID NO: 66947 - DNA, 963 bp, Homo sapiens
gcagagaacaatgggaaagacaacggtcactccaggaggctggtttgggggcaaagactgagcttgctttggggcaagctgtattttgggggtgttggggacaggggtgtccaggagggagttggatacacaggacagatggccctagtgggtcaccggctggggttagctccccagaagtgggagatctggggaaggttggttccggggtgtggcgccagtaagttggaggaggcatggagggagcgtcccgctcttccagtatttaacagaagggacagagggaagaggggcagcaggggagcactggacatgtgtgtccggattagctcagcaaccccctgggttgcccgtcagtgccgcaggccccgtccctgccttggagggctcccagacagtgggagggacaggcagtgggagggacaggcagtggggggacaggcagtgggagggacaggcagtgggagggacaggcagtggggggaacaggcagtggagggaacaggcagtgggagggacagggagtgaagggggcaggcagtggggggaacaggcagtggggggggacaggcagtgggtgccacatggtaggtggttgcaaccactgtgcgtgtccagccacactcaccgtggcactcggtaagggtggggctgggctggaatccctcatcacagtcgcaccggaagctgcccgcggtgttgacacagcggccgttgacacagaggtcaggctgagcgtggcattcattgtcatctgagatgggaggggtgaggcaggtgggcggggaggccacaggcagccagcctctcccacagccccaaagggcccctttggatctgcccaggccctcttgcttatttttattttatttatttttattattattattattattattttttgagacagagtctcgctccgtttcccaggctggagtgcaattgcctgatcttgggtcacta

SEQ ID NO: 66948 - DNA, 667 bp, Homo sapiens
gtgtgagccactgcacctggcccctagtgggttttaaaattacagtgtcacctgttgctgtcacctgttgccttcccatcattcccagttcctgtgacgttgtcacctgttgctgtcacattgtcacactattaatgtcccccagaactgtccccccccgctgctgccactgtcatcccgttaaggtcactgtgagtcacgccagccccaccctccgtttgactttctgagcagccatggagccccccctcataggcgggacttgactgtgtgcacccagagccagcagaccccagatgttcattagcatgagctcgaggaaggcatggagacaggagtgggcagggtgtgcccaggagcacagggtcaaggctggggacaaggagatgggaggagggacggggagatgcctgcagtctatggtgtgtggagtgcgctgggccagcctaggccagggtggcttggggacagagccctctttgtataagcacaggaagcagctgggagtcaaagcattgcatacaacgccaggagtttggccacgtgcccaggaatgaggcttggagcggggagggaagccgcagaggacccaggaaagctctgaggaagagatcaagctggatcctcacaagagaccctgaagacaggctctgatatcatcccatta

SEQ ID NO: 66949 - DNA, 1791 bp, Homo sapiens
cggtgccctcaccgcctcggttggcccccgcgcgcgcctcgggcgaacccctggactggccctccaacagggccccagactcggggtacccagggtggccgctgaggcctggagaaatctgggcctcccctgtgcaccatccaactgcgcgccccagaggctcagggcgccccgggagtgtgggggtgtggacagatgagcagagccagagcatctcgggcagaagaggggacctgggagggggccggggagacagacagcgaacaggggtgaagccggggccggacggagcgcgcagcggacaatactgggttcaaaggggagagataaggcgcagactagaaacgctaggctggacccgggccaggcgcgccgcggggcagagatgggcggagcgggaacgggggcgggggcgagaatgggggggcggggacgggggcggggatggggtgcgggtgcggggtcgggggccagggagaggcctagttgcgtcgaggggggcaagcgcctggaggacccggcgcccgctccaggccctgcccctccaagtcccccgccccgcgccaggccccgcctctccagggccccagccccgcgccaggccccaccgttccggggcgcgtgccccgcccaggccccgcccccacggccccgccccgggctccccccactcaagccttttttcccctgctgggggccgaggcccggccaggagcagagtccggctgcctggggcgggcggcgcgtgtctgcagctgctccgggtagcccgctaggcgcgccgtccccagccccgccgccggccctcggtgcgcccggccgcctgcacccccaggtaagcgagcaccccgcgccgcgaacaccgccccgaacgccaccctcacggcggtccccggccccgcctccgcggccatggcggccccagcccggcccccactcgcagctgggctccagcccccatcaccccgccggggactgtccccctcggggcttcccatcatggccgtctccccgagctatccgcgctcccccacgagggccggggcgcaacgggtgcccgaggacgcggctgtgaaacgggctggagcgagtaggggcgatcctggcctcgtgacgcgggggaatccggatgtgtgagccgggggagcgccccgtttccccgacgtgccagggctggggacgcagctggggccctggcctcggagtccgcagcccggccgcgtagacggcttctgagaaccgcttaaacacgtcattccaagcccgagctaacccatcaggcggccggggtgaggtggaggtgcccaggcggggataatgtcatttggcctggttggaccagccagcgagggctttttaggcccagggcctagccgggagtgtgtgcggagcagaaaagaggccagcctggctgaaacgcggagagggagggtctgaggtggagagaggttggccggggcctgggaagcggcgaggagagtgtggaacccgttctcggggcggtggggaccagggaggcttggaacagcaggtgcatggcgtgatcggattgtgtcttaagaacatcccgtagccgctgtgggtaggagagatggggatacttggaagggggcttctggcttgacctggctggaaggtgtgataggaagtgggtgaactgaaaattcgctttggcagagtaacatcgtctaattctgtctgtttgcaagtggagcgtgggggaccgatgtttctcctgggtagttaggagtatatagaagaggctttcattgctgggttgggagacttgag

SEQ ID NO: 66950 - DNA, 450 bp, Homo sapiens
aaaaaaaattgttgccccaaaagttctgagaaagatgaggtaggagaacccaggaggggagtgtcccctaacccagcccagcggcgattggtcggccctcctagaggaagtgtctgttgaacagagtcgtgaagagctgggaggaatttggcaggctgaagggagggcattactggtagggaatggcatgtgccaaggtccatttgctggggagcaccgtgccaggccagtgggagcacttgcaggattcaaagctgcgggtctgatttgcaggcaagaagaaagacctgggtgctgagtggggaggcggccaccatgattcaatcaagaaatgggagccgtggaaatcgggcagaggagggactgtcgcgggaaagacggacgtaatcgtagggcttaatgaggagctgagtgccgagagggtgtgagatggagtcagagatgactctc

SEQ ID NO: 66951 - DNA, 1481 bp, Homo sapiens
gtggcatctaatgtgtccagccctgtctgaggctctgaggatacagcagtgactcaaacaacattcttttctttcatgaaacttatgccttggggtgaagaagacaccccaatgaaacagatcaactgggacaagagggttgaaggaactacacaggatcaggagacagaataatatggtggcctctttggtggtagtctgagaagtcttcttggaggaggtgacatttgagctgaaataagaatgataacacagtcagacatgtatgtgactgtctggggtgcaaacatggtacaagtgagcttggtgagttggaagcccagcaagcagcagttgctatggattaagctggggaggcagaggtggggaggcagcagggccagaatgtagagggcaggaatgtgtgcagaaataaggggctcaggtaaggcggaaccttgaacttggggtccaccttggggtctttggggggagtggtacctcaaccggcagcatctctggtcactaacaccctgtgggacctctgctcagagaggctcagagtggaagagacaggtccgtctggaagggacagccaggacccggtgcagaggcaggctgtggttatctgcaaacagcccccttccttccagcatgtcacgtgctcccgcctgagcctctggccgcaggaatcaggtgaccccaggcagcgggccaggctgcaggggcgggtgagtgagtcaatgtatgcaagtgtgtgtgtgtgtgtgtgtgtgtgtgtgttttcatctctgggaggcccagacatctggggtctgaattaattgcctttttcacaaccatggacaagtcctgtatttccagctagattgaaagcaaaacaaaacaaacctatgtgcatagctctgatctgctgagcagtgccagggtccttgggggttcggggaagccgtgggaaccagtccttctcactcagacccctgaagaggggcagggatcctctactcatgccccctaacccacctcccgtgtcagtacaaagccccattctctctctttcccccaatctggggctatttttagccactaagaaggattatcagtttggttcccaggtggcaggggccaagctgggagtggggccagggaggcttcaaacagcagccaggcttgggggcgggtggggtgaggggagaagaggctggtcacactggccctgccacccacgcggtggctctgcagatgaccctgaagctgctgtcgtccagcccagcccaaacacttcagctgcagctttaagggaaggtggcaggggcaaggaaagcttccagcagccttaggcacctcagatgctggaaaccgtcctaagggcttggaagaaccatctagaagcctccataggccagcaccccttctttccagaccactccccatcctgcccccacctcctgtctagcagtaactatcacagtctaagctgttttttggggggtttttttccg

SEQ ID NO: 66952 - DNA, 909 bp, Homo sapiens
aaaaaaaaaaaaaaaaaaaaagctggtggggggcagggcaaggtggctcatgcctataatcccagcaatttgggaggctgagtggggaggattgcttgagcccaggaggtcaagtgtgcagtgaggtatgatggcaccactgcactccagcctgggccacagagtgagaccctgtctaaacaacaacaacaacaaaaaaacaaaaaaactggaatggttgttacttttggatgacaggacaggggtggaggttgactgggaagaggtatgagggaagtttctagaggaaatatttgtgataggagactggattagtcaggtacatagttttgtccaaactcagtgactgtacccttaaagatgtgtgcgggccaggcgcagtggctcatgcctgtaatcccaacacttcgggaggccaaggcgggaggatcgcttgagccaggggtttgagaccagcctggataacatagggagaccctctctctacacaaaaatttaaaacattagccagtcatggtggtgtgtgcctatggtcctggctctgcgggggctgacatgaaaagaccacccgagcccgggaggtcaaggctgcagggagccatgatcgctgcattccagcctgggtgacagagtgagaccctgtctaaaaaaacaaaaagtctgcatttcacttgggtaaattttaccttgaaaggaaaaacccataagcaaatattgaaccctagttaatgatctgtgtgctgacatgtgtaggggcgatgtggcctgaggtcagctgcctactttgaaatgcatcgggaacaagcagatagactgatggtggatagagggatggatgggcagaggcagatgggtgatggaataaacagaatggaatgcaaaggggagaatctagtggtgggaatacag

SEQ ID NO: 66953 - DNA, 976 bp, Homo sapiens
aactgcgcccggcctactactctgttttacagatgaacttgaggttcagagaggtcaagtcatttgcctgaggacacacagcccaactctgccttttaacactgaccaggcaatggagtgggagtgatgagaatgaagtggtggctcttctgggaccagaggacagttccaaagtcccaggcaaggggagttccatcttccagtcctgcctcctggttgtcaactgcgctgataggggcccgagtaggagttctgaggctccagcctctcaggccccacttgccccacccattctgcttgcagacctcccagctaactggaacctgtgtccacagaatgctgtccagtttcaacgagtggttttggcaggacaggttctggttaccacccaatgtcacgtggacagagctagaagaccgggatggccgtgtctacccccacccccaggacttgttggcagccctgcccctggcgctggtcctcctggccatgcgccttgcctttgagaggtgagtgtctgccctgccgcaatccattgcccccgcagtcgctccagtatgtgctcgtgccctgtgtgcaatttgccattgcagcatgtcccgagtagaagctggctttgcaccaaagcgcgttccctggctccagcctgcccccagccgccaccacccacacttctggcctctgatggctggtttataggaacactgactgcagctggtttataggaacactgcactgcctgcagcctgcagctgggtatgccagcatcttcataaaacagggatgggaggccgggcacggtggctcacgcctgtaatcccagcactttgagaggctgaggcgggtggatcacttgaggtcaagagttcgagaccagcctggccaacatggtgaaaccctgtctctgctaaaaatacaaaaattagctgggcgcaaacctgtaatcccaactactcaggaggctgaggcaggagaa

SEQ ID NO: 66954 - DNA, 1153 bp, Homo sapiens
aaaaaaaaaaaaaaaaaaaaaaaaaaaaaaaaaaaaaaaaaaaaaaaaaaaaagaagaaccaaaaatcaggtgagcactcacagtacccggttttaactttatatcactgaaagacacactgaagaaacacactgaaagtcctgaatctctgacaccacctctccgccacccctggcagcatggtgtggagagtgcctttgtgtgttggggagagggagggggcagcaattgtgaggcatggaacccagcgctgtccttttagagcagaaagaaaaacccgaccacactcagctgatgcccacccatagagggtgtgggcggcaagccacccaggtgccgaggcaagagactgagggcacaagttgttccagtaaaataaaaaatatatataaaataaaaatagttacaccagaagacaagagtgcgagccctctgttatgcccggacagggccactagagggctccatggtctagcggtaatgccggcgcctgggaaggcacccgttacttagcagaccgggaaagggagtctccctttccttgggggagttagagaagactctgctccaccacctcttgtggaaggcctgacatcagtcaagcccccaccatccccacctgccaacagccatccagaggcctaacagtctagcctctgtcatgctgtgcttcagcggtcacgctcctgtttcactttcatgttccaccctgtacacctggctctgccttctagaaaacagtagcagaattaagtgaaagtattaagccgttgacctctccaagaaataatgacataagctgtcccctctctctgcctcggctaccaaacagggaagggccccctgtccagtagacacatgactcacgtgaccttacctatcactggagatggctcaacactccttaccctgcccccttgccttatatccaaaaaataacagtgcagccaggcattcagggccactaccggtctctgcgtcttggtggtagtggtcctccaggccccagctgtctttccttctctttgccttgtgtctttatttctacgatctctcatctccacacacgaggagaaaaacccacaggccctgtagggctggtccctatagagggggcatttaaaccagccctaacaagagggaaattatgga

SEQ ID NO: 66955 - DNA, 3108 bp, Homo sapiens
actcagtggttaaagagactgagggacgggccatttttccacatgccctgggtcaggctcccgggctcaggtcagcagggagggtctatctcctctgcgtagcaaaagggaaactgaggcagtgggtgggaaactgaggcactgggtagaaaatctgctcagtcaccaagtcctgttgccccgcctcctgaattcctcccagacctatcactctccccatcctaaatgtgtcagctcctcaccagagccccaggccccaggccccaaggtccattaggacaccagagacttgcctttccctctctcctccctacaccctgtgttttcccctcaattttcagatctcagctgatttcctgggagggttctcatgtccctcttggagacctaggaagcactgcctcccatgtctaacaactgtccttaaagccctggtcatgcctgtccacccacagactggacattctgtggaggtcagggctgtgacctggccgcctaaacccagggcagtgcctgattataagtggacacaggtcacataagggtccaagctgggtccagagaagatcccggctgtcctagattctgagcagggaagctcagctgcttgccgacctggaggggcacggaggggcccgcaacctgggccaagggacagaggaagggagtggcctttacggcttcctcctgggtgcggccaggggaggtggcaaatccgccaccctggcttagcttcactctgccaaggcctttaacctcttccacctttacccaccagccatgagcctccaaccccccactccccactgccagcccctcctcggccttcaggcctaattgcacctacttgccacagggtccctgagctctatggatcccagaagagctgtggacaaaccggtgcctgcttccttccccgcccccgggagatctggcagcctccaggtgtggctctccacccaggcgcagacttccacagccctgacacctctgacctcccttcgctggactgcgggagtgtgtatccctctgcaaagtggacagtagagcacagcagtccccgcctcatagggtgtaagcctgacaggagttacagtgaccagtgactttctctcctggcctcagtttcctcacctgtaaacggggtatgctgggaatccctacctcaacatcctgagaaaaaagagactgtgtatagagttttgtcctgtaatcccagcactttgggaggctgaggcggacagaacacttgaggtcaggagttcgagaccagtctggccaacatggtgaaaccccatctctactaaaaatacaaaaattagccgggcatggtgacggtgcctgtagtcccaagctactcgggaggctgaggcatgagaattgcttaaacccgggaggcggagggtgcagtgagccaacattgcactgcactccagccagggcgacagagggagactcaaaaaaaaaaaaacaaaaacttttgtacttggttaacgtgaacgctgcctccttaaaaaaaaacaaacaaaaaaaaacccaggaacatttaacgtgaatgtcagggactttgggatgagtccagggacctagaagtgcggaatgcacaaaggagctgggaaagtgtgtgagcctgagcccagggctgcaagttgggagtgcctgagtgcacagggaggccactccaaccctccagctgcctctaggggtatcagagagggagcccgtccccactggccaccaatacctcttaggccagggcgaacacgtccacgggggtatattcaacttgtgaccccagtctctgcgagagcctgcagtagcatgggggggagagacctcgcgttctctaaggatggaggacaaaggaggagagactgggagggcagggacggttgcggaacggtcacaaggcctgggcgcgagggtttggaaggcaaaggtgcgagaggcaccaggtgacccgtcctgcgtgattagcggtcggacaatctgagcctgctaagagctttcctgaccacgctggtatgaagggcggcttggaggtgacaatgggggacgacagggcacagcaggtgtggagacggtgtgcagggccggagcaaaaccgttaaaggcaggtggagacaccctcctcccctcccccagcatggggtcttcctagcaccagtgcgcgccttcccacaagcgatgaagtccaagtccacgtgctgggggagtgtcatgaactgacgtgcggtgcagccagtgactaggcgttgtcggtgcgcggcggcggggcgaagcctcgcgaggggtgggagcccgcgctgcggggcgtcactcacctgcggcctgggcagaggtcggggtggaaagcgggctcgcggcggcctccaggcctagtccgaggccgagcagcagcagcagcgccaggcccagagcccctgttcgccacgctccaacctgcgccatccaaccgccgctcatgctgtccccacagcggcgccggccacgcgctgtccagaccgctctcttatccctgcgcacgcgcacgcgcggggttggggcggggcccaagcccctgagttctgcggcgcccgcggctacgcgtaccgtaaatgtcagaatagcagggaaaagagaattagaggcccgtccccactttccccagtgaccagatcagttgaaaggtatggagcccgcttgaagttagaaacttctggggatgggaaggaatttgttggtgttcatttgcattatttcccgttccaaatgaggactgctgcaaatgttactgcctcgtgatcttctttaatatggcagccacgcccctcaggcactccgcatttcctccctcatcccactgcttttgtggcgccgacaggtaatttattttatttacttattctggtttgttgtccgagtccccatagaatgctagctactggagggcagggatcttctgttgctcactgctttattctcaggatctgacacatagtgcttgactcatagtaggctcttagtaaacatttggtgagtaaatgaataaatgaaacgtccattctcggagtcgggttgcttgggggggaaaaaggaaaggaaatcaattaattaattaaatttaat

SEQ ID NO: 66956 - DNA, 2519 bp, Homo sapiens
tttcaataattattctttgaatgggtccttcccatcattcaggggactcaactgtcaatttccaaagaaagatctttcccaatcatctgactttacgtagccaccctccagcttccacttattttgttttgtcttcaaagcattccagaacaatactacctgctgtgtttgtttccctactatgcttctccctagaatgtggcgtccatgaaagaatgtggataagaactttcctggttcacaaagttaaacccaaggctgaggtcatacatgacgggggcttgtaaatatcaactaatattttaatataaatgagtctgaaatcaggacacttctgggttcaagtccccgctgccactttttagcttctgagtgacttgaggcaaatgatttcgcctctctggacctcttttttcatctgtagcttggggataacactgactaacatggccacgctgagcactgcaaatctagcctgattgccagtcagaatgcacgcccggcctcgctgtttcaggagggctgtcctccggagttcagcaaggttaaaggcaaacctctgcctccacagcctggcaggggactggtggcaggatgtcagccctccgtttcaggggtctaaaggaacacagatttcgtttttggtggagaaaggacagagccagaggctgggcagcgagcggggcctgctcaccgcttggagatctcctggtagcgtagctgcagcttcccctgcaggtcatgctgtgggaagaggagaggagaggtcggcctgcaaggcaccccaggagagaggaaaggagagggcaagggaccagggatggtccggggatgcgcattttaagggaaggcaggggatgaacactcggggaaacggatgtgggtcctgcaggtgaagagcaaagccagagtccgggcccacagatccaaggctaagaaggtcggggactggggaaatcccaggcctgagtggttcccaggccaggagagggtcccgggctgaaggggtgactagctgggggttcccagggagattcggggagagcgaagggtcccggcttaggagggaggtgaggagcaggagcgggtcccggacacacggagcccgaagccccccatggtgcagccctgtccgccccgcgcaccccggacgcccagttccgcagccgctggatgagacgggtggcggacgccatcttccgtccgcgatactgaagggcgcagccggtgacgtctccaccgctggggctgctgggaaagacgcggcgtggtatcgcgagacgggagtgggcggtgctagaacgtcctataaaggctctccccgaagcacgtgactcctctccgccagaccgccgccgcgccgccatcatggacaccagccgtgtgcagcctatcaagctggccagggtgaggtgggggcccgaatttgggggcagggggagggattagaggagccaaacgggccgggtctgaacccagcttctttcctccaggtcaccaaggtcctgggcaggaccggttctcagggacagtgcacgcaggtaatcgggtgggggcatttggccgactgccggcgacctaaaccctgatgtgacctctaccctgccctaacccctgccagccggaatccgggagccgattctcatttcatcacggggttctgatggttccctttaacgatctgtattctggccccgacacgttctctgaattcatatctgcttcccactccgcggtgcctttccgcggcccgcccttacttcttcctccactccggtggggacccgtaggtgcgcgtggaattcatggacgacacgagccgatccatcatccgcaatgtaaaaggccccgtgcgcgagggcgacgtgctcacccttttggagtcagagcgagaagcccggaggttgcgctgagcttggctgctcgctggtgggtgcaaagaggacacccctttgatagacctttggttggtggtagggaggcttcgttaagcccagggtgagagggtttgggaggcagagtctacatacagagactgacaagagggaggcgggagtttgccaattgctgcggggcctgtcaacatctcatgtttgggtctgtttacagggtcttggatgtcgggttcgaccacttggccgatgggaatggtctgtcacagtctgctccttttttttgtccgccacacgtaactgagatgctcctttaaataaagcgtttgtgtttcaagttaactcaggttcttgtctgggttatacgactagggtttctccaggtttcttgagtggctcccaggcggtcaccgatcctccgcactctggaaatcctggccgtgcggtcttgccaaacgaagcttttcctttttgaggcggggggtcgtgtttgtcgattgcaccctctaccccaaacaaaacacaagcgtagtaggaatgttttattagcaaagaagtttcagagagtgggtggatcagggctctatcacttggtccccacctcaccttggtggggccagagtgagc

SEQ ID NO: 66957 - DNA, 385 bp, Homo sapiens
ctccacttcccccttgatttactcagtcttctcgagcctcccacagcgggcgggcagccgccaggaggccttgaacttcctctcaggcgcctgggatcagcgggaaaggagcgcgtctgagcggccagaacagctgctctcgagttcaccaccagagggcgctgctatctagggtaaaccccccggggccgcggttgtcaaaccgggtatatacagagaaggaattttcggggtggggggtagtgggggaatctatctctagctttttcttattgttgtaaaaataatttcccaaaaataaaaataggctgggcgcgatggctcacgcctgtaatcccaacactttggaaggccgaggcgggtggatcactggagatcaggagtt

SEQ ID NO: 66958 - DNA, 1646 bp, Homo sapiens
tgggcgacagagtgagactccgtctcaaaaacaaaacaacaacaaaattaaatgaaaaataaaataaaagaggtcacggttttgggcaccgttaattccagctagtgagcaggctgagatgggaggatttcttgggcccagtagttccaatccagccttggcaacacagcaagacatcccaccaccaccccacgtgccctcccccgccaccgtcttaaaagacagaaagagagattcaatggtttggaactaaagagaactaggttcaaatctttttttttatctctttttttgagatggattctggctttgtcacccaggctggagtgcagttgtgcgatcttggctcactgcagcctctgcctcctaggttagagcgattctcctgcctccgcctcccaagtagctgggaggtagcactcaccaccatgcccagctaatattttgtatttttagtagagagaagttttcaccaggttggcctggctggtctcaaactcctgatctcaggtaatctgcccacctcagcctcccaaattgctggaattacagacatgagccaccacgcctggcctaggttcaaatcttgacccttctgagctgtgtgactttgtccaaattcctaaaggtctcagaagctcaatttatctcctttcagggaccgacttgaggttgagataaaatggattacacaagtgtctgatggtgtaaaggtggcactaaataaatgtacgctgctacagttattatttccttagtgacttcatagctgtctgccctgcaatgtacaagttcccagactggaaggaattatggggaaaagctaataggggagggtggaaaggcaaccccgttcccttctgagcaccagcccagattctgagtcatcctttctgccctgagtgtttgaggtcctgctcttgggctgacctttcttggtgacctggatgtgagtacagtgtggcaggaagactgtggttagttgctgggggcggtagaggccagtcactggacacgatgtgccattacatagtcctaacaaccttgtgggcttgtctgagaagaatcctgcatgtctcaagccagagagaatttttcatgctcttccttgaacctgagtcatctatttcctgtacactttgtctaggactctgtcaagcatctctcagtcttaggacccctgctccaggaatccttacctaatgggattgacatcttttctatactcttctaggcctgtgtgcttaccccattgcagcattgaccatctaggattcaacttatgtagttaaatcttagcaccattcatggtgccaatgagcaaacagatatcatgtgcctcctgatatcatacactgagaaggacacaacatcactgccaaaaatacataacaggcaccttaaggggaagaaacatctgcatcagacaaatgcaaaatggaggacgtgctacaaaaaaccggtgtgtacatctcgaaaatatcagtgtttggccaggcatagtggcttatgcctgttgtcccagctactcaggaggctgaggtgggaggatcacttgagcccaggaggttgaggctgcagtgagctgtgatctcactgctgcactccagccttggtgacaaagtgagaccgtgtctcaaaaaatg

SEQ ID NO: 66959 - DNA, 937 bp, Homo sapiens
gcacctgtaatcccagctactcgggaggctgaggcaggagaatcatttgaacccaggaggtggaagttgcagtgagcagagattgcaccactgcactccagccttggcgacagagcaagactctgtctcaaaaaaaagaaaaaaaaaagaaaagaaaagaaaaaaaagaaaaagaaaaaaagaaatatacataatataaaattggtcattttaacaatttttaactatgttggccaaagtagcccacgcgttgggattggagacccggtcttgcccaccgtgatcgccccagtacagtgcctggcatatagtaggtgctccaggaacaattgatcaggatgactttgtctttgctgggtaagaggccacattctaaaggtcagtttttggccaggcacagtgactcacacctgtcatcccagcactttgggaggccgaggcgagtgaatcccttgagctcaggagttcaagaccagcctgggcaacacggcaaaaatcctgtctctacaaaatctacagaaattaggcaggtctggtggcacatgcctatagtcccagctgcttgggaggctgaggtgggaggatcacttgagcctgggagtttgaggttgcggtgagctgtgattgtgacactgcactccagcctgggtgagtgagacccatctcagaaaaaaaaaaaaaaatacataaaacagggctgggcgtggtggctcatgcctgtaatcctagcactttgggaggctgaggtggtggatagcctaagcttaggagtttgagaccagcctgggcaacatggcgaaaccccaccccctctactagaatacaaaaaattagcgggcgtggtggtgggcacctgtagtcccagctactcaggaggctgaggcaggagaatggcgggaacctgggaggtggagcttgcagtgagccgagatgaggc

SEQ ID NO: 66960 - DNA, 3616 bp, Homo sapiens
tggctaacatggtgaaaccctgtctctattaaaaatacaaaaaattagctgggcatggtggcaggtgcctgtagtcccagctactcgggaggctgaggcaggagaatggcactaacccgggaggtggagcttgcagtgagccgagattgcgccactgcactccagcgtgggcgacagagcgagactccttctcaaaaaataaataaataaataaataaataaataaataaataaaaaataaagagcagtttttagaataaaatctagagccaacttgaggcgacagtatagactcttttgtagattgctcacagcaggtgcccttaagaccctgggtctgtgatgtgttttgtgctgtgggacacatggctccaaagaagtccctgaaaatcagatcatgaaaaggtcatcaggttggggaagtaattgatcagttctctcagtttaagaaggtggggaagaggaggagcttgcattctgggatagcctgggatagctgtgtccctactcagagagaggctgggggcttgggggtggacaggccagacggtgaccatctgaacctactcctcactggggttttcctccctccctttcctgtccactgctgctgggagggatttgctgtcctggcatctggcccagctgacggggccaagtgtatgagtggcagcctgcacgtcagcccttgggtgtgcagtttcagattccagagaatgagctggcttggagccctgctgagtcaatgcccttctccttgccagtgctctgagccaacctgccccgagttcttcctggcaggctggttttctgtgccagcctccccttcctgacagggtataggggaatgggtagggaagaggcagaggagatcggtgcaagtttgaatgaacacttagccctgtggaatgaatgtggtccagccctttagcctcactcagtacttcctttgtcccaactctatccctaccccaggctcagaatgttggggtatctccacctgcctgagaacttcaaacatacaggggctgggcttagagggcagcagcaccttcgttcagtgcatgagtgaatgaatgaatgagggagagaaagaggaaggtcttccatgtctgaaacttttttttttttttttgacacacagtctcactctgtcacccaggctggagtgctgtggtgcaatctcagctcactgcaacctccgtctcctgagttcaagcgattctcctgacacagtctcccgagtagctgtaagcacgtgccaccacacccggctaattttttatttttagtagagacgaggtttcaccatgttggccaggctgatctcgaacccctgacctcaggtgatccgcccccccccccctcccaccacccggcctcccaaagtgctgggattacaggcgtgagccaccgcgcctggccacagacttttattttatttcttttttagagacaggatctcactctgttgcccaggctggagtgcagtggcaccattgtggctcactgcagcctctacctcctgggctcaagtgagcctcccacctcaggctcccaagtagctgcgaccacagtcatgggcgaccgccctggttcctcccttccttgtgtctcctctttctgttctctaagttcctgctttattataggcaaagctcaggacattaaagaccctggcggtagagggtaggctatgggggtgaggccctgatccaagtcctgccgctaaggcactcataatttcgggctcaggggagaaatggaagtcaaagaatctcataaacacagctgcgatgacgaaccctttcacgggaaggaacatgcgagcccagaaaagtctctcctggtcttgggatggaggtcacacgaagcctccgcaaggcaaggacttttggtgagttccgggctccgctgaactcagctctttttcttttccttcctttctttccttcttcctttctttccctccttccttccttcctctttctctctttcctttctctctctcttttctctctctctctccttcttccctccctccctacctctctctcttttctttttccgtccttccttccttctttccttctttctctctcttttctttcttttcttttcttttctcttctttcattttgagacgtactctggctctgtcgcccaggctggagcgcaatggcgccatctcggcgcactgcaacctccacctcccgggttcaagcgattctactgcctcagcctcccgagtagctgggactacaggcgcgcactaccaagcccggctaatttttttttgtatttttagtagagactgggtttcacgatgttggccgggctggtctggaagtcttgacctcaagcgtgcgccctctccgccactgggtaaggcgggggcggaatagggggcttgcaatttcacactagaggcgggcaccgtgggggaaagaagagtcacgtctcccacggttcgtagaggaaggcctgcctgagcctggagcgggggcgggagagccacagtttggcatccccagggcatcccccagcccgcagactaccaggcctccagaggacaggaccccacccccggccacaggccctgcccccagcactccccgcaccccgcctccaagactcctccgcccactccgcacccaacttataaaaaccgtcctcgggcgcggcggggagaagccgagctgagcggatcctcacacgactgtgatccgattctttccagcggcttctgcaaccaagcgggtcttacccccggtcctccgcgtctccagtcctcgcacctggaaccccaacgtccccgagagtccccgaatccccgctcccaggctacctaagaggatgagcggtgctccgacggccggggcagccctgatgctctgcgccgccaccgccgtgctactgagcgctcagggcggacccgtgcagtccaagtcgccgcgctttgcgtcctgggacgagatgaatgtcctggcgcacggactcctgcagctcggccaggggctgcgcgaacacgcggagcgcacccgcagtcagctgagcgcgctggagcggcgcctgagcgcgtgcgggtccgcctgtcagggaaccgaggggtccaccgacctcccgttagcccctgagagccgggtggaccctgaggtccttcacagcctgcaggtacgtgtccccagggctggttctccgcgcccctagtggctctcctggcttggaagggtatggacaggagtggggcgtgggggcggggtgcgcaactgtggctccctgggcttccctgcgtcaagggatgggctccccccttaggaagccgaggagggaggttcgctcaaggccaggaattcaagaccacctaaagcaaaatagcgagacccccgtctcttctacacacacacacacacacacacaaaataaataaaataaaataaaataaatataaaattaaaaaacgaccgggcgcagtggctcacggagcctccacctgctgtcgagactagcctggccaacatggagaaacctcgtctctactaaaaatacaaaaaattagcctggcatggtgtgcatgcctgtaatcccagctacttgggaggctgaggcaggagaa

SEQ ID NO: 66961 - DNA, 1366 bp, Homo sapiens
tgagctgcaggggtgctggagaaggtagaaatggggttcggggtgccatcctgaaggttagaaccttctaggggagggtgtcatggaggagggggtgccaggtagtagtgtttgtagatttgggccctccacaatgtcttggggtatgtgggaattagggctgggaacccccagctcccagaccagaaacactcttgtatcttacaaatccaatgctccaggtccctgacccctcttcctccttcctctcttgttctcctcctccctccccgcccccgccggccccctccccaccgcagaaagtgggcttttgctgccaccacaagttgtaggtgctttattcccaaatctccgttcatctcgaaccacagcatgtccacgtgtgtccgatgcagactcgcggttctctaagttcacggccccacacggtttctctgtggtcctcatccttccctgcatctgtggctgtccacagccaactgggtgaaagtttggatccccctctcacaccctagggtcagtggcaggcttccagcactgtagacctgagggttctctcctccccaagctcccgctccttcccacctccgtgctgcccgcccccaaccccgccaggctagcatctcagcgtggtcagggtcctgtccaccctcccaaagccaccatcccaggatgaggggcttctggagggtgacgggggaaggcacaagtcctggctgggaaatgcggtggaagggggcaggggttctgtgggttcgggactcccagactcttggctcaggcccgccaagtaggagaaagttcagagctgggaaggcgaacagctggcattcatggaagccacactggtggtttggccgcgtgcccatccttactggatgggaggaaagtaggggaaaggggagatgcctgaggggccggaaagcgtcttcctggtcactctgggcccgcccccacccccaccgtgcagactcatttcgacctttcccctacttttccggctgggctgggggcggttcctcccagtctggagcgtctgagcctccagacgtgctcaacgccatcctcccctcctccctccctctttctttcctcaaccctgcctcctctccctctaggagctgggaccccaggcagagcctctgagatgctcctgctcagcacagttcttcccgttctggacctgctgcctcattcattcattcattcattcatttgtcaagactgttttgtttgctttttgagacggagtctcgctctgttgtccaggctggagtgcagtggcgcaatctcagctcactgcaacctctgcctcccactgggttcaagtgattctcctgcctcagcctctcaagtagatgggatt

SEQ ID NO: 66962 - DNA, 1265 bp, Homo sapiens
tggctcaaagacctgaccatgttccctctcccctgaccccggcaggaggctggtggtttggcacctgcagccattccaacctcaacggccagtacttccgctccatcccacagcagcggcagaagcttaagaagggaatcttctggaagacctggcggggccgctactacccgctgcaggccaccaccatgttgatccagcccatggcagcagaggcagcctcctagcgtcctggctgggcctggtcccaggcccacgaaagacggtgactcttggctctgcccgaggatgtggccgttccctgcctgggcaggggctccaaggaggggccatctggaaacttgtggacagagaagaagaccacgactggagaagccccctttctgagtgcaggggggctgcatgcgttgcctcctgagatcgaggctgcaggatatgctcagactctagaggcgtggaccaaggggcatggagcttcactccttgctggccagggagttggggactcagagggaccacttggggccagccagactggcctcaatggcggactcagtcacattgactgacggggaccagggcttgtgtgggtcgagagcgccctcatggtgctggtgctgttgtgtgtaggtcccctggggacacaagcaggcgccaatggtatctgggcggagctcacagagttcttggaataaaagcaacctcagaacactttgttctttgttcttgtttgttttctttcttttttttctctttctttagttcacagatctagtaagttaccctcagtttgttttaaaaagtgaacaaagtccatgtaaacatgttcccagggccaggcacggtgtctcgtgcctgtaatcccagccatttgtgaggccgagacaggcaggtcacttgaggtcagcagttcgagaccagccgggccaacatggtggaacccccatctctacaaaaaaatacaaaaattagccgagcatggtggtgcacgtctgtagtcccagctactctagaggctgacgcagaagaatcacttgagccaaggaggcagaggctgcaaataagccgagattgcgccactgcactccagcctgggcaacagagcaagactccatctcaaaacaaaaataatttttttttcgtagaggcagggtctcattctattgtccaggctggtctcaaacaccgagactcaagggatcctcctgccttggcttcacaaagtgatgggattaaaggtgtgagcgccactgcacccacccctg

SEQ ID NO: 66963 - DNA, 3462 bp, Homo sapiens
agctatgatcgcaccactgcactccagcctgggtgacagagcaagactcagactccaaaaggaaactttaaaatgaccaatccaagttttcttttctttttttctttttttttgagtcggagttttgctctgctctcccaggctggagtgcaatggtgtgatcttcgctcactgcaacctccgcctccctggttcaagtgattctcctgcctcaacctcctgagtagctgggattacaggcacctgccaccgcgcccggctaatatttttgtattgttagtagagatagggtttcatcatcattatcatgttggtcaagctggtctcgaactcctgacctcgggtgatctgcctgcctcggcctccaaagtgctgggattacaggcatgagccactgcacctgacctccacgttttattttctgtttgtgctttacttggccctttttctgcctgtaaaaccaacctacctgctcagctcatgggaaaattagtttcattttgtgaaatgaagtgttgcccgattgtagaattgcaaataaaatcaattaagatctttaaactaaatgtgttgtaattttgtttttttgacagatgcccaatgaacaccctgggaatgagatccaagaggcgataatggcatctgctctaataactagtacattgactctaggcttagattattcaccactgaataaataaacgtatttattcagcagtggggaacttacagcaatgatggggacagatacagtccctgatgtcatcaggctgatatgctgctgacagaggacaaaaaacaaacagatcaatgggtcaggaaagcaaggcttttttttttttgagacagggtcttgctctgttacccaagctggagtgcagtggggtgatcatggctcactgcagcctcgatttcccaggctcgaatgatcctcccgccttggcctcccaagtatctgggaccctggcatgatgcaccacatctggctaatttttgttgttgttcttttcttttttttccttttctcttttttttcctttttttctttttttttttttttttttgagagactgggttttgacatgttgcctaggctggtctctagctcctggcctcaagtgatcctcccacctcagcctcctcaaagggcatgtttttaggcataagccaccgcagccagccaaaacaaacaaacaaaaagtaacgtatactttgtgttaataattttgcatagtatattgaaaatttgccaagaaagtacattttagatactctcactacacacacagttaattatggaaggcaatggataggttaattgcttaactctcataattggccatgtgtggtgaaaatgcctgtaatcccagcactttgggaggccaaggtgggcgaatcacctgaggtcaggagttcgagatcagcctgaccaacatggagaaaccccgtctctactaaaaatacaaaaaaattagccaagcatggtggtgcatgcctgtaatcccagctattcgggaggctgaggcatgagaatcgcttgaacccgggaggcagaggctgcagtgagccgagagcacaccattgcacttcagcctgggcaacgacagcaaaactccgtctcaaaaaaaaaaaaaaaaactgtcataattattatttcactgggtacatgtgtatcaaaacacacgctgtacaccctaaatatataaaacaaacacatactgtattgtcaggtagtgataaatcctatcactacctgacaatacagcagtatgtgttttattttctatattacctatttttatattttacctatgtggcaaaatataggacaaaagaggggtagtggtaggaggtcctgttggagagcattggtatccagtaaggatttaaaagtatttatttaacaaagaatagcagaaagtggacggttgattcacacttggtgcaatctcggctcactgcaacctccacctcccaggttcaagcgattctcctgcctcaacctcctgagtagctgggtttacaggcaccagcgaccacgcccgactaatttttgtatttttagtagaaacggggtttcaccatgttggtcaggctggtctcgaactcctgacctcgtgatccgccagcctcggcctcccaaagtcctggaattacaggcgtgagccaccgcgcctggctgatctggttattttcaaaagattccatgagacgggtttcttcagtttacagaggaggaaactgaggcacagaaggataacccagtgagtcccaatatagagatggagactgcaaccgagaaaggggacccagcgctgaggtccccggaaatggtcatttatgggcttggggggcgaccagggcagcgcgcgctgacctatgacgtcatcgggacgttaagcatcgtagcattacctggacgtagccccatttctcttcccggacaggtcctctgatagtcgggtaggttctcaatcaagcctctcattagttatttggtctgtcaatccatttcattcctgcagtcttccgccccgccctcttgagctcgcccctgataggctggcgcgtccgtcacttcaaaaaggtccgcattccttccgcctttctccaggacaccgagggcgaggagggtggtaccaagcggcgcccaccctcagagcactacttccatctctgattggcttcgctgggtgcccgtcgctactccactcgccgctgataggccattcaaccgccgctctgcgcggcgccggctccgcccccgtcgggtgtttgtggtggggctgcggagtcgccgatcccgccggaagcgccaggacaatggggacccgggacgacgagtacgactacctattcaaaggtgcggccggtggggcacagacgggcgaagtcgtggcggcgaggcggcgggcagacgggccaaggccgcgctccaggccgctgggcccaggccggagcccggggcttggggcccggcgggtcaggcagccgggaaggccggagccgaccgggcagcatcagcttcgggctaggatgcgcggctatacggagccggaggcccggagagacctgggggacctaggacgcgccggggcggggccagagcctagagggggtggggcccggagcggtgggagaggctgttagggcggggcctccgcagggggtggagctttcccaagatttggcgggccgggctgggctgaaagcgtgattcgggatgggggcggggtttttaggggcggggctaaggcgtgatgggcgtgaccaataggtgggttgggcctgggcaaacggaggcggggctctcacgaggcttgtcctgattggggcagcgtgtttgggggtggggcccgggagaggcggggcaggcaatgggggctgggccgagatgagggcctgggggtgaggtgtgtggtggtgggagccttggattggggtgcaaagctgggattgagt

SEQ ID NO: 66964 - DNA, 858 bp, Homo sapiens
gtgcctaccaccatgcccacctattttttgtatttttagtagagacggggtttcgccatgttgacaggctggtctcgaactcctgagctcaagtgatccacccgccttggcctcccaaagtgctgggattacaggcgtgagccactgcacctggcctgtcattgatctgttcagtggccatttggcctttgctctgacttggtcactctgggttgagtgtccccagctgttcagggagaatgataatatttacatctgtccctggggcagccctgagaatgtggacagctgaggcctgcaaagcactggggacccagcctggccaaagtgcttgagggcaaaactgatggggctgggtgccatggctcacgcctggaatcctagtactttggaaggccgaggtgggtgaatcacttgaagtcaggagtttgagacagcctggccaacatggcaaaaccccacctctactaaaaatacaaaaattatctgggcgtcgtggtgcacgcctataatcccggctactcgggaggctgaggcaggaggatctcttgaactcaggaggcggagagtacagtgagctgagattgtgtcagtgcactccagcctgggcgagggagattccatctcaatacaaacaaacaaaaacaaacaaactgatggggctgaggagccactaaggctgtacagctggggcaaggctggaatggtgtgaaggtgtcgggaatgcctgggcagggcccgagtttcctgtcttatttcctgaggacgtgagaactgagcagacctccctggccttggccaggctcccgtagctgccgtggaaaggaggttaaggttggtggtgtagatgggggccct

SEQ ID NO: 66965 - DNA, 1031 bp, Homo sapiens
catcctgaaaacacaacgtcacatctgtttcctgccacaaatgcaaaatcatgagaaagtattagacaaatagcaatggaaggacttcctgcaaaattactagcctggaatttttgaaaaatattgatgtcatggagagaaggtaagattgataaaatgttccagaaagagagactaaattagagtcgttaacaacaaaatacaatgcttgatcctgggatggatttgggattttttgttttttgacacaggatcttgctctgttgcccaggctggaatgcagtggtgaggtaatggctcactgcagcccagaactcctgggctcaattgatcctctcacttcagcctcccaagtagctgggaccacaggaggatgccaccacaactggctaatatttttattttattttgtagagatggggtctcactgtgctgcccagactgatctcagactcctagacccaagagaccttcctgccttgggctcccaaagagctgggattgcagacatgactcactgtgcctggcctggactttggatttttaaaggactttattggaaacttttcttttcttttttttgagacagagtctggctgtgttgcccaggttagagtgcagtggcaagatctccgctcactgcaacctccaccttgcagattcaagcaattctcctgcctcagcctcctgagtagctggaattacaggtgcccacaacaaaacccagctaattatttgtatttttagtacagacagggtttcaccatgttggccgggctggtctcgaactcctgacctcaaatgatccaagtgctgggattacaggcatgagtcactgcacctggcctttgaatgggctctgggaattacatgataatattagatgaacattaattttctgattttgaaggttatactgtgattatgtgcaaaagtgtgcttatactaagtgaacatatagtgcagtatttttttaaaaattgatctgtcttagagatgggggtgggtgagtttactatgttgcccagact

SEQ ID NO: 66966 - DNA, 1154 bp, Homo sapiens
acaggcgtgagccaccgcgcccatccttttaaattttttgtagagacgggaactcaccatgttgcccaggctggtccccaacatctggcctcaagcgatccttccgtctcggcctcccaaagtgctccgattacaggcatgagccactgcacccggccagtctcaaaaaaaaaaaagttaaattctgcagaggttttatttattagaggacgctggccgtctgcaggtggcgcagcagcaccccctcgtgcctggggcggggctggggcggggccagtgctggggcggagccggagctgggggcggagccaagacgcggcaggggcggagccagcagctgcggcacagcggggcctgtgcggcccaagtcgtccctgtggcctccggccccgcctcttagggcgggacgtgcaaggcgattggcgaatgcaggcgagaggcggtcgctattggtccgcggcgctgtcggctcggcgggcggtgcccggacgcaggtgccggccggagcggagctagtggcgccgacgggccgggccgggccgggaccggggccgaggcgaaccgaggggcctgtgcggccgcccggcccggccgcggatcaggtaggcacgggcctgcaggtagggccggaggacgccagtccgcgggccggccccgggttcgaggccggagctcggcacccgggcgggacggctgggctcgatcccttggccacagccttctcggggacgcggggacctcagttcccgtgtcaaggccggtgggaggtctccggggtccggcacacataggcgcctctccgagcctcggtttccccacctgtgaaactgggtcatcccattgccaacctgatggggcttctgggaggattcaggaggtggctggtgcagaaaacgcctgacacacagtaggcaactgctaagtggccaatgcccttccccaacctccttctcagagcggctctgcctgcaaaatagtaagttataatataatgacccagccactttgcacaaagatgctgaaacaggatgccctgtgctatgtgggtgctcaaaacggggtagtcaaatgggcatgttgagctcattcagttcttttgaaaccatactgagtaggtggaagcagtagaaatgtcccctgttatacagttgaga

SEQ ID NO: 66967 - DNA, 1300 bp, Homo sapiens
gccaggatggtcttgatctcttgacctcgtgatccacccgcctcagcctcccaaagtgctgggattacaggcgtcagccaccgcgcctggccagggaagcatagcttttcttaggagagtgagaaataatacaacccaagctcctgctgtataccagccttgtgctgagttacatgcatcgtctccttgaatcctcactggccctacagaggcccattttacagatggtgcaaactgaggctcagagatgtaaatggtctagtggtccctacagccttgacaagaggggactcaaaccttagtccgtcaggctcattaaccttgcccctaacctccgcactggcctgttcccaggctcctggaaccatgggcctcaggccctgaggatacggggctcccggtggccatgacgacgggtgactgctgccacctccccggctccctgtgtgactgctccggcagccctgccttctccaaggtcgtggaggctacgggcctcggaccgccccagtatgtggcacaggtgacttcaagggatggccggctcctctccaccgtcatccgtgccttggacacaccgaggtgagtggtgactgcgtggatatcctggcctttgttgcctcttctctctgggcgcagtgagtttctcccagcctggggttagaagtccaaccgttgacagagggccaagtgggtaaatagagaaagagacacaaacagttatcgccttgtggaaacagaggcctagctttggccgggtctgattctttaggaaaagctgaaattccagattattatgtgaaatctgaaggtcaaatgttgtcaagtaacacacttttgggaggcagtatagggggcggtcaggagtgcaggctgtgggctcagtgcctcggccctgaccctgagtggacacctctctctctcccagagtgacctgggacaaattacttcaccactgtatctctcttttttttttgaaacagagtctcattttgttgcccaggctggagtgcagtggcgcagtctcagctcactgaaacctccgcctcccaggttcaagtgattttcctgccttagccacccgagtagctgggattacaggcacccgtcaccacacctggctagtttttgtacttctagcagagacggggtttcgccatgttggccaggctggtctcaaactcctgacctcaggtgatctgcccgtctcggcctcccaaactgctgggattataagtgtgagccaccgtgcccagcctctttttaaatttttttttttttttttttttttagagagtct

SEQ ID NO: 66968 - DNA, 1364 bp, Homo sapiens
ctctcttctctgaatttgtttttttgttttgttttgttgttttggagacagagtctcactttgtcacccatgctggagtgcagtggcatgatctcagctcactgcaacctctgcctcctgggttcaagcgattctcctgcctcagcctcccaagtagctaggattacagcccccccgccccgaccatgcccgactaatttttgtatttttttagtagagacggggtttcaccatgttagtcaggctggtctcctgacctcagatgacccacccacctcggcctcccaaagtgttgggattacaggcatgaaccactgtgcctggcctcttctctgaatttgctctcccaaactttttcacagtttcccagaacaagctccaaactgacatgattcttcctcaagattctcgtcacttctgtttccctgggttggtttccggacaaagggttccttttttgttaactttgtttgtgtgtgtacttgggggagggtgggatcggggtatgggttcagaaaggaggcaggcaggcatgcccttttgccattgcaggaggaaatagcagtccagggacaggactgttgagaaagcagccatgagcagcctgttgggctctttttaaagccgcccaactccaccccgcagcatgagaatctgagaaaaggatagaaaacagtcatttccaggcaggcgtggtcgctcatgcctgtagtcccagcactttggaagtccaaggctgaaggatcgcttgagcccagaagctcaagaccagcctggtcaacatagtgagacccccctctctagaaaaagttaaaaaatattagctgtgtggcgtggtgccacctgtagtcccagctactcgggagactgaggcaggaggatcgctcgagctagggagtccgaggctgcagtgagctgtgattgcaccactgcactccagcctgggtgactcaaaaaaaaaaaaaaaaaagaaagaaaaaaaaatacagtctctctgagaggaaattggcgttgtctggaaaatagctcttctttgtgtgacctcacagtctgccttctggccagaaatgtttgggaaacagtgactcatggctgtttggcctctgggccacgccccctgcctcctgagctgccctgggaaggacccggcatccccagagactgggccagggctggagacttttccgaggcagctttctgcagatgctttttatttctatttccccctcacaagggcagaggagcaggtgagcacttctctctggatgcacaggtttctcaggtagcacgggcttcaggtgtgattagatccaggggcccgcaaagatgtccttaagaatctacctttcccaggccttgcgcag

SEQ ID NO: 66969 - DNA, 3362 bp, Homo sapiens
acctccggctcctgggttcaagcgattctcctgcttcagcctcccgagtagctgggattacaggcgcccgccaccacgtccagctaatttttttatttttagtagagacgcggtttcaccatgttggccagtctggtctcgaactcctgacctcaggtgatccgccgcctcggcctcccatacccaaagtgctgggattacaggagtgagccatcgcgcctggccccattattagtgaattttaacagttttccgtttcttctggacgaactgtttgcaattataatgcgaattacggataatactctgatattattccatgccgttccgttgttgcctacaaagttcgcgctggagaaccgcgcaattgcgttacaaaaagaaaaaaatcacacaaaaagacacaatgttttaagaaagtttacgaatcgtgtgccggaccgcgggttgaacaagcttcatctaaaacttccaggaatctctagacaggatcattgcttcccctctgctccagctctggttacagaaagctgagagtgactaggtctaggtgtttgtgtggggtggggtggggagatgcctcctctatcggactcagaggacgcgcgccgggaacagccagtcggtgcctaacgcgagtgtatctcgagagagaagcgatcaacagctgccggtctgcgcctgcgcgcggcgggggcgtggcccggggcgagtggggccaaggaggcagccgggagcggcgggcgcaggtgttactggttgcgtcgggtcacgtgggcgcgcaggcgcagcgcggtgcagcccgttcgctcacacaaagcccagacgcggagaaaatggcggcaggggtcgaagcggcggcggaggtggcggcgacggagatcaaaatggaggaagagagcggcgcgcccggcgtgccgagcggcaacggggctccgggccctaaggggtgagtatcccacggtcctttgccacgggtaagggttcctctccgcggccgacgcgggcggcggctccgttaggtctgttggcggcctagccccggcgcggcctcggccccggctgttcccgtaccgcctgctcagggtagcggcgtctagggccgtgagcggggagccgggggagcctccagaatcgtcccctacaccgggcctcgagcctcgccaccctcagtccctccaggccggggccaaccccgtagtcgaggcctcaggcccagctgctgcgcatgggggttgatggcgcgggcccggaccggagagcctccgaggcctacccgaccgctccccgggagggtgacctcgggggccgggtttcagccccccgtcccctctcctcccggggtctgttttctgatccgtaacgtggggggaggagagagggtgcgcgcccgggaggcctcgcgcgcagtcagcccgagtcaacggtaaccgagcgagggaagcgtcaggaagggccgcgaagccgggtcggggggctcccctcctgccccgccccttagtccccgcgcgccgaccgcgctccgcgggaagtgcctccctcggaaccgcccctcgccccacgctctggccctggctcaagtccctcgccgtttcccgctcctcctccccgggtgcgccgcaggtattagtggagagatgggatctgctgcttagcgttcaccctcggaagcagacagatacgaagtcgggggaggaatcccctttttcccgtgtttcggggaagctgttctgtcaggaggcgggttcatttacttccagacttcatcagcttttcgagtcctgcttggggctctttgactccttggcttttaaaagtttctttaaaggaggaagcatcgacttgtgccccggtgaaactcattcattctgattacagacacttaagagagacagagaggttttggctccaagatcagcggccgggaaggaaggggaagcctgggtacacattgaatttcccagacatttatttcattgtggtaaaatagacataacgtagactttgccattttaaccattttttaagcgtataattcagtggcattgagtatactgactcagtgtgctgtaaccgtcactgcttcatgtccagaactttttcatcatcggaaacagaaagtgtagctattaaatactaactccctccgttttctttcctttctgtctgtgactttgccttcctcatattgtaatgtgtgaagcttagtttatggagattaaaagtgaatgcggttgagcacttatatatttaatttttttctttgagacagggtctccctctgttacccaagctgggatgcagtggcacgatcacagatcactgcagcctcgaactcctgggctcaatcgatccttccatctcagcctcctgagtagctgggatcacaggcgcggcaccaccatgcccggctaattttttgaagagaggaggtctccgggtgttgcccaggctggtctgaaactcctgggttcaagccatcctcctgcctaggccttccaaagtgctgaagttacaggcatgagctactgcgccctgcctagttgagcgcttaggttaagaacgttccctaagtgctagctatattggtagataataaatccggagaaaattccagattctttccctccttaagtagggagaaataaaataccatggttactggcccttagaaatgagaaaaacttcctctattcccagcattttactattgaaaactctgggaaggaatgtgttaattttgactttttcagcgtctatctacggaagctggtaggatttctgagggtggtatttggagggctttaagataaatttatttaccgtatgcaggaaggagtgctggtagaaccttgctagatgatagggtaaattaatagattacaaattttcccttttcccctgtccattttcaaatagtcattttgtgactgagtcattttacaaatacatgtggactgttggaacctgaaaattgtagaataaaatagccgttgtgagaaagaggctcaaagtctcaaagtctagtactagcttcatagaggatagtttaggaagctggcaacacttggatatttttgatagggcctgtggaaaacttttttttttttttttcattacaagtcttaaggaaatctctttagaagcctatacttttgcactccatgcagagtggagaggccattaacatatttgtatgttatgtatgttatgtaattaccataacataaggtaattatgctgtgatagaagttagtggagttgcttggtagaaagaatggaggaggtgacctccgccacctgctgggggcagggacctgttcctccatgacaggaagacgtgtggaagtggaggagaagaa

SEQ ID NO: 66970 - DNA, 2182 bp, Homo sapiens
ggcaagtgtagtccagtagaaaacctccatcttggctcctggagataatttgcattgtgggtctattaggcagaactgtattttcaatttaaatgatattcctacccagtctacttgcttcttcatattttcctctgttggaaatgcagcctgtattttatttattttgtttttgagatggagtcttgctcttttgcccaggctggaatgaagtggtgtgatctgcaacctctgccccctgggttcaagtgattctcttgccccagcctcccaagtagccgggattaggcacccaccaccacgccgagttaatttttgtatttttagtaagagatgggctttcaccatgttggccaggctggtcttgaactcctgacctcaggtaatctgcctgccttggccttccaaagtgctaggattacaggcctggccgcagcctgcattttagaaaggcctgttatgctaaagcgttcatatgtatgaatacttaggttgagccccagcagtgcagcctgtctggcttaccccgtgtggtctctggtgttagggaagcagtaacgttctgttattgccacgcaattgaggagcgtgggctcagtcatttcctaacatgtccataagccaagtaggtgtgtagaataattattttgccatgtttcaaggtgtctttatattaaagagtgtgcatgtgttctgtgcactcccctcgcccaatagagtggcagcctgagaattgaccgttatgagatgaagaatgtttgacaacatgcctgactttcaagtccccccaactcctgttaaaaaaaaatatataggtcttataacatgtgaattctcttcagtgaagcttcggcactgtattccctctttttttctttttcagacttgagcagtaaatgggaacacaaaaacaaatactcatttggctaaaggtctgtgcaggagagtgaggtcacagtagctcccagggaccgcctgagttctttttgggttgctcatctgcttatcctcctgatgtgttttaagaataaggcagtctttttaataattcacttaaatgttggtcaaaaatgatttcttagagcattttaaatagaggtagataacagttggtgttagattttttaatgtcttagttttttcaatattttgatgttttaagctgcagtagaatttgtcttagcagcctactcttgggattccatgaattccatccatgtttacacagggggaggagcaaccgtattttttattaataactgtgagtgccgtttctgtaagactgctgctactgccaagctgtcacctctacccctgagtcctgactgtgtgatctgctctggatggtttgctcgttaaacttcacttcatggaatgtgaccagactgtttacttgacaaattttgccctcacattcttgtcgatagttgtactgactacataaaataaatctttgctttgctattgtagaaccaaaagggaggtggtcttttaaaggctccattttcctataggaaagtatgaattagcagctattgcagatcccttaacacttaatggatggtctctcagggtagaggttggaattttatgagtttgtgaggaggatgggcattactgatgatctcagggacagcactactcatgctggacccccgggtgactgctaaatgatgataccacttgaggtaaaaagagggagaacgttttaagcaaatttttaatacaaaggattgagtcaggtgtgctatttctagactagactgttacgtggaaaaagtcctaatttctaaacctctctttttgttaaagtggttatggccatgggaaaaagtttggtttggatttgcttggtttctgggttgcaattacagctttttgatccaagcgtcttatggacacagactagaaacttcccatgcaactgggacttgaatttcggcaacatggttgcagctgttttgaattaattattgtgagtcttttattttttaaaggttattaggtggtagtcatagctggtaggaaatcaacttggggcctcttcagtcactattttgacactatgtggcattttcatcaaagtggagacaagggttggtggtccttgaatggctgctgctcttgaaacaaatggctttttaacatggcctcagggcggctgcatttttggaactgcttt

SEQ ID NO: 66971 - DNA, 854 bp, Homo sapiens
ggtgcctgggctggtcactacccgtgcactctcgcagctaggagggtccagccagggcgcgcgcaccaaggccccacgggggcgccgtgggggtgaagcgcaggtcccggagctgtagtcatggtgcgcctccccgccaactaccctttgtgtatttggcgcctccgtaggggctcccggcagggttccgcgcggcgcggctgcagacagggacagatagggttaccggaatcccggagaagggagcccggaccaggggagtgagagttcgttagggcgcgccttggggaatctgcggggtcggaaacgcgaacaacggtgtgcagggggaggagcccggggagcacgtgggcggcggatcccagggccgcagggcgccctccacctccccgctcctggcccgcaatgagggtaaccggaccggcacctgcaagtgacagctggggctggacaaatgccgggcacgggcctctggccggcctcagagctgttcagcgcgagcccgcggcttccagccaacctgcccgctatccccactgctctcccggctttcattcccccgagtctgagattcctgggcgccccctgctgggcggagccggggcccaagagggctgggctcctgtgcatgggggttgggggccggcttgagggtaggaggtcgtttctgcagtggacagggtgaacggtggaggacaggtggtgagccagctccccaggcctcgcggcagtcagttcactccagagggtagtgtggtggccgtgggcccgctgtacacacaggaagggctgtcccatctccgtgggtgatggggtaggggagaggtccctggacggacgtgttggctctaggt

SEQ ID NO: 66972 - DNA, 1617 bp, Homo sapiens
atgagtggcatccctctagaaaggccctgaggttagagattctctacgtctcgcttctattgtttcagggactgtgattccccagaagaccccatcacagatcacctggaggtgggcgtcgtctgggaggccgcaggtcctcgctggtcccggagactatgctggtcaggccagggctgggtccggggccaggctggcagctgtctggggctggggaggagccctgctgcatccctccagcccctccacgttcccacactggcggtgtggctgcctgctcagggcctggctcctccgacatggaggaggaaggggctgcagctggcacagccggggacaacacctccttgtcggtctcactggagctgggctctgcagtggccagcatgtctgggatgggccctgagggtttctcctcctggtggaaggaagaggcggagagaacccttctgggctctgggtcaacccagtcggcccccatcctaaggaatcaccagcaggagaggataggggaatacgtaagggtggactaagctctttttttctttttataaagatggggtctcgccatgttgccctcactggtcttgaacccctggtctcaagtgatcctcctgcctcagcctcccaaagtgctgggattagagtcgtcagccactgcactggcccggattgagctccttatgcatacgggagaaacatctgctctcctcaactaggataggtgggagccccagtatgcacacaagcgtggcctagagggagtgggcggggccaaggctacggaggcggggctatgggcaggcatggactgggaagatgctagaggagctagacatggattgtctgaggaccgagaccggccggcctcgagcagtgtggacaatcttggaggtgctgggggcccggatgtaagaagtttaggggcggagtcctagcctgacgggcgtggtccattccgggccgggcccggaagtagggcgctctccgagtgacagccagcggcggacgggtgcccggatgtgggggcggggtcggccggaggctgtaggcgcgacagggccgctccccgccagtccccgcagctccgccgcgcccgcgaccccggtgccgcgctcaccatcttcgacacggctcggcctcttgtttctgcggctccggcggctgcagcttaggcggcggccaccctctgggcagtgcgagttcgcgctcacgtcagcgccattttccacctctcagctctcgcgagactgggggcggggcctgcgcagggcgctcggagagggggcggggcctgagggcagagtcaccctggagctcaggtcggacgctggtgcaatcttgctatctatccccgggcagtcagcgcgcacttcagcagactccgtgcacggagatccgggatgacctcgctgtcctagtcttcaaagtgggcaccttcatccctctagtcttgtcccaagatcagccctggacaggcgataaacagcagttctttctttatattttttatttttttttgagacagagtttcgctcttgttgctcaggctggagtttaatggcgcgatctcggctcactgcaacctccgcctcctgggttcaagcgattcttctg

SEQ ID NO: 66973 - DNA, 1070 bp, Homo sapiens
tttgggaggccgaggcgggtggagcatgaggtaatgagttcaagaccagcctggccaagatggtgaaaccccgtctctactaaaactacaaaaattagctgggcgcggtggcaggcgcctgtaatcccagctactcgggaggctgaggcaagacaatcgcttgaacccgggtggcggaggttgcggtgagccaagatcgtgccacaacactccagcctgggcgacagagtgagactccgtcttaaaaaaaccacaaaactcaaaagtctctctctctctctctgtagacactccccttcctggccttcgtccactcttaaccagcctcgctggccccgccccctctgccctagttccgcgcagactcactggagctcttgggcagcccatcgcccacgctgaccgtgagggtccgaccgccaaccttgagcactgccaagtcgccgaagccgcgggagaaggtgacgctgcgggtgccgccaccgccccagccctccttcttcacccgaaactgtagtctatggggagagaagaaagcttgggggcgctggctgaggtcccccgccccacccaactctcgctggttggggcaggggcggggccgcggccggggccgaagcgcagttcggccgggtcggtggggcgggagagggtgcgccgcgccgagaccaccccgagatggtgctggggttggcggggccgtacgtgtcgctgaaggtgaggggcaggggcctccgcgtcgcctcctcgaagcgcttgcacagaaggctgacaaactcggtcttgaagacgctctccaggaagctgtcggcggcatcctcttggaggatgaagaagtcgtcctgtcgcgtgctggggaggggcgggtgagagcgtcaggtgggacacaggtgagggcgacaggtgagagagacagatgaaggtggctgaaggtggatttagggaagggtcagctaagggccaagtcagcggtgaccaggtaggagaaaaagggggatgtggcaaggagtggaagaggtggttacagaagagggccaggtgaggtctagtaagagggtaaggtgcaggac

SEQ ID NO: 66974 - DNA, 1008 bp, Homo sapiens
agagacaaacgcacacatgcttggggacacacacacaaacccagacacacacacactcgcctccagatctgcgcgcacatagcaaacccctatgcgcacacactgtccaaacacacagacacacaagagactcatccccaggcactgacacacacatgtaatgcacaaccactctgcccctacgtggacggacacacacacacacacacacacacacacacagcgcaaacaaacccacggcaaccccgggcgtgatcagtggcgcgcgcacttgcggacctcaggcaccgaccggagtcgcacagcgggatgccctcccccatccagggcaccacagccccacgccctcacagcccgatgcggacacacaaagtcccactgaatcacgcacccccgggccccccgcccgcgccgctacctgcgccgcgcccggggcctccgcgccgtcgccgccgctgtctcgccgccccgcgcgcgcaggaagggagggagcgagcgagcgcggcggcgtggccaggggagggggcgcggggaaggcacttcctgagccgcctgccagggttataaaaaaacccccaaactgcgcgcggccagaaaccccgcccgcctgccgccgcccggcctgggccgcgggctggaccccagccagggacccgggaactcgggccgccccgcccgggaccagcgcccccgccgcgtgggagggggctggggaaccgcggggggcggggaggggacgaagcgggagaaatcgagtggcggcggggagaatgggtgggggaggggagaaagaatcaggtgggggatggggatggaggccgaattgggtgggtgggggttcggggaaagggaggaagagaagggagaggttgggggagggggaagtttgaatgggaaggggtagggggagatggaggcctggaggaaggggctgagtgaggtggggggaggtgggggcctggaggaagggctgagtggggtggggggaagtgggggcctggaggaggg

SEQ ID NO: 66975 - DNA, 1407 bp, Homo sapiens
tgggattacaggcgtgagccaccgcacccagcctatcactgatatttatgatgtcacctccatggcactttgttggttgacaatacctgggatatctccattatagccctgttcgtgggcacagagttctctgccatggctggggactaggaagtgggaaagagctctaggggaacctgagggcttgggtggaagactggagagccaggaggagcaaggagcaggaagcaaggtggtaatgatgagaggctgagtcttccttcccatgccttgggtgggacatttctggtctctgacacaggagggcatgcagacctgggttaggctcctctctcccccacacaggtccggttggatcagcttattccccctgcagcttaactacctccatctcccttctgggatctcatgattgcctttaattggggccttggatgcccgggtcgtgttgcatggaactgcggccaagtgaggggattaagcaaagctgactaggatcgtttcatgcagatcttttcagagcctttaatagacacctgtgctttgcacagctttctaaaacttacttaactcctttgatattttttcctctgtagcattttggggtaccaggggtttctggaagggatacaggaatcattgctttaactcaaagagggtgcctgaatggtggaatttcaggcagggacttctggctaagcatcaaaggtttcctcctgctcctccctctctgctttcccttcccaggacccgggcactgagaacaaggctggcaccccacagctctctcaggggtggcccagtggggttgcaaattctaggcaggccaaattaggagctcacagggaggctggagggggtcagcccaggcagggctgggggctgggcttgggatgaacagggggactgaacagagaggcagcattctgaactggagttctgtgcctgtcccttgatctctggggggtctggaggcaggcgtgtcttctgggaaggcagcggagtcccctgggacaaagcccagggattagctcagtagacaaacatctgagtcttggccccctcttcccccgagtccagggtcacagtgggaggccgcagattggccctgttcttctgaaagtaaacaggcagtgctggcctggcttcccctacatccagccgccaggccttcgtgtccagcccctttgtgcggcggctccagcctctcagcctcctggcctttcactttctgcctcctccgtctacacccgctgacctcttgaagcgtctctagtgatggggaccctgggggcttggtcactccagtcctcgcttttgtgtgtgtgtgtgtgtgtgtgtgtgtgtgtgtgtgttttgtttgtttgtttttttgagatggggtttcgctcttgttgcccaggctgc

SEQ ID NO: 66976 - DNA, 1049 bp, Homo sapiens
tacagcctgggcgacaagagcaagactaaagatggtctcaaaaaaaaaaaaaaaaaaaaaagaaaagaacagaaaaagaaaaacaaaaagcctccacatagtccccttgctcttgtagaacagagaaggacttcatagacctttccccaacacaggttagtgccagcatgaccttgccaggccaccttaatagagcaaagatcagtagatgctatgggaagtcaaattttctcaacattagaaactctttccaacacacagaaaaatggaaagaattgggcacaggcacactcacccctagattctacaacgaactcattgccattccgcggtaaacgctaagccaggcgtcacacgctatgctgtgtgatgctagaagtgcgcacacttatcctgttggtggtggaatttacacgtgcgttcatgagtgtgcacgtgcgttagccgctgtgtgcatttgtgggcgtgcaaagggatgtgcctgggggaaaacctcacacagtggttaggaagcctgtgcagttgaactgtgggggctcccgtcttgcttctgccacttaaggactgtggggccttgggcgaattgcccaacttctctcctgcccgtttcctctttcagtgtggattcattcattcaacaaatatttacggaacgaacacctcctgcgtgccaggctccattccaagcactgggggttgcagcggcgaacaaaacagacccaaatgcctgccctggtgggccaggaaggcagaaataaagatgaagagttggtcaagtctgcagtatgtcacagggtggtagggctgcgtttgtgtacatggggaagaggctgcagctttagaggtggggggacctcccggggaaggtgaggagagtgaggtgcttctagggggatggaggggaggggagagtctttctggcagagggcaaagcaagtgcaaaggccctgaagcaggaatttactttgctgtttttttttttttttttgagatggaatctcgctctgttgcccagactggagtgcagtggcacaatcttggatcaccgc

SEQ ID NO: 66977 - DNA, 1459 bp, Homo sapiens
cctacctgaaggagttgttggaaggacgacatgaattaatatgtgtaaagtgataggccagtgtctggcgtataccacacatggggtaaggattagtttatttttatatgcggtaggcgtgtgtgtgttgggtgtctctgggcagcagctgagccaggtggccattagtgagtttgttgttgtgaaagaatctctctaacactatttaaaaaaccctgctgggtgtttaaaagccctactggggttgccatgttttggctgggtcccggctcttttgtataacagatgttacccagatgtcagctggggtcaatagagcctcagagatttggcgtctgcctctctcccacgacctgtgggaagcctggtgccctctgtgagatgcttgtgaattcccagggcctctgttctcatggttgcgtcttggcctgagttcctgcccgctgaactcttgccctcacccaccttcctggggccagtgctttgcaggtgaaccggtcctgtgttcttgattttcccccagatcactcttgcacatggactgcctgcaggttgcctctcaagatactgtgctctcccagtctggccaatgtagcaagaacctattgttcctgctgtagtttttttttttttttttttttttttaccattgcttgagcttctgcataagatgttgcttgacaaagcattccaccaccaacaggaaaagtttacacacttgttgcataacacagcatagagcgtgatgaccggcttggagtttaccaggctgtcctgtgaaggggaagttcacttaggacacccggggccaatggctgtgagcagcagaaggtgcctttgatgtcaagctgtcttgaacgctgctgctcccgggtgggtaagagctggcacagtccagaaaaattgaggcggcgacacgatgagagacagcaacccatccccagacaaacctcaagagaccagaagcagccacattgcaccagacttctggaaaattaggcaagcgttggcaacagaatatgttgtggactcttctcacagtttctgtaatcattaactgctttctcagggtgtggatattcaaggaccagaggtcaaagttacagcaacagcaccttgcaaggggcaggggtgaggagaacctccttgggcaggtcgtgctgtatgggataagcccagaactggtttagttctgagacgagggtgcagatagtattggaaagatgcatatcactcaagcctggaagaagaccagggttacacttaaccttgactgcagttcaatgcctcggtaatatggactgaattgtaactaagactgttctctgcaaggtttgcttggtttctgcatctttgtaattgtagcatttggtgttcacttgaaggatgggtcttcaagagcatattctccaatgtttctttctcacggctcaccacaacctcgacctcccaggctcaa

SEQ ID NO: 66978 - DNA, 1473 bp, Homo sapiens
cttgctcaacttactacgctggagagagattctatggtgactccacaggctttaaaaatatcttgtcacttagaggccctattaagtgactaaactgaatttttaacaatttatgtagtttattcagaactgcagagattttttttttaaggccctagagcagggtttcccaacctggcactactgataattctttgttgtgggggactgtcctgtacaacgtaggatctttaagagcaagcagcgtccctcttccccggcctccaccctctaggtgacagtagcagcctcccctccccacaatttgtgaaaaccacagtcgtctccagctacagccaaaagtcccctggggtgcggaatcgccccgggtgagggcgactggggttccctgaggaggcaacagcggcgcggggccccgacccaggagcaagcagcagcttcgtgctgacctaagctcacagcccgaggcctcatgaaccgaaacacggctccctggagggacgcagggcccgtggctggcggtgtccgcggcccacgtcgccccctggactcggacccgagcccccgccagtcgctcaccgagcccggcccctcccgcggggccaaaagcgccgactcgcggggacggagggactcgctccccgctgccccacgcgcggcccctcccacggtaccgccccgcgcttccgcttccggtctggggagaggtgcgctgcacgtccccttccggctcgcgcgggcagcctcgcagagtcgagcgtgttgggggttcggcgcttaggcgacaggcgcggcgggcgggagcggcggccgcgaaccccagccttgggcagaggtgttctagtttgcttagtgggcacaaagttgggccctggcctggggcagtagcgggggtaaggttggccctgggggcggggccaggctgtgagccgcacgaggcctgggggcggggctggttgtgggcggagatcagttccggggcggggctgaaggcggggaaccggctgaggccgtaccaggcctggagggcgaggctgattgggcagagaccagttccagggtcggggctgtgggtggggcccagttctcggggcggatggtataaggcttctagagcggggatgactgagcagagaccagttacaggggtggagacctccatttccggggcggggctgagcgggaaccaggctgtggttgtgacagccctggaggttggggctggctgtgggcggagataagctccgggccgggcggagggcggggactaggctgtgggtgtaccggtcttggagggcagtggtgattggcagagagcagttctaggggcggagctatggggtggcagcaagcctgggggcggggctgactgtgggcggagaccagttctgggggcgggactgtgggctgcaccaggcctggggagggggcagtgggtggagaccagttccaggggcagggatctgggtatga

SEQ ID NO: 66979 - DNA, 1500 bp, Homo sapiens
aggtcctgacatttatcacaagatgggtggacctggaggacattacgctaagtgaaataagccagacacaaaaagaaaaatattgcatgacgtcacttacatgaggaactttttttaatcaagagagacagctcaaatacacagaaataaagaatgaggcagttggggaagaaaatgggaagatgtgggtcaaaaaatacaaaatagcagatatgcaggatgaacaccacacaggtgatggtgattttacgcccttcccaaggtgtcattcagaggcacgtggtctccatctgaccctcactggtgatattgatttgatcacctggtccagatgttgtccaatttcttcgctgtacaatttctattactttttctccattccaacatacgagcagtttatagagaggcatttaaggcaattcaaatattctgctcgtcatgcaaatgtcccccagttgtgtcatgtagatgacaattcttgcctgattcaacctttaccactacgatggctacaaaatgctgtgggttgtggttgaaaatttgagtcttgagtagaaattggagaaatatgctggaccgtcagattccaccggggcacggccgccatgccaatccaaacttcaaaactacaattcccagcatcctctccgccccgcttccgtattagacgccgccaatgaagtcccgcgagaattggaaggcggcagtgaagcggaagccattactctctggagtcgattgccccgagacacatgggccaaggaggggtcagcggcgaattctttcggcctgttggggacccctcgtgtccccacgccagactggacctcccgtatgaacttctcttcgcatcggcggcggcttccgtcacctccgctcccccgatcctattcccagtcgtgtaagccctgctttccttaacccttctccccctcagttccaggggtcacgggaggcctatctggcggtgaggactaagagggtacgagggtcgggggctaaagagctaggcatccagacgaggggtgcgtttagatctcgcgatcagcgatatgaaaagctggggacgcgaaggataaaattggaccattgcagctagtgatgagagaagcattggtcacctgatcctgaaaagccctaagtctctggtgggggcggaaaagcccggctgaagtgaattcaagagtttgggggcagttcaggagattggggggcgtcaggatttggacatcgcgaggagaaatcaccttctttctgcgctgtagtcaattttatctcgtgaatgtcagcacattggtgttcttattagcacttaccttgagtaccttttatatttttaatttaagaccttctggttgcacttttttatttattttaattttagtggactcttgtaaatagcctatatgtatatttactattcagttcaacattttgttaattaacttgagttagtccagttatacttatcgtgattattaatattttccattgaatttt

SEQ ID NO: 66980 - DNA, 1310 bp, Homo sapiens
ctatgttgcccaggctggcctcaaactcctgggctcaagcgatccgcccgcctcggccgcccaaagtgctgggattacaggcgtgaaccaccgcgcttggcccaaacactacctaatgcataaagaggggacaggaggggaccgagccgaggcaaatgtcaccccgtgctcacccgacacgccgcgatccacagatcagctcacagagaacgaggctgaagcgcttgtccttgagacacgaatggcagagatgctcttcctttctggaaagagagcaaaggatgctttcggaggctgatgaactacgacattggttctccaactctcgcctgcatcagaatcaccccgatttctgtacccagaccagagttcccgattcagtgagtttgggaccagccgcggccacaggggcagctgacccgggctctctgaggaggcgccgcggcggcgggaggccccgggcgcggggtccggacaaggagtggcggggaggcagcccttagaccgccgattcccaaacccagccctcggtctcccgcggacccgacccggggcaggcagggcggggcggggcagggcaggacaggaagcgggcggaggcaaaaatgttcctcagacgcgggcggaggcgtagggtgacaaggctgtcgactcgcgcatgcgcagaagcacacttctgattcctctttcggcgctgcaaatggcgtatggggcggggcctgggaagcgggacttgaggtgaagggggtggagcaggtaggagcgggatgcaaaggagcgccaaggctggttccagccgcaagtggatgagaaatcctagtttcttcatgatttggagtaaacagagaagaaacagaaccctgaactggacttgcatgactcggcctgaggggcggaactggggctagacctaggggcgtggccttttaaatactccaaggggcggggctaaaggtggaaccagattgggagcggggcttggtagaaattcctagggggcggagacgagggctgggcggggcttaagtgacaaggcctagggatggggctaaggctagggcttcccatccaggttctcagctaccacggatacaggatgctcatcgatcgggtttctacctatcctccacgttgctacagtcctgtacacaggacacatatatttgcagctctaataggaaacagactctccttgacactcactcagtccttttgggccttttagttttccctttcattgttgtattgataacttctcctgtagagggaagccattgataattatttaaatagaacctttttcctggaaa

SEQ ID NO: 66981 - DNA, 850 bp, Homo sapiens
cggagcccttgagctgccgcttggccagttcccacactgtggagtatgctttcgttttcaacaaatcccagctcttgttcttttgttgcttcattctttctttgctttgctgggcgttttgtctaattctttgttcaaaacgccagtaacctggacagcttgcagtcaagaccccctaccggtgacacttgcgctcttcggggaggtaaacagcatttcctctcagctctgggttggaaaaagccgcagcagctgatgggcccgggaacccgaggccccgccccctaggtggtcctagcctttgcgcgtgcgcggcgtgtctgcgtgggcgcatgcgcataacggccgccatcttaacagcgcgttcccgttggcgtctgaggtaagtttttgtttctgggcggcgttcggtggtgtcccggtgcagccacgcgagagtagaagggtggaaaggggaggtgcccagtgaaatggagcctgtcccgtgcactttcgggcatttcgagcatcttgtgggctctcccaagtcgcggcccctcctctgagagccacagtcaggtctgtcctcaggggtcgaggcggctgcgctggggcctcggcccgggaggaggcggggggcacggcctttccattttccctgctcccctctgcagaagcctcatagggcccggcgcggcggctcacgcctgtcattcccagcgctttgggcggattgggtaggaggattacttgaggccaggagttcaagaccaggcagggcaacatagggagacccccccccccaaccatctctaatggaaaaaaaaaaaaaagtctccacatccagcgttgtgccttttctctataagga

SEQ ID NO: 66982 - DNA, 923 bp, Homo sapiens
ataaccacaccccagatacctaaaaaatagctttatgtttctacctgaatgtagagtgtcaaaagtaaatacaggatgcgcaaagagaaaaacaaattctcagataaaacaggaggaagaagcccccgaaaccaactttcaccccagtactcaccgcgacgagctggactcgccaggtacgggagattggggggatgaaggaccagtcaacctgattcgaacgacgaaaactcgttgtttctggaaaaaaaaaagtcacaaagaattgctttggaagagtttgaagcggcaatcaccgtgtttgcaaaaatcgtgaggaagcgcccttacgacagatcccgaaacggctcctggcccagggccgtcgcagtgacaactcgagtggctttttgaacctggcggcgccaggaggacccgcgcggccccggcggacgcgagcggagcaggcaaggtctctctaaggaggcccctcggcggcctggggcaaaccggtactttcgccaccccttccaccgctggctcccacccgtcatccgacctcgccaaagctgtattaagcccaaacgccaccaggaagaaaacgggtttggcggcgcggagaaagcgccggaaaacacagcagcgctccgtgacgtcacttccgcctccagcctcaaacctggaggagcgctcgggaactgcaacctcagccgagctgaacaacctcaggcagagagattctggtttactccccagtggctacggagacgccttggaggccttggagtctgctcaccttgagggatggaggccaaaaggggcccagagcacaaggctgaggttagaaccagccctgcggacggggctaacctagggtggggtcggtggtgttggcaaagttagaggtgggggctcccccacaggatgtgcacaatgctcacaaa

SEQ ID NO: 66983 - DNA, 1235 bp, Homo sapiens
ttcttagtattctttagcagaaagacttgcggtctacaaacgtttatattcacatacacaaatacgcacaccctataaacctaaaaagcatctttatctttcgccatgaaagtaatggtcaaaaataaaacacaacacaataagacgaaaccaaacttacagatgaaacattcgtttgcataagagaagacagaaaaggccccctagaaccaactttcacccagtgctcaccggaacactcagaaatcgccaggtccctgaaccgggaagatcctggggacggagccaacgcggatgcaaaaggcagcaattattttcctgccggaaaaaaattcacaaacgctgctttggaggcctttggagaggggcgcacagatgaaaacaccctgcggacaccgtaactataaacccgactcctcccgaggagcgacggtccgagcggacgctagcgggcccagcagacacgagcagagcgggccaggcctctctaacgtccgggccaaacccgtccttcaccccaaaaccagttcatctcctcggaactcacccaggccagtgaggccttaactctgaaaggcaaaaagactctcaggcgctcacagccggcgtcacaaaaggaacggcgcaccgctgacgtcatttacgctctccgcctcgggccaggcggggtttcgggactagggtttctgccgtgtaatacctcctcgaggcagaaaaattctactttccatctgcttggctgcggaggaccttggggtgggctcagcgtgggggctgcaggcagaaatgggtccagaaggcaaggtcgaggttagagccaagcctgtgggcagggctacgggcagggggcggggaggaatgtgggtccaggcccagaggaaaaggttgaagttatagccaggcctgtgggcgaggccgcagcagggcggccataggggaaggagccaatgtgttatgcatgtagaaaataggtaactacgtcttttgctctgttactatttcaacatttgatgtaaaaaacattttctatgcagctaaaggaattgtttttaaaaataatttctaggttttctgccttgctttaaaacatcttttctttttttttgagacaaaatctcactctgtcaccaaggctggagttcagtggagccatctcagctcactgcaacctccacctcccaggttcaagcgattctcctgcctcatcctcccaagtagctggaattacaggtgca

SEQ ID NO: 66984 - DNA, 1579 bp, Homo sapiens
gcttttttttttttttttttttttttgtgtgtgtgagacggagtctccctcttttgcccaggctggagtgcagtggcgcgatctcggctcactgcaagctccgcctcccgggttcacgccattctcctgcctcagcctcccgagtagctgggactacaggcgcccgccatcgcgcctggctaattttttgtatttttagtagagacagggtttcaccatgttggccaggctggtctcgaactcctgacctcaggtgatctgcccgcctcgacctcccaaatggctgggactacaggcgtgagccagcgcgcccagcctgcctttcttttgtagaaaggcttgtagctggtaacaacaaaaaacattaagtccaagaaaataaaataagaaactaaaggctcacagtctacacgtgttcatatttacatgcagatataggcacaccctaaacgactattttttttccatcagaaagtaatgtgtcaaaaataagaataggacatcaatgccagattctcagacgagacatttttaagcaaagaaatggaagtcagagccctcttgaaaccaattttctgcaggtgttcaccaggaacatgccggaaacgccaggttcctgaggcgcggaaatgcggggccggagccaacctgactggaacggcagaaatccttttactttcagaaagaaagaaactcacaaaggttgctttccaagcttttgaagaagggagcacagcggatgaaaccactccagaaaacgcgcggagtcgggacaaacacacttcccgacctggctcctgactgggacccactgagcctgcggcctctagccactggccgcgcaaggaggaccgacagcccctggagaagagagtgaaacgaggcggatcggagaggctcctgggcgacagcacccaatcgttcctttgccgccccccgctatctccgggatccccaagcaggcggaactcaccacagccagggtggactccaccacgataaaggcgaaatggcactgaccatgcggagccagcgccggaaaagatggcgattgtgcgctgacgtcacttccgctccgagcctcgggccgggcggggctcctgggttcgagtttcagccacataggacccagtcaaacacagaaattgtagtttcttcccgggtgggcgcggacaggcccttacttgggggcggtttagaggtgggacccggctagccggcggttcaggtggccggacctgctggaagggcgggcgtgggggatgggacgcaccccaggggatgctcctgcagagcttttcccaggtgggcacagtggctaaggcctgtaagtccaacactttgggaggctaaggcaggtggatagcttgagtccaagagttcaagaccagcgtgggcaaaatagcaacatcctttattaaaatatatatgtgtgtatacatatatataaagcttgtttgtatacatctcatgttcctagagcctttccatgattcttccatatggataaagctgccagtgaatggcatggtctatctcttctattcagtcaggctttctgtaggcctttatttcttca

SEQ ID NO: 66985 - DNA, 1975 bp, Homo sapiens
cccaaagtgctgggataataagcataagccacgatgcctggcccattacttctatttaatactgaaaaaaacctacactcaaacaaccctagtagtcggtctgatacttgtccctagagcctgatctcctgtatatggtgttacccccccgccatatgaccagaagacagtgcagacctgcacagaacaattcagtagtcaccagccacgtgtgttattgataacttcattacgtacctaagatgacttaagaacaaaatctaaaattttcaaaagtcggccgggtgcagtggctcacacctataatcccagcactttgggggaccgaggcagacagatcacctaaggtcaggagttcaagaccagcctggccaacatggcaaaaccatctctactaaagatagaaaaagtagccgggcgtggtggcacttgcctgtaatcccaggtactcggaaggctgaggcaggagaactgcttgaccctggaggcagaggttgcagaggttgcagtgagccgagagagcgcgcagcctctccgaactggacgcacagggaggactgatagtccctggagaagcgagtgaagtgaagcggatctgagaggctcctaggcgacagcgcgcaatcattcctttgccgccccctgctatccccgggaccgccaaggaggtggaactcaccacagcctgggcagactccaccaccataaaggcgaaaccgcactgacggagaggagccagcgccggaaaagatggcggtggtgcgctgacgtcacttccgcttcaacactctggccgggcgaggctcgtgggctccagtttcagccacgtaggaccgggtagaacacagaaattctagtttcctctcgggtgggtgcagaaagggcctggggttggctcagggagggggatgcagaactaggtccagagaaaaaggtgaggttagaaccgggcctccagacggaactgtgggcgaggggaggggctcgtactcggggggtgatttagaggagggacccggcctagccggtggttcaggtggccggtcgggctggaagggcggggatgagggatgggacgcatccccgggggatgctcctccaaagcttttatcgggcgagcgcagtggctcacgcctgtaattcctgcactttgggaggctaaggtaggtaaatagcttgagtctgctgggaatgggtgctcgcttggtgtcacaaaatcaacactgagacaaaggatctcagcaaggctagttttactttctgcagaatgggtgccactggctggcagtcttgccaccagagcacacattaacaaaggagacagggtttttttaaacttgaagtgtccatccttctgctgtgtccagcttccattggctggaacgggacctcaccttcctgtacttcactggattggctagcaacttagaacttcccaaaagaggcaatggcagaggagaacaaaggaagagaggaagtaacttgtggactgttgagagaggcaaaaacacttctaaatagggaaaggaataggccatgacctaatagttgcttggaccagttcaggcatgccagggcaaatatctaggctaaaatgtgggagctaaaaacagagtctattgatttctttattacggctggcagaatttaacaatattaccacaggtctttgagaaaatttggcttctaagagggattactatttatttcaatcagactgggaggaaagtccctttgaagaggaacctgtatttatttcattttctacaagtccaagagtttgagaccagcctgggcaaagtagcaagaccctgtctctctctctctctctctctctatatatatatatataaacatatatgtataaatacatataaatatataaatatataaaaaatatataaatatacatgttcaaaatgcttgttccctggtgccataaagaaattagcacttgaacataaatttaatttac

SEQ ID NO: 66986 - DNA, 2281 bp, Homo sapiens
gcctctgcctcccaaagtgctgtgattacaggtgtgagccagtgcatctggcctggctttaagtagaaaggcttgcagctggtaacaattagaaaaaaaataacctgcaagaaaataaaaattaaaaactaaaggcttagtctacacgcgttcatatttacatacaaaaacgggcacaccctaaacaactatgttttttccatctgaatgtaatgtgtcaaaaataagtggcgggtggatcacttgaggtcaggagttcgagaccagcctggccaacatggtgaaaccccatctctaccaaaaatataaaaaattagccaggtgtggtggtgcacgcctggaatcccagctactcgggaggctgaggcaggtgaatcatgttataaagttttcatgccacaaaaaaaaagcactcaaatataacattttcttttctcagcaaggcaatttacttctacagaagggtgtgccctcacagatggagcaatggtgagcacacaccaggacaagggaggggaaggggttcttattcttgaggaaagtggcccctgccgctttgtccttccccgatggctagggttagaccccacaggctaaactaattccaattggctaatttaaagagagtgacagggtgagtggtttgttggggaaaatggttataacagagcaggaaattggaatgagtcagggtggaaaatgagtcagggtggagtaagtaatcgaaataagtctgggtggagcaggtaatcagaatgagtcagggtggagcaggtgatcgaaaaaggttgctttacggagaagtttaaaagtagaaggcaaagaattaaacatactgacatattgattttttaaaaagaaatttaaaactcatatctaacaatcacttgaacccgggaggtgaaagttgcagtgagccaacatcgtgccactgcactccagcgtgggcgacagagtaagactccaaatcaaaaaaaaaaaaaaagtaaaggacatcaagacaacgccagattctcagatgagacattttttagcaaataaatggaagtcacagccctcttgaaaccatttttccgccgttgctcaccaggaacatgccggaagagataggttccagacgcgggagaatgcggggccagagccaacctcaccagaagggcagaaatccttttcctttcggaaagaaaaaaactcccaaaggttgctttccaagcttttcaagagaggagcacagcggatgaaagtactcaagaaaacacccggcggaggcggaacaaacacacttcccgacgcagccagacggactgtgcggcctctcggaactggccagaggccgcaccaggaggactgacagcccctagaaaagcgagtgaaactaggcggatctgagaggctcctgggcgaccacgcccaatccttcctttgccgccccgctggtatgtcccggacccccaagcaggtagaactcaccacagcggggtggactccaccacaataaaggttaaacggcactgaccatgctgagccacagccggtaaagatggcggtggcacactgacgtcacttccgctccgagcctccggccgggtggggctccagggcttgagtttcaggcacgtaggacaaagaaattctagtttcctcctgggtgggtgccggacagtgcctggggttggctcagggagcgggatgcagaaacgggttcagagaaaaagatgagtttagaaccggacctctggacggaaccgtgggcgaggggtggggcccatatttgggggcggtttagaggtgggacccggcctagcccgcgtttcaggtgcccagacgggttggaaaggcggggatgggggatgggacgcaccccagaggatgctcctccaaagcttatcctgggcgggctcagtggctcacgcctgtaattccagcactttgggaggctaaggcaggtggatagcttgagtccaagagttccagaccagcctgagtgaaatagcaagaccgtgtgtctttttttttcttttctttttttttttttttttttttttgagacagagtttcactcttgttgcccaggcctgtgcccggctcgaccctgtctctattaaaatatatatataaggccaagcgccagtggttcacgcctgtaatccctgcactttgggaagccaaggcgggcggatcacctgaggtcgggagtttgacaccagcctggccaacatgctgaaaccccgtctctactaaaaatacaaaaaaatagctgggtgtggtggcaggcgcttgt

SEQ ID NO: 66987 - DNA, 1989 bp, Homo sapiens
tcacgaggtcaggagttcgagaccagcccaaccaacatggtgaaaccccgtctctactaaaaatgcaaaattagccgggcgtggtggcacatgcctgtaatcccagttactcagcatgctgaggcaggagaatcgcttggaccgggagacagagtttacagtgagcctatatcacgccattgcactccagcctgggcaataagagcgaaactccgtctcaaaatatgtatatatacgagaggaaaaacgctgaatcaaaacatgtctctttcacagttaatacaactgtaatttctgatactggtataatgaaggcggcatcctacttcctggaagcccctccgttttgaagctctttgggaggtactgacctaggaagttcagctgcttttgatctcaaaaacacagcggagtattgctactttgctttataactgtggcaatatttgcttttatttctataaacctacaactcctgcacacttgacaaagcatttaactgctgagcaatttcgcaaacttcaataagcgatgccctcccacagccagatcatctcctccgtccagggctcaccggaacgcactgcaatcgccctgtcggtgacaagaggacgctggggcccttttccacaacagctgagatgcttttccttctggagaaaggacacaaaggttgactggctgcttttaaacagaggggcacggtggttggagaaaaaaacacgtctccaccggggaccctgggccaggcccagactgatgcgggcgcagcgggaagaggcgctcagaagagaaggcgggaaccccccgcctcggggtcctggcggggaggaggcgccgcttctccggagcagcagcgggaggccggcgcgtctcagacctagcagaagtccggagcgtcaccctccgaccctcgctccgcctcccgctaggccctcctgccccgccctgcctaggttgagcatgagcgctggctgaggtgaaaacccagctaggaagctgctggagagcggggaatacgtatagctgcgcgccggctggcacttccgcttccggttgcgcacggcattaagtgtaggggccgagccccaagagctttggaatgaggatgatgtgaagctgagagaagagctggggccacctcttcgacacgcgtacagaaaagtcccgttttctcgcatcccaggtggaccaggatccagatcaatctgtcgatattgggaacgacgccggaccaggaaacccagcgccaagggccgggttggaggcggggactggcgcagcgggcggggcacgcgtggaggcgtcacctaaggcttcgattgcagacagcgggatgctcatcgagtgcttttcttttcttttttaatttctctttttagttttttgagataaggctccggtctgtcgcctaggctggagtgcagtggctcggtcatagatcattgcagcctggaattcctgcgctgaagctatcctcccgcctcggcctccggagtagcttggaccacagttgggcccatcacgcccagctaagttatctttttctagacacttgggtctcactgtgttccctaggctggtctcgaactcctgagcctaaaggatcctcccccctcggcctcccaagcagcttggaccacaggtgtgtgccaccacgcctggctaatttatttttattttatttttatttttttgtagagacagggtctctctttgttacccaggctgatctggaactcctgggctccagtgatccttccaccttggcctcccaaagtgctgggattataggcgtgagccaccaccctagggaaattcttttctgcaggattttctccttgtttcttcaaccctctgcagggatataaacatatttacaaagataatcccgctgtagtcctagctactgcgggagaatcgcttgagcccaggagttcgagaccagcgacaccctgtttgaaagattaacctgatggggctgggggc

SEQ ID NO: 66988 - DNA, 1416 bp, Homo sapiens
aagcagaagaatttttctaagtacagatcaaaatggagtttcttgtgtcttcctttttctacatagacacagtaacagtctgatctctcttttccccacaagtaacagtctgatctctctttcttttcccccgcacatatactgacctaaccataagaagtcagtgagactgggaaatatgcatcattgatgcagcctcacaataccccggccccatctgttctctcactactgagaccccaccctgtctcccccttcaccgagatttttttttttttttttttttgagacggagtctcgctctatcaccaggctggagtggcccgatctcggctcactgcaacttccgcctcccaggttcaagcgattctcctgcctcagcctccccagtagctgggactacaggcgcctgccagcatgcccagctaatttttgtatttttagtagagatggggtttcaccatgttggccagtatggtcttaatcgattgccctcgtgatccgcctgcgtcagcctcccagtctgtcccctcaccactactctctttcacggagaccccacccccatctctcccttcaccgactccccgcccccgtctctcgctcacggagtccccgcccctgtctcaaccaagaccgagtccccgcccccatctctccctcgccgagtcgccgcccgcgtctctccctcacccagaccccgccccatctctccctcaccgagaccccgccccatctccccctcaccgagactccgcccccgtctctccctcacccagaccccgcccccatctccctctcaccgagtccccgcccccatctctccctcaccaagaccttgcccccatctccccctcaccgaggctccgcccccgtctcaccctcaccgagaccccacccccatctcgcccttcacccagtccccgctcccatctctccctcaccgagaccccgcccccgtctgcctccctccgggtggctaagccgcacctgaagccgcacctggtcgcagaggctactgctggggaaaccgttgggccagcggcggctaaagggcaggaggcgccgctgtggccacgcgcacttctgattccgctccagggtttcagaaggaactgagggctctggacccggcctcggaggcctgaggagttgggaggggcggcggccgcgtcctccgcaactctggggagaagtcttagtttccgcgcagccaaacgcgattggaccccgccctccggcttcactggggaccgtgggggcggaacccggcgggaggacgtatggggggctggaccatgatggagggagtcggttgggctggacctcgaaatgcctctgctcgctttcctctgcgcttatgccgccatgtacgagtatgcgctgtttccaggtggtttgttatacagcagtaga

SEQ ID NO: 66989 - DNA, 700 bp, Homo sapiens
tcccctcaccgagaccctgccctgtctgtcatcgagtccctgtctccccctcacctagtccctcttctctcccctcaccgagtccccgcccccgtcgtccgctcaccaagtccccgcccccgtctccccctcaccgagtcccgccctcttctcttccctcaccgagtccccgcccccgtcgtcccctcaccgattcccgcccccgtctccccgtcaccgagtccccgcccccgtctctcccctcaccgattccccgcctccgtctcccctcaccgattcccgcccctgtctctccctcaccgagtccccgcccccgtcaatcctctcaccgagtccccgcctccgtctcccctcaccaagtctccgcccccgtctctcggtcaccaagaccccacccccgtctccccctcaccgagtccctgcccgggtcttcctgcctccacgtggcgaagccgcacctgaagccccacctggtcgcaaaggctggtgcaggggaaaccgttggttcagctgcggttcctgggaagggggtgccgctctgatcacgcgcacttctgattcccctctcggggctcggaagcggctgagggctctggacccggtctccgaggcgtgaggcggtgggagggtcggcggccgcgtcctccacgaccctggggagaagtcccagtttccgcgcagccgacaacggttggacccc

SEQ ID NO: 66990 - DNA, 1892 bp, Homo sapiens
caggagttcgagaccagcctgggcagcatagtgagactccgtctctacaaaaaataaaaaattagcaggtgtagtggcgagcgcccgtggttccagctactcaggaggctgatgcgagaggatcgcttgagcttgggaggtcgaggctgcaatcgcaccactgcactccagcctgagcagcagagcgagactctgtctcaaaaacaaaacaaaaacttgataacatagtcataaattagcatttatcgaatgataaatatgtgccagactgttctaagccctttccctgcgtgatctcagtgaagtcccataatagccccgtgaggcaggtactgtcctttatccccattgcagggatgaggaaattgaggccctgaggtcgaagaggagctggtaagcgatgatgccgagataggccccggatcgcctggctctaaatccccagcccgggccccgacacacagtcccagggtgggagaggtggtcttcggggtccgggcaccgcgaccgcggcccaggcccgcccggccagctgcgcgtaccgtgtagagcgtcaggtcgacatgtcgccacagccaccggtcgtccaccagcctcttccagcggtgacagaccctgggggaggggacgcgcggttagaacgaccccagccccgggccacatcgcatctccaggtgccagctgcgccctccgccctgcccttccccccggaggcggggccgcacctggagatgcggatccggtcccgtaccgggaggtaagagaagatctcgagcaggaccgagtccggcagttcgaccaaagtcgccatgatcccgccgacacgcacttccgcttccggttaaagagacccgaggggtcctgggggcgccgaggcggctgacagggcggcggccgcgaccttcccgtagccggtcgagaaatttgaccttcctctcgctgggaagtgattcggtcccagggccggaccagccgcggatggggaccagaaaccagcctggaaagcgtggctgaggcagtgagaggcttgcgggaggtggctgaggcgtgatttggccgcgactgggaactaagaccaagtccagaaggcggggctggagtgaggcgaagctcggaggcggggctagagacgaggaccaagtccggaaggcgtggccggggtggggtgaggatcggaggcggggctagagaccaggaccaagtccggaaggcgtggctggggtggggcgaggatcggaggcggggctagagacggggaccaagtccggaaggcgtggctggggaggggcgagacccggggacggggctagaggcgaggcccaagcccggaaggcgtcgctggagttgggcgaggctcaggggcggagccagagaacggaaccaagtccagaaggcggggctggggcgcggctagggggcggggctagagacgaggaccaagtccagaaggcgtggctggggtggggcgaggatcaagcccggaaggcgcggctggagcggggcgaggcctaggtggggctgcagacgagaaccacgccttggaggcgtggctagggcgggtagaggctcggacaaccgctggaaggcggggctggggcggggcgagaccttgggggcggggttgacgacgaggacctagccgagaggtcgtggtctggacggaaaccaggctgcagcaggaccaggcgccaagggcgtggctggggagcgatggagacgctcggaaggtggggagcgggggacggagacagggagaagactacgccatgaaggcgtggttgaggcggggcgaggcctgtgggtctggccccgagcgaatggcttggtagagagtcagagaactctatttttttacttaatgatgcttcttgatgtctatgcacaaggataaa

SEQ ID NO: 66991 - DNA, 1809 bp, Homo sapiens
acaaaaattagccgggcgtggtggcgggcgcctgtaatcccagctacttactcgggaggctgaggcaggagaatcgcttgaacccggaaggcggaggttgcggtgagccggcaccgcgccattgcactccagcctgtgcaacagagcgagactacgtctcagaaaaaaaaaaaaaaaaagacccaaactataccaagctggggctgatcttatctcgcagaggtcagtccgctctccccactccgagagtggaatactgtgcttaataaacttgcagctttgccatctctgtgtgtctggtccaaatctttcttcaggacaccaagagcctggaactgtccggcaccatgcggtaacagcagctgttgggcagcgtagagtctactctaggatcaagcttcgcctactgactggagtccgtatcccgggggaacgcgatggccagagggaagaggtgagccaaatgctcaccaagcccagccctgaatgaacccagggggtcagaagggatgactgcagaactcgtcccccacccccaccctccgcccttgctcctagttgccgctgcaagaggcttcgggctcaggatcaggagcttacccctactcccgggaccctctggcgtccccaccatgtgaccgagtctccctgcaacaaacaatgacttcaaacgagctgggcgccggcgcctgacctctgactctcgctccacgccccttccctggccacaaacccgccgaggcccccctctctacccggcgcgcctaccacaggcgcgacacctgtcaagccttgggacaccgaaaccgtacctgggaacagcaaacacaccacagactgcagacccggaagaacttgtcccagtgttgaccacaccccctggctaggggcagggcttccggcctcgaactttaacttccgcttccggttcctagcgttaactgcgaccggggttcagcgctcgggtgaggagctggtggcgtcggcaggttcgaggcgattcgaggtgagggggtcaagcggagaggctcggagtcggagaaagctgtcgcgacccagccacccagggtctggggtcggtgggaggtgaggccagggagttttgtggcagggctttcaggcggcgagaaggggcggaggcgcggctccccggggttcgcggccctgggacaggggacttggggcctgggagtattcgagtccggggggttgggggcagaacggaaggctcagtaacctggaattttagggcctgggactgggagacttgtaggctggggcttctgggcctgggagacgcctgaagctctgactttgctgcctcccacccaccccccgctttgtgtagctccagctaggatgatcgaggttgtttgcaacgaccgtctggggaagaaggtccgcgttaaatgcaagtatccactggcagccgagaggcagtggtacccgcaggggtgcttggcgtgaggcaggcaactcaatctgtgttgtcggatggttttagttaaacccgggagagggggcggatggggtcctggcagatggtattctgccctagaatgtcctcttcctcgttctaccgcttccatttgccttaactgctctgcgcccagcacggatgataccatcggggaccttaagaagctgattgcagcccaaactggtacccgttggaacaagattgtcctgaagaagtggtgagtgcagcggtagagccactgggtggactggactaggccggaaggttttggttgggggagcgctgcaggcagccctttgcttaggcttggctacctcatttggcctaca

SEQ ID NO: 66992 - DNA, 969 bp, Homo sapiens
ttctacccaatagaaggccagaaagccaatccggaccgttagggagcccaatgggcgtcgccgccaggccccgttgcagagcgcgtctagccaataggcagcggcggcgggcgggcgcgggcgacaggcggcgcagctgaggcggagcaggcgctgcggcaggagggaagatggcggacgaggagaagctgccgcccggctgggagaagcgcatgagccgcagctcaggtgccgcgggggtcggggctggggcgggactgcgcgggcccgcgtaagcagggctcgagctcgccccttgggcgcggcggcagcgctgcctccctcccatggggtcctggctcttccgcgtcgtccccggggtaacggccccggcccgccctgttgtggggactgcgagcctcaggagccgccgggaagcctgaggaagctgaggcagggggctgggcgggtgagggtccggggagtccggggcgatggccctggccctgccggcccggctgatacctctcggcctaatgcacctgacaccccgggggacgtctctgcaccttgctgggcccgggggcacccctgggagggagacaccccagtaccctgcaaagggcgtagggtgttgcccggcctcgggtccacaacctacccctgctaacacccctactgtgtacacctaatgctgagtctgcgacatcgcccgtgacattctgccagacgatggcccctgtgcttaggcccgatttaagggttagccacaatgataatattgccagtaacagggcatgtttttctctgtgtcaagcgctttaagttctctctgaattgccgcaactctgggagccaggtagttattacttccaccttaccagcaaggaaactgaggtcagaaaactgaaggaactcgtccaagatcattcatttcaggggccgggggttggattaggacctaggcagtttgcctacaaatccccctcc

SEQ ID NO: 66993 - DNA, 1030 bp, Homo sapiens
tggtggtgcgtgcctgtaatcccagctactcggaaggctcaggcacgcgaatcgtgtgaacctgggaggtggaggttgcagtgagctgagatcatgccactgcactccagcgtgggtgacagagcaagactgtctcaaaaaaaaaaaaaagaaaaaaaaaattccagacctcttagtaatgcatcaacagtgattgcagagtggcaatccagtgacgggagaatactcatttgaggccagttttcattgctgtgctagaattctcggttgttttgatcaaactgcttttaaacgaattgctttcgatcaaaacaactttggattgggtctcctcacccatctccccaaagggctggccctggggaaccccttccccccagttcgcttaagcttgagtcatggaataaggggatcctcactggagatgggtctccaggcttggacttcggggccacctccacctctgtcgccattggacacacacagtcaccgaagcgtcaaatgtcaaaggtcctgtttattccggcaaaccggaaagaaaaagtgtaaataaaaaaagaaacagatccatgcactcaactcctgggggtgggggtgggggtgggagtgagggatgaggaatgggtgggaagcaaggagggaggggtggaaggacagagagagagagacagagagaggcagagacggaaagaactggagaaccagagccataaaaagaaaaagacatccataaaaaggcagaaagaaagaagtggtgtattaaaagcagagatcaataaaggagaagaggggaaattgaaaaaatagacagaaatacataggcagagaacaaaagcccagcaaaaaggcggggagaaagggcgtgacagagacagagagatcacccttgagggacacaggcagaatgaaaagggcccccagcccccagaggccccccaggcagcagcccgagccacagcattggctcaggggtccccagaggtgctgatgacgtgaaacagggtgacattgtagagcacctggtggccgt

SEQ ID NO: 66994 - DNA, 1544 bp, Homo sapiens
atggccatggtgctcagcacggccccgatcttgagcagcggcaccgacatcgcgcctccgcctcatgccccgcggccgcccgccgcgcgtcccttctctggcccgccgcggggcgctcggtccctcgacacccaggcgccccgggggggcgtgggggagggggcacgagcgcgagctgcggggcagggggtccgggacggggtgagggggggctcggggacgcgggctgcggctcggcgcgcctggcgggctcctcttataaagcgccggctcgggcccccgccccctcccgcgcctccgcgccgggcacttccagccgccgtgacgtcacgcctccggcccggagcccggcggggggcggggggcgcccagactgcccccaccccccaccccacgccctcgcccgccccccgccgaggacctctccatggggtgggggacctccccctggtggcattccccaagcgccccaccaccaccgcggtggcattccccagccccgccccccaacggtattcccggcccccctccccctaggcggtgttcccggaccgcctcccgcacgcagaccctcttcgagcctgagccgcgggaccccgcgcgtaaaggcgccctcggcccaccccggccacccaaagacggcagggggccggagtcgcaaatccccacccacccactgttgggacacccaccctggctacctaaaacctcggacagcgggcattggggggcgtgggggggcgacacgctcgtgcgctcccatgaatcgggtcaccaagggtctcctttagctgggggaaggggcttccttcccgggcactgagaccactctaaggatccttcggtcatttcgtgcccccagggtggcgtgatccagggccagcagacgaaattgtttgggtgcaggtgcggtcctggggtcacttcggccacgggaggagttcccacgactaccaagggcagtttcctacccagggaccacggagacctggcacgcggcttttaggaggcgagtcccgggcaggtgtctacttgcaactttaactttgggtgggggcggggcactcacgcttcggaccttcctcgcggccccggggaccccgctcccggcccgctccctcgggggagcgggaagcgcagtgccctcgccgcccacccgtccgcccacgcatcagccggcggcggcagccgctgggccgcggagaggagcgccgggctagttttaatttcctctgttttgcctgcactcacgccccctcctggcgtccccgcatcacctcgctccgccgccgccgtcgccctcagcccgcggccgccgccgtctggaggcggcgatgactcaggcctttccaggcggcggcctggggctgagggctctggctggggaggagcgccaagcatgagcggggaggggggctaggggtctcgaaccgtctttttttctgagctggacaacaccaagatgcaagtgtgacctgtagggatgactgttcctctctgcctcagtttccccatctgcaaagtgggtggtggagacctaacac

SEQ ID NO: 66995 - DNA, 1012 bp, Homo sapiens
ctgccccacactgggggctgcaggcgaggagtggagggcttcagaaactgggcatctcggccccgaagaggaagtcaagggtaagcaaccgcccccctccaatgccccctgaagtttccctcccaaccccattcagctccagcgagatggcggggtgggggctcggggccatggaggggttgagaaccccaaagacgccaccccccaaaccagcccagcttgaggctggatttgaagcccccctcgtcctctcccaagccagagagtgcacgtcccggcccctcccccgctgcgacccccgcccctcgccgccctgcagctgggggggcttgtggagcctcccaaccccgtttctccgggaaccctccgcgcccccctcctctcccggagccacccgcgcccgcacctgcccgccgggcccctacctgtccggccaggcctgagcacagcagcagcagcagcggcggcgggaccgtgagcggccacatgacgcgcccctagcccggcgtcccgacccccgcccgccctagcggcgcctcggcgcggggaccgccaccaggcgcgaccccgcccgcccggccggggcgaccctgcgccgccgcctcccccgcctcgccggcggccgggattccgccccacccccgccccctcgctcgctccgagtctttgttgcgggctccgccccccgccccgcccccagctcctcttcgggagcagctcgagcagggtcgggtgggggggtgggggcggggaagtgggggagccagcgccggcgaggggacctgaggacaggacttggcagcgccccccaacccccaggccattccgggagcgggtcgcggaggtgggggaggggtgcccgtcacgtgtttgtaaatttcaccctccgggggcatttcccacgttgcaggtgggacggggacgaatggttgggggagaggaataggaggaaggcctggtagcagagaggggaaatgatgaacgccccctccctaaaaactcaagagtcaac

SEQ ID NO: 66996 - DNA, 830 bp, Homo sapiens
cctctaggatcgtggcattgagtccagtagtcacagtggaggtgacgaccaaaggcgtgggggtcggaggcagatttggagctggagtctctgtcttggggatgtcagtggaggtctggagcagggatggagggagccttgggtctcgggtgagggcaatcaagacaaaagggaggcaccctcccactgtccccaggagctcccagtccggggacagggacagaggaggctccccaaagagcaccagaggccaatggagacaaaagtgtgccagctggaccagggctgccagcagagggagccaccgtggatggaggaggtgctgagtcaggctggccctgaagcccagtggtcaaggtcaaggtccaacattcagggccaggctcccggaagcctagcccacatgtcctctcccaaggcagagttcagcggccagcaggccacagtcagagagggagtggcggctccttctggcctggacagctgcagaggaactgggtcaaggtgggggttgggggggtgtgggaagagggtggtggggtcccaggtgaggggacaaggctgaggaaggggctgaagaggggcccactactcctggtgtttgtattcttggccaagaagatctggaactgagatgtagtgcaaccagtgactcccccaccagccaaagaccccaagcaatgacccccaccaaggaccccccaacccagtgacccaccaagaatgacctacatcaacagaccccagtgattctagaaccagagacccacaaacaacccctcccactcccatcaatggcctcaacctgttactgctccattcagtgattt

SEQ ID NO: 66997 - DNA, 893 bp, Homo sapiens
ccactaaaatgtcagctccatgggcaggggactgttgtctatttgctctacccacatcaccagcaccgtggaaaccaaaaaatgactcaaggagttaaccaagctggcacatcctggcagtacagtccaccctgagaagctcctgacacctcctacctggacaagacagggtacttctctgaccctcagtttcttcatctgtgaaatggaacttgccagggagaaagttatattaagggctggaatgtagtcggggtctaataaattagagcccttaatagttatgttgatggtagccttattccttggtctcctgggtcctgcccggccttccctgggaagctctgagctcaaagccctggaggagggagtaaaaccagaggctgcatctctgcaaggacacatccctgcaagtccacccctcccgcccgcgccttctcggtgcaaactcccgatcccagggaggggaaggcgggcggaatctgagcggcaggcgcagctgctccgggcgggcggccaaggttccctccctcgagcactggcattcctgagggaggggccgagcgcagctgcccgcctggccggaggctcgcttgcgccctctggtgtccaagtacgagaggccacgtggacttgcgcaccagcagccggtctgttctaggccactgtctgcagctcaggtggacctgggtggagctaggtctaccccctacctttcttgggctcccttttcttatccgggttcacgaactcagcttccatcactaaacttgctgtgtgaccctgagcaagacactcaacctccctgtaccacagtttcttagctgtgcaatttgggacaggatcctttacctttttagtgccactttttctttctttctttctttctttct

SEQ ID NO: 66998 - DNA, 1796 bp, Homo sapiens
gaaaaagaaaattatattatcatttgatggggggatcagggacccttcaataggcaaaatttcccaagctggctgaattgacatcactgtagggtgcagattcaaacagactcatcatcaagcccaactgcttcttagaggcagacaccacaaagccgtctcaacattctctttaataagcctgctaaacattgagaattatttgaggacagagaaagcctttttccaggaatgcttcaagcatgatgtgtttccttccctggtttaatatgtataatttgccttctggaaaaggaacccagagactctggcatgacttaggaaacaatagacaatggtcacaatttactaagcataactgtctcctgcaaggatgacgaaatccatatagcgcaaggatttgaagcccaagaagaggactttgacctatggatttctcaggaggtttcgttatggtggatcctggagtcagatggtcaaatgccacatgctgctcactcccggaattgggaaatagggaaaaaatgccagcacctcccctgtttgtgcagctgccctgttttgccaatttcacaaaggcaaaagtagggaaaatccatccaggctagggtagaaagatgtttgctctcctcctgccagccaatcccaagcaagccctgagttcagtgtcctgggtgtgcaaagctccttgctggcggaggggaaggctttaggatatgaccttcatggccaggcacagtggctcatgcccgtaatcccagcactttgggaggttgaggcgggtggatcacttgaggtcaggagttcgagaccagcctggccaacgtggtgaaaccctgtctctattaaaaatacaaaaattagtatttttgtactaagtacaaaatgagcttgctggcccatgcgtgtaatccccgctacttgggagactgaggcatgagaattacttgaacgtgggagacagaggttacagtgagctgacattgtgccattgcactccagcctgggtgacagagccagactctgtctcagaaaaaaaggggagaggggcgtggataagaccctcatggctcatgggacaggcagttctcctaccactctggcccccaaggaagcggatggggcacttctcaagcatatcttggaggcttggctgggaagtaagaaacacccccaactccgccccattggatttatagggattcttgccccacacctgtttagatattaactcagccactacaagtcaaggcaaacaggccagggccagggcagacaagaggacagacaagaggacagacatctgcagcctgtggcctcctgtcaccctcccacccaccatggaaatgccctggcccctagggtggattctgcttcttttgggaagccccctcatccacgctgagcctctgtgagtctggggaatggagggggctcagccggcttcctgcacatctgatgtctgcgtgattccagcttatgactcgtgttcggtgtcattttccctactcaagtcccttaatgcccttgtgttagtctactggcaggtacatcctggtgaccccccgagttctgagggttggcagtccggagagcattcacattcaggcccactcagactccagacagcccctcacaaggaccctcaaggtgaacctcacagtgtgggacttccccatgaggaagacagtgttggcaaggagccagctcattctctcaccaggaaacaactttatggaccaggcacctgtgacggtgggtgacaggctggaatgtgtgaccccaaagggaggcta

SEQ ID NO: 66999 - DNA, 1230 bp, Homo sapiens
gagtgagaacctctttcaaaagaaaaaaaaaacaaaaacagagaaatagttggattccacagttcccagcctggggcaccaagaaggagagaggactattgggagctcactgtgggagtaagaggaacaaccctcaccagtcccatgaattttagggactaaacctcaccaaggttttggtttttgcttgatctcttaataataataacaataataataatagttacaaagcactgatcaggcaccatgctgagggctttacttgtattaacttatttaatcctcacatcaatcctgttgggttgggaatattatgatccccccttaaggatgagtaaactgaagcagagagaagttaagcaacttgctcaaagtcacacagcagagtcaggatttgaatccaagatgctagctccagagactgtgcacttgattactgtgctccccagcctctaaactgctgccttctctctgcagaaaataaaaagggaggtgagacttttcggctccggatggaaacaaggtcagcgcaccaggatcttgaactgggagggaggagggtctcactttccggtatctagattccttagcggccttccccgtgtactgagtggacagtgggaaccagccaagcttgcctctccatgcctgtcccccattctgtacctgcctccttccatgtctgcatgtcctcatatgacaggctctacctcagctgacatgctccatgactcagatgcccagagctggctccaagccctgaagctctccccgtggttctcattttctccgaacatcccagcccccaccccagtcctgccctgtcccatacctcccttgcccaggtctgcttcagatagaaacattattgggcacctactgtgtgccagaccctgttcttggagctagggacccagctatgagcaaggcagcctctccctgccctggcgaagcccacagtctatcaggagacacacacaatcatcaaataatcacacagaaccaataatgaaatggcagtggtgatttcatgtggcaaaggagaggtttacagagtcatgagaggcaaatcagagaatgatctgggcctggtgcggtggctcatgcctgtaatcccagcactttgggaagccaagaggatcacttgagcccaggagtttgaggccagcctgggcaacacagcaagacctcatctctaaaaaaaaaaattcaaaaattagctaagggtgg

SEQ ID NO: 67000 - DNA, 839 bp, Homo sapiens
gttgtcctctacctggaaaaggtgagaggggccgggtgccctccgccagaggtgtgtgggtaccctgggggctggagaacccaaggtcggtcccctgggtgggttttgcagagagccaggccctctcaggtcagctcctccagttgcgatccctgtggtcaaggccacatggtccgtggtcatggccaatgccaacagccaaggcctcgtggtcagtgccacaaggtcagtgccccagtcagtggccctggccggctcagacaggactctgttctctccagctctcccatgagaagaacacggtgctgggctttcgggttcacaggatgctgcaggcggagttcctgcaggccgccctggtcaccatctacgactactacgagccttgtaaggaggggcccccgtgcatggggatgaggcctgcaaaggacagagccaggtgccaggcgaggagagaccgggcattgcgaaaagggggctgggcctggctagacataaggggcgaggtcttattggattgacctaggttggcggggacaggaaggagatggggcaaagttgaagggggactgggcgtggcctgctgggaatggatggggaaggggcaggctcttttgagtgggcgtggcctgttgacagaggtggctggccagggcccttcaaagtgaggtttgtagggggcagggccaggaagaggggaaggtctgggaggacctggagggcgcagcccagggacaaggaggggcaggagggagcctggactttggaggatggggaaggcaggccagggcccggagtgggtgaagacttctcaggactaggccaggtaggcaacgaac

SEQ ID NO: 67001 - DNA, 1618 bp, Homo sapiens
ttcttaaccattgcagattccctggatccctgagacagccggattctaccgggctactagagaccaagaatctgtatttttctcaagcaccgctccccccaaccacacacacactgcctgcccctatcaagggcacacagcaggtggcccagtgactagttgaacgcctactgcaagccaggcgctattacgcgatccactcgggaatcttggcacatactccactccatggtgtagacaccaggattctccccatttcacagaggggtaaactgaggttgagagaggtgaccgtagctaggacagagactcagggcaggaaaagggcccaggtcctcatgagcgccagattcccggggaaggagggagaacagagaggagggtgatgaactgggggagcgcgcgctgggtgggggggcgcggggcctcgccgcggccttctgatgcggccccgcccccacgagggacgtgaagacgcggaccccgcgcagcgtggggacatgtgaccgactgcagaggccgcgccgcctcccccgtccgaggtctgcgcgctccgccgcagggtgcagacccggggcgcccgcctgggtttggggcgcaagagcagaggcggagccagggcggagccagcgcgccgggtcccccctgaatcgaaagcgaaacaggggccggggaggaagggcggagccggccccgaggcaccgccccctgccctgcgcggctgctggaccgacgggcgcacccaggtaggggggcggctgagccgcgcagtgcggaccctcgcggggaactgcgccgccgccaccatgtctcaggaaggtgtggaggtaagcgatggctacggctgggccggggtcagccgcgacagaccccgaggagcggccgggaggcgcggagggggcttcgcagttcctggggacccccatcctagaaccccagatccttacccctgcctggcgctcgccccccttgaaaaggaaagtgactcccacgtttccccagagcgaaatgaggcctccccgaggaaaagcgggggctgcagggtcaaaggtcagaggccagagataacctggccgcccccccacaccttaggctgggacgctcgccccagtccgcgccttcccccaacgccctgtggggactttggctttttccaggaaatgccgtaaagggatgaaaggcggggggggggcggcggaggccaaaaccaagggtcaagttcgggccgggagaacggtgcctagagatgggggagggatgatcccgtttccccttcccccaccggaacccccctgtctccatcccagctggagaagagcgtccggcgcctccgggagaagtttcatgggaaggtatcctccaagaaggcgggggctctgatgaggaaattcggcagcgaccacacgggagtggggcgctccatcgtgtacggtgaggctgcaggggtcccgggcctggtgcggggaccgcgcgtgggagcgccgagggggcgtggtctagggagaggcgttgagatcacctcccccggaggtcccagccttggggaggctctgcgtcgcggctctgggtggcctggaactcccacagacccttcaagggcccttcccttatatgcact

SEQ ID NO: 67002 - DNA, 1019 bp, Homo sapiens
agaggcctgagccccatccccagtttctgcccctgctatctccacccaggatccaccagaagatatgaagcaggaccgggacattcaggtgagttggtggctagggcttgggatgggggagttgggagggggacatctgcaggcacagaaggatgtccattagggcaggaggggagatattcactggggcaggaagaggactcgtctgtagggagaggagggctgatgcttatgttggtgcagaaggggtgacacccccccacctcatccccacctgccccattccacaggcagtggcgacctccctcctgccactgacagaagccaacctacgcatgtttcaacgtgcccaggacgaccttatccctgctgtggaccggcagtttgcctgctcctcctgcgaccacgtctggtggcgccgcgtgccccagcggaaggaggtgatgacctaaaacttaacctcgactttgactgtcccgaactccactcctgactcctatcctcagtgactgtacctctgacctaaggatttcaatcactgagagtccaatccctgacctccaaactcagagctcagccttgatctctgatcccaacccctgacccaggactggacttctgaccttaaatgtgagaagcccaatacctccttaccccagaacctgacccttgacccacaattgaacagctactacagaaatcaaacctggccaggcgcagtggctcatggctgcaatctcagtgttttgggaggctaagtagggaggatcgcttgaatttaggagtttgagaccagcctgggtgacagggtgagaccctgtctccaaaaaaaaatgtgttttgaagacagggggtctcgccctgtcacccaggctggagtgcagtggcgggatcatagctcactgcagcctccacctcctggcctcaggtgatcctcccacctcaacctcccaagcagctgggactacaggcctgcgccaccacacttggctaatttttgtattttgtgtgtgtgtgtg

SEQ ID NO: 67003 - DNA, 577 bp, Homo sapiens
gctgcagtaagccatgatcacaacactgcattccagcctgggtgacagagcaagactctgtctctaaaaaaaaaaagaaagaaagaaaagaaaccaaatctgacctcaaaaacacagccccaaatctggcttctgaacctcctgactagtagttcacttctggtcaatgcttaactagttcttgcaaaagaggcaggaagccaagatgtgtagtgtttgccaatttctgtggtgtaaatattcccaccatggtcaatatcaggctacccacgtgaagtcactgattgagttgggttgctcaagctgaggccagccgctgcagcacactgctagccctgaccccaacctcagacacctctgacaatccttggtcccctctctgtaccttcctgcccaccaccaccaggtatcccggtgccggaaatgccggaagcgctacgagccagtgccagctgacaagatgtggggcctggctgagttccactgcccgaagtgtcggcacaacttccggtgagggcgctgacccccagctccccctcagccctgccctaccccagccctgcccctccctgccctg

SEQ ID NO: 67004 - DNA, 1382 bp, Homo sapiens
tcgtgggcccgggggacattatcagccttactttgggatattttaggagcctcggaatgcagaaagtggttttagcccagctggaggaaatgggccgaagcgggattcgaaccggcggattcgtttctctgcagcccggagccgcgtagccccgccccggtctccctagaaacaggcacccgtgtctccatagcaaccgctccatctgattgcccctccccgctcccagaggccacctagtgcgcaggcccgcctgatgtcgtcccacgccgtgccggctctcaggcgccggaagtgagctgcgcagcgccggaagcggcggacgcaggaggcctcgtggaggacacagcagcatgggacagtcagggagggtaaggcccggcagcttgggaggcaggtggcgcaggtggggtcccggccgaggtcgcggcgctgaccctttgtctctcgtcgccgcagtcccggcaccagaagcgcgcccgcgcccaggcgcagctccgcaacctcgaggcctatgccgcgaacccgcactcgttcgtgttcacgcgaggctgcacgggtcgcaacatccggcagctcagcctggacgtgcggcgggtcatggagccgctcactgccagccgtctgcaggtttgtaccccacccccagcccgcctccacccaccctcggcctagtcttcgtagctgcagtaatggctcccgctgtaaaactgtgggaggacttaagtctccccagctggaaaaaaagaccctcatggggagcatcatttctgcctttcagggcttttgctgggctggagtgagggcgcgcagcttgggagatagatagtcgcctaagcctgacagttaagactggaatctggagccgggcgtggtggctcatgcctgtattcccagcatttggggatgctgatgcgggaggatcacttgagcccaggaattcgagaccagcctgagcagcatggtgaaaccccgtctttacaaaaaatagaaaaattagtcggatatggtgttgcgtgcctgtagtcccggctactcgggaggctgaggtgggaggattccttgagcccaggaaattaaggctgtagtgaatcgggatcgtgccacttcactccagtctgggcgaccggaggagaccgtgttagaaaaaaaaagactagaatctggaggcagcaaagcagggttggaaactgacttctccccagtatctgatgcaagttacttaacctctctgggcctgagttcgctcatttgtcaatgggaagatgcgctgtgagcaagagacagagttagaactcaaatctgcgtccgactgactctaaaggctaagatccttttgctcctctgggcttgttgaaagggtcagatgcaagacagaccat

SEQ ID NO: 67005 - DNA, 1304 bp, Homo sapiens
acaaggagtgagtgcccctgtgctgctgtgccctgggcactgtggtgagcactggcaccagtaatgggtaagcaggcccccccatcctcccgaaggagggagatttttctcaccgtcatcaggtggcgcagggtatgggggaaaataacgcagggaagggagagtggaggcacgagggctgctgtcaacagtggttagggtggccttggggcctctcgcaggcaggaccacggacgtgggaagaggagcctcaagaatgtctgggtgtggctgggcacggtggctcacacttgtaatctcagcactttgggaggctgaggcgggcagatctgaggtcaggaattcgagacctcttggccaacatggggaaaccccatctctactaaaaatgcaaaatttaaaattaaaccaggcgtggtggtgggtgcctgtagtcccaaatactcaggaagctgaggcaggagaatcacttgaacccgggaggcagaggttgcagtgagctgaagtcacatcattgcactccagcctgggtgatgagagtgagactctgtctcaaaaaaaaaagtctgggtgcgaaggtaccaaggcacaagtctgcaagagcagccaggaagcctgggtgggctggtgcgagggagtgagtcgcggagcacagagggtggcactggggggtatggcgggcgggagcgctcttgggggaccttgtggggtgagtctggctttttggcggcaactccctggccaagtgtgagcacctggaagcaaaaggatggggcaggactccagcgctcgcgggtgctctctggtggccacggggagaagaggctttgggcggcggcgggtgccaaggtcagggcagagtgggggctggacccccacggggctttggacggcacagatctgaagtggagccggcaggccttgctggggctggactttggggaggaggcctctagtggggccaggtgtggtgggggagtagggtggccgctgtctgtgttaccagtggaccttgagctccaagactgcctggcccgcctaagctggtccattggggcccaatgcataaccctggctctgagcctcaatcctgtccacataaaggagtggagcccggtccccctccagggaggggaaagaactcgtgtccagggatccacgccatggcagacgtgggctcttggggtagcaggagccgccttatgggggaatagggctcagctggtgacaccttctgcccacaggtgccaagtcctgccctgccaacttcttggcagctgccgacgacaaactcagtgggttcc

SEQ ID NO: 67006 - DNA, 1691 bp, Homo sapiens
ctgcgccctgacgctgcccccgctggccgcctacctctatccccccaagcactggcgctatggggaggccgcgtgccgcctggagcgcttcctcttcacctgcaacctgctgggcagcgtcatcttcatcacctgcatcagcctcaaccgctacctgggcatcgtgcaccccttcttcgcccgaagccacctgcgacccaagcacgcctgggccgtgagcgctgccggctgggtcctggccgccctgctggccatgcccacactcagcttctcccacctgaagaggccgcagcagggggcgggcaactgcagcgtggccaggcccgaggcctgcatcaagtgtctggggacagcagaccacgggctggcggcctacagagcgtatagcctggtgctggcggggttgggctgcggcctgccgctgctgctcacgctggcagcctacggcgccctcgggcgggccgtgctacgcagcccaggcatgactgtggccgagaagctgcgtgtggcagcgttggtggccagtggtgtggccctctacgccagctcctatgtgccctaccacatcatgcgggtgctcaacgtggatgctcggcggcgctggagcacccgctgcccgagctttgcagacatagcccaggccacagcagccctggagctggggccctacgtgggctaccaggtgatgcggggcctcatgcccctggccttctgtgtccaccctctactctacatggccgcagtgcccagcctgggctgctgctgccgacactgccccggctacagggacagctggaacccagaggacgccaagagcactggccaagccctgcccctcaatgccacagccgcccctaaaccgtcagagccccagtcccgtgagctgagccaatgatgtggcctagcggaagctgcctcctcaccctaggtgttgctggagaaccctgagggcagggcccgagccccgacacatcccttcccccaaaaagcaacacctgtgcttgcagccaggtcaggcccagctgcagcccaggcaggagcagtcgcctttcccacccacagcgctggccacagggctccctgcagggtcagggaccagaccacgcccagaggaggggaggcactggcccccgccacaggactggagacgcaagaacaaaaagaaccaagtagagagagtggagctgctttattgcccttggagcccgcgctctcggaggctgtcttctgtcgccaagggtcccggaccgagtacacagtggcagctggcttagttggtggacggcctggggtaggggagggtggcaggtataagacttctgggggcaccccaagaccccagacacccaagtggcatcttgggggtgggtgggcagaggacggggtaatgtgaggacgaagcgggcacggagccagatggccagtctccaggcctggtccacggactggcagggaccccaggcacaagagctgccacccctctgcccggttttggaaaaaaacaataaaggactgtcccctcaaaaccagccgggggactgttaaattggctcagggctattggttggcccaacactccgtgaaggtgctgggacaaggcagggagcaggggctggggcagggatggagtcttacttggcccactcgacgttgaggatgaggtggtcgtagccaaagccggacaccccggc

SEQ ID NO: 67007 - DNA, 1618 bp, Homo sapiens
tttccaattcctctaggttagccctggggaagaagagcctcaccttcctccttgcgacagcctttgaagccttccgggtctcaatcctgaaggtgcggacaatctgaggatgggaggggagaagggtcaggctcctgggaccaagggatctcctttatcaacctcctcaacacaccccaccccattccggtctatgggcccccaagcacaagggtccccactccctgcaccccccaccctcaccttgaacttcttgccatcctcatctatcttgtactctgtcactgtctttatgtttccgttgatgacctccttgggaggcggcagtggagctggcagaaggggaaaaacagagaaagactgagccctgggtcatggggatcaggagcggcagggctggagggagaggcagcccggacaccgagtggcagtcctcactcacctcccggcagtcctcactcacctcccggcagtagctctggctctgggctggtgtcacctgtggccagagggatccccttgaggagctcgctggtgacacatttgtctgcaaaaggcagcgtaggaaggaggagtcagctccaggggcaggagctccccagctgcgatggaagggcttttgggatgacgcctacagcaaaagcggagaaaggcaggccaagggcagagggctggccaggcaacgcactgggatggccctgtggggactcggagtggcaaggatgggagatccctcgtaggaaggtgggtgccaggccatgaagccaaccaggcgccagtagagaaacaggagacgggagattacaacttcctccctggaggggaacagctgggaggcagtggcatgggaggaagagggacccgccggggaacacctggagttggcaacaggcgggtcccaaggaggatggcgcggggcaggggcagaccgtgacggggtacacggtgccagactgggagatggaagcaggcggcagtcacacggcttgggcctggccgcgaataccccgggcgaccgtgtacacttaccgtcctccccctcctcctccacctggtcggcccaactgggcttcgaactgcggaaacaaatgtgtggggaacgaagattaagtcagccaggcccggctcccgcagcctcggcgtacccaggccccataatacttcccagagcaccccaaccgcttcccgtgcccctttccgcgatcgccgactcactcaaagtctccagtaggcatcgcaaaaagtattctccacgcagcccaagcccggccagagagcggaagcgggcgaaaacgagacttccggtgccgccgtcgccgcctagaggggcccagccgcggcacccacagcgacacctgcggacggaggtggaggcgcacgcggctgtgtatgctactgggcgctgctggtaccagagtagggccagcgggggcagaggctgatttcagggctggtcctattaacctttaaaattaaaataggccaggcgaggtggctcaagcctgtaatcctcgcactttgggaggtcgaggcgggcggatcacctgaggtaaggagttcgagaccagcttggccaacgtggcgaaaccccgtcactactaaaaacacaaaaattaac

SEQ ID NO: 67008 - DNA, 477 bp, Homo sapiens
tggcaaaaaccgcaatgacttttgcaccaacttaataatatatactgccaggtaataagcaagtgactcctttctgaggaggtggcatttgagcagagtcctgaagggggagatagagaaccctgtgggtacttggggaaaatctattgactccagcctggcctgtgcctttttcccccaccccaccccccatcccatctagggttcaggtttccaaacagaggttgttgtctcaactgctagagaaggggaattccgatgggggttgcaggccctcagcctctgcggtctgccttctctcccactggctgtcctagtctttgagctggtgttgctgtgtggggctccagcttgggtgcctagggtcccccatcaaagggttcatgcctgaaatcccagcactttgggaggccaaggtggaggcaggaggatcgcttgagcccaggagttcgagaccagcctgggcaacatagggag

SEQ ID NO: 67009 - DNA, 1636 bp, Homo sapiens
cggcctccttatctggtttaggaatgcgcggtatccacgctcgctcgcgcgggagccacgcctcctctcccccccgcccccgagaccgccacacgcgcggggcccccacgtctccaagcggcactggaaggattcctctccgtcccgccaggggtcccgcctcgagattctgggaagactgggggtgggggaccagatcgcagcagcagctgcaccgcgagttccgcgcctggccgtgtcgccccacgagggggactgtgggctcagcgcgtggggcccggagcatctgacaaggacagagacagaggagggggtggaaatccccgggtgagtcaacccgtgcctgagaagggggcgagttccgacgctccgcccggctcggggccacgcgaggtccgcgccacgcgcgccttcacccacgacccatccctgagccggagttgaaagaggaggcgtctgagccacgcagtcactttctctttccttacaaaacaaagccacgccccccgccgggggaccggaggaggcaaacaacttggggaaaccgaggcagaaagcccgacgtccgaccgccctccccgtgggtgccgccccttggcttggaggctccacggcgcgcacatccttttgccctcgctcagccggagtcagccaggaggggtgttgcccccccccaaacacactccccaagaccccggtccccgagcacggcgtcctgcctcccaaagactccagtcgaaagcgctcggattcagccttctccccggcgccaacttcctgccgctgagaaaggcggggagcacagtctgcgggttcgcggccgaggcagtgggggccgcccggattcttggagagggcgcactgtgaccacccgctccgtgcagcaggaacccaggcggcgcgtgcgcgccccagccccccgattggggcccctcagctcggatcccgagacctcaggggaccaggcccgccttttctgcctccttgtcgccacgcgcgctcacctggctaggccggcccggctcccggccctggccggaggggccttggcgtctgcgtccccagggcggccgcggctggggctggggttgccagccgggctcggctaagtcccggggctgggacgagggacagaggggggggcggagagccgccgcctctgccccccgctcgccccgccctcctctcctcccctttccggcggcggctgcaatgaattccagatgtgaccggccggctggccggggcgcacgcgggggccgacaggagctgcacggagggccctttgtccgccccccccacccgatctctcactctgcccctcccagcccccacccgtgagaaccggccggcgcgaaacgtcacgcagcctggtgacgtcacagtactcctggccaggtggcctcaacctgaaacaactgtcttcaaccccaggttacctctgggcttacccctgggaccctggacttggaagaaaacacgaggtcacatttattgactcaacaaagagccttggaagtacctactaggtgtcaacgcagcaaataggcattaagtgcctactgtgtgtccacccaacaaataaattcctactaagtgcgatgtcctgtcccaaagacaaaattgatctcttttt

SEQ ID NO: 67010 - DNA, 790 bp, Homo sapiens
accagacaattctaacacagggtgatggggctttgaaggggggatacaaagaaagtcagaaagtgactagtcaattctacactttgccccttttcctgagctcgatttcagggtctgctgggttctgggccagatcttggggcgcacttggaccttggcaaaacctcactgcctcttctaccaagtgagaagtgttgcctggacactctagaaaccaggtgtttaatccgcagaggaggaagcacgaagaaaattaggttttctcctcgtctgagagctatcagagcggaaatctcagtcttgtgtggggacctgaaggctggggaggaagtgaccgccctcatatgcctgggctggctcagcaatttgcagtctctcctgggacctggggggttggggcagaggggtgatgtcaaggctgcagacatatgtggccgtctgccaggggaaccgtggctcccagacaaaggtgatgtccccggggacacacagacacaccgacatgcaacttccgcctccctcccacttctgaggcaacacaatgtcttcgccaggtcagccaagggagcgctacagaggactggaaaacgctggaggcctggacttcctgatggtcttggtgggggtcaggaggagagcttggcctaccccggtggcggggggcggggggctgagtgagagaacagtggaggaggaaggaaacagggcccttttcttggagaactcccagcaggggaaatagaggagaaggaagaggcttgaactagcttccactaattatagggtcagt

SEQ ID NO: 67011 - DNA, 1517 bp, Homo sapiens
acaaataaaaaaacaaaaccacataactggataaagaaaaaaccatctccgacagccttggaggcgggatgaaggcgtggcccggtgggcgtgaccaacagcaaaagtttaagcgttattggctgtattccttagttgctcactccagaactgcccacttatgggcgggggtcactccttcaggcttaacagtcattggctgaattgggccagagaggtctcattggctgaattcctgcaccggctcgtcggaggcgggacccaaagtaggctaggcctacggaagctgggtcttcttgctgtgaggtcgcgttccccagtgttacggagggtccttgaggcaggagtgaaaattgggtctgggggttagtcctggggtggaggtctgggcacgccgggtcggaccccctccatcttcggttttgcacaccccgctttccagcgcggagtcgcggcgggtagggcggcgtcgcgtgcgtgacgtcatccagcggcgcctcgcgaggctccagtggccttgacctcccgcggcgtgggaggctgcgcggcgatgctgcagttcgtccgggccggggcgcgggcctggcttcggcctaccggcagccaggtgaggccaggggctggaggcgtggtcgaaggatgaaatttgggggtgtccaggggtcgtctctcactttcgcccaacccttgcagggcctgagttccctggcggaagaggcagcgcgtgcgaccgagaacccggagcaggtggcgagcgagggtaaggcaaccggggtggctccaggaggggcggcgacagagaggtctgacccttgaccctaacctctgacccccgcaatcgctccaggtctcccggagcccgtgctgcgcaaagtcgagctcccggtacccactcatcgacgcccagtgcaggcctgggtcgagtccttgcggggcttcgagcaggagcgcgtgggcctggccgacctgcaccccgatgttttcgccaccgcgcccaggtgagcgagggctgtaatggtgaactgagtggcagagggatgaagagcgggatttcaggagtcacgatgactttgggcttgtacccttgggaaagtgctgtatttctacagcctccgtttctccacctgtcaaaggggaatgatgacagtttcccctgctgtagcgctgtgtgagattgaagcctgagaggtgacatcatctaagggttagggagacagaattctggagcccgactgattaggttcaaatcctgccttcccctcttgtccctcagtgtccctattttgtcagcggtcgggaggttgctgtgatgaataaatgacttaattctggcacataataagttctatagaaatgttgataatctttgttaactggtttttgcaaataagagcactaaaaagactaaaccattcctcggtgcctggaagaggctgtttgcattttagttaccctgctgttcataacatctctaagaaaatgtaggggccaccctgggcgcagtggctcacgcctgt

SEQ ID NO: 67012 - DNA, 692 bp, Homo sapiens
tatttaaagtcaaccagctgggcgcggtggctcacgcctataatcccagaattttaggaggctgagccaggtggatcaccggaagtcaggagttcgagaccagcctggccaagccgggagtggtggcgggcacctgtaatcccagctacttaggaggctgaggtgggagaatcgcttgaacccaggaggcagaggttgcagtgagccaagatagcgccactgcgctccagcctgggtgacagagcaagattccatctataaataaataaataaataaagtcaatcaggactgccttctgcctgtgtgggcctggccaggctaagcagccacacaaccctccctacctgctgggccacccctggctgaaaacctctctggaatgcctctcttgggattgccttcagagattgcaacacattctccaaacaccctcagtggacatagactttgatccttgaagcagcagatttgactaagtaaaaaagaaaaagctattaaaaccagttggctgggcgcggtggctcacgcctgtaatcccagcactttgggaggccgaggcaggcggatcacgaggtcaggagatcgagactatcctggctaacacagtgaaaccccatctctaccaaaaatacaaaaaattagccgggcgtggtggtgggcgcctgtagtcccagctactcaggagactgag

SEQ ID NO: 67013 - DNA, 650 bp, Homo sapiens
tgcctgtagtcccagctactcaggaggctgaagcaggagaatggcaggaaccggggaggcagaggttgtagtgagctgagatcgcgccattgcactccagcctgggcgacagagcgagaatccgtctcgaaaaaaaaaaaaaaatacacacacacacacaaaaactgtgttaatgcttaactacacaaaaatgataatcagataaatatgcatttatttagagaactgcatgttggtcagtccagtccctgcagagggaattcccagcatgacctcattcacttgtgaagacagagcaatccttgtgttttatttttttaagatggatctcactctgttgcccagactggagtgcagtggcatgatctcagccctctgccacctccaccttccgggttcaagagattctcatgcctcagcctcctgagtagctgagattacaggcttgtgcctccatgcccagctaatttttttatttttactagagatgaggtttcaccagtttgggcaggccggtctcaaactcctgacctcaagtgatccacccacctcggcctcccgaagtgctgggatgacaggtgcctggtcagcaactgttgtttagacatacacattttatctgctcgtccagcatggtcagccctccactt

SEQ ID NO: 67014 - DNA, 3297 bp, Homo sapiens
gagatgggggtctccctatgttgcccaggctggtcttgaactcctgggctcaagtgatcctcccatctcggcctcccaaaatgctgggattacaggtgggagccgcgcccaggtggatttttgtctgactctgttcattcctgtgtccccagtacctggaaggacgccaagcacacagtaggcgcttaaaaaacattgagccacatgttgagaaaagaacggcaccattgtggctgcaagtgggacttgggccgcgcgggggagctcgcgcacctcgggccggggcaagagctcagtggaacccgcccgaggaagaacccgtggcgcaggattttcccaggccttctgaggaccaggggcgtcccccgtcccaccctgtgactttgctcaggccgttccggggcgggaattcagaactcctcagccccccaagaaaaaaatatccccgtggaaattccttgggaatgaccgaggcgggggaaatatgcgtctctggatggccagtgactcgcagcccccttccccgataggaagggcctgcgcgtccggggacccttcgcttccccttctgctgcgcgacctccctggcccctcggagatctccatggcgacgccgcgcgcgccccacaacaggaaagccttaggcggcgcggcttggtgctcggagacttaagagtacccagcctcgacgtggtggatgtcgagtcttggggtcacacgcacaggcggtggccaagcaaacacccgctcatatttagtgcatgagcctgggttcgagttgccggagcctcgcgcgtagggcaggggttcgagcgccccttctccctgcctcgcctctgcgcctgggggctgctgcctcagtttcccagcgacaggcagggatttcgagcgtccccctcccctccctcgtcaagatccaagctagctgcctcagtttccccgcggagcctgggacgccagcggaggggctcggcgcgtagggatcacgcagcttccttcctttttctgggagctgtaaagacgcctccgcggccaaggccgaaaggggaagcgaggaggccgccggggtgagtgccctcgggtgtagagagaggacgccgatttccccggacgtggtgagaccgcgcttcgtcactcccacggttagcggtcgccgggaggtgcctggctctgctctggccgcttctcgagaaatgcccgtgtcagctaggtgtggacgtgacctagggggaggggcatccctcagtggagggagcccggggaggattcctgggcccccacccaggcagggggctcatccactcgattaaagaggcctgcgtaagctggagagggaggacttgagttcggaccccctcgcagcctggagtctcagtttaccgctttgtgaaatggacacaataacagtctccactctccggggaagttggcagtatttaaaagtacttaataaaccgcttagcgcggtgtagaccgtgattcaagcttagcctggccgggaaacgggaggcgtggaggccgggagcagcccccggggtcatcgccctgccaccgccgcccgattgctttagcttggaaattccggagctgaagcggccagcgagggaggatgaccctctcggcccgggcaccctgtcagtccggaaataactgcagcatttgttccggaggggaaggcgcgaggtttccgggaaagcagcaccgccccttggcccccaggtggctagcgctataaaggatcacgcgccccagtcgacgctgagctcctctgctactcagagttgcaacctcagcctcgctatggctcccagcagcccccggcccgcgctgcccgcactcctggtcctgctcggggctctgttcccaggtgagtcggggtggggattgccgtcgggccagttctccgaagccccgggaggaccggctcccgggtcaggtcatgcatgcttaggtagctgtttatgggaaggaggggctagagacagcgattgaaaggcaacagccagtaggttcgaatccagaccctgcatacctccacgtgtggccttgggctatagattgcagctttaaaaaagggtagggggttggagatggaggggaggggcgggcctcgttttgttgcccaggccggtcttgaactccgggggtctagccttacctcctgcctcagcctcccgagtagctgggatgagaggtgtgaaccaccgccttgcttggctagattgcgtctcttacagtttctcagctgtaaaacgggaaacgttatagcggccacctggcagggtatcttggcccagcgcagcacctggccccaggactcgatcatgatggtttgggaacttggctctgtgccaacccaacaaggcttaagggacccccacccccctcaagatgtatattctgttcctcatcctctctgcccctggggaagtccagggctgcttctacttgggggaattccagagctgacttatccgtggcccaaagctgagaagtgggacgccccagcacaccctcccccagctccagcccagctagggaagagggaaggggtcagagggtctttcatggtggtgtaagtttggggaaccaggagggtgggagattgacagcttggttaacagctcaacaaagcctgagatccaggccagcacggtagttcatgccagtaatcccaacactttaggagccccaggcgggcgaatcacttaaggtcaggagtttgagaccagcctggccaacatggcaacatcccgtctctactaaaaatacaaaaattagctggcatggtggtgggcgcctgtgatcccagctgctcgggaggctgagggaggaaaatcccttaagcccacgaggctgaggttgcagtgaaccaagattgtgccactgcactccagcctgggagacatagcgagattctgtctcaaaaaacaaagcgttctgatccggactcagacccagatcgcactgctttctagctgagtaaccatttctctctatgaaatgggaatggtcccagaatctcccttggagaatgtatggagccagtgtcctcacacccccatccaagatagaacaaatctgagacaggaatctttgagtgaggcagtgctgggctcagacattttttcccaccttcggaggcagcagaatctgagggacctgatccaaataagccccttctttctttcttttcttttcttttttttttttttttttttttgagacggagtctcactctgtcgcccaggctggagtgcagtggcgtgatctcggctcactgcaacctctgcctcc

SEQ ID NO: 67015 - DNA, 1451 bp, Homo sapiens
cctgtaatcccagctagtctggaggctggggcaggagaaacgcttgaacccgggaggtggaggttgcagtgagctgaggtgcagtaagccattgcactccagcctgggcaacaagagtgaaactccatctcaaaacaacaacaacaaaaagaaagccaatgtggctagaatacagggaggaagggggaagagaacacaaaatcctgggagccaggagtcctagtgatctctaataaatgcttaacaaataagagcttggcaacagatgaggccatggtgaggggtttggattttagtccatatttggtgggaaaaagacgtgaagagacacacctaatttgtgggtttttttttttttttttttggacaaatgtataaggacctccttaattccctctgcccggttcctaccttccaggtccaccccgtggcgctgggccaggtgaagaacattgtccccgactctgccactcactgggatccgctggcctgagcggtctacgaacaccacgttcaccctggggacagatggaagtgcgaatgccgaactggatgatgggctcagggcccgggtagaatctagggttaggaagtaggaattgaggcttgacgcacaggtactgaatagggcaaagcagaagggggacctcgagatgaagctacagggcaagatggggaccagaggaattccgtgggatgaggaatgggggacttggccccctgcactcacacgtccccgggccgctccgggccgcccgcgtcctcctctccagccgggcgcgagcctggaaaacacggttcggtgagcggctgcgccgagccccgccccgccggcatctgacggattaacgctgcccgccccgggcgccccaggtacctgtcgcttgaaactttctggttgtccccagcgccaccccctcccccgacccggaagtgcccccaggtctgttccaccaggtgcccctggcagcctgcagtagaaccctggcactcacgcctccccgggccatggaggcggccatgacatgcatcacgtgactcaccgactgagcatgcgccgcgccagggaggcgagggaaagcccataatcaatggaacataagcgcagatgtttgcttagggcctgcggtgaccaggtgggaagagcagggcggaatccatctcaggtaaacccgcggggccatcccagacctcccactcaagcccactgtttgtcccaagaaccagccaactctgatttctttaaaaccatttacttacaaactttaattcagcaaaggtccgtgtggggagactggggtggggtcgggggaatagtccccttggagtggatgtggacccccagagtcaagggagggaagctggtggcccagttggctgggggcaaggcccagggtcacctcaggtcgacaggtcctgctggtgggcgggcccagagtttatcttcatgg

SEQ ID NO: 67016 - DNA, 1388 bp, Homo sapiens
tgagagactgcagacactgagaggaagacccagaaagaaacctgaccatccttaatgatccctgtcccgatctgtccccaaattcagcccctcccaacatccctggggttccactagccacgtgcccacccggtgtgctggtgggccggagagcagggaatctcagcagcaggaagcgagaacctatttcaccgccatagggcagggcagtatagatgccatttccctgggtccaaagagcattgggaagcgctgccccatgctggccccatgagaagggcactcctagcaggaagattagccacgaggggctccatagaacacaggcctcgcttccttcctgtaggtctgtaggctggtggcagaagaccccattttcccaaattaatcctgaggttttgggggctgagacccaggggctgctgttaacttccggatttatctctgagagcagtgaataaacgcgtgatatggaggggcgtactctccgcagtcctgaaacttctggatgtgaggtcccgccaccctgtggtagagtgggtggagaaaagcatcatccaagcagggggcaactggtggtccaatgtaccagcccattcacaattccccaacaggaccaaagctgtccgcccccttccattccccgcccgcttccatcacttggtgtcgcccaagcctgtggtcgcccctagcaacgccctccctcacttcgcagtcggtttcccctttcatcatcgcccccccacgtcccgctcttggtctctcccgatcccgcgtggatccggtgcttgggcgcccccgccaacgacccccgcgcacctcagcgttggtgtcgcccggttccccccgcgcacgcgcaccgtggtatttcccgccacgctcctacaccgccccccccaatacctggttggtcacgtcccccgggaggccccggatcagtatcttgcggcggttacggaactggcgctcggtgtgttccaggcgtttccggatctcttctggatctagaggcggcagctcttcttccggcgcccggcgctccgcggcatcgccggcttcgacttcggccccagacttagggctcagcgggggccggtgagtaacggacacgtccgccgccatcttgggaaacccggcgccttctgggaccagcgagccggggcggagcggcatagagcggcaacgagggcgcgcccgtcgattggctgggagaaaccccacctccttcccgccccccttgccccgttggctaagccccagcccacctctcaagagttcaagctgcgtctgcgcgccacaggccccgcccccttccgtcgcagcgacgctactcagtggatgtgcacctgggtgggagagacttgcagcgcgggtggaatcaaaccaca

SEQ ID NO: 67017 - DNA, 2263 bp, Homo sapiens
cactcagctctggacggttcttcccccattgcttctgtcggctgcatagacgtgaggggcagataggtgctctcctccctaacatggtaactgccgctccgttggtgctccctgaagacgtacattaaggccagtacgatagtcaccacgcccagggtcagtaacaccgccacgaagacggggacaaagtgggagctcccagctgtgcagagaaagcgctaagtcaatatgcgtcccttctgtctccaacccccccgccccccggcttaccggtccagacccgcagccccgtgttagctcaccctcaatgtccatcaccacgaccagggtgtatttgcctcgtgagctggacgcttggcactgataagtaccattatgtgttacgttgacgaagaacgggatccccaccggcacctcccggctggagccttccttcaaacaccgcagctcggggtacgggttgcccctggcttggcactgcaggacgtgtctcgttttatctttccatttcaagtgctgggggcatgtggctcggtcaattttgggaccatctgtggaaccaccatgtgtgatcagacacccaacacacccgaggcacagtggtgcagaggagcgtctaatctttccagggcaggggtggagggattaaaggtcagggtgaccgactcacacaggactcgcagctggacgctactgttcctgtgcaagaactcgccgtccacctcgagagtggcactgcagaagaagctgcgtccgtcgtcactctcggtagcatttagctgaagttgagctggctgccccggggccgcggccggaactccgtccagcgtgacctggactcgagccccagccatgcaactcacggtcactgtggacccctcatgggcggtgggctcgctgaggttcacaatgggtcctaggaagcctaaaggcggggcattgcccaggagcttaatgaacaggaccttcctgtgggtcaagccgctccctccgccctcccctttcctctcgggatatccgggccacgctttcggccgttcaagcctcgccctctttccgcgctgtgtccagcttcgggcactcaggcccaacccacgttgcaactgctattggggcaagccaggccccaccttttcggctagtctccgccccctctgccacgcccccagactgctgaggccgcgcccccttcccacgcctcctcttactaaagaccgtcaagttctcccgggcctcccgtctctcgccccctagggtcacgttgcagacgatctcccgggcaccctcctgatccgcgcgcgccgtggctgtggctgtggccgttagcgtgtccccgtggttcatgactgtcgcattcagcatctggtcccccagcgccaggtagacctgggcctctgaggctggaaaaagcccgtctagggtgcagtccaccggccacgacgtttccacctccaagaaccggggggccacgaggcgcgggggggtcacgggcaggactggggagaaaggtgggcatagtacaacccccaggactgtgccttccccaggacaccctcatcccccccagtcaggatatcttgctgactgggtcacccttcttcacaggacacacacacagggccatgaaaacggccttcttcaaagatcccacggctcgggcctcccttccggggccaccttgcccagtggccgggggctttccttcccagaagcctgtgaggtccggggtaccccactctcaggaaccccaaggtcagggcaccgtctaccctggctcagctcgtcacccaccgtctgaagccccttctctcaccaaaggttcggagctggcggggggctgaggtgttcacgaacagtcccagcccctggggctgcatgtccagttctgtgcggcatgagaaaggggctccgtggtcgtctctgctggccagcacagtggcagtgacctccgctggctcctccactgcgggctgccggctcagctcctcctcccagcgaagcagcaccaccgtgaggctggtccggggcgacccatcctccacttggcagcgcagggtgaagttctggcccaccggctgccaaggaggcaggggtgccagctccacacgctccgggagccctgagagaggaggggaggatggcacttagcgggtcctgcaaacccacccactcaccccagggactggggaggagacagggtggtcctgccgagaactgtgagctttgagttaataaacttagagggcttagagctgggccagtc

SEQ ID NO: 67018 - DNA, 886 bp, Homo sapiens
ctcctgcctcagcctcctgagtagctgggattacaggcacacgccaccgcatccggctaatttttgtatttttagtagagatggggttttgccatgttggccatgttggtcttgaactcctgacctcaggtgatccgcctgccttggcctcccaaagtgctgggattacaggcgtgagtcactgtgcccggccctgtatttttatttattttattttttcagaactaaaagagacttacagaaaactggcctcaaccaaacgcaattggggaccttgtttgtatttttatttttttattcagaactaaaaataaatgatctattgggcgggtgtggtggctcatacctgaaagcccagcactttgggaggctgaggtagagggatcatttaagcccgggacttcatcaacctgggtaacatggagaaacttcgcctctacaaaaaatacagaaattagcttaagcgtgggaggcggaggttgtagtgagcagagattgcgccactgcactccagcctggatgacagagcaagactctgtttcaaaactatggggacagtaaataacagatcagcagttgccaggggttagtgagaagagagggatgaacaggcagcgcatgaatgacgtttagcgcagtgaaactactccatgtgatactatattggtgggttcatgccttatacgtttgtccagccccacagaacgtacaacagcaagagtgaaccctcatgtaaagtacagacctcaggagaaaatgatatgtcagtggaggttcatagattttttttttcagacagagtcttgctctgccgctcaggctggagtgcagtggcatgatcttggctcactgcaacctccaccaccacctcctgggttcaagcaat

SEQ ID NO: 67019 - DNA, 1002 bp, Homo sapiens
ctcattggctaggccgctcattggctaggccgggttaaccccgcccaccaggccaagccgcactctatacaccgccccttgcctccataggccccacccccgcaccgctaggccccgccgcgcttcactgggatcatgccctatcatgatacccagcatccgtctactccaccctgcctgttccaagtgaccccagcaccccctcagactgcaccccgcctggtcaccagaacacggggctgtccccatcctcgcgcacgcggtagtactcgtggccttcgggcacggccttggctaggccaaagtccccgatcttgaccagcctgtcgttgtccagcagcacgttgcgcgcggctaggtctcggtggatgtagtgctgcgcgtgcagataggccatgccctggggacggggcagggctcgtgagtttcagtggggcggggttcggccgggggcggcggcaggacctgagcagccaggagggctgggggacagtcaggtcaggccggtggctacccggccgctggagagggccggatggcacgtggcaccaagcaaaaggaggctgagccagaaagcagggacggggctagacgagcaaagctgggcaggagggcgagttgggaggggccgagccggctgtgcgtggtcccttgggaggagggggtgtggccaagcaagccaaacagttcggaggtcagtgcaaggacaagacagcctgggcaaacgagcaggggcggagcgtgagagcagactgcaccggatcgctcaggccagcccaagctgaagaggaaggggcaagctccagaagcaggggcggggccgaccaacctcgcagatctgctgggcgaagagcagcagctgggccagcccgatgctgtgccggggcaggtagtctcggaggctgcccaggggcacgtactccatgaccagctgcagcgacttctcgcctgccgcggagaggggcggccccggtgggggacgatagagggcgggccggggac

SEQ ID NO: 67020 - DNA, 1862 bp, Homo sapiens
agcaagccacttagcaattctgggcctcagtttccccatctggaaaagggaggtcctcagggtgttgccatcaaaagatggttgtaatgtttcaatatagttccgcatattacacattcagcacagaccctgattcaggcacacacaaaaagaacaaatatgaccaaaacaagaataacataattgttattagtttcatcgtggtgatggcctctttcaggccacaattctcctctcccacatttacccccatgagtgacctcagtccctgttgactccccaaagcctaggagagtttatgtccagctccatccccccaatccagggcctgagcctcctgagggcgccagtatggaagtggaggggctgtcacttccacccatgttgctggtttcctcatctggaaaatgggcatgtaacagtgtctacctcaaaaggctgctgggaggatttaacgcgaggaggcagagaaagtgcctggtatacagtaagcgcttaattagcctttgccattaatacctattcatgttatagatgagatcccggggatggggctttcgcggagcctacttcctccttcctcctttctcgtccccactggacccagacccagctttgaagacagggtcggagtgaagtttgcaactgggaaggctgcacgcccccatgtcctccccccaaaacctctaaacccggccggcaacggcgggaactgggatgtgcacccaccgggcatcggagcagtcccgaggcaccaggtgctcccatccaagtgcagcctgtcaagcgcagccagtccccgcggcttcttcctgaggacctccggccgcgctccttccgcgcccgcgtccagactcacccttccgggggaacacaagctcgaacccggacccctccccgctcccgcgggtagctactgcttgtcccccgccgagacgcctcctcccattggccgcctgaaacgcacacgcccattggcagctgctctgttctccctgctcgtcaccattggatttttttttttttgccatggtggcggcactctcattggtcctggggctcattcgtcactcagccgcgattggctgagtcggcacccagatgcgctgtcgcttctgctattggctggcactcggtggacggagacgggggaggggcttgcgagaggcgggagggagagcgaagtgtgtgggcaacgcggccggatcctggagttcccctccgtgctgtggaattgggtcaggcgtgtacggtcctgaccctaggacacagctgcatgtcctcacctcggtgttcaaagctgcaccggccaccattcaaccctccgacgccctgccctttggcttccccgttccatccggtcctgtctcctttccctcgtttctacctggccgactccatcctgctgactagaattccccctccttcactcctgggaggcattcctcgcccacctgccccagtcctcttcctgatcacctgcagccctgtcctctgaagctccctagcggtcagggtagcagcttggacatcccgccagacgtgaattcaaatccccactccgcaagtcgtgcccatttgctgagaagcctacagccagagcgtttcacatacattatctcatttgatcctagcagcaattccctgtatggcggctcttattatccccatttcacagaggaagaaactcaggcatgaagaggtaacaaagaccgtcctctgacccttcttctgtgccacaccataaccactcctcgactttgtctttcacctgcccagccaagtcttagcaaagaagcctattaagtcatccgctcatccttgatgtctgatcaacttcctcatcttccactttttttttt

SEQ ID NO: 67021 - DNA, 1992 bp, Homo sapiens
cttgagttaggggagagtttccaatgctggctgaggctcatacaggaagccagtctgggaagtgggtggtgacagggtctgcaataccaagtaggagcaggggctctggctaggccggaagccacgtgggcaggatttcctggtataatgggaaatgggtctaccggaggccaaaggagaggctggaatgtgaggctctatcgggttggagctggtagttagatccagaggggaaccagattccaaaacccaagtactcggtgagactaaggatcctgaagggggacggttctacactctaggaagggggtcctgggtgtgggcagggacaggaatatcagagtagcacagagttccttgttccgtttagaaaaggagtggcgactccggatctgaatgggaaccccggatcaagatcccggaaagtagatcccgggacagaccaaagtattgggggtccagactacggaggtgggggggcgatgggagatcccagataggaagtgaatacccgaataggatgagggatcatctagaagaatttggggtccaaactttgaggcagagttctgggtataaatgttaactgccgaacagaattagggagaacccccaagactcgtctaggggactccagactatgaagaagttctagggggtgaatagggaatcccacgcaaaaatcggagcagggagtgggggagcggagatccagggcagggactcagggtcccaatggtactggggtcccggagttgaatcgaagctcctgaaaatccagactgggggggtgagaatcctaggtgtgaacagcggggtccctgggcagtatcggggatcacaactccgaagcggggtccgggagtggggaaagggatgggcgcgcgcgccttacctgatgccgccagcggaagagactggccgtgtcgatgttggggtgcgtctcgtcttcatcatcagacacctcaatgtggtcccacacgctgtagtccaccatcttgccttggcggcccagcccgctccggctcgggtggcggcgacggcggcagcagtggagactaggagcgcggagccccgccccttccgcttccgccgagcgcgggaaaccccgccctgtgtgacgtcacatccctagtaaccgcggcagcggcactagctacccagccagccttaaagggccctgcgtaagtgttccggccccctggagttcccgcagagactccgcgtcatcgggcgctggggctccgctaggtctcctgggggcatatgagtgcgcgcttcaactccgagcccccctcatctcccgccgctccacggtgggcgtttggggtggcagggaggggacggttgatgagactgagaggactgtcccctcagccacgccgcagtgacgtctgcaaggggtagggacacggcgggaaggccctccccctgcccttcgtaaacggggacctaagcctgcgctggagaggggcgcctgatgactcctcggactttctcagcccgaggaggactggacctgccctgggggtgtctaaatcgggggtggtatggccctccccttgcagggttaaacgtggaggggagactgtggccctgccttgggagctggggtttccccgcctcggcaacagccttctccttgtcttccacctcctgccattcgcagcgaggactcgcgcgagcgcgcgcgcgcacacacacacacacacacacacacacgcacacacacacacacacacactttggaatcacccggaccccctcaaaacgggtctcggctccccaccccgctggccgctgggtgtcgctagagtctagcccacggcgcgtattcctggccccgcgcttggtggggggaatcgtggaggggtggaagggggctttccttgtcgtcacagtctggggccacgcatagcccctccccgttcgtcttggggtacgcttcctccgccggggctctaaggactccattactctaagcatgcaggg

SEQ ID NO: 67022 - DNA, 1136 bp, Homo sapiens
ggactttgacgtttcctctgagtgaggtaagagctattagggctctgagtagaggaagatcatgatctgaatcgagttctaacaggctcccacagggtcagatgttaccatttattaaatatttactgagtgccagacactattctgttcaatatggtttgatctcatttcattctcacatggaccctgtagggaatatcattccatttcacagaaaagaaactgaggctcacagagtttaagacactgacccatggccgcacagcaataatcttcagcgcctgggtgccaaggtaaagtaagccagcctctccctcccccaagcatttcagacaaggatcggtggctgcagagcgcacccgtcttcgggaacggcgtctgtgtccctgtctgtctgtttctatttccacacgtccctgtctgtctccacgcgcctctgcctgtgcgtcccccatctgtgcccaagccgccgtctctctgcgcccggcccccgcacatcggagctatttcgggtttaaggcttaaaagcccaacagctcggaggagacgcttcctccggcccccggctcggaccacgcgccgcacgcggccagctctgggagctcccagttttttctgcgggatccccgagccggggaagcccccgcgggaggaagggtgggggctggggcgacccgggcccggaggctctcggccccccagtggccaaccccggcattgacgccgtcaggagcccagccgtgcgtcagctgtcgccctggcaacgggggcgacgtcaccacattggtggtgcgtcagtccgctgacgtcacgccccaggagaggcaataggcaagtggcgggggcgggttctaggcccgaccggcagggggagccctggggcactgatggcagatgcgtttggcttggtcttgtaggaggccctggccctgccgacatggccaccgcagtcccaacggcgcgctaggttggcgagatgaagaggagtcgcagtgccctgtccgtggcagggaccggggacgaggtgcgagaggaggggcttgggctaggggcggggcttcgccccttgggggagactagcgccctctagtgaccacggctatttcctgaacgtggcttcactacctccaagctgt

SEQ ID NO: 67023 - DNA, 477 bp, Homo sapiens
ctcaaactcctgacctcaggtgagccacccgcctcagcctcccaaagtgctgggattacaggcgtgagccactgggccctgccctctcttgtcaatttctatagataatttccttcactgagaaatgtgaaaacgaaaccaaaaacagtataaggacattgtgtggaccaaagaaaacatgactaaggttcagacttacagcttgcagcctgtcacgggtgtccaataaacatttgctgactgcccgaaaggctgggctaccctaggatttggctgctgttcactgcactctgccccactttgaccccagagaaaccagggagcccagagacatatgaagacctcaccttccccagctgttcaccagtctccccacatgtgtagacaaggaactcagaaccccagttgttttttaattttttttttttttgaaactgagtcttgctctgttgcgcaagctggagtgcagtggctcga

SEQ ID NO: 67024 - DNA, 2557 bp, Homo sapiens
actaaaaatacaaaaaaattagccgggtgtggcggcgggcgcctgtagtcccagctacatgggaggctgaggcgggagaaaggcgtgaacccaggaagcagagcttgcagtgagccgagatcgcaccactgcattccagcctgggtgacagaacaagactccatctcaaataaaacaaaaaaaagatattctcatacttcggcctcctgagtagctgggattacaggcaccagccaccacgatgggctaattttttgtatttttagtagagatgggatttcaccatgttggccagggtggtctcaacctcctggcctcaagtgatccccctcctcgacctcccaaaatgctgggattacaggcataggctgctgtgcccagacgtgagttacgtttcaaaaggagtgggggatctccaagtggctccccacaagtggatctgcaagttctcactcccctctttctgggactcaactcaaagtctcctcttccctgttttattgtcatcactgcgcttgtcaggaactgaaatgacctcctttgcttgtctgttgatcgactgtctctcgtccccggccccagcgcctcaaatggcagggagacctatgtaggtcggcgtcgggccaaccctctcctgtgcctctcgcctggggcctggcactgcgcaggggtcaataaacgggtggttggctaactgccctgccaccgtgcctgccagagcggcctcctccaccctccctgggtgccactcggcccccactctggtgccaaggccctgggtttgcctcttggtctttggccaatcggtcaacaatgccccttgggcaccgggcacttcccccaccctacaaagcggcaagtgggcgactgcgcatgcccctcctgagcctccaccaggcccagtgaggcgaggaagtgaccccaccgcggcctctcggctgccaaccccagaacgcagatcgagcccctcaacgcctcggagcccccgggcctccttctgcgcagcgcctcctggttctctcgctcggtttccgccgctcccgggccaccccaagagttgcgccgtccaacaaaaatatccacccaggtcgcgccctcctggccctccgagtcctggcggggaactcggaggcgccctgggccgtggcgcccgttttcctggtctccgggcacggccgcaggggcgctcgcggcccgcgatgcccgcagcccgggcacatcccgcctcactcaccccgccatggccgcgctccggctccgcctccaccgcccgagccccggcgcctccatcgctgcgcgtgggggaggcgcggagcgcgcgcaggtcaccatgactaagcagagccgggcgcccgccgtgtcacaataaaagtccccgggccctggcctcaggcggtagggaccgctgaggggccgctccccacccccgcccacgcctgctgtcgcccagctgcgcggccaccacggcgcccagcatggcggcggggcgggggcacgcgaccctgagcgcgcttagccgcgtggtccgagtcgcggggagtctgaaccccgagttccaggcctgcgcgccccggcccgcaccaggggtggggtggacacccctccccgtcgctgctgcccaagcgctcacctcagcccccaggtcgcctccgtagggggtccctcggggtggggatggccggggcgcgcaggggctccgggcacagtgatgccacccgcgcactgcgcttccgggaagccgggggaccgcgacccagtccaggagattcctgccttaccttggctgtaggggacccgcgggcgcctccgccgtcggggggcctcggctccagggctgcgtggcctgcggggtcttggttgtcggttggggagcggcctcgggacgcccgaaaaggaggcggggagagggcggaaagggcgcggcgggaaaggagcggcgattctcccgcccttcccgcaggtgcccggcgcccgtcggcgaggagtggggcatcgggcgggggcgcacagccaggccccccttctcactgtcccttccatctcccgatttcgttgctggatgtctcctcgcggggctgcgcgccaccatctgctattctccttttaacaacgcacagcgccggcctcgtggtccggcggccgcaggatctagggaaaattatctacctcgctaggttttcttttcttttcttttctttctttctttctttttttttttcctttagagacaaggtctcgctctgatctgcacgcccaggctggagtgcagtggcgcaatcgcggctcactgcagccttgagctcctggcctcaagcgatcctcccacctcagcctcctgagtagctgggaccacagacaggcgccaccacacccggctaatttttagtttttgtttgtttgtttgtttttctgtagagatggggtctcgcaatgttgcccaggctggtcttgaacacctgggtttaagagatcctgactccattggcctcccaaagttctgggattataggtgtgaggcgctgtgcccaggcctcaggttttccttgtcttttttttt

SEQ ID NO: 67025 - DNA, 1872 bp, Homo sapiens
cccggaggtcacactagtcgatttggtcccaggccagggcgggttctgggtcggcagcccgcgcaggtgcactcgggaggcggggcgggcgctgcaggtgcgcagtcagtctcacctgggcgcctgccaggaggtcagtcctgggccctggggggcaggactaggggcggggccaggggcaggggttccccagctctgctgcctccgataagggcctgaaggggctgtcgcgctcctggcggtgtgataaggagggcggggggaggccgcgggaaggcgtcggggtttgaggtccccgcctggcgacccgggatcggggcaggaaaggcggctgggcggggagagggcggggcggggcgtctggcttggccacgcccaccgtcatccggggtcctggcccgctaagatggcgatggctgcggtagcagcggcggcggctgttgcctggcccggtaccctggggacgggggccgagtagcgccttccccgggccccgtgaaccggctgcgggtcgcccttggggggcagcggccgcagccccccacctgggccctcggtccgccctcccggcgcgtccatgaactcagtgtcgccggccgccgcgcagtaccggagcagcagcccggaggacgcgcgccgccggcccgaggcccgcaggccgcggggtcccagaggcccagaccccaacggcctggggccttccggagccagcggccccgctcttggctctcccggggctggcccgagtgagccggacgaagtggacaagttcaaggccaagttcctgacagcctggaacaacgtcaagtacggtgaggagggggcccggagatcgtgggggtgtcgggggccgttgaggaaaaccagaccccggtcctgccagttatcccacccttgttcccgtcctgagtcacctgtgggtcccctccctgcccggcccagggtggacctgtggcaggtccaatagtgttttcaagccccgcccattcccctgtgtgaccttgggcaagatcctttgcttcctggcgcctccgtttttgcccctctctgtaaaatgggtacaataatcagaactaccttccttcatcctgaattgatggtggacactcctgtagctgtcactgggggccccacctccgacggaatccccggagccaccccggagataggaactaggatcgtgcccatttcacagatgggggaatggaagcgctgttgctgtcatgcaagtgcttcatctcgctgggcgctgcccctacgtctccccaggttgggtggttaaaagccggaccagctttagcaagatctccagcatccacctctgtggccgccgctaccgtttcgagggcgagggtgagctggtggttgggaccagggctgggggaggcctctccacgcccgccggagtgtccctggtggcagctgacagacccgctcttgtaggtgacatacagcgtttccagcgggactttgtgtcccgcctgtggctcacataccgccgggacttcccgccccttcctgggggctgcctgacctcggactgtggctgggggtgcatgttacgcagcggccagatgatgctggcacagggccttctgctgcatttcctgcccagaggtgagccataggggggaaggggtgcactaggagtacagggtcaactgccatatcagcagtattagaattacttaccaactaagagttcaaagtcacgttagaattgtgtgtcaagtaagttttggagagatgagagttgtttataagagtttcagccggggttggaaacggtggctcatgcctgtaatcctagcactttgggaggctgaggcggatggatcccttgcggtcaggagttcaagaccagcctggcca

SEQ ID NO: 67026 - DNA, 1272 bp, Homo sapiens
ggagaggggccctcttggggtgggcaggggcaggccacaggtaggtacaggatatgggtagaggaaggtgaggggcaaggagaaggtaattcctggggaagacaaagacttgacaaggggcaggtgggctgagggcacaagagagacagcggggaggggctgggccaggccgcacagtggggccaggatcagggctgatgtgagaagttgggcgccccacgtggcgcaaggagtacactaaaaaatggctagactcttgaggatgaaagaggaaagggggggttcttgggggacagagtcgccccacacatcagagtgggcaggtggggatcgtggcaggggagagaaaataacggggatttggctcccctggggagagggggggcactgtctgtccctcatgggatggggagcggaggatgggacgctcccgcagggcgctctggggttgggggttcccccccgtctacatcggggtcggggtgcagaggggggcttggacgcctccgcacgtccaggacggggcggggacgcgcaccacgcgctcgtcgcttgagtccgactcggagctggagtcgctgctgctgtctcggtccccgtagcgatccttcactgcgggacacagacgggatgcccccccccaggtcagccggcggggccactcgactccccacttcccaaccggccggcgcgcgcaggctcccgcgcgcatgcgccccgcactcacgccgctgcagttcctcgcgctcccggtagcggttgtaccgcgcggcaaacgccgcgttcacccgcagctgcgacgacccgcgcggttccggcatggcggttctgtggcccattgcgcacgcgcattgaggaagccctggacggggcggggccgccctcagtcccgcccgcatccacttgtaaacgaggcgtaccgctgctaaccccgcccctggcttttccgggatccctttcgcctcatcaccgcagtcaccgcccacggctacgcccctgcggggaaggccgcggccaccgcccacccgccccaccccctgtgctccgggcacccagctgacatctgggggccctttctccactcgcggtttcctgcttcccttccgttccgacagcgaaaaccgctgccccacccagctcactcaccctggcgccctgggaattactattctctcccctcacccaccacatccacgatccgcgacccccgtcctcatccccatcaacatccgggatgtgtaactctccatcccagactcaaaaatcagaagc

SEQ ID NO: 67027 - DNA, 2681 bp, Homo sapiens
ggattacaagcgtgagccaccacgcccagccaggaaacccattttcaacacctccttgctcttttttttttctgagacagagtctcgctctgtcgcccagactggagtgcagtggcgcaatctcggctcactgcaacctccgcctgccaggtcaaacaattctcctgcctcagcctcccaagtaggtgggactacaggcatgtgccaccacacccggctaattttcttttgtatttttagtagagacggggtttcaccatgctggccaggctggtctcgaactcctgacctcgtgatccgcccgcctcggcctcccaaagtgctgggattacaaacgtgagccaccgcgcctggccttccttgctcttcttgctccaaatcctgggaacgtctgaatcaacaggcggacatctgtcaaaccttcctagcaactacgcctgcggatggccaacctgaccctggaagacagtggggtttagttaagcacagattgtacatcgggggcctcataaggcgcctggaagcattcaagaacaccacgcttgtaaggacaaagcactcggtcacgggcgcctttacttcggagctccgcgctgctgctggacgagcgtccgttgagtcccagccccaatttttccaggaaatggcggtgagccctctagtgagatattttttggcctgggcctcagtttctccatctgtcaatgggggaaggggaaggcgggctagaggaccccgaccaggtcggctgcagccttcggaagctacggcccagggacgccacaccaaggcaggtctgcgggacgaaagaacccaagaacccgggcgcgcattggcgccggtcccgggctcaaggggcagcaacgaggagacgctggacctggccgttcctcgcacacatctctaaccttctgtgcctctcaagggagatggggtgagcatagccacctccactggagcccgaaaatccccggccgagataccgccactaaaaaggtacacatgcgtcaaagcctctcggagccatttccgctaacgtactcagggcgacgggcgtaagatggcggccgcgcaggcgcaaaatgtcgcagccgtagggaggctccgcctctgacgcttgccttgcatcacgtggtaatggccgctcaaaaaacgccttagcgaaaaccagagcgtgccctcgtcacgtgatggaggactcccagtacggcaaagggaaggcgccaaaagttgtcagatggcgaaggaaaccgcgaaattcgccattgtcacatgatggagcaacctatcgaaagcggagggaaaggtgccgaagtcacgtgactacgcacgcaaacactcccgcttgcaccacgtgcaactcacgcccaccccctcagccccccccttatctcttttcgcccctccctcccatttgggttgggcctgcgtcgaggcgcaacgcggcgtcaaagggggcggggcttcagccggtcacgtgttcccgcacctccccggcgcgcgcctgcccgcccgcccgctcgcccccggtccggactcctcctcctcctcttctcgccattgcagttggacccagcagcccggcgcgcaccgcgtggcttttgggggcagaccccggcgggctgtggcaggagggcggcggcggcggctgcggtcgaagaaggggacgccgacaaggtaagcgtcaatgtggcggcggccgggcccgctcccgcctctgcccctccccccgcccgccctcagtgagatccccactgagggttcgcggtgacaaggctggagggatcccacgctcgccgcctccgcccggttccctcatcccggcgcctggcccgttcctcccttgccggcctcgctcccgcgctcggccgttaactctcttccattgtgcggaggaaacaaaatggcggctgcggcggcggcgaggactcggtgcgcgcgcagccgctcccccccgcacgcggcccctcggccggcggcggcgccacgcgcgggggggtgcgcgcgcaccgggcccccggctgccgcctccccgcggctgggcttttgtctgttgcgggggtcctggggacgcgcgcacgtgcttggagcacacaccccctcgggtcccgagttccgcggcggggcgaccccccttcctcactccttccctaccccctcctcctctttgtcccggtcccgcccccgattccaggagagtcccaggttcccgaggcgggaaaagtcgcctcctttgtcctcacaggtcgcggagaggcggaccccctccttggaagccccttcccacgcggattgctgaggaagcctttgtgggttcgtcgggtttccaaatctctggtcagccaggcctctctcagatcagggtcaaaacttgagagggtttcagctttttctttagttagtttgttttcattgttgaatgtttttccagattgttagtatttgccttctctagaccggcaatctacttgggtgcaagcctgggccccgaaacgtggatgcttaaaacccatttctacctttattttctcaagtagttgaacgattgagattctcgaggttactcatgaggttctgccccagttaattcaccgcctggatgaattatttggggtgtacggcggtctgcatgctcctcccccagttcagtggccaaatttgaggagaatgagggatctctt

SEQ ID NO: 67028 - DNA, 470 bp, Homo sapiens
cacaaagagctgatacagagttttggataaagttttaaactgttgtccaatttttcaaaccacatcattggacctcacgctaataatgtgctcgcagtccatggcccgccgctcgcatgcctgtcttcaggccttatccaaacccctggtgtgcagatggcagagaagataaacgctctgcttggccgcagcataggctggcatagcgcccttgttgctgtttacctttggttctcatagctgattccgactaccaaagcccttctagttgatcaacgtagggacgctggacctttgaccaacaggactctctctgtcaagggctggggctagggcagtcccgcctggtgggcggagttggtcccctttgctgcagatgccttgggatggctgttgtgtgatgcagagagggagttcatttcctctccctcggcctttttaaattttttcctattgaacattttagcata

SEQ ID NO: 67029 - DNA, 1166 bp, Homo sapiens
caaagtctttatgccgagatgctgtaattcgccacattttatccaagagaaaattatggctaagagagtctctgattgtagctcgaaagtgctagggatgggattcgttcccagttcaattctgattcttcgctttagcgtgttgtgggtaggagttaaatgggcccccagccaggaccaggggttcaaatccgttgccatggtcccccgacgctttcccgggctccagaacggatcgcgtggtcacgtgacagcggccaacatggcgccgcccactgtgtggtacggcccacgtggttccgacagtcaagatggcgggagcagctacccaggcttccctggagtcggccccacggatcatgcggctggtggccgaatgcagccgctccagggcccgggcaggcgagctgtggctgccgcatgggacagtggccactcctgtgttcatgccagtgggcacgcaggccaccatgaagggcatcacgaccgaacagctggacgctctgggttgccgcatctgcctgggcaatacctaccatctgggtctaaggccggtgggtgggctctgcccgcgcggggaggcggcgaggcggcgaggcgtggggagccatggagcgtcctccaggcccggacactcctcccaaagtcaatcgaccagctgtattgagcgcccccaatgaccaggccttgtactgggcgtgaaagagcagcagggactaaagctggccagatctgtctcccaagaagggcccccagggacgcggtcacccctaacctgacactttcttccatcaacccagggacccgagctgatccagaaagccaacggtctccacggcttcatgaattggcctcataatctgctaacggtgagctgaggagagagccgacgttctagggcccttctctggagtgaagggtccccatctccaccccctgacagctttgcggtggggtttcccttaggacagcggcggtttccagatggtgtcgctggtgtctctgtccgaggtgacggaggagggcgtccgcttccgctccccctacgacggcaatgagaccctgctgagcccggagaaatccgtgcagatccagaatgcgctgggtgagaggaccctggggagccgcctccttaccctgtctgtcagggggtgaagtttacacgg

SEQ ID NO: 67030 - DNA, 1791 bp, Homo sapiens
tgttagcggcgtcaagatcgggcgtgagcagaaagggcacagcatttgcaaaggcgtggaggagtgattttattgcgttctatccctaggaagcaatgacttggcctctaccatttgcagagcgcattgggaccctgctcccagagctggtttgcagtctgggaactgagatgcgctctgggacttgtagttttccccagtgccaggaaactcaaaaatcgagacatcggatcccaccacgaggtgtcgcccttgagcgagtacggtgggatctatcctatacttcagaaggctgttgcagacatccaacaatcacaaggaagaacgggagtttttctgattgacagatatggttctcaatgatagtcaagattcggatgttaaagcccgccctcttttgcctggttggctggagcaacgaagtgatatttatatgaaccaatgggaaattcttagggaacgaggtagtagctcaatccccaacaccattggtccacattgtctactggcacgtctgcctgccaataagatggtggaacttcgccaatgggcagagccaacgtgcctttttcggaaacacccccttcctctcttgacaacttgctttctgccgctattggctgttgcacaacagtgacggttcttttgtccaataagtcagcaagacggtccccagggggaaggtttactcaaccataggcccgtgcctagtttttattggctagtgtatccgagtggcggtgcagcaggccagtcgcgtgcggcgcgagtgctttgggcgcagcccccggggccggggcgggaggtcgctcgggtcgggtgtcgcctgagaaccggatgaggcggcgaccgtgaggccgagccgggagcgggcgtcttgccgaggcccgggcgggcggggagcaacggctacagacgccgcggggccaggtcgttgagggtcggcggcgggcgaggagcgcagggcgctcgggccgggggccgccggcgccatgggcaaccgcgggatggaagagctgatcccgctggtcaacaaactgcaggacgccttcagctccatcggccagagctgccacctggacctgccgcagatcgctgtagtgggcggccagagcgccggcaagagctcggtgctggagaacttcgtgggccggtgagcgggcgcggcagggatcgcgggcgggtggcggcctagggcgcggagggcggaccgggaatggcgcgccgtgcgccgccggcgtaactgcggcgcttgcgtgcccgcggcggggaaccggacggggtcggggaggcgggccctgtgggacgccctgggcagaggactccctgcaggggctccggagcaggcccgggccccaggggcggtgtcacgggccagggcgccgtaggacaggaggtgcgctggaaccctgcggtccatctggtcccagctttcgtgggtgaagtctgccatctggttggccgtgggtctggggtagatccctcttctgctctttcgggctgtccatcagaggtgaaaccggccatctagatatctattggggcgaccgctgcggtctggctggcttgttcttgtatctggagctgcccccgccgtctggttggctgtctctctgtcctgggcaagcctccctgccaccaccatttggttgtccatctgtccagtcccacctggcagccccctgctgtctggctagctgtccagggtgacctctgctgtctggccgcccatccgtgcccctcacagactttaacactgagcagtccctctgttgggtgacaccagctggc

SEQ ID NO: 67031 - DNA, 653 bp, Homo sapiens
gggcggagttgtgagctccaggaccccacatttgagcagtttccccgtcactcttgaaaatgctgctgggccggccagtttctttggggtttctcagtactgctgaaagttacaaggtcaacactggcctgcaatcacagttataaaaaagttataaaagcctgacattcaaatcacgttggagactataaaacagcaagtttttcatttgcacacctcacatgacctcaagcctgctgtccatacacaggaaatggggatgtgcggaaaaaaaacccgaagtggaggacatcatcccccacgcataatccagtccgtgcatcgcacttgaccttcggcactgcagcctgcattgctccccggactagctcccaagattgatttagccagttccctgccagtggacatttaggtcattatcggttttcattccacaaagtactgccctcagggagtcggctgtccttgccaaaccactgcattaatatgtttctgggtgctggggaaagggcgcttaagacccctgccctcaaggtgttgatattctagttgggactgttagataaatgagcaattaggctgggcacgcttgaaatcccagggctttgggaggctgaggtgggaggatcgcctaggcagcatatcactacaga

SEQ ID NO: 67032 - DNA, 1250 bp, Homo sapiens
gtctgcctcattggtgtcccacccacattcgtgtcctggctctgctcctccctcgctgagcgtcctgggcaagtcctgagactgaacctcagtccacctgtctgaaatgggacttttggccctggcatccttgtgactttcaacccctctggggttgtcagaggatttgccgctatgttgcccgagatggggttagagacagcctgttgggtggccagcgttccttgtgtggctcttatcagagtcctgagagaagaggccagggtggaaattggccctggagtgtgggctcctgccgaagcctcttcctgtggccagtgccatgctgaaggctggctgtggtgtcacgtgagccctcccagccacattcaggctcaaagagactgtgctgagcatatggtgacaaggaagggatcccagcccagggtcctggccaggccctgccagcaccaggctgcacaggtgaggggtggcttgccctggggtgctggctctgggccacactgctgactcaccctctgtgggcttatctgttgattctccctcccatgggaaggctctgggtttgagcctgcatcgttcctgcacgtagccgtccccaccctcataggggctggaagtcaaaaggcgcctggtggagccttgtggtctgttcaaaaaacggtaaataaacagcctgggcttctgatctgctggactcaacctggcacctctcccatcgctgctgggtgctgcctcccagctgcacccttccctgcctgtcccctaccgccttcctggagcgcttatccccttccagggagaggtggcccactttagagctctgaaacctgctctggtggggtgaagtgacttgagccaggccaagccggtggctgggccctctgtggcagactggaagtgtcctcccatttcatggatggccaagtcagtgcccagagaggggtagagacctgtccagggccacacagcccaggaggggcggagctcgactttgaacccaggctgcctggctccacagtctggattcttcttacccattcaacaaatacttaatgagcacacactgtctggcaggcactgttctaggtgctgaggatctagcagtgaccaggccaggtgcagaagtcttggcgtgtcacaggactagaccttcatcagaggccgttttgctgggagtgggaaggggtgtgtatttgggagggaggggcgcaagccatcacacctgcccatggccaggtaggcagggc

SEQ ID NO: 67033 - DNA, 923 bp, Homo sapiens
tgccaggcagtctagactgtcttccaggcaaggcattaagcagcataggcacccttgctgggggaggtgggtgggaggtaggacgccttactaagaggagaggaaaatgaacacattgcgggcatcagtgattgctggggccggcggggccttgtggggtatacaccagaccacgtggctcctagggattggcagctggctctctgtgaccaaactcagaaccaggctgccaccctttactggcccgggacttgttaaagtgacttccctctctgtgccttggtagcttcatctgtaaaatgggggtgatggtggcgctgccatcgtggccatggcaccccattggctgtggtatgctgtctcttcctgtggggtctgatgtccaaagacagggcccccagggcgcagcccacgttcccctctggttcccgcagcttgccctcattccagccatccccagtgaaccataacttccagccatagaagtttaaacattacctaagaccataaccaccaggaagtttggtggcccatgagtgaaccctgccctcactgggaagcagccccgtaaactctgagtgcctgggactgttcctgtgtggaatgtgcacagtgaggccctgtgaaccacccctccccaccgcccttggccttgaactggcctttggtgtgctcaccggaaccaaggaagagatgtcaggacctggctccagggcttcccattggcctcagaatcaaatcgagcctccttctcaaggccttgtggcccttgccagtctctgggacctcacctcctcctggtccccagccactgcccccatccatctccctcctgattctcaggcccagcttgctggttcccactgcttggcctctgtgctcactgtgctgcctgcctggaacgccctgttccctacctgcca

SEQ ID NO: 67034 - DNA, 1107 bp, Homo sapiens
ggtagggctgggctttgtagacaccacacttggtgggacagaggcctgctagggagagggcctgtgtccttgccaccagcccatcttccacgccatgtccccctgcactctttgaagggagatggtctcttttggggctaagctggggtcctggagccagaagagaactgagatttgctgtggggggttgggagctgttccatttttagtggctgctacaggaagagcggccgagtgtttccccttgtccctgcagaaggctggagtgtaactgtccttgggaactgggtcagctgatagcagggctgggggtgggggtggggatcctgaatcctccagcagatgtcctcattgccctgatctgggtggccagtgcctgtgctggacacggtcctcagtcatcggagcccactgagtctccccctgaccctgcagagaatttcaaagaggcgaagttccttccagtggcctcacaaaggctatctggcttaggagccattacctgaagccagaatttctgagttccaagtcccagctccatcacggaacttggcccaaggcccttaacccctctgggcctcagttttgtcatctttgaaatggggatcttagagatgcctacctgtcaagggacttgtgaggcgcaacgggaccacacgcagggcctggccagagtgccgtagtttcttcggttgccatgatgggacggtgaaactcctcacactcttctttctgccttgaagattctagacctggctgggtgttcatctccctttttgcctttgcttgaggcagtttatggcatggctgtgttattcacgtcgccaggtctcctcctggtggacgttgaggccattttcatttttttactcttaaaaacgacagggcagtgcgcatcttcgcatctccggggtgggtcaggtctctgacctctttgccagtgtgacttattacccctttctttctttgtttttctttttgagacagtgtcttgctctgtcgccaggctggaatgcagtggtgtgatcatagatcatagctcactgcaacctccagctcctggctcaaatgatcctcccacttcagccgatattaatccattttcat

SEQ ID NO: 67035 - DNA, 1959 bp, Homo sapiens
cagccttgcgggactcgctgaccaacagcacgccctgagggctctccagcgtgaagtccacgtccagtccagcacctccgatcacctggggggcaggtaagagcgggtggagggctagcggtaggccaagggcgcctgccgaagagggctacggctgaaccaacactgatcaatacagaccaccaagggcttacctgaacggcggcacacccacacccgccccaacctgtcccagtggctgcgccccttgcctccaccctcattgatatgacagcttggggtccatactttcagctgaccacgcacctaccaaaagtacttaatggacgtttacctgaccacgcccctggttggctccgcctccgaaagaggataggcccagcctttttccttagtctaacccccgagaaaggcctgtgtgggcaacgcccccgcagttgacctatcagcactatcgccacgcccaccagccagagtcctgtcctctcagaggctccctatacttatcgatggccccgccccctctggatctcttactctagccccgcctgcttcattactccctccccttccgctcccacacaccgtccccgccccatctgtccatctctttctagctccgcccccgcgctcccaagcacggattcctcccccttcctcctaaagcgcgcctcgcctcgaccgcttggccacgccccctctccctgactctgctggccgcccagcccgcgaccctctacctggtattcggtctcgaggcttgcgttggccggcgcggactggtagaaacactgcttcctccccgccggcaacaggaacgtgaactcaccgtcctggattggcgggggccccgcccctcccacctccactggtggcattagtagccacaaggccagggctagggccgcgccggccgccatcatccgggtcaccctctggtctgcaaaggggtcgcggctcctttaagcgctagccctgccccggtgctactcggcggagctcattggcagtggcttctgtatgttgtccgtaaccagaggtgccaggagtgaaggacccccccactagagggcaggcggcccgaatgaatgcctgatgtgcccagaaacactcaaccgtctgggaatatttttctcaaaggcttcggctctcttctcggccgctggtggaggaaaattacaaaaataagtgccatgatggcgcatcttttgtaggcagtagctaagacaactaaagttacaggcggcagggtcctttttagtcacctccacgtggttttcccagagtgcgccgcgcgtgacaacctttggcgggaccgacgtggtggagtggacccaaaaatagcgtctaggcgtggccctgtacgcgacccgtagggctcgcctataaaagggctggggcggggcggagatacctgtggcgtcgtgttttgcttgctctgtgagcgtggtccaggttcgacgccttttgcgccttagaggcatcagcgtatcagtttcctcgtaagtcgggagtgatggaacgaccaccctgtagtgcggctgtgagaattgagatgaggcttggttcatattgagtgctcagctttcctggcttatagacagtggaggggcgtggccccaccatgcaccccaagggtctcagactcaagggccagcaggtaaatagagccattacagtagcctcgggtcagaaaaacgacagcccaggtaggaagagataaggacagtgtgggactgggagccacgttgcctggttcagctcctgccccacccattacttgaggcattccctctgttgagcctcagtttcctcttctgcaaaatggggataataggcctacgctactgggctgtctttaggatacgtgaaatgcttgttgagtgcttgcttccgcagtgcgtgggacatcacaggccctcagtaaataataatctgttatttggttcccgtctaaac

SEQ ID NO: 67036 - DNA, 2459 bp, Homo sapiens
ggaatgaggcgtaaatgaggtctagggaagagttaaagctggagtgctaggaagtggcccaagctcactgggtcgcccaaaagagatggggccacccaaaatgaagggggatgcagagagaagacgggtttgtgtggcgggagaggggccctgcgccgggccaggctggactcagcatcgttggaggaggggctgagagaggagggggtcaaaggatatcttgtgcgaaaggagacagtcaaacattaaggattaagaaggcaatgtgggcagagatgatggggaagggaggaggagcggtcgaatgtcggggaggggtcctttcaaccgggctcaggttgctcctggaggccagggctcatcggaaatcgtcggtgcgggggcggtggggggaagggttgggggcgaggcccgggcgctggccacgccctttcccccgcccattccccagagcggggcggctgacaaagcgagtccgggtgggagggcgcgggcaggcacgggggcggggcctcgtcgcggctgggccacgcctccctgagggctgcctcacaaagccgggcgggcccgggggggtggggcccagtctcaggggcgtgtccaggtcggggcagggaagccgcatcacgacgcgcggctgcttgtgtggggcggggtacagggcgtgtccacgcggccgagcaccgcccccgccgtccccgcaccgcctcactcgaaagcagccgttaatgaggcgccggcctgggggcggggcccaggcctccgaggggcgtgcccgcgcgcccgagcaccgcccccgacgtaccctcccgccccgcagttcccgggcggtggagccacctcacaaagcggcgaccgttctcgcggggcggggcgtagccggtcccgccccacggggtgccctctcgttcgctcgctagctccccgcgcccaggacggccggcagagggcgctgcgccacggggccgggccgcggcgacggtggcggcggcggcggcgaggcggcgcgtggccggcaggcggcgctgcccggctcggcctcggcctgcacggcggctgcggcggcggtagcggcagcggcggcggcggcggcggcggcggcggcggcggcggcggcggcggcggcagcggcggcggcctgggcccgggcgcagcggcggcggcggcggggcctggagccggatctaagatggcagcggcggcggcggcggtggggccgggcgcgggcggcgcggggtcggcggtcccgggcggcgcggggccctgcgctaccgtgtcggtgttccccggcgcccgcctcctcaccatcggcgacgcgaacggcgagatccagcggcacgcggagcagcaggcgctgcgcctcgaggtgcgcgccggcccggactcggcgggcatcgccctctacagccgtgagtacggggccccggggcaggcgcagggccggggctgctcacgaggccggcccggggcgggggccggcggggaggggccctgagcgcgggggcctggcgtggggtccccgggactgagccggtggcctgcagggagcgaccgtggagggccggtgccaggggacagacagagaaaagagggcgtgcgtggtggccggaggggcaaggtgcccagagtgagcaagggagcgcgaaatggggagtgaagggcctgagatttgggaggggtgggtgagcaggaagtggggggctctgagtggaaggggaatttggaggacgccaggcgtggtgggcttaagcgtgggggagggaggtccggggtgcgggagaggtgggcgtctcgggggcgggcgtggccgcctctgcagggaggagggtggggcgtgggcggcccgggatccctctggggaccccctggatagctcaggacggttggaaagtgtttgctggtctggggcgcccgcgagtaccgagttccaccgctgtgcgaggtgtggcgttcaggacccccgaatgggaaacttcaggatctggggagagggcccatgcggggacggtgggagccgcagggtgagctcctcgtggaaacgtggacgggacgggccccttcctgatgccgggcttcgaagtaagagctaacagcctcctcccatcttcttttgggggatgtgagaagctggttacattttccgaagctgctttcaaaactgacatttcactggggggaaaagaaaatcacaaatgcgtttgccagcaccccccacccccgctcccagtctttgtagttcattcttcttcttgttactccttcttatctcttctctttgattccttgttcacattttgctactctgtgtcatttggctttgtctttcagggcttcttgcactgatgccctggggaacccctcaggaggcctctagctagcttgggtcctgtgtgaattttttgccactttggaaacggcccgattaaaggaaagcccgaggagcagtccgttcacactgg

SEQ ID NO: 67037 - DNA, 721 bp, Homo sapiens
agaggctcgggagtctcctgaacaaagagaggaacacggcttagcttgttttttttttttttttttttggtttgtcagtatttcccaggtgtcttctgtgtgccagggactaacttggggataaagctgtgactttgagaagctgccggctccgcgggctttagcagctgctgctgtgatgaagcgatccacttgccctcagccccggcatctttggcccaagcccagccctagccctggctgggcacagccaggcttcacttggccacaggtcctgtagttgcctgcctggcgccaggtcagagagggacgcctcaggcaacatcgggttgccaggctgcttggtaaacaggcctccctgggcccacttgctgtcgcccaggtgtggctaacagatcgacagtatctcctgccccaggacgggtatgagtgtgggcaccatgccaaggttggatgtcccttcctgggacccacccacagctgggagcactttatcttgggcctctgtgggtgtagtgaggctgtgagtctggggcagtggcctgctgacaccctcctggcagggctcaggaggttcctccatgccctgccctcaggagggcggcacctggctcctggggtgggagagagtctggcaggactggctgggtgtggccggggagctgcccttcaggtctcatatctgtaggccctcatacctggactcgtcagttaggaacag

SEQ ID NO: 67038 - DNA, 2050 bp, Homo sapiens
gccttgtcactctcctcctccacctcatcctcggctccatagctgccacctgagcccacggccacagccacgtgcccttgtggggtcagctgatcgcttctgctggtggtggctgcatctggggtgtcagccagaagattagtggcctcctcgaattctgtggaggaggtatatgggacacacgcacgtttgaggggtggaaagaactcgactgggcccaagctaaaccgatgctcatctgggggcggaggctctgctgagccattgatctcccccaaggtggggcccaacttcctcagtttggaggcatccggaggacatctgttcccttcctcctaaagtggaactgcaacttagggttgacgctgggatggggtcagggtctggggacgagaggctcgggtttgaggtctgagttcagggcgggggcggggttcgagtcagagatgggtctcactcctgggtcagggttcacagccgcctaggcttcggggtagagaaattggaagccgtatcggggggaggttctggcccggggcgggagtgggagatccggccacgtcggggccgcactcaccatggaaggtcagctcgtcggccgatgccatggtcgttcaggggcgtctccgcatccctcgctgaggacagagaccggtcaggcacacttcccccccgcccccgagccggtccctcggcccccagccctacctggcgaccaactgcacccacggaggcttgaactcgtcgtcccgtccccacaggtgcgctccgccccccctcacctgaggccacctgggccggcgtggctggggctctctgcgcctgcgcgtctcgcctacccgtcagactccaaccgactcagacctgacagcaacatccggcgcctgtcctctttctatcctctcccgttgggaagccacttccggtaaagttggcgcttgcgcagaagagactcccgggctcttaacgtcgggtatcaggagtttcttcccggagcaaggacccccaagacggaagaggatggccgcggcggctctgaggagattttggtcccggcgccgcgcagaggcgggcgacgcggtagtggcgaagccgggagtgtgggcgcggctgggtgagtagcggcggaaggcggcagggtgggtggccgccgcgacagggtgggtggccgccgcggccggatcactcttaccgcgctcctctcccctcagggtcctgggcccgcgcgctgctccgggactacgccgaggcctgcagggacgcttcggcggaggctagggcccggccggggcgcgccgctgtgtatgtgggtctgctgggcggcgcggcggcctgcttcacgctggcgcccagcgagggtgccttcgaggaggcgctgctggaggcgtcggggaccctcctgctgctggcgccggccacccgcaaccgcgagtccgaagccttcgtgcagaggctgctctggctgcggggccgtggccgcctgcgctacgtcaacctggggctctgctcgctggtgtacgaggcgcccttcgacgcccaggccagcctctaccaggcgcgttgccgctacctgcagccccgctggaccgacttccccggccgggtcctggacgtgggcttcgtgggtcgctggtgggtgctgggggcctggatgcgcgactgcgacatcaacgacgacgaattcctgcacctgccggcgcatttgcgggtggtcgggccccagcagctgcattccgagaccaacgagcggctcttcgatgagaagtacaagcctgtcgtgctcaccgacgatcaggtggaccaggcgctgtgggaggagcaggtcttgcagaaggagaagaaggacaggctcgccctgagccaggcccactcgctggtgcaggcggaggccccgagatgaaaccctgaggcccccgagtcctggcaaactgcttgcctggggtggtgcagttctgagtgtgcctcacctgcagaacagctgagacagatgatgtgcaaagtgttttctcactggatttgcacaagtttggggagcctttctgccccccgt

SEQ ID NO: 67039 - DNA, 1227 bp, Homo sapiens
tcttttaacctagaagagtgccccctatgcatacacttttgatgtgttgcagaaaaccactttttttttttttctgagacagagtctcactctgtcgcccaggctggagtgcagtggcgtgatctcagctcagtataacctccccatgccgagttcaagtgattctcctgcctcagcctcctgagtagctgggattacaggcacctgccaccacgcccggctaatttttgtatttttattagagacagggtttcaccatgttggtcaggctggtctcaaactcctgacctcaagtgatccacccgcctcaccttcccaaagtgctgggattacaggcatgagccactgtgcccggcccaattttatcacttctgatgggtgcccaggtcaatcgtttcattaatagctgtacaaagaagccagttcttttgttcttgcaatcttatttatagctggtgagccacaggcatttcacatttcctgttactgattcaccaggtgaacaaataaaaacctgaaagagccagtccttcaagatggatctggagtggcagactgggcttcaattttaagtacacccaagcaaccatttgctgaatagaggtcacacatgtattctgagttgccccaaaactcacgcctccgttttaacttttggacattcagaggtctcctggaccaatcagtcagaactcagatgtgtcaaccagtaaaaactaggcaagtttgactccctgatttgcataaacagacttgagtgggaacctgggctggaatttttgctataatacctgaaccctcgggaggctaaggcaggagaattgcttcaacccaggaggcagaggttgcagtgagctcagattgcgccactgcactccagccagggtgacagagccagactgtctcacaaaaaaaaaaaaaaaaaaaaaaaaaaaaaaaaaaaaaaaaaaaaacctgaaccctccctttgttctctggaatgcaccttcattttacaccaaatactgtgtctcttcagtttgcaaactgttgactggaatacaatctattccctccaaattccttttcagagaacattggttcacaatcatgtcctaccagaaggagtttctggggaattcacagccatctacagaagacatccttgacttgccttttgaggtttccctcagggcagccacaaggatgctgtgttcctttcccatgttgtggcaggccacagtgaca

SEQ ID NO: 67040 - DNA, 1014 bp, Homo sapiens
ctaaaaatacaaaaaattagccgggcatggtggcgggtgcctgtagtcccagctactcgggaggctgaggcaggagaatggtgtgaacccgggaggcagagcttgcagtgagccaagatccgccattgcactccagcctgggtgacagagcgagactccgtctcaaacacacacacacagacacacacacacacacacaaagaaaaatcaattaaattaaatgttttgttttgtccactggttctcaagcaggggaaattttgacctccctggaaatatttcacaatatctggagacatttctagttgtcagaactggaggaggggtgttactgggactaatgagctgctaaacattctaccatgtacaggaaatccccctcaaccaagaagtaactaagccaaaatgcctataatgccaacattaaaattcctggaatagctcttttagttcgcagcaggagggtagactacacaacctggtttgctatcagatcaaacaaacaaaaatcttcataatcagaaattaaaatatttggccagacacggtggctcaggcctgtaatctcagcactttgagagtctgaggcaggaggatcacttaagctgaggaatttgagaccagcctggacagcataatgagacccctctctacaagaaaattaagaaaaaaggctgggcacagtgcctcacgcctctaatcccagcactttggcaggctgaggcaggcggatcacctgaggtcaggagtttgacatcaacctggccaacatggcaaaaccctgtctctactgaaaatacaaaaattagccgggtatggtggggggcaccaaataatcccacctacttggaggccgaggcaggagaaccacttgaacctgagacacagtggttgcagtgagccactgcactccagcctgggtaacagaatgagactccatcccaaaaaagaaaaaaagaaaattaagaaaaaaaaaatgtcattaacattccagtactggccgggcctggtggc

SEQ ID NO: 67041 - DNA, 2207 bp, Homo sapiens
acgatctcggctcactacaatctccacctcctgggctcaagcgattctcctgcctcagcctcccgagtagctgtgactacaggcgtgtgccaccacgcccggctaattttttgtatttttagtaaagacggggtttcaccgtgttagccaggatagtctcatctcctgacctcatgatccaccagcctaggcctccctaagtgctgggattacaggcatgagctaccgcgcccggctaatttttgtatttttaatagagacgggtttcaccatggtggtcaggctcgtttctaactcccgacctcaggtgatccggccgcctcggcctcccaaagtgctggattacaggcgtgagccaccaagtccggcctctcatactgcactattttgcttattaatcttgcttcttgtcctccttccccactagaccgagggctccacggcggctgggacacagtagcagatcaataaatatttgctaagctaattaatggcacttgggaagttttgcagagaaggcggccacggtcgggccccgccttgcctccccaaataggcctcgccgccccaggtcagggatcaaagcggttcccaggcgcgcccttggcccgcgggaaaccactgcccggtcttggtccaggcggcccgtcctacggtccagggttcctatttccgagcctcagggacctcctttccccacggaccccacggccaccgggatcccattctccagttgccccatcgtcaccgcggccgccgccaccgccgccgcagtggcgtccgctctgcgcatgctccggggcgtcaagacgcgaggcgtgcagaaggcgaagcgtgcgcaggcgcggggccatcgcggcccgagtggggcggtgcatcggacgcgcgtgcttcctccgggccacgcccacccccgtccgcccagggacgggcgcgcacgcgcgccgggagcggaagggcgggctggcgcgcgcacgaggccgggcaggcggcggaagctggagaggccgccgcggtgctgagggggaggggagccggcgagcgcgcgcgcagcgggggcgcgggtggcgcgcgtgtgtgtgaagggggggcggtggccgaggcgggcgggcgcgcgcgcgaggcttcccctcgtttggcggcggcggcggcttctttgtttcgtgaagagaagcgagacgcccattctgcccccggccccgcgcggaggggcgggggaggcgccgggaagtcgacggcgccggcggctcctggtaaggaacgcgggccgcgggggcagcgcggcgcggggccggggagggcggtttgaatggagccggggcgccgaggggggagggggctgccggcgcgccctgtgcggggccggggtacggcggcgcccgagggtcaagaagcccagccggcagccgcgcgcgtggggaaggccacagtgtcgcgaggccgtggcagcggcggcccccgcggagcggcggggtgggtggggggcccgggccgcgtggaggccgcgcgatcctctccgcgcgcgctctcgccggggtcgccggacaaagctcgcccccctcgcccggcacccctacagtcgccctcccaattacagcggctgcaacaataggcaggcgttggggcttttctggctgcgtggtaacgggtccgacccgaatgttgcgtttttggcgaagctgcgatcggggctcagccaaacctccagatatgtccggcgtcggccggacacgggcattagcggtccccttgggctagccgacctcaaattgtcttaaaaacgtgtcattccagattttcaaggaaaggtaaaggactcccccgatgccttgcagttagtgacttcaaaatgtttgcccgaattggggttggggatggggtcggcggcaagtaggggagcacggaggaaatcctttgctgtgtaaaagcattgcttttcttttgcatccttttttctccttcccaattggtttttcagattaaggcttttattttcaacgtggaccttttgggcgagtgttttgtcccgatcttgaagataccagtcttgattttttttttttttttttttggtcagtgactccttggggaaagtagcaagggaataagcggaaaagccgcttcgcaggaatttgaagcaagttttcagtttggattgataggctgcattcaagcttgattcctggtgctgtcagtcacttagcaca

SEQ ID NO: 67042 - DNA, 817 bp, Homo sapiens
tggccagtttttccagttatcttcacagcagcagagaatcctgggtcacatttagtggaggtccctttagtcagctttagtcttaaagagctccttgtgtgtgtgtttgtttttttgcagagatggggtctcatgttgcccaggctggtcttgaactcctgggctcaagtgatcctcccacctcggccttccaaaggctgtgattataggcgtgagccaccacgcttggcttcaggccagctatgtcatccagtggccccggactttggtttgtctgatgttccttgtggttggagttgggttatgtgtctctggcaggcagacccaacatggccctgagtccctctcagggtgtcatatcgagagtgcatggcggaggttagcaaataaggtcactggtgatgctgactttgaacccctgccaagggatctccactgtccagttactgtttttttcttttgtaatcagtaagtaccctgtagggagatacttgagactctgtaactatgttgtaactcctcagaattccagctactccttttagtatctttttttttttttttgcctgtatcagtttttgctctgatggctacaggatggtgacttttatttccatcgttctttctgcattgatttgtttgtttttctatagtaggaaaagctttctctttggtcctgttagtcctgtggccatggtctgccaacccctggtgtagacttacggattcttgtttagttgaatgaatggattccgatcctttaaaatgatttcttttggtcatttagctttagccagcaggagccccttgccattgg

SEQ ID NO: 67043 - DNA, 1248 bp, Homo sapiens
cttctccccagctgtgagggtctcctcacccacaccccagtgtgctctggtcagagctcatatgacagggccgagggggtcagagctgggttcggatggggggagtcaggcctcaagccaccttgggccctcgtgagcattatgtgtcccctgcaggtggagtacgtcatcaagtgcgacatgtctgcgctgcagcgagtgctctaccgccacatgcaggccaagggcgtgctgctgactgatggctccgagaaggacaagaaggtgggccccagagtcccccaactgcattccccactgggtgtccaaggccggcagcgtggcaggcagagcagagcgtgctctgaccatcgggtcatgatctggtcatgatccccagggcatctggccagccctggttatgatggctggtggcttgtgtcaggacacactgactcagctgccagtggcttctcctttgcctatgaaacactggctccttctgcaattggcagcctgggcccagcactaaccccagcagggttagagtgttctagaatgccccccttctctgttattaagtgaaaggaagggagcgggctgtctcctgcaggggctgctctgagaatcccaggccccaggccccacctgcctggctctcctcaccagcagtgaaattatcctcccaggaaatgcaccagaccccttgattctgcccccaaggccttgacctcggcctggcttccccgagacgttgtgtctgtgccccttctcccctgagctgagcagcagtgtgttccctagtccattcccagcccagagcatgcaccccccgccccgcccccacctccttcctcatcctggagcccagggagccctgagtcatggctcacccggctgaggccctcttgcccagctgagaccctctagggacccccacagtaacagtgcccagaacaaagctggcatcacaaagcatcggggactctgcctcagccctttgccagtcttgtttccgtcccgtcctgctggccctgtccctgccatctgccctctgctgtgccaggcagtcatttgtttcccagggcttgttgggggcctccgggcctccagcctgccatctcctcactcccaattgctgtgccaaaagccactcttccccactagagcgtccccatggcccttctcccaacacccacccatccaccaagcccaccccaccccaggagggcaagaccccatttgggtccctctcatctgccttccagg

SEQ ID NO: 67044 - DNA, 729 bp, Homo sapiens
ggctggcagttgcttgtggagctgacgtgagggcccgttctcagcagatggcagctggccctgcaacagcagctgcagatgtctttgagtcagtcgtgcggtgctcctggggcttcacccgacccaactttcccagcccaaggcacactgtgacagatgcctggcactgatgtcctcactggggttacggtgacagatcagaccccttcccagctcaggggctctgagttatagagacgatgattcagaatccatccctgaagttgtgtcataaaaatgtcctgaagcaataattccgagaaggcaggtggcagcttttggctatgccatgcaaagtgccacacccaggaaagagccatgtggcctagcccatgtggccaaacagccccggttccctcctgggacctcagcagcccagactcatgagcttgcctgccaagctgtgcaccagagggcgctgttgaaacacaccaggagcccaggtgacagacaggccatcctgttccccagccagcctcccaagcacagcgctccaggacccagaagagaaaccctgaaaagacagtgtgagccctgccacagacctgtgtgacagcagagctgtttggctgctgtatgagtgtcaccggccctgcatttttttcttttttaataaagacaaagtcttgctgtgttacccaggctggcctccagttcctgggggctcaagtgatcctcacacctcagcct

SEQ ID NO: 67045 - DNA, 822 bp, Homo sapiens
tcccaaagtgctgggattacaggtgtgacccactacactcggccttattttcacttatttatgcaattttcactattgctatattctaggaggcactgtggaattgcactgtggaattttagtattgctgtatttcagcaagccatgaggtctgtcagcacacggctttgggcattttgtgaagataactgatgccagctgagccaaggcaggttcctgattccacccactggcaggcaccgaggtctctgctgttactgatggtttctctgtggattgatgggcttaaggccagaccacagctgcaatggctcacctctgccaaaggccaggctcgttggggcagagacctattccggactgagcctcctggtgaattagagaggtagaaaatgggaggacgggggcaggtgggctattacagcgaggaaaatgcccaccctgagttgtattagataactttgggagttcaggaactttccaataaagtgggttccacagcaggattacttactgactccctaatagaaagaaggcaggcacaggccgggcgtgttggctcatgtctgtaatcccagcacgttgggaggctgaggcgggtggatcacaaggtcaggagatccagaccatcctggctaacaaagtgaaaccccgtctctactaaaaatacaaaaaattaggctgggcgtggtggctcgtgcctgtaatcccagcactttgggaggctgaggcgggcggatcacgaggtcaggagatcgagaccgtcctggctaacacggtaaaaccccatctctactaaacatacaaaaaaaaattagccag

SEQ ID NO: 67046 - DNA, 1303 bp, Homo sapiens
aggcgtggtggcacgtgcacgtgactgtagtcccagctacttgggaggctgaggcaggagaattgtttgaacccgggagacggaggttgcagtgagccgagatcgcgccactgcactccagcctgggtgacagagctagactccgtcaaaaaacaaaaaacaaaaaacaaaaaaacaaaaaaaaaaaaacagcaggaactggcaggtcttccctgaagagataaaaaaaaaaaaatgcagttgcaacacaaaagcagccacagagaaaagcaaacccatatatggtatttattatgcaccgagtgtggctctaatcacttttttttttttaattgagagacagcctggctctgttgattgggctggagtgcagtggcgcgaccgtagctcattgcagcctcaacctccttggctcaagcaatcctcctacctcagcctcctgagtagctgggaccacaggtgtgagccaccacgcctggctaattgttttttttttttttgtagagacagggtctcactatgtggcccaggctggtttccaactcctgggctcaagtgatcctcccacctctgcctcccaaagtgctggggattacaggcatgagccacctcgcctggcctctagtcgctttatatattttaacttaatccttacaagagccctgtgagctagttacaggagcacaaatggaaaccaagaaacagaaaaatttatcagcatgactcagtcctcagagccatgtatggccgtgtccgtgcatggcaggcaggtcaggggcctggggaacgctgttctggaaaccttggccaggccttggcacccgaggaatgtgcttttcagagtttttgtggctcttttccagacctgccctgacctctagctctgggaactatgtaagccaagtgccttccgggaagggagtccctctcctggtaactctttctgggtaaccagatgtggactcatgacacacactgagcctacgtcttataattttttgtttttgtttttgagacagtttcggtcttcttgcccaggctggagtgcaatggtgcgatctcggctcactgcaacctctgcctcccaggttcaagcgattctcctgcctcagcctccctagtagctggaattgcaggcatgcgccaccacgcctggctaattttttgtatttttttttttttagtagaaacggggtttcaccttgttagccaggctggtcaccaactcctgacctcaggtgatccgcccacctctgcctcccaaagtgctgggattacaggtgtgagacagctgtgagccacc

SEQ ID NO: 67047 - DNA, 6041 bp, Homo sapiens
acagtggctcatgcctgtaaagccagcaatttgagaggcatcatgatgcaagaggaagaggattgagtgaagctaggagtttgggaccagcctgggcaacatagtgagaccccatctataaaaaaaaattaaaaattagttgggcatggtggtgcactcctgtggtcctagctattcaggaggctgaggtgggaggattccttgagcccagggttgacgctgcagagagctgtgatcacgccactgcagtccagcctgagtgacagctggaaataatgataaataaataataaataattatttaaaaaattataataaaaataattaaaaaattattttccctgattaatctttttttttgtccttctgagagttcaatttgtcccttttctgcctggtctcctaggtttccctaaaatcctgctgagaggttagcactgcctgccaaagtcagtttgcaaaatcccagagaaatccagcttattcctgggggaaccgccaagactgcccagccctgtgtggggttcaggcaagtttctcacatgtgcctttttggcaagaggcctctggcaaccccatgagtccccaaagagactcaattctaaaagttggtctccaccagctctctgtggcttaggggttcaagttcaactgtgaaagccctgttttgttttgattttgctttgagggagaggaaaccgcccttctgtttgttcaactccttctcctaaggggagaaatcaatatttacgtccagactccaggtatccgtacaattgatttttcagatgtttatactcagccaaaggcgggatcccacaaaacaaaaaatatttttttggctgtacttttgtgaagattttatttaaattcctgattgatcagtgtctattaggtgatttggaataacaatgtaaaaacaatatacaacgaaaggaagctaaaaatctatacacaattcctagaaaggaaaaggcaaatatagaaagtggcggaagttcccaacatttttagtgttttccttttgaggcagagaggacaatggcattaggctattggaggatcttgaaaggctgttgttatccttctgtggacaacaacagcaaaatgttaacagttaaacatcgagaaatttcaggaggatctttcagaagatgcgtttccaattttgagggggcgtcagctcttcaccggagacccaaatacaacaaatcaagtcgcctgccctggcgacactttcgaaggactggagtgggaatcagagcttcacgggttaaaaagccgatgtcacatcggccgttcgaaactcctcctcttgcagtgaggtgaagacatttgaaaatcaccccactgcaaactcctccccctgctagaaacctcacattgaaatgctgtaaatgacgtgggccccgagtgcaatcgcgggaagccagggtttccagctaggacacagcaggtcgtgatccgggtcgggacactgcctggcagaggctgcgagcatggggccctggggctggaaattgcgctggaccgtcgccttgctcctcgccgcggcggggactgcaggtaaggcttgctccaggcgccagaataggttgagagggagcccccggggggcccttgggaatttatttttttgggtacaaataatcactccatccctgggagacttgtggggtaatggcacggggtccttcccaaacggctggagggggcgctggaggggggcgctgaggggagcgcgagggtcgggaggagtctgagggatttaagggaaacggggcaccgctgtcccccaagtctccacagggtgagggaccgcatcttctttgagacggagtctagctctgtcgcccaggatggagtgcagtggcacgatctcagctcactgcaacctccgcctcccgggtttaagcgagtctcctctctcagcctcccgaatagctgggattacaggcgcccaaccaccacgcccgcctaatttttgtatttttagtagagacgggttttcaccattttggccaggctggtctcgaaccccgacctcaggtgatctgcccaaaagtgctgggattacaggcgtcagccaccgcgcccggccgggaccctctcttctaactcggagctgggtgtggggacctccagtcctaaaacaagggatcactcccacccccgccttaagtccttctgggggcgagggcgactggagacccggatgtccagcctggaggtcaccgcgggctcaggggtcccgatccgctttgcgcgaccccagggcgccactgccatcctgagttgggtgcagtcccgggattccgccgcgtgctccgggacgggggccaccccctcccgcccctgcccccgcccctttggcccgccccccgaattccattgggtgtagtccaacaggccaccctcgagccactccccttgtccaatgtgaggcggtggaggcggaggcgggcgtcgggaggacggggcttgtgtacgagcggggcggggctggcgcggaagtctgagcctcaccttgtccggggcgaggcggatgcaggggaggcctggcgttcctccgcggttcctgtcacaaaggcgacgacaagtcccgggtccccggagccgcctccgcgacatacacgagtcgccctccgttatcctgggccctcctggcgaagtccccggtttccgctgtgctctgtggcgacacctccgtccccaccttgtcctggggggcgccctcgccccaccagccccgatcaagttcacagaggggcccccggccaccctcaaggcctcggttccttacgaggttgaaacgttgcctcagaatctccccgcccctccttggtctgcagccgagatcttcagccacggtggggcagctatcccccgggaccgaccccctggggtggcctcgcttcttcagaggctgtgaatggcttcggttcagctgtccaagcggcgatttttcctctgggtgaaatggattagattttagatttccacaagaggctggttagtgcatgatcctgagttagagctttttaggtggctttaaattagttgcagagagacagcctcgccctagacaacagctacatggccctttccctcctgagaaccagcctagcctagaaaaggattgggattgcctgatgaacacaaggattgcaggaaactttttttttaattggcaagggggttggctttgactggatggagagctttgaactgccttgaaattcacgctgtaactaacacaccagtttcctctgggaggccagagagggagggagggtgtaatgaaatacggatgattgttcttttatttttatttacttatttattttttaactttttgtagagatgaggtctcgcttggttgctcaggctggtcttgaactcctggcctcaagcgatcctcctacctcagcctcccaaagtgttgggattacaggagtgagccaccgcgccccaccggggatgatgatgattgcaaacattctgccactcagttttacaaaagaaagagaggcactggattaatgtgtatctcactcaccaatcaacctcttccttaagagaaaatgttaaggaagtcttaggcaaggccttgtttgttcatcactttagtttctctctcccgggatggctgagaatgtgatgtttcctctgttgtcaaggagactacacccctgatgttttcctccagacttctgagagctggtgtgtgtttctagcactttctagctgcaccacctcacgctgtagctggcttcaaggcatatccaggggggagtttcttgtccatttcctttacaaagggaagttgttggaatctgaaccgcaagccttcacttagaccaaaatcaggcaacagcggtgagcgcagctccaaacgtgtcaatgactcacccaaatttgagtaagggagttggctgctttaacgagccgcagggtgattcccttgtcatttccggaaatacctatcttccagggaacactgggaaaaaacagggagacctttgttgagacagaaaacctgtaggggaattctgttcctcattcctgctcttatctgtagacttcctccctgataagatccaattctagatgggtcggttgctccttgctttgatgggtgctttgatgggctttattattattattattattattattattattttgatgggctttttgatgtcccttttccttccacactctgtcccaactgtcaagcaaatagccttttgttgctaagagactgcagatgtaaccgaccagcagcaaacagtgagtcaggctctctcttccggaagcaaaatcaattgctgagatcactctggggaaaatacccaccttatttggaaagaagcactgatcaattgatgtctattttttttttttttgagttggagtctcgccctgtcacccaggctggagtgcaatggcataatctcgcctcactgcaatccccgcctcccgggttccagcaattctcctgcctcagcctcctgagtagctggaattataggcgcctgccacaacacccggctaatttttgtatttgtagtagagatggggtttcaccacgttggccaggctggtctcgaactcctgacctcgtgatccacccgcctcagcctcccaaagtccaaggattgcaggcgtgacccactgtgccagccaatcaattgatttctcattcattttcagctggctctgttcccttaagccaggggattttcgtttgtttgtttccccttcaaggaaatgattctagctacagttttgatttccttgtacaactgttttcagtagcacagggaaagaaaacatcgaaagcattcaccacctcatttgtgtgctgggggaaaaagcagaaatgtgtattctctttttttgtttcgatgaccttgttcctgacttgttactcgtgacttgagagatcagagggctagaggactagaatttatagaggtgttttttttgtttgtttatttttgttcgagttgcccaggctggagtgcagtggcgcaatctcggctcactgcaacctctgcctcccaggttcaagcgattcttcggcctcagcctcctgagtagctggaactacaggcgcccgccaccacacccagctaatttttgtatttttcagtagagatgggatttcaccatattggtcaagctggcctcgaactcctgacctcgtgatccacccgcctcagtttcccaaagtgctgggagtacaggcgtgagccgccgtgcccggcctttttgtgtttttgtgtttttgagaggagctcattgctttttaggcttccctagcgtgagaaaatctggggatccatgctctagtttacttcctttttttttttttttttgagatggagtctcgcttagattgcctaatctcagctcattgcaacttctgcctccggggttcaagggattctcgtgtctcagcctcctgggtagctaggatacgggcacccgctaccatgcctggctaattttgtacttttagtagagacagggtttcgccacgttggccaggctggtctcgaactcctgacctcaggtgagccgcctgccttggcctcccaaagtgctgagattacaggcgtgagccaccgcgcttggcctaatttgcttttcctgaaattcaaatggtctaatatgaaaaacgccaaccttgcttgaaagaataagaaagaggtgcggtttcgttgggccgttgatgtttggaacaggactggttttgtccccttgctcggaaagggcagcaactgtgaggacagctccctgacgtgctctcactcagcactgttccgttcctgagcactgtccccactagctaggccaagggagctcatttggcaggcaactgctgtctggctgcgcctgtggcagtaaaatctgcctttattttttggaggcagggtcttgccctgtcgctcaggctgaagtgtgcagttatagctcactgcagcctccagcttctgtactcaactgatcctcctctctcagcctcctgagta

SEQ ID NO: 67048 - DNA, 2852 bp, Homo sapiens
gcctcctgagtagctgggattacaggcatgcaccaccacgcccggctaattttgtatttttcgtagagatggggtttctccacattggttcaggctgttctcgaactcccaacctcaggtgatccacccgcctcagcctcccaaagtgctgggattataggcgtgagcccccgaacccggccactcccagctaagtttaaattttttgtttgtttgttcgtttgtttttattttttgagacagagtctcccgcccaggctggagcgcagatcactgcatccttgacctcccaggcttaagccatcctccccactcagcctcccaagtagctgggattacaggtgtgtgccactatgcttggctaagttgtgtattttttgtagagatggggttcaagggattctcgctttgttgcctcggttggtctcaaactcctgggctcaagcagtcctccctcctcagcctcccaaggtgctggggaaatccacttttgaaacattgtctggagagttgcccaggtggtagatcacagaaataggtcatcgtggggtccttcccatgggtgcagtcttgagccacctgtggccagcaaatatttggagaataatagtcaggggagagcttgaggtccagggaaaggttttgtttttcttcagggaaaggtttttattgttctttatccctccttaaaggaccttcaggtgttactgacattcccggtctacccagtggcacatttagtttgtaagctgggccctcgtacagaggtagggaggtgagagcattggattagtggtcaccaaagctgcggtcacctagtggggtgatcagaggctcctcccttaagatcttgattgccaacgcctctggcccaactttcctttttatttatcgcaagcctcctggaatctcaattgctttttgcccacccggtgtgtcagcacaagaaatgagtcatttcctcctttaagcacagttgaaattgagctgtgagtcagtgaggtgtgtacgatattgtcaaagcggggtgtgtacagtattgacagatctgtagttgggcaagagaattatcagagtttgtgaccacagcagattccaaagctcgactcattttcttctctcttccttcccttttttcttttctttttttttttttttttgacagagtctcgctctgttgcccaggctggagtgcagtggcacaatctgggctcactgcagcccctgcctcctgggttcaaatgattctcatgtttcagcctcccgagtagctgcaattacaggcattcgggttcaagtgattctcctgcctcagccacctgagcagctgggattacaggcgcccgccaccacgcccggctaatttttgtatttttagtagagacggggtttcaccatgttggccaggctggtctcgaactcctgaactcaggtgatccgcccacttcggcctcccaaagtgctgagattacagacgtgagtcaccgcgcccagcctgttctgttctttaattctcaaaacaccctctaggaagtagagactgccattctcccccattttacagatcaggaaactgagtcccagaaggatttagtcagttacccaagttgttctagttaaatggcctggaaagccagtgaagcccaggattgtctatctaacccccttactactctaactttcagggaatccacatgaatgtgctgggtcaaccatcaaagttgaaatggataaagggggctggatgcggtggctgatgcctgtaatcctagcactttgggaggccgagatgggtgggtggattgcttgagcccaagagtttgagaccagcctgggcaacatagtgagacacctgtctctgcaaaaaataaataaaaagttagctgagtgtgatggtgcacccctctagtcacagctgttgagttaggcttaggcaggaggatcgcatgaacctgggaggtggaggcggccgtgagcctcagtcatgccactgcactccaacctgggcaacagagtgaaagccggtgtccgaaagagaaagaaaaaaagacatagatacatcttttaaagttaggttgtatgttaattacctacaactcagtttcaactgtgcttaaaggaggaaatgactcatttcttgctacatatcaaattagcccaaaatgtagtggcttaaaacaacacatttatgatttctcagtttttgcgtgtcaggaatttggaagcagcacagctagacggttccagctcagggtctctcatgaagttgcaatcaaaatattggcaggagagaaaaacatattttcagaagctgcaggcataggaagacttggctggggttgaaggatccacttccaagatggcgcactcagtggctcttggctggaggcctcagttccctgctgcgtggagctctccctccagctgcttgagtggactcatgacatgcagctggcctcccctggagcagtcgatccaacaatgagcatggccatgaactaggctcagaagccactccctgtcgtctctacattttcctatcagaagcaagtcattaaaagtccagtgccactccaggggagacgaattaggctctgccttctgaaaggattatcacagaagatgcggtcctatattctttttttaaaattattcttttttttattttgtagagatggggtcttggtatgttgcctaggccagtctggaattcctgggctcaaacaatcctgtctctgcctcccaaagtgttgggattacaggcatgagccactgcacctggtcatgtggtcatattttctttttcttttttttttttttttgagacagagtctctgtcgcccaggctggag

SEQ ID NO: 67049 - DNA, 459 bp, Homo sapiens
tggaggttgcagtgagccaagacagccccactgcactccagcctgggtgacagagtgagactccgtctcaaaaaaaaaaaaaaaaactaaacaaaaaactggttagtggctagacaacaggatggtatcttccaagcccatggctgactcagcagctcctgggtcaagacactgtgacctgtgtcccctggcaggaagcatcgcccctgccacctgcccggtgtactctgtacctgtcaggtgacatctgctacctaagcacgtgagaggtggcatttcacagtttcagtgtggtgctgacaacccgggacgcacactgtccttgcagctacaatcaggaggtgaatgttgggtttccagcagagaacactggagaaggcacacttggtgtctggaagggaaaagcagggaagagagcatcatcagatgcctgcgggtgaaggtgggcccgctatggcc

SEQ ID NO: 67050 - DNA, 2337 bp, Homo sapiens
agctacgcgggaggctgaggtaggagaattgcttgaacctgggaggaagaggttgcggtgagccgagattgcaccattgcactccagcctgggaaactctgtctcaaaaaaacaaaacaaaacacaacaaaaacccaaaaagagcagactgaccaggccgtctgggttcataacctggctctgccactgactcgctgggtgacaggcacctcagagcctcagtttccccacctgacaatggagacaaagctaatctccccctccccaggggctctggaagtggggcaggatggggctgcgcaggcgctcggagacaaaggcagggcctgtcatctttcctgcgtccacggggtggcacttccttcctgccttccgccttttgttttgggacgcttccaaaacgcccctgggagggaaaactgagcagcccacacaggaagcgtcctggagcctgcacacaggcgctcgataattgctcgattgacgaaattggtgctcaaccaagtggcaaacaggataagcgggctcagatggccaggaaaacgggagggcctgggaggtggcggctcgagggtgctgagactgagacgggagggtgggcaggaccggggtgcatccccaggcaggggtggggactgggagcacagcatgggtggggcatggcccagaggagaggccagaggtgatggaaggttctggtattcggccttggctgctgcattgggagcttgtatcagagctttgagggtgacacagacatgcagacattcagtttcctgacaatccatcgttctgccccgatggtcgccaaagggagggagggttgacagccacccattttacagagagaaataggaggctcgggtcactgtggctggattctgatcctcgccggttccagttctctggctcagaacggggccctggtaaaatgcgctgctggctccctggtctataggctcagcacccacccacccacccacttgtcctgcagggctgggggcagcctgcagcttggggaacgccacccctgcaggctggtggtcctgtcctgtctccgcaggctcaacagctctggccaggacagggtggaaggtgggaggaatttgtcccactcccagcaagtctgacacccacaactagtgtcccctgctgtccctccccttctcctgtccccaggccgttccccttccagcagcccgaggcatcccagaccacagctgtctgcagtgagtcagcctggagcctctgggctgagccgcggctgccagagggaggtggggagaggggtgcaggctgccctgccctgcagctggccctggcctaatcccctccccgctccccagtctggggtcagcaccctcctcccttgcaggcagtgattttccgtgatgatgaaggaataaaaaagccacggagggttctgagtgggagtccctggtccccatcaccccactgagcatggccgctggggtttcctggcaactttctgctccatccggagccgtccctcccctgggctgggctgctctggggctgttcctgggatggggagcggggagcttgggagtaaatagtgacatcagccacctagacaggcggggccactgtgtcaaggggccatgtcaggttcccttctcccagagctggggcttgtcttggaattggaaaatcctccccacattgccctgtggactgcaggcctggcgtgatcaaggacccctgccctcctgccatcccccttggtctcctccatgccagccttgctgtttcccctgcctggctcacagtctccacacctttatcccctgggggctcaagtctgggacaaatgacacctcctccctgggcctcccacagagccacagagcgtcaccccccaccaccccacagcgttcatttgtgggtcaggattaagagcacaagctctgaacacactcagctcagattaaagccctggctctgccacccgtctacagaaaaactgacacagtggcctccactggggtgtggctccatgaaggagggtctggcgggccacaggcttacagtactcatttctcttttcttttctttcttccttcatttcctttctctctctccttccttcctccctccctcccttccttccttctttcttcctttgtttctctctcttttttttttgagacggagtctcgctctgtcgcccaggctggagtgtagtggtgcgatctcagctcaaggcaaccaccacctcctgggttcaaacgattctcttagcctcctgagtagctgggattacaagcacgcaccaccacgcctggctagtttttgtgtgtttagtaaagatagggt

SEQ ID NO: 67051 - DNA, 2084 bp, Homo sapiens
cagccatcccaagctgctcccagctgcctgcccctctaggtggcccccactactggcctgaggatgcactttatccccgccagggcctgaggagtcctggggaaaggtacccaagtctagtcctcaggagaagccgcccagggagcactagggcccgaggaagggttcaacctcgagactccatagcccctgggctcccgtccccagaaacaccagttacgagcagggggctggccatggtgtgaattcatgacctgcacacctcttgccgtaatgactaagtggctagagcttcaggctgccccactgctgccctctggagctcgagcaggtgcaggtgtgggtgcccaccctggcttggcctcttctcacctgggtggcttcggacacagggtggactcctcaaaggggctgcttcccatctgagaagccagcataatcctccaggggctactgatatacacacgctgcccctggtcctgagttagatcaccctgcccctagggagggcttgggggcttcactgctgaagttcagactccagggtggtccttgtcctgtgtgcctcagtttccccatctgtaaaatggatggtcctggggctgagcctcagtgctgcagggactagtgtggaaccctgtgtcctggtgcctgaaaccttactcccacctcagcagggctgggctgagccatcagcaagcctctggccggcctccatcattcaggaaagagccggtggctgaaggcacagctctcagagggagaacaaacgggggcgggggtgggatgggggcggggccggaggccaccggcctcaggctgtcctgggcatccagccagtgctgggcagtgagtcaggggccaggcatgtggagtggggcctctcccagccccggagatcaggcacctcccggaacccgcctgctgggcccccaccaggccgcgttcctctcccactcgctctccccatagaggggaccctggacctgcctgggggggacgaggatggggatgtggctggtgggcacagggcctctctgagccccggcacaggccgcctgatgggaccgtctcttccttggggaaactgaggcccaggttgctggggtggaggggatgtggagtgacagggcagggcaatggctcctcggccccctccgggaacaaagccaggtcattcctgtggggagggagcgccaaccccagggttggggggggcacgggccctgggtcaggggtacagataagcctgggctcccagaacccttgtcacagcggcacccctgccccatgcctgctttctctccagggcactcagagctgcagtttgcaggacgagagggagacgtgcccaatccccccatcccaggacgctcagccgtgcgtgggctgggcccactccactcccggcgcccacagttgccccagtgaaccggccagtggaggcatcctgtcccgtgtgcgggaaaggaatgaccgccaaggtgacagcagcgcttagccaaccctggcgctgacacctgacttgcaaactgctccctgcctgaggcttcaaggcaggcgagaggctttgtgtgtgtgacttcctccccgaagggacactggcaacagctggagacatttcctgttgttaaggctgagggggagctgctggcatttggtgggtggaggccagggatgacgttaactgttctactacgcccaggacagcccccaacacacacaacagcctggcccaatgtcacgagagctgaggtggaacagccctgttctgcttcaggtcttcaggtctttgggggtcaaggatgcaaatagaggactctgctcccaattcagctcacataaaagaaccggccgggcgctgtcgctcatgcctataatcccagcgctttgggaggccgaagtgggaggatcgcttgagcccaggagtttgagaccagcctgggtaacatagcaagatcccatttctacgaaagtacaaaaattacctgggcacggtggcatgcacctgtagtcccagcggcttgggaggctgaggtgggaagtttgcttgagcccaggaggttgaggctgcagtgagccga

SEQ ID NO: 67052 - DNA, 1262 bp, Homo sapiens
tttcttatttttagtagagatggggtttcaccatgttggccaggctggtcttgaactcctgacctcaggtgatctgcttgcctcagcctcccaaagtgttgggattacaggcatgagccactgtgcttggcctatttttttgagacagtcttgctttgtcatccaggctggaatacagtggtgtgacctcagctcactgcagccgccacctcccaggttcaagcaattctcctgtctcagcctcccgagtagctgggattacaggcatgcgccacaacggccagctaatttttgtaattttagtagagaccaggtttcaccatgttgaccaggctggtctttaactcctgtcctcaagtgattcacccacctcggcctcccaaaatgttgagatgagaggcgtgagccaccacacccagcctgagggtgtactttaactcctctgccccacatctgtgacatgaaaaacaggtccagagacagaagttcagtgactcgcccacaggtacatagctccaaacctaggatgtgaactggatctgtttgacccaaagcctaggatccctggatcctgattctcagttttcttggccccagattcatccattctgctaacagccaggctggccgagtcacatctttctcctcaagccatcaaaggagggggagttaatggaggggtggaagaaggaggagggaaggagggaagagcctgcttgggacatcacattcaggataatattcagactcctcctgggcactctccaggcctggcagtcaggcggctgctgagctcatcttctgcttgccaagttcattctcacctcctgacctttgcatttgcaatccacgctgccaggaacaccgttcctgagccaccccgtggactggctccataggccaatcaaggctcagcccaggcctcctcataaaatgtgactgtataaggcacctgaaacccctggcactgcagctgtcagggagaaccgtatggcggttcctcagaaatcaaactttgaattaccatttgatctgcttctggctgaatacaaaaaagaactgaaaatagagtcttggctgggcgtggtggctcacgcctgtaatcccagcactttgggaggtcggggcaggtggatcacgaggtcaggagatcgagaccatcctggctaacacggtgaaactctgtctctaccaaaaaaaatacaaaaaaaaaattagccgggcgtggtggcgggtgcctgtagtcccagctactcgggagg

SEQ ID NO: 67053 - DNA, 1065 bp, Homo sapiens
tcagaaggggccaacccctccagactcctatatttaccactaaacccctggggggtgggggatggttgctgtcataaagccgatttctcagatggtgaaactaaggctcagagggggccgtcccagggggcatagggcaggagatgggagagtccaggagagaaggggttttgaggtgggcctggtcgccccctcccagcacccgggccccttcccccgtgggcccgcgaccacgctccgaccctcacctcgcagctgcttctcggcaccgtcttgcgtttccagcagccgctccaccacctgctcgtggcgccccagcagccgtcgctgctgcgcctccgcgcggttggcgcccagcaggctgagcagcccctggctcacctcctctatgtcgcggaaggcggccatgactacgccaggctccaacccgcgcaaatttgactgtccgcggggcccgccctcttccagaagaggttgctttccattggattttttgatacgtcagtcataagcaatggccaataggcatggggaacaggatcttagactgggctaagccgcctttggtctggcctggtgcgcctgcgaccactcctccgtcagtcatcggtgatgaccaatcggcgcaggaagggggaggctccgttatccttcccgatgcgcctgcgcgggagagaaagcggctgtttatttctccataggtcgagcgcttgctctgtgcagggtggggttctaacggcaaagcagcgagcagcttctcctggaacttacatcctacagtgtgtgcgtgggatacacaataagcatagagaataagtagattctatgagaggctgcatagcaaaatggcgtctgcagccagatttactgggttcgaatcccagcgttgccacttactagctgtgttaccctggacagacttcacctctctgtgcggtactttcctccttagtaaaatgagggtcatactagtgcctgtgtcagcgttggcgtgagaattcttcttattactttttttttagagacaaggtattgctctgtcacccaggctgaagtgcagtgcca

SEQ ID NO: 67054 - DNA, 655 bp, Homo sapiens
atttcaaccttccaagtagccgggactacaggtgtgtgtcaccctttggtgcctgagagcatggcttcttgaaccagctgtgtaatgttggcatagacctcacttctttgtgcctaaaggcagtgaataacaattaggcagagtgaaatcaagaggggaaaagacttcaggttcactttctgatgctgcagcttacctgtgaccttggcaggttcctaacctttctaagccatagtggctaaagatagccctttcttattagctgccaggaggtgtcccagagataagccaggcaagattgtgcaactcgagcctgatagatctaaaggctcctgtggaaaaatgccacccgcccacctcccttccaaaaaagcaaagcgagaaccgcttcccagccattaggatggctactgtccaaaaccaaccaaccagccaagcaacctggaaaataacaagtgttgaccaagatgtagagaaattggaatgctgtgtacccttgctgagaatgtaaaatggtgcagctgctgcgggaaacagtatggcagttcctcaaaaaattaaaaatagtattaccatatcagcaattccacttctgggtatagccccaaaagaattgaaagcaggttgttgggccgggcgcagtggctcatgcctg

SEQ ID NO: 67055 - DNA, 545 bp, Homo sapiens
ccatccccaccccgcaaaaaaagaaaggaaattctgacacatgccacgaggtggatgaagacatgttcagtgaaataagccagatacaaaaagacaaacactgcgtgattccacttagaggaggtccctagagtcgtcagattcataaaaacagaacgtagaatggtgggtcccgggggctggggaggggtatggggagtgagtgtttcatggggacagagtttcagttttgcaaactgagaatgttctggagatggatggtagtgctggttgcacaacagtgggaatgtgcttaatgccgttgaactctgcactttaaaatggttaaagtcgtacattttatgtcatgtatattttaccacaattaaaattaaaaatatactaaaaaaaaaaagcaaagcaagaaactgtgtgatggcgggaataggtcttaaaggtgagctgaacaagagaagtaaagataatgacaaatggtcctggcaatggctttgtgagaaagtttatttcctaagaacccttcttggctcacaaagccagaggaaact

SEQ ID NO: 67056 - DNA, 650 bp, Homo sapiens
ggcagaggttgcagtgagccgagatcgtgccactgcactccagcctggatgacagagcgaaactctgtctcaaaaacaaaaacaaaaacaaaaatgaagacctctgagatcctcatgggtgcggtgggggagtgccggagtttggcacaggcaaaaattggcaagggataatcttctagaacagggtcaacaaacctgggaagggctagatagcaaacatttttggttacgtcacacataaggactcggttgcaactgctcaactgtggcatagttctaacacaaaaccagtcacagacagtatgtaagtgattccgcgtggctgtatccaataagtttgaatttcacataatcttgtcatgtcaagaaatattttttttgagacagggcaagactctactttttttttaatgtgaaaaaaaaaaatcaataaataaactagagcagcgcctaaatcccattctgccccaacagagaagcaggcagtgacttcagggaacttcttttttttcttttttttttttgagatgaagtctcgctcttgttgcccaggctggagggcaatggcgtgatctcagctcactagcaacctctgcctcgcgaggtcaagtgattctcctgcctcagcctcccgagtagctgggattaca

SEQ ID NO: 67057 - DNA, 615 bp, Homo sapiens
agggaataaaatgagactccaggaagaactttcaggcagcagcttgaatgcaaagaaggtggacatcgctatgtctgtttgtcctgcaggcagaaggcctctcagctgctctgggaggcacgtctggaatggtggttgcctctcagagattccgaggctgggccaggcggagcctctggcagggggccagaacctcaggacctggtgtttgggatagacacagaacaggcgggtggtgtccagagctggccaggaacaacacgggccggcgagaaaacacagctgggtccctgccctccagcctgtgccctccagtctgttggtaggggctctggccacctgacatttgaggctgggatgagaacttgggccctaccttcgagccctgctgcagattcaagctgtcctggttatttatttcttttttcttttcttttcttttttttgagatggagtctcactgtcatccaggctagagtgcagtggtgcgacctcggcccaatgcaacctccgcctcctaggttcaagcaattctcctcccttagcctagctaggactacaggcgtgtgccaacacgcccagctaatttttgtatttttagtagtgacagggttt

SEQ ID NO: 67058 - DNA, 1663 bp, Homo sapiens
aacatgaacctaagcctggtggatccccccactgcccaccaagccaccaccctcagactccacatcagatatctctacccgtttcccagatacggagactgaggtctgagggtactcagtcatctcaccgccctcgatgaggaccagcacgtcccgagtaaggggaagagaaaggagacgagggggtgtggtgggggagatggatgtctgtggctgagacccttctctcgccatgggacccctggggaatggggaaggggtgacaggataagacagagatggagagactggagcctataagaggggacaggtagggagcgcagggaaggggcgcgggtctccccaacccaccacccaagaccggcctgcacatcgcggaggtcggtggtggtggtgggggggggtcttcccgccccaaactcggggtggggggaggcgagaaggaccccgccccgtgcagagagggggcggggcctgtgggatcccgggctaatggcaaacagctgccgctccccacgccggcccagccgccaagcccaggcccagcccggccggacgcccggccgccttcccgccgtctggggcatggccgcggaggagggcgaggggggacagtgcggggagagggcagagccggggaggaacagaggcagaaagtgggacagagacaggggagagcgggcagaggggagccaagacaggagaaacgggcagggcacgaggaatcgatggggggtactgggaggaatcgatgggggtatggggtcaaagacgaggagggggcagggacgcggggacagacactccaagtctggaaagtttgggcacagaaggtggagttggaggcagcggctcgttgagaccagcgaggtcgtgtcccagggttggaggcggggggtagggtagtaggtgtgtgtggagggggtgcacactcgatccccgaaccagacttgaacccctacccagccccgggtcccactcgccttgcgcgctccggccgctgccttccctgggtcccgccgcccgagcgtcttcgcgcgcgccgcagcctgggcgcccggccctcggaggtggctccgcccgcaccacgccccctccggctggtcccgcccccccagccggcaccgccccctccagccgcccgggcgccccggccgcggtggggggtggggatggagagacgctggttggagactggatctcacctggacagcaggtgtgtgtgcgcgccggggtgtccggcctcgtccttccttcctccctaagtccccgaggcagggtcctcccactgccggcctcccccccaccgcctgctgtccctgggccgctgcggggggcggaacggctcggcggcgggagggggtggagctggccggggcccagctcggggagggcgcgcggggcgggcgcggcagcgggaggtcacccctcccccaggcggcccagggctggaagcggcccagcgcagtcctggcacacggtggcgtgaccgccgcgcgagaagggaggctgcagagtcctgggcgccggcgccagccagacctgcattcccatcccagacccaccaaacttttgctgctctgtgcctcagtttattcatctgtaaaatggagatgatcatgttagctacctgataggagcgttgagaagattcactgaccat

SEQ ID NO: 67059 - DNA, 2208 bp, Homo sapiens
cccctcaagtgatccccctgccttggcctcctaaagtgctgggattataggcattagccaccatgcctggccccagctaatttttgtatttttagtagagacagggtttcatcatgttggccaagttgatctcgaactcctgacctcaaatgatccatccagctcggcctcccaaagtcctgggattacaggcgtgagccaccgcacccagcctcttctcccagatatttctcgtctcacagggatttctacaaactcaccatccgggaggctgggctcagtgccaggaaggcgaaaggcgtagtggacgtaggcagccagctgtgggcagtgaccgcgggcatcctgggctgcctccaggctccggtgaacaaggctgactacatgggccattgcttcaaaggctccacggcccaggttcactgcagggcagagcagaggtcaagttccagggcccaaggcctctcacctccccgcccactttccaaatataaagacatcaggatttgagggatcatgtgctcattaaggggtcacaaatttttttttttttttttttttgagatggagtcttgctctgttgcccgggctggagtccagtggcatgatctcggctcactgtcacctccgcctcccaggttcaagcaattctcctgcctcagcctcccgagtagctgggattacaggcatgcgccaccacgcccagctaattttgtatttttagtagagaaggggtttctccatgttggtcaggctggtctcaaactctcgacctcaggtgatctgcccgcctcggcctcccaaagtgctgggatgacaggcgtgaaccgctgcacccgggccaaagggtcacagaagaccttctctgggtgcaggggactggaggtcatttttcagatgagaaaaatggccagagaggtaaatgggcttatagaagatccctcaggacctcaggactgagaagccatgtggatggggaaactgaggtctgaggccacattcgcttaccaatctggccactgatgatcgggggcctgatgaccagacgcacgagcttgtccagcacgtggtgggagaaggccacaaggggttcggggctggccaggcgcagtgctgcaagactggcccgcagctcctgctccacgttgccctcgctcagcacagtgtccttgagccggaatgggaaggctccctcctccaggacgtgcaccagggtgaagaatttgtccaggtaggggtcctgggtagggatgtggagtgagcagggtggggcctcagggaatgaagaccacccctgcctgaatcagcagcttcccttaaagctgggtccagctgaccaaagtcacgtccaaggcctgaggccagacctccccggccatcggcaactgttactcaatcgtagggcaggcaagaggggagcagggcgggactcttggttcccggcccaccccgtacctgggggtgcacagaggacacggctgtgagctccacactgaacacgcccttgtgaccgtccacccagcgcatgcccggaagcgccacctgtgggagggaggcaccaggtgggcactggtcagccctccctgactgatcaggtcacccagcggccccagccattgcgacactgcagcgtgagtgtagcccggtctgggggtgcagccaagcaccctgcccccagccctggtcccagtagactgagagggtccactgggcaggctggaaatccacatgccaagacgggggcagagaatggagacacagggtgaatgaatattcattgagtaggtcaggaaacaggataggaggatttgaggcctagggtcattaacaatggtgcattcatggggaatgataaggtactacgagggcaggggacagtgatcaggaaggcagtcagggtggctaaagtgggaatggagcagagaggcaatgggaatctttggggaggacatgtaggacacagagaggcattaataggggaataatgagctacacgggggccctggaggcaccagtagaggataacaagcctcccaggattgacaggaaggaaggcaggtgactcgggagtgcttctggggacagtgcattggcaggcaggagctccagggcacatacatcgggtgtgagcacggaatagctgggcggcggctggtccacagacactgggagacagaaggggccggtcctcaggcgcccgtgctgcag

SEQ ID NO: 67060 - DNA, 1704 bp, Homo sapiens
aaactgaggccagagtccgagtcctgcctccttcccccaggggcaactctgtgcaagccttgacccctctctgggcctcagtttccctatgtgtataatgggcacttcaggccttccagctgagcctttgtaatgatactgatgatgataaataacaacaatgacaataattgcaccaaacactattactacaacaatgaaataatcgcgcctactgtgtgccaggctctgttctaagcactcaacatgaaataactcatttacttctcacaagtagctcatgaggcaggactaacatcaccgccattttacaagcagggaaactgaggtacttgcacaatcacccacggagtaaaatggcagtcagtggtgatctgggcatatgcaggtcttggagatcaggctgtgtgaccttgggagagtctctgccacctgcacctgcccccttggatactaaccaggccaataaaagcccccacgtggcaagtatgtgggaggggaacaagagcagatattgtaatggcaggtcaaacagctcagggcaaaccatcaatgcttataaaatctttactgttattaccatcatcattgcgatgcctattcatagatggagaaacaggctcagcatggtgagtctcaggaactcccagcagggtctggggcccgtcctctcccaatgccccccacccacacctggccctgagccccaggaagcgtgatcccggcgtggcctagccggacattcgcctgatgcaactatcgcaccactgccaggcccttgtgcaatgcggggcaccaggtcggccagttaacgattgactggggatcagtgggggtatgaggcataaaaggcttcagtgacagtgctgtggctataccttagaccctcagtcatgccagtgcctgctctgtgcctgctctgggccctggcaatggtgacccggcctgcctcagcggcccccatgggcggcccagaactggcacagcatgaggagctgaccctgctcttccatgggaccctgcagctgggccaggccctcaacggtgtgtacaggaccacggagggacggctgacaaaggccaggaacagcctgggtctctatggccgcacaatagaactcctggggcaggaggtcagccggggccgggatgcagcccaggaacttcgggcaagcctgttggagactcaggtgggcaccgtagctgcgacactgtggggtggccaggagtccaaagaggagttcgtgtctagggtaaccaaccatcctggtttgcccaggactgaagggattcctgggatacaagattttcagcgataaactcaggcaagtccttaggtacacaaagatgagttggacatcctactagtgacccactgtttattaagcagatggaggaggatattctgcagctgcaggcagaggccacagctgaggtgctgggggaggtggcccaggcacagaaggtgctacgggacagcgtgcagcggctagaagtccagctgaggagcgcctggctgggccctgcctaccgagaatttgaggtcttaaaggtaaggagctcccccaaccctagtgggctgagaccctgatttccggccagaactcgcttctgcaccttgagtcccaaagacctcccagatcagcctcccagctctgtggcctctaccctgcatgtccccagacaaaactcaagtccttttgt

SEQ ID NO: 67061 - DNA, 1376 bp, Homo sapiens
ccagcccgtgacgggagagcctgaagcagaaggtgggggggcgtccacagctgtcccccttccccccccccgacagctgggcactggaccctggagggggaagggcacgggaaactcctcgaggggtttcaaacgccaccaaggagcccatctctgtccccaaatctcagagcctggagcctccctgccccaaaccaggcactgaggaaggaacagaaagtccggcccaccccgatctccgagagcgcggggacagtgaggggccgagaggcggacggggagcgcagggagttcagggggcgcccgtcatccgcatccccacgccacctcctccgggaagccctccggacacacccccgcgcgtcacggaggcagaacggcagccgccatcgcgctcccagccccgacgcgactcccatctgggacccccgccgggacccccgcggccctccccgccttctcccgctcccagccccggccggaggaagctggcgggacccgggccgaggcggaaaggggttgaattgggggcgcccgggcggggagggtcgcaccgccccggggcggagccgggccacgtgggggaggtgggagggggccccgcggccacactacctgttgatcttgtgcgcgaaggcgcggcgctcggaggcagccatggtcctcgcgtcccgccgccgccgccccgggccccggccccgccgccgccgccgcctcccggttctgggcagccggggcggggcggggccggcgcgggggcggggcccttccgggtggcccgggccgctccgtgctgcccctgcaggccggaggggtcgcctggagtcctgggggctggggaaactgaggctggggacggagaggaggccccgggatccaggctgggcgggccccagactcccgggctggggggacgctctttctaccctaggagaagggctggggaaactgaggctgaggagggaagttagggagaggaggcgctgggacccagactgggggtgccccagactcccgagctggcgggggcgctctttccaccctgggagctgggctggagaaactgagcctgaggagggagggagggaagggaggcgctgagacccgggctaggtggaccccaggctcccggggtttagtggggtggtcttaccaccccaggagcagggctggggaaactgaagctcaggagggagggagggaggggaggcgctgggacccaggctgggtaggccccagatttccggggtttggggggcgctctttctgccctctgactcctggctggaaaacaataacgatgttcatgtatctaataatcatacctgtaagtataatcgtggccgtgcatggtggctcatgcctgtaatcccagc

SEQ ID NO: 67062 - DNA, 1414 bp, Homo sapiens
aaaaatagccgggcatggtggtgggagcctgaatcccagctactcgggaggctgaggcatgaggatcgtctgaacccaggaggtggaggttgtagtgagctgagattgcgccactgcactctagcctgggcgagagtgagaccctgtctcaaaacaacaacaacaacaaaacaaccaacaaacaaaaccaaagtcctcccacaacccacaaggcccagcatgatcaaccctgtcacctccctggcttgcctcttccttttctttccctcattcactccactccagctgcccctgcctcctggatgcttctctaaacaccaggacacagctccactcaaggacctttgcatgttctgttccctttcccacatatgggcgttgccagtagcccccttttacagataaggaaactgaagaacacccagagaggggactcgccctaatgtagcctagtgaatcagtgtcagatccaagatttgactccagggagcctgatcccaaagcggttgtctctaaagtctcactgggtctccatcagacctggctgtgtgacccaggataaattgctcaacttctctgagccccagtttccttgtttgctccctgagagttcgtggttggtcacagcttgagacccagacatcaggaggtaggttgagccatggagcagcaaacttcagggccttgtcagggcccattccctgtcgaagcccaagggggttttgagctcagcgactccatgtcctgccttggtggaaacgctgcttcagagattgctccaatcaaaggccctaccccagatgcctcgagcacagtacccgccccagtgcctgccagacctgactggtgaggctatttctctccagagcaccaccagccctgactcagctgggtgtggctggggtgcccctgacagctgatcaaacagaggctgagcgtggtggcggggactttggcctcctctgctctactgcgtggagaacacgttgcggacatgaggctggagctggtggaccagggaggaggggctgtactggtccaggttagggatgataggcctggatggggtgaggatacaggggaggtgagaagtcggtgggctctgagcagatggctcactggtggctggacagtgagtccatctgcaagttagagtaagagaggagtcaaaaaccgtctccttcacccacgctgctgcctaatgctgctccctccacgtggaatgctgttccatccactcctcgtctgcctgcacccttctttgtcccttatatctcagcttggacatccctgcctttgcccgctgcctccgccatggaggccccagtcacgccccagttgctgggttacctttctctgtggggttcccagcacctgacatttagtaggagctccataaatactgactttttgg

SEQ ID NO: 67063 - DNA, 831 bp, Homo sapiens
attttaatcccctaaaaataaaaaaggagaccaagcatgtggagaaataaatgtctcaacacaccataagggtgtattggagtggcccttctatgattttgacaatgatattaaacgtcctggccgggcgcggtggctcatccctgtaatcccagcattttaggaggccgaggcaggaggatggcttgaacctaggacttagaggtcagcccaggcaacatagcgagaccgcgtctctacaaaaaaaaaaaaaaaaaaaaaaagcaagtatcttgcatttgcaattcgtcggatgcctgcaaagttccgtgggtgtgtgatgtaggaatctggggcacgggaagttattcttgcttcatttcctgacgctgaccggctgggcggggtccctggggcacccgggcacatttggacgtgtttggcagggagagtcctggcccagccccggcacgtagggccgcgcttccacgggccgccgccaggagacgcgcgaggctgtagatgcggctttgcagagaagctgggagggtagaggggctggggcggtcgaggggcggggctgcgtgcagccggcccagattcctttccggccagttccttccaggagctgctcccacgtctacagcgccgtctgctactcacccagctctcttgtatctgagcctcattttcccaccgtcctttaagcccgttttcccactgctcatttgcagccaagtttccatctcgcatctttgcgtcccccttctctgcaccctcctttgcacccccattttcctgctttcccttgagtccacatttcccagacctcctttgccccctacattttcc

SEQ ID NO: 67064 - DNA, 1053 bp, Homo sapiens
cactccagcctgggcaatagagcgagactctgtatcaaaaaaacaaatgaaaaaaagataccccactccaaagttctaagggtagcctctggtatgaagaaaccagggctccctagaaataaatctaaacttgaaccaggctttccccctcacacataccccagggaagaggctgagctcatgaaagctgcaggaagtcattttggcttcaggggctgggagagcagacacaacctctgaaacagagtcagggacgtgggaacataaaacatccacttagccatcctaacagtgctggtcctgtgaaggggtgttggttggtgtttgggagcaaagaaaaggtgctgcgcccctagagtttggaatctgatgggcagaaagtgcctctaaaccggaggtcaagatgtacatcttcaaactgcacacgtaacctctgagcagaagcccctggaggtggggaccccagcttcagagactccccggcactgatcacagtccatcccccccattcacataaggtcctgccactctcaggctgtctacaaagtacaagcagtgacagcaagttactcaatcctacctcctcaccccttccgcccaacccccagcatcccttagaagtgacccctagtttgaggctgtggtgagctatgattgcaccactgcactccagcctgggtgacagagccagaccatctcaaaaagaaaaaaaaaaaaaaagaagtgactcctccattagcaaaaattgtcacatccctgggccctgccgatgacaaggattgggaaatggacattgggtcttgaagggcccccctcaagtcggagcccaggtgcttacatcagaaagtcgccgacaactgcctgcggtggctgggaacgttgcttcatttccttttctagcaggatgcatgattgggcaagaacttgcttaaaacacaaccagctaaacagctaaacagggcctgggagggaggccccagccccaggctcctggctctgaggttaattaacttctggccgaaagcccagagccggagtgctaggggttgggcg

SEQ ID NO: 67065 - DNA, 556 bp, Homo sapiens
ccatctctatctgttttaagtatttgaataccttctgagcctgtttcattaaaataaataaataaaaggaaaaaaaaacagtctgtgaagttctagttacccataatcccctcctgtctgtgagattattcttgaaacacctgtcaggtctcacttacccacgtctatgaaacataatgcaggcaagggaaggccagagtaaatagagaaatctgagatgcagagatagtttcttgccttgtggccagaaaaatgtgtggaaggggataggaaaccataaattcccagtcgggctggtttttaaacaataagctggggtcaatgtgccagctcagctgagtcaccacagcttggcagcaggcccagccagcgggaggagagggaacagcagctagcagggagatgctgggggatagacagggctgctggggactgttgtacaggctgtgcactgctcaagggtatccagagcccagctttgtatctaccaggaagaaggggctcccctcccctcccttcctcttccctcccctctcctttcctctcctctcctttc

SEQ ID NO: 67066 - DNA, 927 bp, Homo sapiens
ggacaccgatcccaccaaagccccgaggaaacgccaaatctcatcccgaggacaccgatcccaccgttaggaaccgggacctcaatccgcagcacccggattccgagaacagaggcgtcggggccaaatgggctgaatctggtacctcactcccacgcccccgggtggacagcgaccctcctcggccgcgtcccctcgtgggtttcccccaaccaataattcgtcccgcctcccagctgagcccgaagccaatcgggtcgtagatctgcacctttctatcccgccctcctgggtattgactaatcgtagaaacccccctgggatcccgccccctccacgggcttttatccaattacgccgcggctactaagcgcagctgaagcgtgaaggcgccaatgaggccttcggctactccggcaggggcggaactaaaatgccggccacacccctctctgtgactcagtctctgagcgttttaatacgatggtgtccccgcgggatcaaacttcagcgtcacagctgaggactggcttcgtggtccctgatgggagagcatgaacaggtggtatgtggtaggtggggttctggagcctggcgggtgtagatttcacaacccagggggcggagccaggatgatgaccccgccccctccctaaataattctcccgggagggacacggaagcagcaaccgggatgggacggggagagaggaggcactactggggacctaagctggttctcaaatgcctctccttttcccctccaagcctcccaggcttcctatggtccctaagtcccgggttctcagcgtgacattccagagcaaacacagctccccattactctataccaggcactggcatggattaatttatctaatcacaacatcccagtaaggtgactattatgacatctcgtttttatag

SEQ ID NO: 67067 - DNA, 1013 bp, Homo sapiens
ccaggggtcattcgggatgtgtgggcttggaatcaggggacatctgaagccagatttaatatatgacaaggcaaggagtcattctgtccagacacgagcagccagacagacttccacactggccacagagccttcctttctggggggccctggcgaatggggaaactgaggcccagagagggagaggcgcggcccagggacatactctgaagcccctccctcctattaccctcggagccccgcccaccccagggtcctccctctctacttccattcttggttccttcctacaatcgatgctaacacgccccgcctccaagatcacggaggccccgccccacggggctatgcaaatgagacgcccggaggccccgcccctccctccacctcggagtctgcgcggcgcggccaggcccggccgaccgcgtctcggtcttcgcgtctgccagcctggctggcagtccgtctgtccatcccgccgcgccggggcagtctaggcggagcgggggctcaggcggcggcggcctcgacgcggtgagaggagggggtgggggcgcccctcatcccctcccgtgggcttcccacccccggtgtcggtctccggttcctgagggttgggtccctctgggtccagcgcggggaggggcgggggaggggaggcggcgagctgggggaggggaccgggctgggggaggggaccccgggccgaggagccagcaccggtggtgagggcggctgtgggtaactgtgattgtgtggttgtcattgtgtgtctgtgtgtggttgtgtaactgtcatcgtgtggctgcatgactgggattgtgtggtttcgggaggtccgcgggtgtgtgtgtgtgtgtgtcactgtcattgtgcggctgtcgttgtgggtgtcactctgatggtttgtgtgtgtgtgtctggctatgctgtgactgccattggccccccgtgtggctgctgtctctgtgtgtgactgtcttggtgttcgtgtggttgtgtgcataggactg

SEQ ID NO: 67068 - DNA, 2071 bp, Homo sapiens
ccagacacacactccggcccatactcaggtgcacagaaagacaagcacacagctcatccccctctccaaaactctcagttgtcattggatgacatcagcaaaaccacacacaaatacatgccgatcacaatactcctctgagatatcataagccccattttacagcagggcaaactgaggctaggagcctttaaataatatgtcactcattctggtctactcctccaactttcaacccttatatttgtctgattagctgacaataatagtattcgtgctggttcccccagcagcctccctcagggaagggtcttatttccctcgaatgcacccattcctccgcataggttctaaccatttgcccattcacctgaggaatcgagttttgatggacagattcctagaccaatagagaaactaagtgaactgtaccgatgcggccacggcttgggcgggactaaggctgggaacgagccaccgattggtcagagctacgcggcgaatggcggagacgctgaggcgggtgctaaccaggggcggtgcggcctggtccggggaggagaacatgcctgccgccggaccgcctttgctgctgctcggtacaccaggatctggaaaaacagcgctgctatttgctgcggccctagaggcggcgggggagggccaaggcccagtcctcttcctgacacgaaggcctcttcaaagcatgccccgcgggaccggaacgactctagacccaatgcgactccaggtaaccgtgggggtgggagcagaggcgttctagccaatggtggagtagatccgggatattgagtaacaggtagacaagccaatggagaggacggtggaagagcgagccagggcagccacgatggggcggagtcaggcaggcggagtgaggagtggcaccacgcggagcttagttaagattgaagtgagagcccatccaatgatgggcggtgttagcaagaggcggtgcccagagattgaagtccggcccatcaaggggcggggctaagcttgggtccattctggacctgagttggttcctgttagtgtcaaggatggggtcagaccgagaatgctgggggagggttttccgtggaaaaattgcgctagagatttggccaaaaacaaacaagcaaaaatggcttgccctcaactaatactcggcagtgatgagtgctggaaaaacgggcgaatataagaatatttaacagctctgaactggttcatcctggaaccaaggaaagtatgcaaggaggcagggttacttttaaggagtctggcttcctgtgctgaatccggccctttccttctgtttctccttctagaagatccgcttccagtacccaccctcaacccgagagcttttccggctcctgtgctctgcccatgaggccccggggccagccccctcccttctgctgctcgacggcctagaagagtacctagcggaagacccagagccccaggaagccgcctacctcattgccttacttctagacacagctgcccacttcagccaccggcttgggcctggccgggattgtgggctcatggtggccctccagacccaggaggaagcaggtagtggggacgtcctgcacctggcactgctccagcggtattttcctgcccagtgctggctgcagccagatgcaccaggtccaggagagcacggcctccgagcctgcctggagccaggcgggctgggccccagaacagagtggtgggtgactttccgatcagatggagaaatgatgatcgctccgtggcccacccaggctggtgaccccagctcaggcaagggttcaagctctggaggccagccctgagctttggtgggtgactacctctctgtgcttcagtttcccatggctggaatacttacctcagggacatatgcagatccaaagacctaaacaatgtaaagtgctttttctcttttaaaagtatagcattatcttgtatatattttacccaatcaatatgttgtttatagtttcattgctttaaactttataaaaagagcttcaggccaggcgtggtggctcacgcctgtaatccc

SEQ ID NO: 67069 - DNA, 581 bp, Homo sapiens
gcatcgtcccccagcagcgctctgagaggacttccagggaagcaggtgggtcctccgtgaagggggtgcaggggctccaccacaggcagccatcattctggtacagccacagctgaagaaatagcaccaacctgctcagagaggcctgcagtttggctgcaagaagcagggaagcccaggcactgaggggacaaccaggccacctacctggaagttacccttgtgggtggtgaagaggccttcaaactcgctctctgggctcgggatgccaggccagatcttctgcttcagagccctgttgaagccaatataaatagttacatagatatgactcattgaatactcaccaattccccctccactcccagtcatagaggcacagatacacttggtccctgtgatcacaatggaggcagaggagtacatcagggccaggggacaggggttttggctgaagcatcagcaaggccctacaaaagggtaaatggaacagggtattgaagggtgcataggagttcaatataccttggtcattctccctttaatcctggccatggccaggtgcagtggtttacaccagc

SEQ ID NO: 67070 - DNA, 922 bp, Homo sapiens
ctttctacctggtcgcctcatctggtcgcctccgagcccctcccttccttccgcccactgcacctggcggcctgtgctcggctctccagctccgccctcaactggtcgcttccggccccgcgccacccaccaaaccccctcctcacctggctgcccccggggccctccgccgggctcctgcgctgactgcgctgccgccgcagggagacactgtacaccgcgccgtcctcggtctcttcaccccagtcctgcagcggtgcctggacgcacaggcggactcagggcaccaaaggggcacaggtcctggggcctcagcctccttggccgctcggactcgggccgagtcctcctgctgcatccccacgccccttcccggccagaagctgcgagactagggctggggtcccaggctagtcccctcctcgctgcgggtcccctcctcccaggtcctgaggacatggggtggcatttggggatgtcccagggcccagtctaatagaacctgtctctagctctttctgccgactgcgctcagagactcgcgcccccatccctaagaggaaccagtcgcttcactgggtcaagggccgcgagtccccaggaggggactccagggcaagttcagattgggagcagataccgtccgacgggcgggcgcttggagtttctggacctgcgggtcaccagggatgcggggtccggggatcccttgtccccttaccagggccagctctttgcctgctgtgcgctccatggccggcgcccgtccctctcagtggcgccgctgagtgaggcggaagggccggcgggtggcgggtggcgggcggcgggcagtggccgggcgctgaggccagaggggcggagcggccgagctgctggggcggggcggggcagggcaggccggacccagcctctgggtgcc

SEQ ID NO: 67071 - DNA, 1740 bp, Homo sapiens
ctaacagttgtatctttttatgtaactcagccacctgagagtgcacagagggcttccctgcacctctgtggaaggatcctcccttggaacggcctggggtccacgcctgggctgtgcccttgcctcggaggtggctgggtttgcccgaagcctccctgcccttgaccctggaagagggcgtcgaagcctggtcctgaggaggcagggcgttggcggaggccgccctgcacagaggagatgtcatgatggggttggggctgaaggcccctaggggttagggggataactaggagtcagtcgcccctgtcagggatccgtcagctcggattcctagggctctgaaaaatgcactttccgaccgctaggtggttgcgctccgcatctctcggttgccaggtaaccgcctccccgtctctctccactgtttccatggagatcacccgcgttccgtggctgacactgcgttctcattggctgaggctgcatagaggggcggtcccaacagtgggcggggtagagccgcgccgcaggacggagggtctggacactttggggtcacgtgctcattccgtttccctacctcccccaaccttatcccgcccctgggggttcgcgggcatttttcaggaactttctttccggcttgagaagccgccactcccaagatggaggtacgctgcgccgccattaagagctagccctcagaactatcctctctaaggtttcacagtcctgcccaagatggccgtctcggctctggcaccgcccccactcctgcctctcccaacatggcgaccctgagtctccgttcccggtgcggaacgtacgaccggaagtgacggggtccagaaatttccgctttctttctgcagcaggaaccgcggctgctggacaagaggggtgcggtggatactgacctttgctccggcctcgtgtaggtgtgaacgagcgggtgggagggcacctcagtttcttacagggggcaaccggagggtgcatgtgtgggtgtggacggcggaggctgttaatccctttggtctgttggcgggaattgggtcacaattgggcacagggagcggaggttttgagatcttgagatcctcgccattgatttgagcaaagtgagactggccaggattggggagatcgctgcccctcgcccccatatcggaaacaaagtgaggcctcattgcctggaagcgatggaggaatccaattggctggaagtagccctctcccactgaccgggatccgctttcttcctgcagcgtgaagacacagcgcatctccccgctgtaggcttcctcccacagaacccgtttcgggcctcagagcgtctggtgagatgctgttgccgctgctgctgctgctacccatgtgctgggccgtggaggtcaagaggccccggggcgtctccctcaccagtgagtcctcctgttcaccctcccgccaggctggaggtgggaggggccaacattgggccttagggataggcatttacagccttttgactcagtttcccggtagtgctccgctggtggggatgggaggacagaggtggtatttggtggagaaggcgcttacctgccctgggctgagcttcctgtaccccgcagatcatcacttctacgatgagtccaagcctttcacctgcctggacggttcggccaccatcccatttgatcaggtcaacgatgactattgcgactgcaaagatggctctgacgagccaggtgagcc

SEQ ID NO: 67072 - DNA, 518 bp, Homo sapiens
actcgctcatccttgccgattcttctgtccccggctggggtagccccccggtccgcagcaggaactgaggcatagctggggccccgcctcatcccccgaactggtgaggaaccggcggggccaatctgcgcgtggcgccacagggctcccccgggcacgtgcctgagctcgcggctgcggtccccagggtcacgtggctgcggccaccagggcctacgcgcctcgcacgccacctagcggccgcgcctcgctccccgcccctctctctagcggcccgcaggaggcggcggcctcagcatcctcctccgggaaatggggccagggcagccgccgccaactccccttccccccgcggcttcctgttttaggaacacgccgagctagttctacctcggggttttggcactggttgttcctctggcctgagaatttcctcccccagctttcttctgggatagatctttgtcattctggtctatgcgcaaatgccacctcctcagaggccctccctgaccacc

SEQ ID NO: 67073 - DNA, 630 bp, Homo sapiens
gccccaggtgctgctataggttccaatctggaagagcagtggcggtgtcagctgctccctaagtctcgcatgagacctgctcttgggatcatggggcatggggtcgcggggataggagggaagatggccagccccacccaattcctgtgattgattggtaatagttcctgtcgctgtggctcacatagctacagcttactgaggacagggaggaggctcctaggggtgtagtcctgtgcccggagacccagcactgggctttgacccgccagctctggcccaggctcccaggcccatgtccctgtgtcccccgctcatgctgccagctggcccagggcctgacctgaatggatgatcatgtgccgccgcaggtggttggataaatagaacttcttgccacagccaggatgagggcacactttggtctttcctttccgatgcacaagattgacgtggttctggagacgagacaggcagaagtgggtcccataggcccacagaaggggctctgggaggtggggagagatgagggcagctggaaggcaggctggggctggcctccccaggaggagggaagaggggtacccttgcccagctcagagattcccaggggcacaactggggtcaaag

SEQ ID NO: 67074 - DNA, 608 bp, Homo sapiens
tggccaagtatgtattcttattactacaaccatccatggcctggtgattccatctgcagcttctgcctacacctccatgtcgagctccagattcttccatctcattggccccctaagagtgtctcacaggcatctcaaactcagatctgcaacactgggctctgtatcttcccttctacaaagcctgcactgctcacgggtgtccctgactcagcggaaggcagctcagtctctccagtggctcaggccaaagtcctggggctcttgttgacttctctctctctcacacccacttccaatctgtcagcaaaacctgttggtgctgcatccaaaatacatccacccgcagcctgaacgcttctcccacttcccctgcagatgctagttgcggccccaccggccccctgccagggccagtgcagtcccttcttttgggtccccggctcctaagaacctactctttacctcctgtgaaagaagcaggccagctactcactaaatccctctcttcctggcaccagcaccgactacatttcccagcatctcttgcaggtaggtgtggccatgtggctgagtcccagccaatggaatgcaagtggacaggtgct

SEQ ID NO: 67075 - DNA, 1063 bp, Homo sapiens
gtgccccagggtgtccagagtcccaggccaggtggggaactaagcgggggaggatgagaccggtgagggggcggggctgcccccccagggcctggttagttacaaggcctggaggtggggccagtcccaggattgggccgccagagttctagcgggcggggccaagcgctcagaaggcgggtcgaggggctgggtgcaccctaggattgggcagtcggaacgatgggaggcggggccacgagccaggcgcgtcccggccaggcagtacgagacccaggccgccggcccggctcctgggcggggtccgcaggtgccgggggctggccctagaagcggagggggcggggtaaagcccggcggggtctgggggcgtctcctccctccctccctcggggccaggccccctcacccgtggcggccgctccgctggccgcgctccagagagatgaggtaggcggcgagcttggcgtcgctccagccgctgcggcgccgcaggtccacccagggcccgtgcgcctcgcccaggtacacgcgccgcacgtcgtacttcttccgggactcgagccgtcgccgggcccggtccgactccgtgagtcgcggccggccccgcgcctttcggcccgctgcgccctcctcggctgctgcctccccgcccgcgcccgcctcagcctccgcctccgcctcgggctctagcgcccgctccgccatcccccccaccctggttaccagcctcccccgttgttaggagccagaccggaagtggcgcgcatcttcggcgccgccgagaaatttctcacggtctctcgctgccccagggcgccaaaaggagaccaagaatggaaactgcgcatgcgcacaaccaacagcgctcccgcccctttttatttgaattcggagaaccagaggcgcctgcagattctggaggggtctcgcctgcccatcgctggcagcccgagatcctggggaggggatgccatactgctagagatgagggaagagagccccaagcaggaaaacattgatttgctgtacactcaaagggcatctcatgccttcagtccac

SEQ ID NO: 67076 - DNA, 1252 bp, Homo sapiens
ggggtgcagtggcacaatcacggctcactacagcctcaacctcctgggctcaagcaatcctcccacctcagcttcccgagtagctaggactacaggcgtgcaccactacgcccagataattttttgtagagaacagggtcttgctatgttgccaaggctggtctcgaaactcctgggctcaagcgaaattcccgacaccattaacgcatttttagtaacttatcagtatctgaaatcacctgtttcgtttatttctaatttgttcaaagtctggttcccccaggagatgagagatttttatctatcttcctcattgctgtgtctccagcaccaaggacagtgcctggtatatgacagatgcctaacgagtaacaactgaacggaaacaagcctcaatttcaaaaaaacacctataaatctgaaccccgaggtatggtgtacgtacaacagctttgaaaccggctgccaggattctgggtctcttgggggaaaaaggcagacgcggattccaaatcctgcccggttgccgacttgcggcgtgacctctcgcgaggtcatctgcaaaatgggagactgggggcgtgaggcggctggcacaagacaggcggcctttcccagcgcgtccccgcccccactacgaaaggtcatggcgccctggccctgcagctgggtccctccagggctgccctctcgcgctgccgggtcctgaagggcccgcctgcagcccagcagttcgcgttcgcctacccgcgcgcgacctacctactcacgcggccagccgcggactccaggccagctctgtcttgttgctgggcgctgccatattggcccagagagcgtccgggtcagggagctccagggaggtagcaaatcaagaaagctggtgtaataggtcccgcccacaacgcgaggtgggccaataggaaggcggaaggatctgggacccgcctcataacgagccaggcccagcctctaatgaggcaagacgcactccagacctgggaaccttgaaatggcccgggaggctggacttgggagtcatagtctatgaatccagtcgcaggccccagcggctgaaatgagaaaatgaattaaaaaaaaacaaaaagtgaaagggggccggtacggtggctcatgcctgtaatcccagcactttgggaggccagaagttcgagaccagcctgggcaacatagcgagacccccttatctacaaaaaatttaaaaattaactgggcatgatggcgcatgctc

SEQ ID NO: 67077 - DNA, 435 bp, Homo sapiens
tatgtattaacacagaacaccatatgtgaggccctggtgcagaatctttaacattacagtcccagaaagaaccctataaaaagtagtagcttcacagtgaaagatcctagcagacaccaccttaaccaagggaccaacatttatatcaccagcaatgagtcatggtgatatcatgaagcccttggtatgacacacttagaaggatacatcatcacctctctggtattcttcctggtaatgcaaacacctcagtttattcaagacaaaccaaactcgaagacagtctacaaaataactgaccagcactcttcaaaagtgtcaaggtcctgaaagacccagggactattatagactgtaggaatgtatggagatatgacaattaaatgcaatgagggccaggcacagtggcactgtagttctagctatttaggaggc

SEQ ID NO: 67078 - DNA, 1143 bp, Homo sapiens
cgggttcaagcaattctcctgcctcagcctcccgagtagctgggattacaggcatgtaccaccatgcccggctaattttgtatttttagtagacacggggtttcaccatgttggtcaggctggtcttgaactactgacctcaggtgatccacccgccttggcctctcaaagtgctgggattacaggcgtgagaaaccacgcccggccaagtgtgagttttaaatggttctgagcatcaggaaggttttagggggtcccctgaagttgaggagaggcatggctttcctacaatgactgtcctagacccttcgggaaaccgtgcctcttacaagatcctacacttctcatttagatggtaaactgaggcacagaggggctagagcctggaaaatgccagaaaggagcgaataagggatgacactcgggtgtctactgggattggggcctcgatatgggatcagccccctctaatgcctctacccccatctaccagacagagacgcgaagagagacggacaatacagcgacagcgacatgaagagaaacagaatgactcaaagaccaggcacagaaacagagacacagagacaaaggcagagacagaaaaaggctcagcgacccagagacggagatacagagacacagacctactacaatcagagggacaaggcagtccccgaaagggctgccccctgggggtacccggggctgccccgttggggggcacgccaagagctcccccaccccgcccccgtcgtgcctgggccgtgacttcagagtccgtgcagattctataaatggccaagaggccgcgggccggggggcggggccgagtgagtcatcgcgtgacgtcaccgccgcctggacctcgccaggtcccgcccccgcccctcccgggccgccagggggcgccggctgcaggtcctcacatgcgcagtagcgaactgcggcccccgagggccgctcagtttgggagggatccaggaatctgcgcgttcgaatcccgcccctgccaccctcgagctgtgtgacccggccattcggcgtcacctctctgtgcctcgtatagacccacctcataaggctgtcgtgaggaatgagttaacaggctcaaagctcttagtacgtagcaggtgctaattg

SEQ ID NO: 67079 - DNA, 1163 bp, Homo sapiens
ctctacaaaattacaaaaattagccttgagtctgtagtcccagctactcggcaagctgaagtgggaagcttgcgcccaggaggtcgaggctgcaatgagctatgatcgcgccactgcactccagcctcggcgacacagcaagactcactctcaaaaaaaaaaaaaaaagtccaaacaaaatctacggatgagccccagaagctcattttgcccagggactacagtctccccatcccatgaatggggtctggcttgcacaaggaatgcagaggcctcagcctgtcctgtgacaacgttaagtccaagagcgccaaaaggggatggcagaggagtcatcccccgaatctgctggtacccaagaggtggggggttggctgttcctccagactcactaaagcttcggcatcgcctcccgacggccgccgggaggagccaggcgtcccggtagtcgcgcttggaaggatggggtcggggggagtcagtctccccgaccggctttcccccaagctcgaggtcccaggagcctcctccaggaccccgtaaacgcacggagtagaggaacttccagtcctgcccacccccaacgcccactcgcacgagccgcaccagcactcaccttctccagctgcgaaagctccgttcacccgggagatagtgacttccgactcctgccggaagcggaaacccctctcctactttcaggtcccggccacccccatcccggacagcccagcaaataggccctgcctccttcgccgctcctctgagcgcacgcgtactcaaatagcagcgctccgacggagacgcagtgcgcctgcgcaagagccggtgcgtatttgcctgtacctacgcgcgatgccagtacttctggtcagtttccaggagcggcaagtgaggaatatgaaataaccttatggctgaatcagggtgaaggggaagcttgtaagcatggaagacgctctactcaaactaaaaagttcaagttctgatccagcagatgaagagggaggcctgagaggctgctgttctaactcgctcccaggtgacttccatgctgctgatccgcagaccacattttgagtgcccagattgtagtagatgaggttgagtggacaggctggggccagattccatggagcctcgtgggccgtgttaaggatttt

SEQ ID NO: 67080 - DNA, 1319 bp, Homo sapiens
gcacgagaatcgcttgaacccgggaggcagagattgcagtgagctgagatcgcgccactgcactccagcctgggcgacaaaagcgaaactccgtctcaaaaaaaaaaaaaaaaaaaaaccaaaacaaaccctcaaatatccctcgggctgggtgcagggaggaaactcggcctgagaggcgcagtggctagaaccagtcaacactgctacgcacagccacgtttccatggcttcctacgtcactcaggccttagggggcggggtatgtcaccctatccaatcaggggcgctggggcggggccctgccaactgtccattcagatgggcccgggagaggagggcagggcctgcgcctccctacggagcctttgtttctggcgaccgtccccacccgggctcgcgtctccgtttctccgagaggcccaaggtgtctccgccgcagcctctgtcgcgccgtgacctgtacaggtcgcgggagtcgtagggaggacgccgggacacctggaagccgagaaatggtgcgtgtgaggggtcaggcgtccccagacctgggggaggggctggttggaaccggccggaaccggctgtggagggacctaggcctccctgcggcgactccggggtctgggacccgagttccctcggccgcaaggtggggctgggccaggagctgggaccccggtcgtcctgtcccgtccctgcgcgacgcctgcggccccgcagccccgcgtctccccacatggtgcgggggccgcgggagggtcatgggggtatccctcctcggatgtggttcgtgttgcaggagctgcggtctgtggccgccccccacagtcccgcctttctcccgttaaaaatttagagtttatttgagcaaacagcggctcatcgatggagaagctcccggtcgtggtttgtggcttggggatccgttggagggaatggaaggaaaggctgtaaggtgcaggaggaagcgaaccaaattcagtacttggttggtgacagttatgcagtcgccttatttgctctatctaggtggacattttctgcttatgtagtcagaggtggattggtggttgtggtttattaaccctaaattttatttccttataaactggtaatttataagaatttcatttgaggctggagcgcggtggctcacgcctgtaatcgcagcgcttttggaggccaagacaggaggatcgcttgggcccaggagttgaagatcagcctcgcaatatagcgagaccccatctctgttaattttttttaaatgaacatattcagactgagaccaaaaaactactacaaatttttaaaat

SEQ ID NO: 67081 - DNA, 1822 bp, Homo sapiens
actgatatcgggttaggatttcattgtagaaatttccctaaacctttttcactctgatatcccatgttcttcaacattttaaatcctggattatcaaagttttcatttgtaagtctcctatcccatgctgtaagtctcgaccccataaattgatggctatatttgcaacataaggctgcaaagtccagagcaagcttaaagttgtaaaagttctttaataaataaacagagtaacctgataggacgggcgcggtggcccacgcctgtaatcccagcactttgggaggccgaggcgagcggatcacgaggtcaggagatccagaccatcctggctaacacagcgaaaccccgtctctactaaaaatacaaaaaattagccgggcgcggtggcaggtgcctgtagtcccagctactcgggaggctgaggcaggagaatggcgtgaacccgggaggcggagcttgcagtgagtggagatcgcaccactgcactccagactgagcgacagagcgagcctccgtctcaaaaataaataaataaataaataaacagagtaaccttagctctctgagtgctagtaaactcagatcgagtgattgaattatgtggtctctactagcctgctgcttttccatgtttaccagacccatcagtaaaccgtgttaaagccttaggtatgggggagtgaaataccgcttcgaattgccttttacttaaacgaatcctgatgatatgagggtcataacttagcatttggactgcattaatcattaagattgctagctgaaatagtaataagtttaaaaagaaaatctgaacgcgtctctagaagcagagacttaaatgatatactttaaccatgtgcttaaaaccacgggcggaatagcttaaatcttgtaattgagtttttgggctgaccaagtttatggactttaatctggcaaacagtcttgaaaacagtgactcactggctggggaactcaatttaggactcttttagcaagtacaaatcacactatctgtaatcagtgggtaagacagtcattcatgcataagttttcactacacttacaacttttcttcactttctgagaaggacacaacatttttaccttctaatttgacaaatatcatttaattaggtttaaagttctcctttaaagggtaatgtgtggttttacatgcctagcttttaattactcattaatgaattcgtgggccctctgtaatctctttcccttcagaggttactgttttacttaaattgaatttggaaagctaccttaggggtaggagagagataacagtggccattattagaaaagaggtttttcaaattcttacattttacttaaatcttagcagagaatcatagtctgggacgtacgtaacacatgaacttttgctatgggctgctcacagagccagagggctgcggtgcaggtccttggcggcggccgcattgtacttgctcaggttttgcctgtgtctgcgccgctccctccctcctttgccgggggtggggcatgctgccagcctgggcggaccttgtgggcttggtcgctgccagcttttctgctgctgaaccttctattccgcccaccgcttgcttggtcgcgcggtttcggcttctaatgccttttttctttctttttttttgagacggagtttttgctcttgttgcccaggctggagtgcaatggcgcgatctcggctcaccgcaacctccgccttccaagttcaagcgattctcctgcctcagcctcccgagtagctgggattacaggcacttgccaccacgcccggctaattttgtatttttag

SEQ ID NO: 67082 - DNA, 1307 bp, Homo sapiens
aggcttggtcatgcagccagcagcttcatcccaaattcctgatccctggaggacatcagaccccctctcctactgcagtgtggcctgtgtggcctcggctccccttctgctccgaggccaggggatgtctccactggacagtgagtctgggattccctgcacacagttgtgaccccccagtcccggaggaagaagcaggaagggctcgcagactattggcaggaattcttcttaaatgcagatattccccgggaggggtcaggtcactgcccagggaggaaccccccctcccccgcccgccccatgccaagagctgtgtctgcaacctgttcatctggctccactcagcactgggagatcacttcttctgtcgctcagtgcctagggggcgggacctggagtactatccaatcagagccgctgggcggggccgtgagaactgtcaatcaggcgtccaggaggctggaggatgcgaggttgaaaaagcccgcggcgtcttctctgtcacccgcgctcggctccctgctcggtcgggctggaacctgtactggcagccggaggtgtaggtaggaaccggaatacctcggaagccgggaaatggtgagtgtccgaggccggggttcccgagacagggtacagctggttgtaaccgaccggaaccggctgtggcgggacccagacctcctcgctgttgtctctggggtctgaggacccgagtgccctggcccagctcggtcctcggtcctctcggcctcagggtggggctgggcctgcagccaggactccgggcgtcctgtccggtccccgcgcggcaactgcggcccaggttccggagtcctctctgggcagctccgcgtccgcagccccgcgtctccctagattgtgcggggacacgggagggtcatggggggaatcctcctcgggtgtggggttcatgtggaaggagcagcggtctgtggggtccccagttcctcctttgtctccaaggggctcgagtttttactgagatatccagatatatgcgaagcagggtctcaaatccgcaactgtgatccctggcctagcttctcctagggctgccagcaaatccctggatttccagatcccgctccgcgttttagagctggcctcctcttcagttcaccacaacaatgtcaactcttcgtcccccaggctttgtttcaaacatagccatatatatgtgtgtgtgtgtgtatatatatatatgtgtatatatatatatatgtgtatatatgtatatatgtgtgtgtatatatatatatatatatatatatatattttttttt

SEQ ID NO: 67083 - DNA, 2122 bp, Homo sapiens
aattaaaataatgcctctgtttgaaatattgcctgagggacaaagagttcataaagttgctgggaattgatgagagacagttagcctggggaaggctctgaaaaccaagagatttgctgccagccctaggaggagttaggatgaggggatagggtggtggatttgagaccctgctgcccacatctttggaagactcggagggaaaccggtcacctttgggaagaaagaagggactggggaacccacagatcacagcttctcttccaaagcacaaagcccacacacacgagtctggattctgcctggtgaccctccgttgtcaccgtgcagcgtcctcaccgggttcacaggaactgcgagccaggctggaggcgagattgcagttagatattaaccaggtgccctcagccccgctgcctcacggggccgcctccctgagagtcaggtcacagcagacgctgaccgccggcttcctcatcgtgcccggggataagatctcttgagagttgctcacgggtcgcctcagttctttctcggatcctgaattgcagcggaaaggctggcgccaaccaggctgaagaccccacaagggaacccactcagcagaatgcggtttcttcacctccagtcccaggagtcacctctcacttctccaccaaccagcgaccccacactccagccgtccctgtccacacctctaaacaccccatccccaaacctctcagggaggcggatctggggtgtcctcccctctcccccattaaactgtttctgctgcagccttcggcgtctcggtgcagtgactcgggccgtgaacctgtgccggttacaactgcacaatctggggagacgcggagctgcgggcgcggagctgcccagagagggcgccggggccggggccgcagcggccgagcagggacgggacaggacgcccggggtcccggctgccgccccagccccatcttgcggcccaggggaccaagggcagagctgcgccaggggcactgggatttgcagaccccggagtcgcccagggcgaggcccgggtcccctcacggtcggttccggccggttccaacctgccccttctttgcctcgggacgccgggccccgcacactcaccatttcccagcttccaggtgtccgggtgtcctccttaaaagccagtgtgggtcccagcgcgacagacgctgatacagaccttccagggcgtctctctctcagcgccagagccaggactcagagcgcaggggcgtggagaagactccgcgggctctttgaacgtcgcaccctcctccctgcagcgtgcctgattgacagttctcacaatccccgccccctcatccctgattggatagtgctccaggtcccgccccttggtggctgattgacagaagaagcgatctcacagtgctgagtggagccggatgaacaggttccaggcacgacccttggcaaggcgggcttcctcccaacggagtgacctgacccctcccgaagtgacgtttgcattttagaatttcctgattgtattcagtgggttcttcctgctttttcctcctggacagggactcacaagtgtgtgcagggaattccaggctccctgtccagtggagccattcccggacctcggagcaggaggggagcccggggcacacaggccaccctgcagcaggagggagggcctgatgtcctccagggatcaggaatttgggatgaggctgttggcgacgttgccaagcctttccctcaccttatctctcaatctactcattttcagcccagaagataaaaacaggacaacaaaataaaatagttgagtatgtggaaaaactggaattatatggcagcaatatttcataaagaatcaaaagagaagaaaagcaaaaacttgaacaagctcagagaagcagcctactgcactcacagttcacaagcagaccccctttcaggaggtcaaacatatccccaagctgggaagccaggcaatgattcctaaaatggagctccggggtggatcagaagctggtgataagggagggacaattaagaattttactctgaggtctcaaaatacctgtcccctctgcacagcgtggaaatgctccctccttatgccatt

SEQ ID NO: 67084 - DNA, 2060 bp, Homo sapiens
acataaggtgggagaaaggcttggcctgtgcagccaacagcctcatccaaaactcctgattcctggaggacatcagcccctcccttctgctgcagtgtggcctgggctcccttcctgctctcaaatcaggggatagctccactggacagtgagtctggaatttcctgcacagacttgtgggtccctgtccaagaggaaaaaggaggaaggtcaggacatactgcctaaatgcaaatgtcccctgggagggggtcaggtcacagcgcagggaggaagctagtcctctcaaggcctgtctggaatctgtttatcaggttccactccgctgcccgagatcgcttcttccgttactcagtgcccgggggagggacctggcgcactatccaatcagggccgcggggcggggtcgtgagaactgtcaatcaggcgcactgaccggaggagggtgcaaggttcaaagagcccgccgagtcttctccacgcccctgcactgggctccgggttctgtcactgagagacgccctggaacgtctgtggcagcttctgtctcgctgggacccgcactgacagcgggaggcagagggaggaacctggacgccggaagccgggaaatggtgagtgtgtgaggtctggtgtcccgacgcgtgagaggagagactggttggaaccggccggaaccggctgtggtggcaccaggtcttccccgccggcgacaccctggcgcagctcggccctcggttccctcggccgcacgatggggctggggcggcagccgggaccccgggcgtcctgtcccgtccctgcgcggccactgcggccctggccctggaggcctgtctgggcagctccgcgcccgcagtcctgcgtctccccagattgtgcggctgtaaccggcacaggttcgcggcccgagtcactgcaccgagacgccgagggctgcagcagaaacagtttaatagggggagaggggaggacaccccagatccgccttcctgagaggtttggggatggggtgtttaggggtgtggacaggggcggctggggcgtggggtcgctggatggtggggaagtgaggggtgactcttgggactggaggtgaagaaaccgcattcttctgctgagtgggttcccttgtggggtcttcagcctggttggcgccagcctttccgctggaattcaggatctgagaaagaactcaggcgactcttgagcaactctcagagatctcatccccaagcacaatggcgaagccggcggtcagcatctgctgtggcctgactcttggggaggcggccccgcgaggcagcggggctgagggcacctggttaatatctaactgcaatctcgcctccagcctggctcgcagttctgtgaacccggtgaggaggctgcacggtgatgacaggtcaccaggcagactcgtgtgtggggtttgtgtgtgggaggagttgtggtctgtgtggtcccctgtcccttctttcttcccaagggtgacccgttcgccttcgagtcttccaaagatgtgggcagcagggtctcaagtccaccactgtgttctctcatcctaactcctcctagggccgacagaaaatcccttggcttccagagccttcctcaggctttctctcctcaattcacagcaactttatgaactccttgtcccccagtttatttttcaaacagaggctagtattttaattgtcattttgtttatacatagcaatatatggctctttgtaaaaggttttgtgtttgtgaacatttcacatgagaggaagcagagaaaaaccaccagacatttcgctgtaaaaaaaatgaatattaataaataaaatctttgttactgtcctcccttcatcatccctagacagagacaccttttgagaatgtctttggattaagtttcctctttggaaacgttacagagtgatgagtccccagcccatcctctatggtttcctggtcctgggtttcagagctgcctggggccaccccaagatgcccacagctgccaagtctcttgtagtgtcaagtgaatatcagtccctttgtcactcctc

SEQ ID NO: 67085 - DNA, 560 bp, Homo sapiens
ggtgtggctccgttttccaggatgatgaactcctgggttcaagcagtcctcccgcttcagcctccaaaagggttgggattataggcgtgagcccccgcaccctgcctgcaagtcttttaattcacttcaattatcttagaattttccttccccactttatacatacgtacagtggaactgagggtgtttgtctcaggtaaccgatcaatgaagtgaataacctgtagggggcagcagagcctaaggccagtgacaccctgctgaggccagtctggagccggcaaagggagggaaagggagctcccctgggtgtttcccgggcagcctgccctctactgcaggtggcctccagctgctcagaacagctgcggaaggaatgtggatcctgagaagctacagagccctggaaagcaggagactcacgtgcaggtgcactttgtgtaggggggttggggggaggttctgtccttactggggctgtacctagagcctagggacgttttgcgggggcagtgtttggtttttacgtgcaaagggtcccggcgacagactgtaatttg

SEQ ID NO: 67086 - DNA, 1302 bp, Homo sapiens
atcccatttcccgcacgctggaagacatctgcctctctctcctggtgcagtcgtgccttgcctggtctgggctcccctcctgctctgaggcaagcgtatctctccattgaacactgagtctgaaatgccctgcacacacttgtgatcccgtgcagaaggaaggagcagggacagccccttgaatgaggaagctaacagtgcctcttctaacaataaggagcaagtcgccttgaaatgcaaatatctgatgaccagggctcaaggaaggcgctcgcttagagaggctgttcgcttagagaggctgctcgcttagagaggctgctcgctcagagacgctgtggccagaacaagtcagacatgatctgcaggacccggttacccagggcttctgctgtcactcagcacggaggaggcggggcctggcgccccatccaatcaggggtgctggggcggggccctgtcaactgtccatccggggaagggggaagggacagtcgccctccgtccattcctttagtgctgcgccgacagcggtcaggatctcggctttcttgcttcgagagggactaggtgcctccaccagagcttctgtcgctctgtaacctgcactgtgacctacactagtcgcgggagccacgcagaggacgccggaacaccctggaagccgagaaatggtgtgtgtgagggggctggcgtccgggcgactgggagaggggctggaatcggccggaaccggctgaggcgggacccgggcctccacgcggcgactccggggtcgtggacgcgagtcccctcggtcgcagggtggggctgggccggcagccgggaccccgggcctcctgtcccgtcccttcacggcgactgcggccccggctccggagcctaatctgggcagctccgcgtctccccacattatgcgggggccacgggagggatatggggggatcccgcctcggatatggggtttgttagaaacaagtgcccggtgccgcaaagaaaaccagcatctaggcagaaaattcctcagcaaagcaaatttatttctacacaagggtgcagcttgcgccagtcacaagagcacagcgagcggggtagggcaggggtttttctccttaacgcagtttctagcacttctgtgtcctttcctcattggctagggttggacctcacaatctaaactaactcgataggctaaggtttaaaattaaatagggtctggccaggcgcggtgggtcacgcctgtaaccccagcactttgggaggccgaggcaggcggatcgcgaggtcaggagatcgagacca

SEQ ID NO: 67087 - DNA, 1147 bp, Homo sapiens
cacactcctgtgaccccatgcagaacgaaggagcagggacagtcccttgagtgaggaagacgctagtgttctcctctatcaatagcaagtttggctgaaatgcaaatatccaataaccagagtgcaggaaggagctcgcccttggaaaagctgtggtcagaatccgtctgtctggctctgcagggcccgatacccagggcttccgctgtcactcagacatggggggcggggcctagcattccatccaatcagaggcattgtggcgggtccctgcccactgttcctccagacactgagggggtcgcattccttacctcacctttgtccctgcgcgggctgcggctgggatccggtctttccagccccgagagggacctggttcctctgcccaggcttctgtcactctgtcacctacgctatgccctgctgtagtcacaggaggtgtagagaggaccccgggacatctgaaagccaggaaatggtgcgtgtctggggccgggtgtcgtgagacgggggaggggctgcctggaccgaccggaaccgactgtggcgagaccctggctttcctgcgggcgactttgggatctgggaccgagtcctcctggagccgctcggccctcggtcccctcgactgctcggtgtggctgggccggtagccgggacaccaggcgtcctgtctcgtctctgcgcggcgactgcggttccagagccctctatgggcagctccgcgcccgcagccacgcgtctacccagattgtgcgggggccacgggagggtcatgtgggtgatcccgactcgggtgtggggttcgtgcttgggaggagcagcggtctgtggggcccccagtgtccactttttctcctgttaaaaattaaactgaggaacgttaacaaagagttcatttgagcaaacagcgattcacgaatgagacacacccagtcctggcttgtggtttgtcaacggaaaaagccaaactatgtaaaataaagaagtttattcggagccgaataggagagaccttggccgagggaaaaacaaccccaagaagcctggagtaagtggtcccgaggcggctcaagacagtttggttttattcattttagagagacaggaattgcagggaaaatcatgaattagtgcctggaag

SEQ ID NO: 67088 - DNA, 1126 bp, Homo sapiens
ctgaaattccctgcacactcctgtgaccccgtgcagaacgaaggagcggggactgtcccttgagtgaggatgacgctagtgttctcttctatcaatagcaagtttggctgaaatgcaaatatccaataaccagagtgcagaaagcagctcgcccttagagaagctgtggctagaatccgtcagtctggctctgcggggcctgatacccagggcttcagctgtcactcagatgtggggggcgggacctagtatttcatccaatcagaggtgctggggcgtggcactgcccacagttcatccggaaatggagggggtcgctttcctcaccttcctcgctgcgcgggcggcggttggtaaccggtcagaccagcccgagagggacctggtgcctgtacccaggcttctgtcgctctgtcgcctgcgctatgccctgctgtagtcacaggagctgtagagaggaccccggtacatctgaaagccgggaaatggtgcgtgtgcgggaccagatgtcgtgagacgggggaggggctgcctggaacaggcgggaaccggctgtggcgggacccgggcctccctgtgggcgactccggggtctgggaccgagtcctccttgagcagttcggccctcggtccccttggccgctggacggggctgggccagcagccaggacccgggcgtcctgtcccgtccctgcgcggcgactgcggccgcggcccctgccccggagccctctctgggcagttccgctcccgcagccccgcgtctccccagattgtgcggaagcaacgggagggtcatggaggcatcctgactcgggtgtggggttcgtgcgtgggaggagcagtggtctgtggggcccccagtccccactttctcctgttaaaaattaaactgaggtacgttaacaattaaagagttcatttgagcaaacagcgattcacgaatgagaaacaccccgtcctgggttgtggtttgtcaacggaaaaagccaaactatgtaaaataaagaagtttattcagagccgaataggagagaccttggccgagggaaacacaaccccaagcagcctggagtaagtggtcccgaggcggctcaagacagtttggttttattcatttcagaga

SEQ ID NO: 67089 - DNA, 1380 bp, Homo sapiens
accctgtgcaggacgaaggaccccattgagtgaaaaagacaacagtgtcccttatagcagttaggagcaagtttggctcaaatgccagtatccgaagagcagggagctgaaagtgagcccatttagggaacctgcggctggaatagcagcgaccggctctgcagcgccctgttacccggggcttctgctgtcactcagggctgagggggcggggtaggatgccctatccaatcggggtgctggggcggggccctgccaactgtttaatccgccggaaggagggcgcagcattgccggtcttctcattgcctggctgctagaggaaacccgaagtcgggattctttctttcctgctctgagagggaccaggtccctcctccgtagcttttgtctctctattgcctgcgccgtgtcctggactgctcacgggagttctgcaggagacgccggaatatctggaagctgaaaaatggtgagtgtgcggagccggaaaccccgaggtgggtttgggggttaggggacggtctagtcagaaccgcggaatcggaacgcgggcctccatgttgcgactcgggggtctgaggcccgagttcccctggcgcagctcagccctgggtccccttggcctcagggtgggtctgggcggcagtcgggaccccaggcgtcctgtcgtccctgctcggcgactgggacccctgccccggagctctctctggggagctctgcgcccgcagccgcgcgtctccccaaattgtgcggaagtcgtggagggaatcccgcctcgtgtgtggggttcccagtcgcacgtttcttctgttaaaaattaaactgagacactgttaacaagtaaagagtattttgggtaaacagccaatcatgaaggagaaacaccgggtcatgacttgttaacggaaaaaaaaaaccaaacagtaaaataacttaaagaagttttattttgacctggcgtggtggcttacacctgtagtcctagcactttggctggccgagatgggtgggtcacctaaggtcaggagtttgagaccagcctggccaacaaaccctatgtagggtccagccctactgggcctgtgggtttttttcctcgtgtgcggagacaagagatcatagaaataaagacacaagacaaagagaagaaaagacagctaggccggggggaccactaccacctaggtgcggagaccggtagtggccccgaatgcctggctgcgctgttatttattggatacaagacaaggggggagggtaaggagtgtgagtcatctccaatgataggtaaggtcatgcgagtcacgtgtccgccagacagggggcccttccctatttggtagctaaggcggggagagaggacagcttatgtca

SEQ ID NO: 67090 - DNA, 1348 bp, Homo sapiens
ataaaaacagtcttgagccgcctcgggaccacttacttcaggcctcctggggttgtgttttcctcagctgaggcctctcctattcggctctgaataaacttctttaagttattttacacagcttggcattttccgttaacaaattacaagccaggactgggtgtttatcattcaggaatctcaaaggaactctaattattaatatattttttaaaacctattctgagaagcaaaactataattgttaacgtgtctcagtttaatttttaagaggagaaaggcgctactggggaccccacagcccaccctcctcctacacaaacccccacacccgaggcgggatccccccatgaccctcgcgtagtccccgcacaatgtggggagacgcggggcagcgggcgcggagctgcccagagagggctctgggaactgggtgacagtcaccgcgcagggacaggacgagacgcccgggtcccggcggccggcccagccccactgtggggccaaggggaccaagggccgagctgtcccacgggaaatcgggtcccagaccccggagtcgccgcggggaggcccgggtcccaccacagccggttccggccggttccaaccagctcctcccccgcctcgggacccctggcccgcacgctcaccatttcttgcctttcaggtgactcccacgaccagtgcgggtcacagcacaggcgacagaagctatggcagaggcacctgaaccctctcggaggggaaagccaggctcccaacctcagctcgccgcctggagccgggaaccgaggagagcagggccttcgccctccccgatggacactcggcaggccccgcccagcgcccctgattggacgaagcgccgggccccgccccctcagccgtgagtgacaatagaagcccttggtaacggggctctgaaaacgggtttgaccggatccagcgatagattctttaagccagaggtctgtaacctttttagcaccagaaccggtttcgtggaagacagttctcctacgggggcagatagtttcggaatgaaacttccacctcagatcaggcattttatcctcataaggcgaacccaacctagatccctcgcatgtgcagctcacaatagggttcgggctcctatgacagactaatgcctctgctgatctgacaggaagcatatctctggcgataatgcccgctggctcgcccgccagccgctcacctcctgctgtgcggactggttccttacaggccatggaccgggggttggggacccctgccatagagtactgttgaatagaaactttagctcgtccggcggtgggctgggggggtgggggtagctcat

SEQ ID NO: 67091 - DNA, 1307 bp, Homo sapiens
gaaatactccatagacgcaaatttcaccccccagaagacagttgtgcaagggcaaagctgcagccattcgaaattgccaaataaatatattttggaataaaatattttaattgctttcacctctattaaacatagagtctggaactccctgcacacacttatgacactgtgcaggacgaagaagcagggacagaccattgacagagccacttctagtaattaagacgagcaagtttggccgaaatgcaaattttcaaagagcagggcgtagagagggaacttgaccttggactgtggcttgaagcggtcagtcctgctctgcttggccctgttacccaggacttctgctgtcactcaggatgcagggggcggggcctggcgctccacccaatcagagtcgccggggtggggcccggccaactgtttatccgcgggtcacattgccgttcgcctcagtctttggcccctcccgccgggtgaggttggcaccccgtttttcctgctctgagagggaccggttgccaccgccatacttctgtcgccctgtcgtctgtgttgtgactgctttggacgtgggagtcacctgaaagccaggaaatggtgagtgtgagcccccgctgggagtcccgagacttgggggagggtaggcggaggctggttggaactggctggaaccggctgtgccgggacccggacctccccgcggcgactcgaggtctggggcccgagccccgctggcgcagctcggccttcggtccattcggccgccgggtgcggctgggccggcagccgggacccctgggcgccctgtctcgtcgccgcgcggcgactgcggccccagcccgggagccctctctggacagctccgcgcccgcagcccggagcctctccatattgtgcggggccacgggagggtcatgggggcaatcccgccttgggtgtggggctcgtgcgggaggagctgcgctgtgaggccctcagtgccccctttctcctgttaaaacttaaacaggcccggtgctgggaatagaggcgtgagccaccgcgcctggcctagcgtggagaacttgtgacagcggataaatgttttccctgctgtctgtggcttagagcttggcaactgctgtcgtgtttttgttcacatcatgatcaatgtgtactagatgctttgttgttgtaatcgcctgaggggttcttcctgcctgtgctgcaaaaagaaagaccagggcattgcagtaaagaaaatgtttgacacgagatggaccacgcaacgccgaagacggagacagagttagcactcaaatcag

SEQ ID NO: 67092 - DNA, 1162 bp, Homo sapiens
tggagtgcagtggcgtgatctcggctcactgcaaccttcgtctcctggggtcatgcgattctcctgcttcagcctcctgagtagcggggactacaggcgcatgccaccatgcccggctaattttttgtatttttagtagagacggggtttcactgtgttagcctggatggtctcgatctcctgacttcgtgatccgcaagcctcggcctcccaaagtgctgggattacaagcatggtccaccgcgcccggcccaaactctttaacagaaaaaaaaatccgcaggattcccccatgaccctcccgtggtccccgcaaaatctgaagagacgcggggctgcaggcgcggagctgcccagagagggctccagggtcggggcccacagtcgcccgcgcaggaacagaacaggaggacgcccggggtcccggctgccggcccagccgcaccctgcggccgaggggacgcagggacgagctgagacagagggattcgggtcccagatccaggaggcgcggcgaggaggcccagatcccaccacagccgcttccggccggttccacccagcccctcccccgtctggggactccggccccatacactcaccatttcccggcttctgggtgtcccggtgtcctctctagggctcccgtgaatagtgcgggtcacggtgcaggcggcagagcgacagaagttgtggcagagggacccggggcctctcggagtaggaaatctggtatcccgacaacaacctgcatagcaacaaaagtagaagctggaatgggcctcctccttccggacggaccgttggccgggctccgccccggcgcttctgattggacaaggtacaaggccccgccccctcagaactgagtgacggcagaagccctgggtaacgagccctgcaaagccggactgatcggttctagccacagcttctctctaagggacaactccttccctgagccctggtcattggatattttcttttcagccaaatttgctcctgatttttacacagggcactatcttcttcctcattcaatgggctgtcagtgcttcttcgtcctgcacagggttgtaagtgtgtgcagggaattccagactgagtgtccaatggagcgatgtgctgacctcagagcaggaaggggagcccagatcaggcc

SEQ ID NO: 67093 - DNA, 1178 bp, Homo sapiens
ttctgctaaaatgcaagtatctcccatctccccatcccccgcagaccaagtacagtgaaggggacgaggggaagaagtccaccctgcgtttgagggctggggccaagacccctcattcccgcttcactcatctatgcttcacatctcctgtcattcacatctgtcaagatgcagggggcagagcccgaagctgtacccaatcaggggcaccggggaggagctctgcgatcggtccaatcaggcgcgccgtcggggacgcagctgcagacgttcaaccttctcgcgggattttcatttctcgcgtctgccgtacttggtttcgcttcgctagtcccagaggcccagagtggctcgcctggagtctctgtggcgcggtttcctgtacctgccttgggatccggagggaggaagctgggacacccgggagtcaggaaatggtgagtgtgtcgggccctgcgtcccgagacagggaggaggggctggttggacgaccggaactggctgtggcgcggcccgggccttcccgtgggcgactctgggtctgcgtaccgagtccctctggcgcagctcagcccttggtaccctcggcctcagggtggggctgggccggcagccgggaccccgggcgtcctcgtcccgccctgtgccgcgattgcggccccggccccgaagacccaagtctcttcagattgtgcggggcccacgcgagggtcatggggtgggggaaatcctgacttgtgcgtggaaggagctgtggtgtatgaggttcccagttccttttctctccacagaggacacccgtttttccctgagttttctaagtgtatgggatgcagggtcccaaatcctcactctgtcccccagcctgctgtttccagggcttgcagtaaatccccaaatttcctgttctcttttcgcttttccaaacgccaacctctccccttccattcacgacattagcaaccgtttctcctatattctacatttcagatattgtgctttcattgtttatttttcaacaaagcaatggattactctttcatcaaggtttgttttctgttcatagccttgacactccgctgtaagaaacctttgtgcttgtccttttgtctcctctatgcacagatacctcatcagaatgtctttgagttgaggttcccctttggaatctttacagg

SEQ ID NO: 67094 - DNA, 2155 bp, Homo sapiens
tctgtgtctatttgaaatatcgtcttgctgacaaagggttcataacgttactgggaattgaggagtgaagttagcatatggaaggctctggaaaccaaaagatttactgttagccccaagaggagttaggatgaagggacaggtctcaaagaccctgatgccaatatctttgaaagcctcggaggagaaatggtcgcccttggaaagaaaggactgaagagcacagagaccacagctcctcccacacacaaaccccacacacgagtctggtttgtgcctagtgaccctcccaccgtcaccgtgcagcctcctcaccgggctcacaggaactgcgagccaggctggaggcgagattgcagttagatattaaccaggtgccctcagccccgctgcttcacaggaagccgcctccctgagagtcaggtcacagcagacgctgaccgccggcttccccattggcctggggataagatctctgagagttgctcaagagtcgtctaagttctttctcagatcttgaattccagcggaaaggctggcgccaagcaggctgaagaccccacaaggaagcccactcagcagcagaatgcggtttcttcacctccagtcccaagattcacccctcacttctccaccaaccagcgaccccacatcccaaccacccccgtccagacccctaaacaccccatcctcaaacctctcacggaggcggatctagggtgtcctctcctattaaaccgtttctgctgcagccctcggcgtccgggtgcagtgacttgggctgcgaacctgtactggttccgccgcacaatctggggagaagcggggctgagggcgcggagctgcccagagaggggcgccggggccggggccgcagtcgcagctcagggacgggacaggacgcccggggtcccggctgccggcccagccccaccctgcggccaaacggaccgaggaccgaggtgcgcagggggcgctcaggtcccagaccccaaagacgctgcggcgaggcccgggtcccgccacagccggttccgactggttccgaccagcccttcgccctgcctcaggacgccgggccccgcacactcaccatttcccggctgtgcggtgtcccgggtcctcccaactcccgtagtcagggtaggtcccagcgcgacaaaagccaccacagatgtcccagggcgtctctcagtgacagaatacggaacagaggtcaccagggtgaagaggccactagctcctggaacgtcacaccctcctctctgcctcgcgcctgattgacaattctcaggaacccgcccacgactttgattgggtagccctccaggtcccgcctcctgggcactgagtgacagaagaagcgatctcacagtgctgagtgcagccggatgaacaggttccagacccggcccctggcagggcgggcttcctccctgcgttgtgacccgacccgtcccgggaaacgtttgccttaaagcggaatttcctacctgtacgcagtgggccctttttgcttcttcctcctgaacaattgtgtgcaaggaatcccagactcactgtccagtggagccatcccttggcctcagagcaggagggcagccgaggccacacaggccacactgtagcagcgggggacagggggtgggtgggtgggggggtggtgctgatgtcctccagggaccaggaatttgggatgaggctgtcgcctgcaaggtcaagcctttcttccactataagcgctggatgggttctttctgcgcgctacgcaaataaagaccacggtattgcagttaaaaaaaaagtttaataaacactaggccagctacgatacgtgagagacggagttactactcaaattattctcatccaaggtcctctggtaggggtttttcaagggcagtttgggagaaagggtggaggtagctaggcttgctactgactggttggggtggggatgaaatcactggggatggaatctgtcctcttggcagtgcgtggtggctcaccgctgtaatcccaatactttgggaggcctaggtgggaggatcgcttgaggccagtagttcaagaccagcctggacatagagtgaaactccgtctctatactataagggaggagaccacccctcatattgtcttatgcccaatttct

SEQ ID NO: 67095 - DNA, 567 bp, Homo sapiens
ctagaaaagctcatgaaactcattaaaaaaaaaaaaaaaaaagaggctaacttccagagcaaatcctccattgtaatgaatcaggcatgttctggaagaggatgcccaattgtaccttcatcacaagagtacaaagaaagccttggggttcatgacttggaaagattgccttactctggtgctacgtggcaatgcagcaggtcataagatcaaacaaagcctcctctactaagtaaacaatccgtgggtccttgaaaacaaaagcgaaacttgcctgcccgtgtcctgacaaaaacacacgaggacttggttctaccactgcttcattcctgatgtgaatgaataccttgaaaagaaggggctgccactcaaggccctcctcataactgacaacgctcctggcatctctcttctctctgttatgccgataaaaatggggaagtgatgttcctgcctcctaaaactacatcactgctacaactacttgatcaaagcatcatcaagtgcctcaaggtgtcttacacccactggacttttggaaggatttatgctgtcttgataataacc

SEQ ID NO: 67096 - DNA, 4045 bp, Homo sapiens
ggttcaagcaattctcctgcctcagcctcccgaatagctgggattacaggcgcctgtcactaagcccagccaatttttgtattcttagtagagacgggcttccccatgttggccaggctggtcttgaactcgtgacctcagatgatccatacacctcggcctcccaaagtgctaggattacaggcatgagccaccacgcccggggcagaggtaatactttctaattgatgttataaggccaacattgccctagtaccaaaaatagacagacattacagacatatctccaccactgaggacataaggggaaaactgccatctttaaacctggaagcaggcccttaccagagatctgacctacttgaacttggattcccagcctctactgagaaatgaacaactgttgtttaaggcacgtagtttatggcaatctggtatagcaatcctacgtaattaagacagggaagcgctttctctaccacacatcaaggctttgaagtctacagtaatcaggagagtatggtgttagcaaagtgatgggtacaaagtccaatggaagacagcaaattctggaacaagagcatctatttaaggtatgagaaactatggcacagcaggtattgccaggcagcgatacaaatgacagctacttcaacccaaagaacagggacaaattgttatctccagaagaataaccaatcttctgcctaacacctccatatacaataatcaactaattacagacctgcctgttttcatgaatttttattcactctattacctcagcttccattttgaatgtggttctctacctttctcataccagaaaaagtattttaagagccttgagacagtattcatttttctgtagtcatcatggaagaaagttttttccaatttattttccctgatggcattttctctgctaagccctgaaattctattgagatgatccaattaaaaacaaaacaacagcaacaacaaaaaaacagacctggaaaacttactacacaggctctgtgtagtacgacagaaaagaaaagtaaacaagaattttttaaaggcatataggactagatatatgtaatttgttttctgaaatccaactctttcttgtccctttagaaacatcttctctatcaatctctaatgatagaatgcattttacagctaagaaaaaactgaacagaaatgagtgaacaaatcttttcaaggttgacaacctcagggaggggcagtgctgactggaacacagacaagtctcattcaagggtcaggtcaggtcctcctgtcacctgggacatcccccacccccgtgctgctcactgaagtgctcagtgactactccctacccccaaccaccagataccgcactgtgtactttcaggctcttacaccacctcactggggtaagttatctttgacctttcggatagtttttcttgcttcactagtctaacagaattcaaaggatgggaatcatttctattttaccccctcaataccagcacctgagtggctgaccagccatgtctccaagaaatgaaaactgggcttggggtgagaaaactgagtatcccagggcttaactttttacaagaggataccaggggaatcctcccaccacagggtatccagctcttcccctgggaggccccagccctgcatctcaggctgtcctctgggaggagtggcccaggggctgatattcactaccctccaagacaaggctgctgtatccacttggtgccagtcccaggcagttatcaaagccagtaccaggaaaagatagtgtgggctcaggactcatcagctggtggtttccaaaggggaacctcaacccaaacacttccagataaggtgcctgtgcccagagaagataaaaggagaagaggcgcagacatttttcttgttggtttttacagcagagtggttaaaccacctgacaggtggttattctctgcatcctcacatatgaaatattcacaaacaaaaatcatatcttctaaaaaagaatcatatattgctacctggggaaaaaaatgacagttaaaatactgtatttgtttgaaatacagcctgggggacaaagagttcattatgttgctgtgaactgaggacagtgtagagtcttaattagggaaaaggctaaggggaacaggggaaaaggctgttaaattaaagtcttaattagggaaaggctaaagggaacaggggaaagcagaaagataaaacaaaaaagctataaatctgcctatcttcatgtgcagagaatttaaacaaaagagaatgcaggtaagttacgggtctaactttgttttttttcttttttctttttttttttttttttgagacggagtctctctctgtcgccggcccagactggagtgcagtgacgtgatctcagttcactgcaacctccgcctcatgggttcaagcgattctcctgcctcagcctctcgagtagctgagattacaggcatgtgacaccacgtctggctaatttttgtatttttagtagagaaggggtttcgccatcttggccaggctggtctggaactcctgtacatgtctaactttctttatggcccaagacatggccttcttgcccagataacgcacttaattcacagacttcctgctcaccatcaaacgcctcaatttatcaaacaccggggctgacagaggaatgcaagttaagctccctgctgccttggcactctgctgccttggcactatcaatcagcccaagttccattctataaaatcacccacaagcctctgcttctctcctgcaggcttcccatggcctcccttgcgatggattttgcttctttcgctaataactttacctacaactgtcttagtaaaaattattttaccccggcgttaccggcccagatagcagtcgttcccctgtgacggagaggaagtcagctttatgaaatgcagggcaaaatctggaaatctagggatttactgccagccccaggagttagggtgaggggacaagataagcattagacatctgccttcccaaacctttgaagactcagagggacaccggtcccctttaggaagaaaacagagactgaggatcccacagatcacagctcctcacaggcacgaaccccacacacgagtggggattccctccatgacccttccgtgaccctcccccaatcctggggagatggggggctgcgggcgaggagctgcccagacagggctccgaggccgggaccgcagttgccgcgcagggaccggataggacgcccggggtcccggctgccagctcagcctcactctgtggctgaggggaccgagggtcgagctgcgccagggggactcgggtcccagaccccggagctgacggcgggggaggcccacgttcgccgcggccggttctggacggttccaaccagctctttcccacttttgggacgcctgaccctgcacacgcaccatttcccggcttccgggatgttccagggtcctccctctgcctcccgctgccagtgcgggtcccactgtgacagaggctgccacagacgttccagggcgtctctcagcgactgaggctacacagacgttccagggcgtctctcagcgagcgactgagtctagagctgagcgcaggggcgtgaagacgccgcgggctctttgaacctggcaccctactgccagccgtgcgcctgattgacagttctcacgaccccgccccatagctctgattggatagggctccaggtcccgccccctgggcactgagtgacagaagaagcgatcacacagtgctgagtcgagcgggatgaacgagttccaggcacagcccttgacagggcaggcttcctccctgtgctgtcctgatccctcccagggaacatttgcatttatgcagaattacctgcccgtactcagcaggcccttactgccttttcctcctggagaaggagtcacaagtgttttgcagggaatcccagactcacagtccagtggagccattcccctggcctcagagcagaggggagcccaaggccacaca

SEQ ID NO: 67097 - DNA, 1044 bp, Homo sapiens
ccctcagggaggcggatctggggtgtcctcccctctctggctattaaactgtttctgctgcagccctcagcgtctcggtgcagtgagtcgggccgcgaacctgtgttgcttacagccgcacaatctcgggagacgcgaggctgcgggcgcggagctgcccagagagggcgccggggccgcagtcgccgcgcaggaacgggacaggacgcccggggtcccggctgcatgcccagccccaccctgcggccgagggccgacctacgccaggggaacccgggtccgtagatcccggagtagcccttggggaggcccgggtccagccacagccgattactgcaggttccacccagcccctcccccgcctcgggacgccggcccagcacacgcaccatttcccgacttccgcggtgtcccaggtcctccggacggctcccgctgccaatgcgggttcccgcgggacacaggctgccacggaacttccaggtcgtctcttagctacagagccgagcaccgagcgcccagcgcaggtgggtggagaagacgccgcgggctttttcaaccacacactcctctgggaagcgcgcctgattgacagttcccacgaacccgccccacggcccttactggatacggcgtcaggtgccgcccctcgtggactgattgacagaagaagcgatcttgcacagctgagtggagccagatgagcaagttcctgacacagcccttggcagggcgggcttcctccctgctctttgatctgaatcctcccgagggatatttgcacttaagcggaatttcctgcctgtactcaataggacctcctgcttcttcctcctgtacactgactgacaaaacaattatacttttttttttttttttttttttttttccgagagagagagagagagagagagagagagagggagtcttgctccgtggctcaggctagagtgcaatggtgcgaggctcactgcgacctccgcctcctaggtgggttcaaacaattctgcctcagcctcccgagtagctgggattacaggtgcg

SEQ ID NO: 67098 - DNA, 1181 bp, Homo sapiens
tgtgcctggggataagatctccgagtgctgctcaagagtcgccggagttctcagatcctgaatcccagcagaaaggctggcgccaaccaggttgaagaccccacgagggagccctctcagcagaatgcggtttcttcacctcctgtcccaggattcacccctcacttccccaccaaccaaggacgctacacccagccgcccccgtccagaccccaaatccctcagggaggcggatctggggtgtcctcccctctcctcctgttaaaccgtttctgctgcagccctcggcgtctcggtgcagtgagtcgggccgcgaacctgtgttggttacagccgcacaatctggggagacccggggctgcgggctcggagctgcccagagagggcgccggggccgcagtcgccgcgcaggaacgggacaggacgcccggggtcccggctgcatgcccagccccaccctgcggccgagggccgacctacgccagggggacccgggtccgtagatcccgaagtcgcccttggggaggcccgggtccagccacagccgattacggccggttccacctaacccctcccccgcctcgggacgccggcccagcacacgcaccatttcccgacttccgcggtgtcccaggtcctaccgacagctcccgctgccaatgcgtgttccagccagacaaaggctgcctcagaacttccaggtcgtctctcagctacagaacccagagccgagcgcaggtgggtggagcagacgccgcgggctttttcaaccacacacacttctctgggcagtgcctgattgacagttcccacgaacccgccccacgcccctgattggatagggcgtcaggtcccgccccctgagggctgattgacagaagaagcgatcttgcacagctgagtggagccggatgagcaagttcctgacacagcccttggcagggggggcttcctccctgctctttgatctgaatcctcccgggttatatttgcacttaagcggaatttcctgcccgtactcaataggacctcctgcttcttcctcctggacacggactgacaaactaattatatctttttttttttttttcctcgagagggagtcttgctctgtcgcccaggctagagtgcaatggtgcgaggctcactgcaaccttcgcctcctgggtgggttcaagcaa

SEQ ID NO: 67099 - DNA, 832 bp, Homo sapiens
cggggaggcctgggtcccaccacagccagatccggccggtttcaacccgcccctctctcccatctcaagacccccagccccgcacacttaccatttcccagactctgggatgtcctggtgttctgtttacctctcccgcggccagcacaggtcctacctccacctgaggcccttcctccacctgagggccttctggggtgaggagaccccagagcggagcgcagcggctggtagccacgccctcgccgtttgcgcagcgcccctccgcccgccttcccggcggcgcccctgattggacattgcactcttggacccgccttcgttgcctgagtgacagctagtagggaagtcgcgtctctaagcaacctgcattcgtccggggtcaggaatctgttcccctgccacggatatttgcgtctaagcagaatttgttaacgtacccggggtcgggcactggtgtcttcctgcagctccttctgagcgcggagacacaagcgtgcacagcgcaggaaattccaggctcagtttccagaaaaaggctctttgtccacagcgaaaaaggacgcccgggccatgccagactagaacggaagggtcagacgctcccagacttagcataaggctgcgaggccattcatggatttctgactcttgtttacaaatacagacacttagagtgacagagtgacctcatcatacctaacaaagagtgactacgttttaatctttgacaactgacagggtttaggccgtcacccatcccttccctccccccacactttgctctagtgggaagtttggaccccacagccctagtctgagagaaggagtt

SEQ ID NO: 67100 - DNA, 1186 bp, Homo sapiens
gcctccagggcccttttgctgtggatttactcctcaaagagtcagtcatcaaggggttcgctttatctggaaactcttgtctggcattccctgcgcgcacacctatgtccccgttcagaagcttcttcggtaaacgccagtgtccggtctgagggcctttatatctagcatataaagttctggtataatgcaaatgtctctggcaggacagtttcagggacaaaagtggaagctggatcgctcagctacctgacctccgtctgagatgtgactcaggcaacagggggtggaacctcacaaactgtccaattggagacgccgccggagcggtgggtggggccgccctgtacaaaggcgcgtggatacggtggcgcgatttccagtttgtgtctctcctgcctcgaacgtcgctaggtggctctgccgcagcctctgtcgctctgggacccgcactggcagagggagtcgtagttagggggtggggacaccgcggaagcccggaaatggtgactgtgcggggcctggaatcccgagacctgaagagctgctggccggaaccggctgtcgcgggaaccgggcctgcccgcggccactcctgggtctgtgaacccgagtccccctggcgtagctcggccctcggcctcctcccgccgcagagtgaagctgggccggcagccaggatcccgggagtcctgtcctgtccccgcgcggctactgaggcccgggtcccggagccctgtgtgggcagctccatgcccgtagccccgcgtcttccaagattgtgtggggatcacgggagggtcataggagagaaggaatcccggctcgagtgtggcgttcgtgcgtgggaggagcggtggtccgtggggtccccagtctcttctttttccccagggggaccggtttgccccttaattttacaaacgtgtgaaaacaggatctcaaatccacgaccccgttttccagcctagctcttcctaggactgacaggaaatccctaaatttgccaattccttctttcattccaaatgaagctttccctctccaattcataatattattatttgccctgttaaatacaatttgtaggaagccattggtttagactgagctcctgcactagacccaacagaccaaaccaaaatgagttacccacggggacgttcctcgctaccaagctgaaact

SEQ ID NO: 67101 - DNA, 2321 bp, Homo sapiens
cattttgggaggcggaggtgagcggatcacctgaggtctggagtttgagaccaacctggccaacatggagaaacccagtttctaccaaaaatacaaaaagtagccggtcgtggcggcgcatgcctgtaatcccagttactcaggaggctgaggcaggagaattgcttgaacccggaaggcgaaggttgcagtgagctgagatcttcccactgcactccagcctgggcgacagagcgaaactctgtctgaaaagaaaaaaaaaacaacaaacagaaaacaaatcctttcaaaagagtatggtgaaagaaactataaacaactaaaatactgtgtcttaaatgtcaaacaaaaaacagctgataatgttgatttggcgaggggaggtcacctttgggaatgcggggaaggaaccggaaatttaggcatttatttccagccccagaaaaagctaggctaaaaaaaacgggagtcgtaggtttgagattctttttccagtacgtttggaagactcggaggaagaccagtcccccggaaaaaaagacgatgtactgggaaggccacagcccacagctcttcccatgcacgaaccgcacacccgagacgggattccgccttatgaccctcccgtgtcccagtacaaacaatctggagagaggcggggctgcgggcgcggagctgcccagacagggctccgaggccgaggccgcagtcgccgcgcagggacgggacaggacgcctggggtactggctacggcccaacccaccctgcggccgaggggacagagggccgagctgcgccagggaactcgggtcccagaccctggagtcgctgcagggaggccagggtgcttccacagccggttccggccggttcccacaagcccctcccccagtctccaggcgcccggccccgcacacgcaccatttcctggcttccagggtgtcccggggtcctgcctacggctctctccggcctgtgcaggtcccagcgcgccagacgctgcggtggagccaccggggccactggagaagcggagaccggaacccaaacgcagcggacacgaaacaggaagaccccgcggagttgttgaacattgcccctgtcccccttgcagagttcctgattggatggtttgcaggttcccgccccagtgcccctgattgggtgatgattcaagtcctgcccccttggtactgagtgacaggagaagcaatgcggtatgtggctgagtaaagacagattgacagggtcttggccactgcccttcgcgggccgggcttcctccttctgtaaccttctgtgccggggaggatatttgcatttaagcagaaagtgtttcaggctctgcagaggtgacactggcgtgtttctgcactcagggtgcccttcctgccttttcctcccggacacagagtcacaagtgtgcacagggaatgacagactcggcgtccagtggagccatcccctggcctcggagtaggaggcgcgcccaggccaggccagaccacagtgtaacaggagggaggagggcttgcttctttcaggcaagaaaattaaaacggacaaagaaataaaagtattaaatgtataggaaaaactggagtttttatgacagcgatcatctataaagaaaccaagagaagtaagcaaacatttgaactagctcagacaagcagcctgcttcacccgcagttcacaaggaaaacccacaatcataacgttaaaaatattcccaagcgccgggcgcggtggctcacgcctgtaatcccagaactttggaaggccaaggtgagaaaattgcttaaggtcaggagttcaagaccagcctaaccaacatggtgaaaccccatctctactaaaaatacaaaaattagccaggcgtggtggcaggtgcctgtaatcccagcaactcgggaagctgaggtacgagaatcgcttgaacctgggagggggaagttgcagtgagccgagatagcgccattgcactccagcctgggcgacagagcgagactaaaaaatgaaatatgaaatgaaatgaaataatgaaatgaagaaatgaaatataaaataaaataatcccaagcttgggacccagactctaactgctgaaatggaaccccagtgtggatcagaacctggtgatgagacagggacacttaagaattcaactttgggagctcaaggtgccctccagtcctctcctcacagtgtggaaacactctttccttcaaaaccttcatttgtaccagcaggaaactctcacccggagtcaatgtaaagtcgtgacctaaataaattgtcatgttcccaaaccttttct

SEQ ID NO: 67102 - DNA, 658 bp, Homo sapiens
gcttacggaggctccaggagtcctccctacggatccctcactacctgcaggtcccagtgagacaaagcatacgcagagccacagacagtccgaggctgggacgcaatcctagcgaaccgctagaataaggatgttcacacgcgcattcagagctagggtgcaagcgccttttcaacaccgatgctgactggacagtttgtgtgcccccgccccctgacccctgagtgacagccatgcaggagggcacgtggttgagccgagctagcttcccagagtgggttttcccggcggggatatttgcatgtaagaggaatttgttctttgcccgaggtccatttttaagtggcctattcagtagtgttaagtgtagttacattgtgaaaccaatctctagaactgatttaatcttgcaaatttgaaactctttattgattgaataacatcccatttaccgctcaccctcagcccctgacacctactattcgactttttgattgtgtgaatttcactgtgggtacctcatataggtggaattattctgtatttgtccttttccgactgacttatttcacttagcataatgtcctcaatcttcctgatgttgtagcatgtgtcagaatttacttccttttaagacatttaaaggccaggcacgttg

SEQ ID NO: 67103 - DNA, 1428 bp, Homo sapiens
ccccaccgcccccaccacgcagtagctgggactacgggtgtgcgccaccaagccctgccttggggttccttttctaaagtgccaaatgtgtggaggtggggaaaagaaaggtggacgcctcaacgctgttatggtcaaagattaaaatgcaaccacactttttattacacatgatggggtaaccgtctgtttataaacaagggtcactattccacgagaggccttacaacattatgccaagcccctggtacctggaggacatcagaccctcctgttcctgtgcggccttgactagacgaccacttgctctggacttgctcctcgaggggtcgctccatctggaaactgagactggaattcctgcgcatccctgtccccgcatccagaaacactgcaggaagacttccgtgtccgacccgagatccggaacaatttctgcttcaacacaattgtccacggagggcaccagttccgtcccaccggcggaagcgagatctgcctagctactagacctgctgcctagctgtcattcggacaaaaaggggcggggctgtataattgtccaatcaggggcggcgccggaaaggagggtacggctacgctgcgcaaatgcgtgctacgtcactgtgcgatcgggttgtgcttagcttggggtctcctggccccttgacgcgtcaggttgctgtacccctgcatcggatgcgctgtaccctgcgctggctccgtgaaccttagggacaacaccgggacacccgcgaggccggaaaatggtgagtgtgcagggccggactagttggaaccggccgtgatcgcgggacccgggcctccccacggtcacctccggccgcagtgtggggctgggctggcagctggaactccaagcgtcctgtcccgtccctgcgcggcgactgcggtcccagccccggagccctctctggacaactccgcgcccgcagccccgcgtctttcccagatcgtgcagggaccacgggagggtcctggggagaatcccgccttgtgtgtttggtttgtgtgggaggagctacagtctggggttcccagtcccttctttcttcccaaaggctgtttccccctgagtcttccaaagatgttggaagcagagtctcaaatccactaccctgtccccccagcctagctcctcccacggcgggccattaatccctagatttccggatccctccccgaattcccaaacgcctacttccgctcgccagtggaaaacatcgtcaccaactctttgtcctgtgtggtgcatttcaaacacacgcagtattttaataatcttttttccaatagatgcctcttttaaacgatttatttcttgtttgtggatattttacatcagagaaaaatcagaaaaattattcacttggaactaatctgcataaaatgctgtggccctcatcc

SEQ ID NO: 67104 - DNA, 969 bp, Homo sapiens
gatgttatccccagtttccagatgaaggcactgaggcttagagaggataggtgacttgcccaacgtcacacactcaggaagtgtaagagctaggctggaatttcaggcagactccagagtcccagctctcagccagcacctccccccacacatacactgctcaccccctgccacctcctgcccctccaatcccacagttaagtgcagacaaagtctaggcaagcatcccggagacacggaggcaggtacaatcagacacagtcctatactcagatgcgcacagccagacctcgcaatgacacaaagcacgcactcagaccacactgtcatatcatcagccattcactagacacccacaggacagacccacccacacctctagactgtattctgggtttcactctgcctcctgtacgtttcagctcggaggccccactcacctcgtatcccccggcccgagcaccggcagccgccagcaacaaaaggaaaaagcagagaggcgggagcggtggccgcagggcgcgggacatggtccaggggcctgctgagtccaggcagccgcgagcgcagacccccgaagcccgcgcgtaggcgcccatggctcagcagcttcctcctggggttccccggccctggaaaggccgggcaaacgccccgcccccagacccggccgggccaatcggggtggggggcggggccagggcgcggtctggaggctcacgggagagaggctgtagccctgggcaatcccgggggtcgttacaggaaggtaggaaaatgccaccctcagggcactggttgggctaaaggtgacactggcgtctcacgggctatgaagacggaatgcctcttaatgccggaattccaagacggaatgcctcttaatgccggtaggagcagaagtgcttttcctaagggggccgggttttcctagccggtgtagtgtgtccatgggaatccagggtgtcc

SEQ ID NO: 67105 - DNA, 2513 bp, Homo sapiens
ctagggtgttccctaggaaagggccaggttccctctatccagctgggggcaccgagacggcctcattcagggaagtccaggatggcagctgaaggcagcaggtttagcagccaaagcccaggcctagtggatagacagggtccaaaatgtgacccttctaggctggtatcaccatgggggcgtcatgggctgaggattctgcagataggacatcaccacggcagagatggacagcctgagacaggagagaggtgtcagtctaggatggccaggctggggtccccccaccccttactcaagagtcacttgttctgtagggcaagtctcacatgaagctactcatcatttgcttcgtgtcctccgagctccgagagttggcaaagctgatgaaggagcagtagacagcgacccaagcacaccacttcagctagggaaaggtaagtgggtgggcaggttagtgaaaggcacaacaatgagtccccgaagccacctttccagacaccagatcatgcccactgattccatctgatgcagctgggaccttgccccacccggaattcctcagtcccacctgctcatggcatactctagatacgtggtttctagtcctactgtctggcctgcgtctctcaggaccaagagagactctgacatcccacatgcttaagaccctgccctttttccacaactcctctccaagttgcttcaaagcctggccccactcgcagaccaatctgccacatccccaacctgactcgaatccttgacttcaccaaagactggggctttctcggcccagcgtcatcgcagccccactcccggccgatctcaggtcccgccccatcagcaatgacaagacaccccgcttcattccaaacccgcccccgggcctcgttctcaggtccaactacacccatagaagctcaaccccgcccaccttaagcatgaggccgcacatgctgaagatcatgcccagcaggttcatgtagtccggcgtcgggtcgtccaaggccgggttacattcgctcggcgggggcttgtacctgcgacaggctcgagggtcaggggcgctcaggtcctgcccccgggatagacaggcgcttcccagggccccgatccacacccacaacccgaacccgtgcccacgacgctggggtcctcacctcagcactttgttcggcctccgtgggtccgacatattgttagtggacatagcgagtcgaaggccagatcacgcctcttccgctgcaggaatcgcagcttccggcgtgcaagctgagggcggattttagagtaacacccgaggccctcgcatttccgttcctcatgacagaggcttggactccccttacccagagaacggagatttaggagaagccagaagtcttcctttcaaagggaaaatggggaaaagaacctgaaagcgggcttcaatagttccaacccgatcaccgaaatgccaaaatgatgaacccggaagtgataaacaggaagtaggtcaggaagaacaataataaggttacacccaagcgtgggtttctaaggcgcggaattttccgtacagaccgatttaaggctgcaaggaaggagtcctgggagcatggctttccctgagccaaagccgcggcctccagagctgccgcagaaacggttgaagacgctggactgcgggcagggggcagtgcgagccgtacgatttaatggtgagcgccttcgtcttcattccgggtcctcctcccgcctcctgagatcgacggcccagtaacccccgcctggtgttccccagtggatggcaattactgcctgacgtgcggcagtgacaagacgctgaagctgtggaacccgcttcgggggacgctgctgcggacgtacagcggccacggctacgaggtgctggatgcggccgggtgagccggggaccaggctgggatgggagcgctgaggctgggatccgaggtcgatgctgatcctcctcctcctttactccagctcctttgacaacagtagtctctgctccggcggcggggacaaggcggtggttctgtgggatgtggcatcagggcaggtcgtgcgcaaattccggggccacgcaggggtgagtgaaagcctggagaccctcatttgagtggaggggacccgtattagcgcataggtggtgacacggccacccccattacaccgtaaggatcccttccccagatgacgatcccccactccgcatgccaggctaggcagtcaccaacccctgtccttgctgttcccccaaaacctttcacctccccttcgcccttgctttaaccgacactgggaaccctgcctttatcccagtcctccaaagtccagcctcctctgagtggcaataactttctcagaaggtgaacacggtgcagtttaatgaagaggccacagttatcctgtccggtgagtctggggcctaagcacgggggcccagggtgctgccctccccctccaaacctgacctcaccatcatgctggcctcacaggctctattg

SEQ ID NO: 67106 - DNA, 1049 bp, Homo sapiens
ttccccgctgggaaaagcaaatctaaattcaagaaccgcccagacttaggctcctcctcccatatcctcccttaatttgtcttgccccaggctccgcccattccagaaagctttaaatgtacctagaacccgcccccacaccaagaatcagtcctcgcctcctcaggttaccgtaccagcatgtaactaccagagtgcaaaatccccttcccaggacagaaactcccgcccagaataggtcccgccttcctccaactattgggcaactcaaataaaagacatatcccctccactggaaacgctgcccccgtctagtaccgcgttggttctacaagccacgcccctccgcgtccctagaaattccgcccggtcctcaccatggcattgacttgctgtacagcgcgcccgaagttggttgcttggaagccggtggtgccgaaggcctccagcagtgcgcggtaattcacaccgcggttgaagtcgtagccccggacctgggtgctttcgggcggcaacgtcgagctgtgctttagcacggcggccagcgcccccgctggcgcctcccgttccagggaaccttccatgcgcctatagccggctctcgagtcaaagctgcccctaggccgggcttacggcggcccagaaacgcgttaaaccccgacgcgcgcgtctccgcaagagcacaggaagtagggaacgtgctttgggcgaaagaccggaagttggtttatcacgtgaccatttttagcccctgtaaaccaggtcgccgccatttttgtgcgtgtgttccgtaatacggaagccgcgaggagcctttaggccctttctttctttttttttttttttttttttttgagacggagtctcgctctgtcacccaggctggagtgcagtggcgcgatctcagctcactgccagctccgctttccgggttcacgctgttctcctgcctcagcctcccgagtagctgggactacaggcgcccaccaccacgcccggctaatttttttgtatttttagtagagacggggtttcacctggtctcgatc

SEQ ID NO: 67107 - DNA, 1681 bp, Homo sapiens
ctgtcttccctcaggaaccaatcaactcagggccaagagccactgtctcacccctaactgggtcaaggctctagggctcaggagttttgacatcaacaggtgctgtctcagcttctaagctggactcagaacctgaggatccttgggctcactttgagccccagcataaactccagagcctaagacttcaagtccctgtgtcaatccccaatcaggggtcagtggcttagtaccacaagaccccaagactgaggatatttggatcctgagtcgtccaggaaccacagccccatgttagggtttcacagcctcaggaccccaagtgcctgactgcctcgtggtccacccagaggtcctcaggggcttcggcaccaccagtaactaccttagcctccagcctgagccaggacagccacgaagcctgcaccagaggctgcatccggaacaccccatgtacctcttccccgccccaagcctgacctgggcgggcgcccccggcccccggtccccggcccccggccccgcgcaccttccaccactgggtagggcgcgcgtacgcggcgtagcgcgcgtagcctccaggtgacatggtcagacacgaggtcgcggagcgcgtggcacacccgcgacaggacgtggagcacgaggcgggcgtccaggtaggagcagatctcgagcagcagctccgggggaaggctcagaaggcccggctcacttacggccgaaaccctggacgcggcccgaggctccgaagcgctcggggacgcggcgggtgtggatagctgcgaggggcgcgagaacgccagcccggattttggcggactgagaacgcgggccacgtaggccttggcctgcgcgtctgggtctgtctctgactctgggtccgagtcatcgtcccaggtgcgggaatcatcgcaccgccctaggggaagctccattgcgaccgggtgggcgctgccggcctcgcgtcttgtctcctaggcagcacgagggcacttccggcgctgtctgatgacgtttatgcgcccaccggaagcgacgaagtcagacactggcttaatacagaacatcgccccgcttacagggtctcttgcaactgcgtcggccttaggctggaaaatgcaggttcctgtttctgcgctttttaaactagccgataccgagagccagccaactctagctaaaaacgaaactcaagccaggcggggtggcgcgcgcctgtagttccagatactcaggaaggtgaaggggtaggatcccttgagtccaggagttcgagactgcagtgagccatggttgtgccactgtactccaacctgcgcaacatagtgagaccctgtctctttaaattagacataaaataaacactgctttaacgaaggcatctgttatatgtgacactgagcttagaaacccaaaggcccctttccgagttcaaggagtagagattggaactcttgcctcttttcccagagccagaaatatgcagttacactgcagaggcatcagttaagtgactttttttttttttttttttttttttgagaaaggaactggggcctcagaactacctctccagaccccattccccaacccaaccttggaggacagcagttcagtcctccaagcggagtgcttggctcattgcaacctccgctttctggactcaagtgatcctcca

SEQ ID NO: 67108 - DNA, 3094 bp, Homo sapiens
cgcccgcccaagtgcggggtccccgccagctgcgccatcctcggccgcgcagtcgcgggctcgggagcgcgggaggggggatgtggaaacgggccacaggcggcggcggcggggcccggcggatcctcatgggacccagcgaagagccctcgtcccagggtggcccatgccgctgaccccggctccgagcccgaaggcttccacctccctcgcagcggctgggcgagggcccagccgcctccacatccaggggccccgccccagaccgtgatagcgccccggcccccgtggtctcttctatgcaggcacagtccctgaagagtccccttcccccgacactctgcccttaacttctgccagatcccagaggcctcctgccctagtccaatttctgagcttccccagatgcgccctcccaagacgatcgtcctgatctctcctgtcccctgttcctgcccttcaagctcagtggatgccagatatccccctctgtggcctagccaaattctaaggattccccttaatcaggcccaaagcagtccccaggtaggtctctgctgcctcttcgaatgagagccagccaagcccggccaacccactataggagccccctggaccgatcccagtcgccttccccaatcaggtctggccaagcctctccctgaaattccctccgaccctgtcagcagtaacccctgctgacggatctctgttgcctctcccagtcaagttcggccgagccccccaccacctcgtgtcagtaaccccctggtccgatccttgcagcctcccccagttcggcctgggtaaacaccccccggggcattcccctcaacggatcccagcaacgcctcgaagtcagatccaagaaaaccctctaggccgaagtctgacgcccctccctgtcaggacccaacgagctcccctccccccaccccgctcaacttttcagtgcggcctcccccaatcagacccaaccaagccccaccgaaacaggcccctacacacacccgatcctcgcgacgtcccccaatcaggccccaagcagtccccagacgcttcccccaatcagatcccctccagcccgaccccagcagtcccactggccctcttcttgaggagccccgacatggcctggctccgaggccccaccccctaagctctgctcggttcccccctcccccgcccggcccgttctagctgccaggaggatcgggcccaaccggcttcccggcctttcccggtcgggcgcggccccgacgcccgggccgcgcgcggcgcaggctcggtgcccggcgggggtcgacgcaagccggggccaagagggtcgggctctgagtgaggcccacttacccggccccgggcagcagcggcggcaactcgcgctgcggcttctccagagactcgcgcggaaggagggagccaaagagagagaattaaaaaaaaaaaaaaaaaaaaaaaagaaagaaagaaaaaaaaaaaagaaaaacgcggccgtaggtgagccgccgcggctcccgtactccgttcaaactggtcccgccgagccaatcggaaggttcaaccttcacacgtgccctggcacttgggaaacccgggctgagacaaggtccggtcacgtgaccaaagagttgccgtttctttggcctctctagccagccggtcctcccagtgtctcgttttcccagcatctttcactgacctgaccgcaagctctttagctggagccaggagtttggtagcgcgtggggactttgtgtgtgatggatccaggaacccctcggccagagccagcaccctccttgtcaccttcctccactaaaaattgaaatgtgcctcccttcccccatccagaggtacttgggaggagtacgctgtgtgtgcgcaaggaaagagctgagcgtgctctttataccccagagacaaaggaaagaaagcaggacaaagtaagtgcctgagacaagccgggttcctacagaagcctctgccactttttgcattattttccagtactgtttgatagtttttacaaggagatgaaaaagccacaaggatataaatttttgaataaaacgaaatgaactaataaaataaactttgaaccacgcctaatccctttccctacctgaagttgaatgaggtggaacagcgcaggaaattctggcaagggcagggtcatgaagaaagaaatcttcttgatccttgcgacgtctgaagacagtagggcaccgtttttccttctcttgagagaggagcagatggtaaaaagctggagaccctgtagcgtcttggtttcccctccctgccctgccgataacaaagtgggagacctcctgccacttgaagcctcagtttccccacttgtcaaatgggtataagagcagttcgcgcgattagagatcatccaagttaagcatgacctggccagctctgaattgttccttaaaaacgtggctttaccctccaaggctcaaggctgttcttttactgtattcagcccctccctaagccgatatttaatgaattcaccagctctaatcccaaagaacaacccaccctgccctgaggaactttttgaccctcgagagaggcagaggtcaatttttgcccctgcctgaaggaggggaacagctatctcaacccacttgccgtaggcaaagtcagtcccggctccgttcattcatgaaaatcaagtcccgggcctccaaggttagggaagtgtcggcaggcgcctaactccactcggagaatcgcggaagacaccctaaaggagcagttgggattccgaggtagccagttccgctggactgaaacctgggctgagaaacacgtgcagaaagccgccaccaaggcatgcgtaaaggcctccctctcccccaccctccgataagccctggaactacaaatcccgtcctgccatgcgccagggtcgccgcgctttggggttttggctgagactcaaattggcaggagggtctctagaccaaccgaggtgcatggggagcagaagagtgagactggggagctggggctggatttgggggttcctggagcgagtgtgaacgataagagctttctggtcaaatttgggggc

SEQ ID NO: 67109 - DNA, 1987 bp, Homo sapiens
gcatttttgccatattgtccaggctggtctccaactcctgggcttaagcgatccacccacctcgacctcccaaaatgttggaattacaggtgtgagccactgcacccaacccacgcccatttttaacaaatgaagaaactgaggcttgcagaggttagatcatttgcccaaaatcacatgctggatccagaactagagcccccagtcttgttattctcaacactttttcctccacactacagggacttgatcttaacaccacagacatggcaagctcagagccaaaaatcaatatatgccctatttacttaatccagagtttctcaacctggcactaataacattttgagctggattattctttgtttgggggtgggagggcgctgccccacgcatggtaggaagttgagcagcatccctggcctctacccatagatgtcactagcaccccctcccgcagttctgacaaccaaaaatgtctccagactttgccaaatgtgggggtggagggaactgccccaattgagaaccaccagtttagcccttcctggaagacaggctctgtgctaaccacttttccaggatcacctcataaaaccctcaccacatcaagagatgctatgatgtctatttttgcaactagggaaaatgagggtaggcaaacccagaggctccaggaaagcagcgatcttgtctgtaagctcaccactgcataccagcacctagcacaatgcctagcacgaggtaaattgctcaataaatggaggttggtcgaataagatacaaggaagtcaagcaattgtcctagataagtaattgtccttacatagtacgtggtctgagtctaacacatatagctcagagtccagacttaaatttactccctttcctcacaattagtggtggtcccatgacccaaggtccgggtaccactcaaacaggaatcctgatatccacgtttcctcattctccacagtgctgattcctaggcaattcctcagctcccagttcccacgggcaagctcctggagtccccactcccgcccctagaccccagttgtcgggaatccaagttccacaccctcagcgggtgacccggacgggcccctcattcagaacggaaagtggacttcggtcccgatcccccttcacgggccccgactcccgctgccaagacaggccgtggcgcccgcccccacccccacggctccttacgaagctaagtgtggagcccggaccgcccttcctcttcggatccccggggccagcggcggcggccgactggtcgggtcgctgcggacccgggggcggctcctcctgccgctgccgctgctcctcctccatcttccgcttgaacagctccaggaagctgccgtcgttggcgaacaagttcacgccgcccgacaccgggctcgaacccgcgcccgacacctcctcgtccccgctctcgggcgacgtccccgatcccgactcagcccaacggctcccgccaccgccaccgcccgcggggcccggagcctcccggccctgaggctccgcccgtctccctcgggcagccattttgtcgccaggtgccgcgcaaaggactccgggaaggccgctccggccccgcgcttggcgcccgactcgcctcgtcccgaacaatgcatgccgggaagagcggtcaggccctccagcgcccgcagcgggggcggggcgaatgagggaaccaacccgaaggggcggggctagggggaggagcccccgtctcgcgggtttttttgtttcgttttttttttttctttttttttcagacggagtttccctcttgtttcccaggctggagtgcagtggcgcgatctcggctcaccacaacctccacctcccaggttcaagcgattctcctgcctcagcctcccgagtagctgggattacagacatgcgccaccacgcccagctaattttgtatttttagtagagacgggatttctccatgttggtcaggctg

SEQ ID NO: 67110 - DNA, 1605 bp, Homo sapiens
tgtagtctccctctaaagttaagagtgtcatgggctggggtctccatcaagggcctggaacccagcttctgttcctgctctaagacagaggttcaaacatgaaatatggtatactggagtcttctcttgaaatacaaggagacttttaggaattccttctacgaaacggagcgcaattgcaggaatggtgtctgctaggcatgggagatcagggcgtacaggacaagactctgtggactcgcccactctaagccactatcagcccggggacctatcgccaaccgagtcaattcgtctatgattggtttgcggcaagagccaagaggctcacagcctattgaataacagagggggcggacctgaggtgaggttgggacctaccgtgaagaatagagggaaaatgatggacataaagttgagcctatggagtcaggccaaggaggaccgggaatctaacttcaccgaaagggcatggactgggtgtttggctggttgctaaggtgaggttggcgctaccggaacataagagtgattggtgtaagtaagaaaagacatagccaatgaaaggagagctgcaagacctagggcccaatcagtgaaagggagtagcctagaccgtaccgatgtgttcattaggtagggggaacccttggaaaattatagaccagaggttgacaaagtgaaccctggaagcaaagaatagtgaaaatataatttatatttctcctaaaaggcaagtaatgaggaaattaactcatgctcctagcttcgctaggaatgtgatagagaatttcccctgtaggttcttcgtatggtgcgctccgctggatcacgtgagccagttccaaaatggcggcaggggtggccgggtggggggttgaggcagaggagttcgaagatgctcctgatgtggagccgctggagcctacacttagcaacatcatcgagcagcgcagcctgaagtggatcttcgtcgggggcaagggtggtgtgggcaagaccacctgcaggtaaggaggctgcggcgggggccaggaggcgtgtaggatataccactgggcgaaggggaggccaaggaccggcttttccaccacgaccggggcatgggggctggcgggggtctttgggtttcactctctggaagttacctggagcaaatgagaaagacctcaatgcagccctagcaccctctgagttggaccatccgtgttggggctcaagtgccgaaccacagtgaactcagcgcccgggggacggggaagcacttagatatccccatcagctggaccgtacctgagtgaatccagagttgtgggtgagggcggcaccagaacaagcaatcctagtttggtgaaccttggtgttttatgcccaaggcgagagtgagggtggaaagcgagggagagagcacgtgatgagactgtcccaggcagctacaggcaggaggtgtccgttggacagattatcctggacaagcagactgaaccatcctgtgcttactagggaatgcaggagaccccttagcttattaaggaagggggcacggagtcaagctatgctggctggaccgctgggccatgccactgtgcccagcaaaaaagaagc

SEQ ID NO: 67111 - DNA, 525 bp, Homo sapiens
ggaaatggggctgagccacgactgaggttgaagatccaagttgaagtgcaaacacagggtgaggccaggctctgggtttaggagctaagatctttggggataagtgggacaaagcggtgggtggagtcagggaaatcagcgcgcctgggaccctgctctgtcaacaagaggcgaggccgcagcgctggcccactgtcggtcccgcaggctggccaaagaagacatgcagttccagcggctggacggcttggatggaccgatgggagaggcgcccggcgacttcctgcagcgcctcctgccggcgggcgcgggcatggtcgcgggaggcccgctgggccggcgcctgtcctttctactccgcaagaacagctgcgtgtcggaggcgtctactggggccagctgctcatgcgcggttgtccccgaaggcgcggccccggagtgcagctgcggggacccgctgctcgaccccggcctgccggagcccgaggccccgccccctgcgggtcccgaaccgcttaccctcat

SEQ ID NO: 67112 - DNA, 522 bp, Homo sapiens
gcctctaaaattgctgggattacaggcatgagccactgtgcccggcctgcctgaccatcttccttcatatgtctccagaaccaagtcacttctcaccacctgccccaccatccttcagccctacccatccatctttacctctcacctggattagtgcaccagctgcctctcctcttccacttttgctgcctacattttatttctctccatgcagccagggggagctttataaagcccaagccaggttgcatctttgctctgctaaaaccctgccttgactttccacagcacttaaaaatagaatccacacccccaccatggcctgccaggcccctgatgacctcatctcctacaaatcttgccctcttgctctgttctgccctctctgccattcctccatcacaccaagtttattcccaaatcacggcctttacatctgctattccctatgcctggaacaccgttcccccaaatttcacttggagattaacccatctgatgtaatcagccacctatgccctc

SEQ ID NO: 67113 - DNA, 820 bp, Homo sapiens
ggtggtatcgcgagtcacctgggccccacaggcaccacgtgaccaggccaattcacctgtgtcctcgccccacgtgaaccaaccacagaggggcggggcctcacctgtcctttccacgcagacttgccacgtgacgggggcgggtgctcgggccagagtccaacggtccagcaagtcgacgaccccgcacctcccagccccagcaccaagagactgaccgaaccagggccagggatcccgggcaagaggagcgggcgctcaccttcccctagccccgccccacgacctacccaggtgagcagagacccgcatagctcagctttgtccacgctcatggctcccgatcggattcaatccaggccacggagccccggcgccgcagcagcctccgggtccgccaccagcgagcgcccgcagccccgacctcccgctcggcctagagcgccgccccgccccgcccccctaggcgcaggccccgccccgcccccaagcccaggctccgcctcggaacgtaatctcctccctacgcccgctcttgcctccagccccgccatcttggatccgggcaccgttcgggcgcccgccctgccgctaggggtcagcctggcccagccttgtgcatccgagggtggtcccacctcccatcctcgccctggccctttttggggtgggaggtcctcaagatccttttgagacggaggtgctccaccctgttacacaagcgcattcacgtcttttccctgcaacttaagtaaattctttttttttttttttttttttttgagacggagtctcgctgtcgcccaggctggagtgcagt

SEQ ID NO: 67114 - DNA, 2551 bp, Homo sapiens
tgggcgtggtggcacgcgcctattcccagctactccagaggctgaggtgggaggatcgcttgagtccgggaggtcaacgctgcagtgagccgtggtcgcgccactgcactccagcctggacgtcaggggggagaccctgtttcaagaaataaataaatgaatggatcctccctgcattattgactccagcagtagataaggggacacgggtatggtcctaggtcgagaagaggtcagttagacacacatgtcctggctgatggataggcacccttgcccagcctggatccgtcttccacgatattccccccgcgccttgccctccccagatgcgcgcccggcatcacccccacctcagaacccaggatttggctgaagctgccgcgtcgcccgggcccaccagggggcgcggagaccgcagaacgcggcctagggggaagactgtgcgcccgccctgaaaccccggctggggcggtggagcgggggtcaatggaaagtgatgggaattatagttaacaataaattgcagtcaccatgtatggagtgcttactgtatgcagtccttgcgctaagcgatttaaatacatagactattgaatcctccccatgtctccagatggcaagtgctgttttaattccctgctttgccggcgagaaaacagaggttccgagtggaccgggttttgaggggaagggtgaagcccaggctcgcgccctgtgaccccagggtccctctgcaacccctccccggtagacgggcggggtaatgtgcactaattagaggttattagctgtacccagagggaggggcgggctctgcattgggggcgggcccagatcggaggggaggggcgctgctcccacccacccagaagatcctggcgccagagaccttgccccggagcagggtgggcaaagtgacagctgctccccgcgcgcatcgcacgaacgcagtcactcacccccagacacccgattacagcccactcatgcgcagccgtacgcacccgggggcctcggatgctcgtccatatccccacaacctcctcccgcgtggttttccagactccagcccctgggagcgggtggagaggatagtgggggaaggggacaagggccggcagcgctggcttccggactgggctgtcttccggcggtcgtgggaacagctgccgttggctccccgacctcgcattcaccagaggagagggtgctgccaatacagggaaacagggccaccccgttcccaggtagcaatgggaggtgagccaggaaccacagctgttacaagcatgggtggctggacatgctgagatcaccacattagggcgggggtcgcagggattttgatgtttaggggaaatctggaaatccaaatatttaggcaaattgacttaaattgtgctaatgttggcgtgatgttgtgggcgtcccagatgttcggggagccaggagtccccagacttaaggaaaatctgggtgtgctcaatttgggggaggagcataaccctccattttgcggcggcagggagtcccacatttggggaaaagcagtgagcttctatgtcggcggggaagacagcagcaatctctgttttgaaacacagggagccccgctgtgcggagatccaggcacctttaattcagcaagaggggctgaaaaaccctccacattttggaagaaggatccaaacccctgttttaggtaaagagagcccccaacgttttgggggatggtctgaaggccgccatttgtagggacacagagccctggtgtgcaggtctgggccagcagcccccagctggattggggagcccaccccctctactggtttccaggaacagctgggcccagcctaggttgtactgctgggaagcggctgactcaacccctccctgtggccacagctggaccccggcctgccccctccagcgttcacatctgggcagggatccagtcttcatcagggctgagaaggggaccctcagtcccacaactggagaacagtgcccctctgccactcccctggctgaccacagccactgggtggactccatgcatcatcaccatggaggactctggcaggccccctacagcccagatattgacatcctgccaggaactcctagccagtcccccctccctgtgtctgtgtgtgtctgagtccatgtgaaatgtgctaggtttttttgtgtttttgagagaaagggttttgctatgttgcccaggatggtctcgacctcctgacttcaagtaatcctcctgcctctgcctcctaaagtgctgggatttcaggcgtgagccacggcgcctggccaaatgtgctggtctttgtaggtgtgagatggaggatctgtgactgtgtgtacacgggcatgtgtcctgcatccattgtgtcataaggccttcgagtttgtgcaacaggctgtgcctgatttgatgggggggagggctggtttcggggactgggggaggggaaatttgtaacatccttgtcggtaacatccttgtccgtaacatccaggttggggccgggcttggtggctcgcg

SEQ ID NO: 67115 - DNA, 3793 bp, Homo sapiens
atgcaccaccatgcccagctcattaagaaaaaatatttttgtagagacaggggtcttgctatgttgcccaggctggtcttgaactactggcctcaagcgatcctctggccttggcctctcaaaattctgagattacaggcctgagccactgcgcccgtcctattttgctggatggggttgctttatcaggatgtatctgccacctacctatgtatgaatatggctctgtttgcgtccctatcacaaacgctatgtgactgacgtgcctgtgtgattgtctgcgtctccatccacgtgtgtccgtgttcgctgcgaggctggctggactagaatgggttggtgccaagatgtggcaggtgtatcctgcgtccgtgtgacactgtgggtcggggagtttgtttgtgactttgtgtgtagggggcgggaagtgggagtcaaagtcacagaggacagcaggctgcgcggacgcagtgatgtgcgcagagggcctcccgccccgccgttcccctccgggaggcgccctccccgcgttgcgggggcgcgtgcgtcgtgcgtgacgtgagacacgacgggggtcgctgcgtgcgtggaacccgacgcggtcgtgcgtgcaagcgcggggggtggaagggcgggagctctgcactggctgcgtgcgcgcgtgcgtgggcggtggcgggggctgggcgagcggaggcgcgcagggcaggaccagccccgccccggccgggaccttggggcgccggtgaaacccgggagggggcctccgttaaccccttcctgcccgatccgaaacttgtggcccctcgaccgagcgcccgggggcttccccagcgcctgacgggagggcagtccctgttgggggagggacctttcccatggagctgagaccccccccccagttgccatgggaaccagagcttcccgcgtagccaggcgcgtgtttcctttccccgcccagccatcctgcttttcctccagctgcctagtctactgacaatgcgcttcccgctcgtgatcccgggagaagggggctggggtcagcgtcgcccgggcgtgcgtgactcaggccagcccgggggtcccctggccgcagctggcctcgctcccgcttctccgcccccgtgactcacccctcccggctttccccgcgtgtgactcaggcccctggggagggggctgcggagtctgggacccctacagacagtggggccgagaaccaagttctggggacttcgctctccgcggggaaggcctcccccaccagcgagcatccgagggccagcgactccccttagcaagccagaggcgccccccccaactccgcctctgaattggtagaccccccacccccacccctgcaaacctccgggaacccagcccccaacccctcctcccagcccacaggaagttttggcagagcccgtcgcggcgatgaaacggttaaagccgttttcttattcatttcatccaggggcccattttgactcagagcaagccggcgcccccctcgagcctggcctcctgggggcctgggtgcatactccaccccacatgtaccatttttagagaggggaggatggcgcttggtgagctggctgggggtcttgggtagcatatagagctgggttcaaatcctgtctctgccctcattgctgcctggacctcagtttccccatctgaaaatgagggatcattatgtccagcttgttgggttgttgtggggattaggtgaataatagatgggaaactctgcatccagggttgagcacgggagccagaagagggctcctcctgtttctcaggcctgggtgtcagggtgcccagcagaagcgagtccttgccgggcaggccatgccccacccagacactctaaggccatggggttcatcttgtccaccccctgcccgaggcaggcacccaggaagtgagaggcggggcaggaatgaggcacaacctgttgggcccgtcacctccccgccccccaccctcattccagtgccctgagagggcccccccacgctgcagccccacccccgccgccctggacgcctgggtcctgacccgcgggtggcccgagggaggggacgtcggatggagactgtgtctcgggaacatcctgtggactgctggctggacagacggaggagggtcagcccctcccggggcagggcagacattgactgggggcagagtaaacatggcccagggtgaccagacagggggcgggcggggggctgtaggaatgtacacacagtcaccccgagagagccagtccagacacacaaacccctgtcaccttggccacagagagactgccagccagggacacacagacagggtcagacatacagctgggtaagatgatccagcaatgactgtcacacatggacacagtgacagaccagaccctcaagcaagagacacacaccgtcaaacacatgaacgcatccactggtcaaaaatacgcaggcaggccgtgtgcggcggggataaatcaacccagcacataagcatgatagacacaaacacacagagactgacattcaggtgagaggcacacagcaaggcagacacaatggcgtgtgacacacatggagacaaacacaataggctagaaacataggggcaagacagacacagagtgaactatatgtgagacaagcaggcaacatgtgcatgctgataggagagacagtcactttcagcaccagcaccccgagagccacacgagagatatgcagacacaggcatgcactatcagatcctgacacgcaagagaaggcaacacacacacaccccagatctccaactcagaagatagagacaagacaagagagacaaacctagggacagagatgatgtgttcacagtatggcagagagtccctggcaccctggcccaccactgttgcacacacatcagagatgctcccagggacaccaagccgaagccttagaggtacacaccatctcaccaggaacacacacatgtgggacctggcaacagattgggtagatctgggcagactgacacattcacagacatggtctggccagacagtcacacccagtgcagagaggcacagacaggccacagtgggacattcataaacacatcggcacagaaagaccatgacaaaacctgtttgcacacacacacatgcacacatacaaacggagatcagtaacaggcaacatacagatcagccacagaacacacacatggaaacaagccacagacctcacacacagagaccacacacacacaccaaacacaaaccagccacagacctctttttcacacacacacacacacaccagatcgtatacacacatacatacagaccagccacagacctctttttcacacacacacaaatgcacattacagatcgtatacacacagaccagccacagacctcttttacacacacacaaacagatcatatacacacatacagaccagccacagaccacacacacaaacacacatacacaccgacacaagttagccataggaactttgaaacaacctacacgtacatacatctagaccatgtgcaacccatcctatagagctcacacacacacagagtggaacagaactctacacagataagccctacatagacctttgcatccagggctgggcacagaagcgggcagagggctactcctgtctctcaggcctgggtgtcagggttggaccagcacacactctcacatgcaccctataggccagtcacacgcttgccccctggaccttgccaaggttctgtgggggcactgga

SEQ ID NO: 67116 - DNA, 7008 bp, Homo sapiens
caagactccatctcaaaaaacaaacaaacaaacaaacaaacaaaacaccaaaaaaagaggcccttcatgagacggcctgcagctggtactgcatacatgcttctctggttgtcattattcacaacacagtggctaatgctctgaagccagacagcttggattatatctcaactctagtgcttctagctgttggacaccagacaagttccttaatctcctgtggctcagtttctcatctgttacatggggatacaaataacatgcattttgctggattgttggaagcagtcgatgacttattttatgttaaccacttagaagagtgcctagcccacagtaagagccatgtaagtgttggctattaaaataataattattatttctcagcctatctatcttaagtgtttctgagtctcactgtctgcgtgacactaaccttgaacccatttgtctctctgggcatctctccctgccctgcgcccctgcccccatacacccactgttccttgccctcctcctgggatggactctgtctgggatggcctcacctctctctaggactccctctggcatggccagcctcagccctggccagggctgaattactgtggcctcctggcttttgggacctgcaagttagcttcccaaggtgctgccctctggcctgccctgccctgcccaaccccccaacgctgcccgctgcgcccccgcggggcccagccagatgtcagctgcagttattagcctgggcgggagacacaggcctggcagtgtgcctgccagactcacaggcctccggaatctcccttgagcctggggagggggaggggagccattcaagcaaggggaagaagggagggggcatttaggggtcacagggaccctccaaggacgggacgcccccagcttctgctgggaccttcctccagcaaggccactgcactgctggacttccccctgcccccacatagctcagtttctttttcgcctctttcgttttccttctctttcccacacttggtgagatctaggctgccccggaatggctgtttaacccctatcccttagcctctttctaccctaaagaagagagaggctctcttcatcctccagaagacagaggcctgggaagctgagagagagagagagagacaaagagagagagagagagacagagacagagacagagacactaggcttctcacctcttggtctagtgggttcacacactaactgctcggaagtcccaccttaagtctaactggaagcctgaccgtctgcacctcgccgcagcccttcccgggaaggggctctgggttccctcatattctccccttagattttcaggtcttctctgactcggggagggaagctctcagatgacagagctactctagggaaggaggggggctccctctaggtattctggatgatagtaggatgggacctgcagactaaaacgagagtggggcccctgactcacatgagtgagtggggggtgttggggacggagctccagatctcctggcagaagggaagggcaccccacccgagggaggaggcagccgccgttccagcccgcccaggcgccgggggcgcctcgaggcatcggcccgccctctccgcgccccgtcgggccgggggcgaagtccgacccaggcccgcgggcaggcggggacctgccgggctgggttgggccaggccgggcctggcaggacgcagccccaaagcggcggggtggggcggggccgggccaggcggccgtgggggccccgggggcggcggtcggggctggtcgggactagcagtctgggggcccaggcgcgccctgggacctggcagatagtcgggttccccgcttctggctcggggccccaggacagcgctggtcccacctcttcctgtgccctaatatgggcggcggggagagacttcgggggccggcccgcgctcagtcctgcccgcggactcccgcctgttgccatggcgaccaggccccgctcctcggctgcgtcccccgccgtcgggccaatggaacactccccaagccgcctgcctccgcggtcccctgcaggcaccgcgggcggaaccattgcttgaggggagaggatggtggctggaggctgccgcggctgggcgggctccaagcacccgggcctccgcgggggctcgcacgcccaggttcctcttccgaggcgcaggatgcggcgggacccagggcggggcgcacggtcccgtaggatccgagtgacggagacagggccgggctccttcccccggggctgttgccacacttcctgcctctgcgctctttccccagcctgtttctaaggaagggagtggggttgggcgaccgcgccccagccgtcgggctgggtccaggctctaggagccgacacggtgttgggcaaagcccagggtcaataggggagggttttaggatgggggacagagaatacagatgactaagaggttaccatcgagggggagcagcagtcgtggaagatccagcagtcctggtgcgcgggaccctcaaggccccctcctcacatgtcaactgagtaccctcttattgtcttctctgctccgaagatgtgtccggccccttctaactctctccttcatccgggctagcagatgaccccagtggtccccaatttctggcagacatgtctccatcttctacctggcatattttacctgcctcagtgtaccccaggccgcttactagctttctgcatatctagacttcccctaatgcctccttcccgcttacgggagagcctcagactctggactcagctcccatgagctcctggacccctactcatttcttgcaatttaatgggtcatgcagctccacccactcaccccttttgatctctcccctcctccgtcctgtgaaaattccagtcccgcatccttctgagcccgggacccccagtcaattcctgggtcaggtgtctccttaaccctcccgatttacagtgcttaaccctcatttctgctttttggggtctcccaatggattgtcagtcctcctacccctctcgtattctgggtacctcaggggtttcttcgcacatactgggaccctcaccccacttgctgcgtaccaggtcctggtatttgtcccagtggactccagggaaatcatcctcctccctgaaacccctcactcatgtgcctgggccccccagcacctccttccatgcgtaccccgaggtcctttgagcccctccccctgcagccccgccgagccacccggcccgtggccgctgtttacaaggacacgcgcttcctgacagtgacgcgagccgcctcctccccttccccacgctcgaggaggggggcgcgggggcccggctccggcgacggccaatcggagcgcacttccgtggctgactagcgcggtataaaggcgtgtggctcaggctgagcggctgggaccttgagagcggccaggccagcctcggagccagcagggagctgggagctgggggaaacgacgccaggaaagctatcgcgccagagagggcgacgggggctcgggaagcctgacagggcttttgcgcacagctgccggctggctgctacccgcccgcgccagcccccgagaacgcgcgaccaggcacccagtccggtcaccgcagcggagagctcgccgctcgctgcagcgaggcccggagcggccccgcagggaccctccccagaccgcctgggccgcccggatgtgcactaaaatggaacagcccttctaccacgacgactcatacacagctacgggatacggccgggcccctggtggcctctctctacacgactacaaactcctgaaaccgagcctggcggtcaacctggccgacccctaccggagtctcaaagcgcctggggctcgcggacccggcccagagggcggcggtggcggcagctacttttctggtcagggctcggacaccggcgcgtctctcaagctcgcctcttcggagctggaacgcctgattgtccccaacagcaacggcgtgatcacgacgacgcctacacccccgggacagtacttttacccccgcgggggtggcagcggtggaggtgcagggggcgcagggggcggcgtcaccgaggagcaggagggcttcgccgacggctttgtcaaagccctggacgatctgcacaagatgaaccacgtgacaccccccaacgtgtccctgggcgctaccggggggcccccggctgggcccgggggcgtctacgccggcccggagccacctcccgtttacaccaacctcagcagctactccccagcctctgcgtcctcgggaggcgccggggctgccgtcgggaccgggagctcgtacccgacgaccaccatcagctacctcccacacgcgccgcccttcgccggtggccacccggcgcagctgggcttgggccgcggcgcctccaccttcaaggaggaaccgcagaccgtgccggaggcgcgcagccgggacgccacgccgccggtgtcccccatcaacatggaagaccaagagcgcatcaaagtggagcgcaagcggctgcggaaccggctggcggccaccaagtgccggaagcggaagctggagcgcatcgcgcgcctggaggacaaggtgaagacgctcaaggccgagaacgcggggctgtcgagtaccgccggcctcctccgggagcaggtggcccagctcaaacagaaggtcatgacccacgtcagcaacggctgtcagctgctgcttggggtcaagggacacgccttctgaacgtcccctgcccctttacggacaccccctcgcttggacggctgggcacacgcctcccactggggtccagggagcaggcggtgggcacccaccctgggacctaggggcgccgcaaaccacactggactccggccctcctaccctgcgcccagtccttccacctcgacgtttacaagcccccccttccacttttttttgtatgttttttttctgctggaaacagactcgattcatattgaatataatatatttgtgtatttaacagggaggggaagagggggcgatcgcggcggagctggccccgccgcctggtactcaagcccgcggggacattgggaaggggacccccgccccctgccctcccctctctgcaccgtactgtggaaaagaaacacgcacttagtctctaaagagtttattttaagacgtgtttgtgtttgtgtgtgtttgttctttttattgaatctatttaagtaaaaaaaaaattggttctttattaatttctgttgtctttttttccaagctgggagggcggggggaaaaaaaaaagcactggtttgcccccagctcagtgctgttggtggctcggtcctgtatgtgtccccctcgtcggttcggcgcaggcatcttgtggtcccagcccaggagtcccacccttcccgcgtccccagatctccagggttggatggttggggcgcgggacgcggtccagggacccaggagctgaaggcagggtgctccggccgagacttggagtgcgcaggcgcgtccccgcccagccgcgcgcgccggggctttccccgctgacgcagcggaagcgctgcccatacaaggaccgattctgcccagtgacgcgaccgcggtctctgggcagattccgggaatcccctcccccgctctgccgggcagggccgcggcgccgggaagggggccgggattttcccgggcaggcggctgcccgggcacggaaagccccaggcctgggtccagagcgcccgcggtgggcgggcagcgctcctgggctccgggagccacccctgtgccaccttcaagacactggcgcctaggccccgccgcgcccacgccccctccgtctgacctgaccggggcggagggttgctgctgcctccgctgctttgccgacgccgtcccctctacccccaccccctccaggaagggcggcgcccgcctgccagtttcccctcacgggtgccaggccaggagcggggcgactgccaggtctggtcctgccggggcggctgctcgggccgctgggcgccgccaccgccctcgcgctgggctccctcccgcgcagctgggacacgtggaggtgggggtgggggtgctggtgctgctggcccgcctagagggagtctggccggcttcggggttggaagcccccagagcagtggagaaaaacaggtagagaaaccagacaggcagtagggtgagtggaacagacacttcatcaattcatttgtacaatacctagaacaactagaccctggagacacagcctggaccactccagacaagacaataaataaacaagcaaacatggttctttgggggtggtggtaagtgctagtaagaggaaaaaaacaaactaaaacaaacaaaaaaaaaaaacaaaaaaaaaaggtcaaggtggcaatgatggggcagggaggaaagatgctttgcagaatggagtgggaacatggacctttaatagggtgactttttcttttttatattttagagacgggtctttgtcctgttgctcaggttggagcgcagtggtgcaatcatagctaactgcagcctagaccttctgtgctcaagcaagccttccacttcaacttcccaactagctagagctacaggcatacaccactatgcctggctaattttgtttatttttgtagagatggggtctgctatgttgccctggctggtctggaactgctgggtcaaacagtcctcccgccttggcctttcaaagcactgggattccaggcgtgagccagtgctcttctcctgcagtgactttttttttttttttttagacagattcttgctctgtcacccagacttgagtgcagtggtgcgatcttggttcactgcaacctctgcctttcgggttcaagcgattttcctgcctcagcctcccaagtagctaggattataggtgcctgccaccacgccctgctaattttgtatctttagtagagactgggtatcagcacgttgg

SEQ ID NO: 67117 - DNA, 1447 bp, Homo sapiens
tgctgaacgcgatgatctcggtggggcacacaaaagtgaagtccagagggtagaaaaagaggaccacgtacttccctggggaggagggacacagaggagttagggcccagcttctctcatgcacggccccgcttctacctgggccccctccgggcggcgctcacctttgtagtccgacagcttcacctctttgaaggcgccatcaaccaccgctgtggccttgaagtcaggggctggctttccgatgcgcgcgttaccggaggccatgactgaaagctgagacccccgcccggtcagtgcgcccgggaagacactttgtcctcccaacccaaggtcgcgctgcgtgctgggccctatgactgagtcagcacggcggaggcgacagcactaaccctcaccctcccgggtacccggtctacgaggcccggaggctgccggagacccgctctcctgaccagagcacgagtgacccagccactgccaccagcaccccacgagcgagtcggccggagggcggtgtcgcaagcccccagcccagaaggagacagtgaggcccgcacgagcagggggcgggaagtcgggcgatcaggcctgcgctgcaaggctgtggcctcggtttcccccgcaaggacaaaggaggccactatagcggatggaaagcaaaggcggccagcactaaagtcaggatcgggccaaagcagcctgaagggggtcctcccgccaggtgcactccgggtgttcatacctgcgtgggcaaaggctagacgcacggacgatcacacgcgtggacccgcgttctcagcgccaagtgagccctgggccgcgaagccttttatgcccggcccgaaccaagacgtgcacggcgcgggggagggagcggacgagcggagcggtcgggtccactgcgcccgcaggtgcgggggagcgtgcggccgggtccatgcgcctgcgggcggcggggggagacgcgttgccttcggccgggaccactgcacctgcccgcgtgggtaatgcgcccgccgcagactccgcgcacgactccgcctgggagcgcgttgggggccgttggagtccagcatggcgcggaccccgggggcgctgctgctggcgcctctgctactcctgcagctggcgacccctgccctggtctaccaggactatcagtacttagggcagcagggcgaaggtgacagctgggagcagctgaggctgcagcatctaaagggtaacctcaggcggcggggatgacgatgcccaaaggctccccgttgccctacttctcctgctggctgcaaagggaccttcctcggcgggctgcaaatctccacccagctccgcactggaggcgtccccttgggctggttacttttctctaaggctcggtttactcttggatatattgaaatagatactgctttaaagcagctcccaggggaagagagggtgt

SEQ ID NO: 67118 - DNA, 1281 bp, Homo sapiens
gtctgacagtgcagatctccccgaccaccccatgcacgtcaggggttaccttggaaaaatgggacccgagtctctccccagcccccaatccaggcctcacccttcgtgtgcccacgcatggaagagtcctgagccttgctgggttgaggcggttggtcattgtagagcaggaaggcgagctgcgggcggataaacggaggcaacgtgaaattcctcccaggcagggcagccctagagtttcgcccctagttggcccggggcccccttcacctggctggtgttgctccggtacagcggctgcaggcttcggcccacggccccctccgggctgttgatgagtgccctgccgtcccgccagcctccggagctctcgtccagatacttgtactgcagccctctctgcgccgcctccccggaccctctaagagctggcagcttgtagaccacgaacctggaggtcggagaatgcacagaaataggagagagggaagagaaggcaccccagggttccccgaggaggtagccatcccggttgagtgaccgcagccggaccccggggcgatggtaggccccccgctgcgcactcaccagtctacaggctgcccggagtccccgtagcaggtcagggccccggcggggacgcacagcagcgctgccagcagcagcgggatcatagctgctatggggctgagatccaggaatctgtgtcgggactgcggggcgctgggttacatcagaggccaggactggcacctggcgcctttcacttccctaaacttgcctgggaaccggggcggggacatcacgagggtacagactcctcccccgagacgcgatgctgcgttttggagaggcaaaaggcaacgctgagtctgcccagaccacgcccacgacgggcccggcgctccagcgtctcctggagcctggccaccgttccttttcgtggtagctaatcccagcccacgctcttctgtctgacccaactcccgcccgggtttctggatcaggcacaagtttgtattttattttttattccagccctacaacctgggtccaactcttgggacctttgttcttcctctttttttttttttttttttttttttttttttgagacggagtttcactcttgtcgcccaggctggagtgcaatggcacgatctcggttcactgcaacctccgccttcctgattaaagcgattatcctgcctcagcctcccgagtagctgggattacaggcgcccgacaccacgcccggctaatttttgtagttttagtaga

SEQ ID NO: 67119 - DNA, 1212 bp, Homo sapiens
ggtttgctaagatcgcccacttggagctcgtcttccccacaaccagcacccaattagagaactcgagtctggcctcctgggttcaggaggacgcctagtgctcgcgccagaatttctttgtttaattcttgactccctccgcacacaccccctgcaactgaccaaccaggagtgggccgagccctttcctacggccaataagaggagaaacccagctggccaatcggtttcccgcactcgtcttccgcccctaccccgtccgcttcttaaaggggctagcctatctctgtctgggccccccgatttccacaggcaaggctaccttagcccttttaaaaggcagagctgcggagggggccggattctaggaggaaccaatgaaaagcctcactcggcctccgctcctcccacttcttgctgaggtcaaaggcctgcgtcagttgcactgtagcctcggcagtgaaccgggaggtactaccaggtaaggaaggtgcggtagccccagccgtgggtgagaggagctccgctctgacacccccgctcctgtaggtcgccgtcgttgctccgctcgctctgagagagcatggccctgagaggcgtctccgtgcggctgctgagccgcggacccggcctgcacgtccttcgcacgtgggtctcgtcggcggcgcagaccggtcagtgtggggtcgggagtgtggagggaaggagggaggaactgggggtttagggactttccggggtgactttcccgttctgtgcttgcagagaaaggcgggagaacacagagccaactggctaagtgtaaggacctctggtcgcaccgtgtgtctgctgcccctgttcagctgtctgtctgccgcaggtggactctgtcccagaatccgagagctgcccgagcggggtggcagggtcgtggccagggtcagaggcactaaggcagtgagtgcgctgtgcctgcggggccggagaaaagtcacctgatcagtctcgcttgcagctcgcactagccggggggcgacatgggtgttggggggtagggctgatgagggtccgagaagggagggcacagtgatcttgcggactggaccgaggcgaattccccttcccagcctcgcgtcccgagtttgactggcaggacccgctggtgctggaggagcagctgaccacagatgagatcctcatcagggacaccttccgcacctactgccagga

SEQ ID NO: 67120 - DNA, 1736 bp, Homo sapiens
cccagatcctggccccatggatctagccttctgggtggcccacgggcccctcagcatcctacgcctgtgactctgtcactgtccacttgcccaagtcagaaggctggacttcatctgtgcgccccctgccttgtcctgaatcccacgccttccccacctcccccaagcttccttcccatagccagacatcatgccctccagcttggggaagtgccagcttcttctttcatcccttcacctccagtcctgtccatgccaattcttcccaaaggtgatgtggatagcacactcatctgaccggctctagctcctgctatcgcttcccagttccctcatgaggtaaagacctaagaggctttgcaattacagctatgctggtctcccttgccgcctgccatcccccaagatcccggccactgatctctaaagtgctatcactttcctcaacagagaacagactcagccgtcacctgcaccaggccgctctccctgacccccaaggctgggtcagctgtcacagctgggtcccctgttttcccccatcactctggttcttgaagcaccttcctattacgtcgcaacctgcgtgagggcagcaaccgcgacttcctcgtccatcatcgtaccctctacccacgctgaccgtgcctcaataaacgtttattgcatgaggaacatccgtgcgtctgggccctcactcgtcccacttcccgcccgcacatcccggagtggacacatatacagctaccccaaactaggcctgagggaatttggcttggacgtagagcgcccgtggcaaggggactgtaggtgcaagggcaaggcggtccggcatcacgggcccggctcacctcgcccagcgcctgaaggctcttcacggcgcccaccaccgcctggtgctccatgcccagctcagccgccaactcggcgctgtccaggccgccatcagacgcctccagccgccggagcagcagttccgccacctgaccatccgccatgactccttccagtgtgctcagcgtgtccgggcccgggtgggcggggggagctgagccaccggaaccggaaccggagtgtgtaccgccatcttgaatgtgtctaactgtagaacagggctcaatgtgtcgtcatcttgagtgtggcgacggagccgcaaaaggtgcatgggactcagttcccacctccaccctggctccatcaatggcgtctggttgaccagaggggtaaaattgattatctcaaggtcagaagcaccgccctgttttgagttttatctagcctcacttcgagcgggctgtgtgaccttggacttccccgtctctgggttacagaaccctctgcccttctggtattctctcttgccctaggagaggcggtgggtggtgggctccagagatggtcattttggcgatgtcagctacttttaaaatttcaaaggaaggctgggtaggtaccgtccctttttatagagggaaaaggaattcacctagtaagtcaaggtggcacctaacctgtgtggactacctcgtatgtggtagtacttagcccagaactgagtacttcacgtgtagtatttcatttatccccaaaactttatgatgtagatactgatataaccgcattacacatgtgagaaaactgaggctcagagggtggtatgacttgcccaaggttctacagagagttggtggaaatgaagtcataaattataaaccttccagatcctcccacccctg

SEQ ID NO: 67121 - DNA, 1806 bp, Homo sapiens
ggcaggggtgggggagcagcagtggggtgctggttctcaaatgcaagataagagctggctaagaaagccttgcccagcccctccacctagagggaatgggagggagagaagctgagggcagggtcccggtcccgcgtggagacagctgcgctcccgcggtttctttaaacgcccagatgggcaacgacgcgcgcggacgagggcggggttgggttcaggtctggtcacatgacctggcctgaggtgctcgcggcccccaccccaccagtgggcgtcccccccacgcgtggtcgaccatcattggtcggtggtgaggccaatagaaatcggccatctgggaacccagcgttccgaggcgcagcctaacatagtgaaccgacgaaggtccaatggaaaaagacggccatgggcatagaccaatgacaaagtggcaggggcgggcccaagggctgggtcaggttggtttgagaggcgggtgggtataaaagtgcaaggcgggcggcggcgtccgtccgtactgcagagccgctgccggagggtcgttttaaagggcccgcgcgttgccgccccctcggcccgccatgctgctatccgtgccgctgctgctcggcctcctcggcctggccgtcgccgagcctgccgtctacttcaaggagcagtttctggacggaggtaacgcctggtcccgcctcgaggccgccccgacgacgcggccggcccccgatcctggatctgcgttgtcgcccgtaattaccgtttagaggtccaacacggtggcctcccgggactagagccgcgggcgatttctcttctgcgtccctggggagcgcggagggcgtagcggcctcccgcggcgggagttagggttagcccgaggatctctgaaggcacccgacgtgtcaaactagaggttggaatggggagtgtcggggatctcctttcctgtccccagcagcttgtggctctcggcagatgtttggtgtggggggggattagcacagccgctctgacctacccctctaatcccccacttagacgggtggacttcccgctggatcgaatccaaacacaagtcagattttggcaaattcgttctcagttccggcaagttctacggtgacgaggagaaagataaaggtaagagcctaggagtgggtgctcagatccgggaggacttcctggcagaagtccttgtctgtacacacacagccgggacagtccccttggaggaggacaggtggaggaagtgggggagtcttctctattctctaagtcgagggtcctcgcgagtcaaggcccaacggtgacctcactaccgtcccgtctcaggtttgcagacaagccaggatgcacgcttttatgctctgtcggccagtttcgagcctttcagcaacaaaggccagacgctggtggtgcagttcacggtgaaacatgagcagaacatcgactgtgggggcggctatgtgaagctgtttcctaatagtttggaccagacagacatgcacggagactcagaatacaacatcatgtttggtgagggcctgcttcctggtgctgatctctgtcccattagttagagggagacccagaccccattgactttcttaataatgattttttttggaaggggagctaaaagaataagtcccagcaacaatttattgcattatgatcgcagatctaggctgttaatttaatttgcgtgtttgtatatagttatttcccaatcttactaatgaggattttgagttctagagcactgattttttttttttctcctttaaacttaaggctccacccacagcc

SEQ ID NO: 67122 - DNA, 1870 bp, Homo sapiens
cctggccaacacggtgaaacccaatacaaaaaattatccgggcgtggtggggggtgcctgtaatcccagttactcgggaggctgaggcaggagaattgcatgaacccggaaggcggaagctgcagtgagccgagatcgcgccactgcactccagcctgggtgacagagactgtttgaaagaaaaaattctcatttggaagaggcaaaatgaggtttttacagaagaaatacaaatgtctgtaaccagtacaggtacataaaaactttgttaaaaattcatttgagcgtgagagtggggacaccagagtcactttgcagccccgtgacgtcaccgataacgggcatggcgtcactcaggagaccacgtgtgcgggccgagcaagaagccccgcccacagcgcggagtttagtctgcgcgtgcctcgctcgagaacgcgctcgtgcgcatgcccacaaaggccaaggagggagtgcgcaggtcacgtgcgccggtggtcagcgcgcgcattgcctgccccggaagtggtcggcgcgcggcgcggcgcgcctgggcgctaagatggcggcggcgtgagttgcatgttgtgtgaggatcccggggccgccgcgtcgctcgggccccgccatggccgtcaccatcacgctcaaaacgctgcagcagcagaccttcaagatccgcatggagcctgacgagacggtgcgggccgggccggagcccgggggcgggagcgacgggtttcgggggtggggtgggggcggggaggctagaatcccaacgggaggggcagggaggacggcgcgggtcggccctgcccagacccccgacctgcccgactttcctggaccccccgatggtctttggcccagcccccagccgatcgggcggcgctcctgcgccggtctccgggcgaggccccacccccggggcgctggccaggccccggctccaatgtcagcgctctcgcggggcgcgggagtcacaagctcggattcctgggcaggccaagctctccaagactgggctccacgttcccagctttgcaggcgtctccttgggacactggtggtcgaatctaggagtaatgaccaggagatactgagtagtgacgacaacaacgatgttaatgataataaacgggtctcagtctttataattttggtggtccgtgtttgttggccgtttactttttatcagtcaccgagtgttgtagtgttgttttaccgctctgcaaaacgggcttgtcattggggacctctgatcattttacagatgtggaaacctagggattgaggaactttgccacagtcacacacaagtaatggcagagctgggattcaaattcggttctgcctcgtgtgagcgtccacgatataaatattatgctgcctttttagtcaaaagtagaattaggacctaattcaaacatactgaatgtctattgggtacttggcgctttttgcatagtgagggagacattgaagtccactttttgtagaaaaggaaacacacattttttgatccgctcaagtgtttggctttgggcaagttaacctgcctacctgtctgtgcctccgttttctcaaatatcaaatgaaccggtcgcctgctggcttccgcctgtaatcccagcacttagggaggcagagggaagaggagcccttgagcctaggaattcgagatcatcctggcaacacagtgagaccccgttctctacaaaaaaaagaaacaaaaatcaataaataaaatgagaccaattaaacgtatttcataggaaacttaaaaggtatgacacatatacatttacagtagcactattggccaggcacggtggctcatgcctctaatcctgatgatttgggaggcagaggc

SEQ ID NO: 67123 - DNA, 1516 bp, Homo sapiens
cttgaagtaaggagtttgagaccagcctggccaacatggtggaaccccgtctctactaaaactacaaaaatttgccgggcgtggtggtgcacgcctgtaatcccagctacaccggaggctaaggcgggagaatcgcttgaaccggggaggcggaggttgcagtgagccaagatcttgcgactgcactccagcctgggcaacagagcgagactcttgtctccaaaaaacaaacaaacaaacaaacaaaacttgctgatgaatgactaaatggacgttattctgagtttgttttgcggccaggtgagcgtatacataaatctacaacatgcagatgctgcgacgtgaccccgaaggggtaggcacggtttggggcccagttcgcccacggggcacagagggcagccccgcgtctgcctgcacgcacgcacctctcccgacgcttctgctcttcggccagctgcttcacccgcagcgactcctgcatggtcgccaggctcgggtaccattcgcgttcttcggcctccagctcccgcagctgctccggcgacggccataacgaaccggggaccaccccggaggcggcgccgtaacgcgcgaactgcttagccgcgtagcgcggtcccagctgccaccgcggggtcaggaggtcctcggggtctggccaccggggtcccggcctgcggcgcgggggcggccgcgcccggtagccacgggaacccggggccagggtcgccgccacacctagtaggctgcgtgcctgtcgcacggacgccgccatcttggctgtgcggggtcctcacaggcccgccgggctgtccatgcccggtgcctgagcgcgaggcccggtgtgggccagggcagggcgaggggtgtccctgctgcctcagttcgggggagggcggcgaaggggatagtatgggttttatacgtttccaagtataactttaaattttagttaagcagttactgattaaagtcatttttaattttcactttttttcttctcctttctgcacactgacacttaaaaatacatatttttgtcgggcgcggtggctcacgcctgtaatctcagcactttgggaggccgaggcgggcggatcacctgaggtcgcgagttcgagaccagtcttttttttttttttttttcgagacagagtctcgctctgtcgcccaggctggagggtaacggcgtgatctcgggtcactgtaacctccgccttccgggaggagaggagaaaccccgtctctactaaaaatacaaaattagccgggcatggtggcgcatgcctgtagtcccagctccgcgggaggctgaggcaggagaatcgcttgaacccgggaggcggaggttggggtgggccgagatcgtgccattgcattccagcctgggtaacaagagcgaaactccgtctaaaaaattaataaataaaaataaatacatacatgcatacacacacacacacatatacatatatatatacgctcacctggctacaaatatatatttgtgtat

SEQ ID NO: 67124 - DNA, 536 bp, Homo sapiens
acggtgcatgtcagagcgtgggtcgtgggtgttttcccagactgctgtgtgtgtgtgcccgtgtgtaggggttgtgtgtctgtgccttgtgtgcactggtgtccgagtgtgctttgtgttcgaaggcggaacgtgtggccaggcgttctggacgtgacatgtgtggcggggtccgagtcccgctgcgtgtcagcgtgtgtctgcgctggaacgcgggccagcacgtgtcagggcggccgcgtcggtgtgcgcccccgcgcgcgcgtgtgcgtgtgttcgtgtgtgtgtgtgcatgtgtgtgcttgtgtgtgtgcgccggccgccgctcccccgccctgcccgcccctccccgcgcccctcctcccgcccgcgccgcccgcccgctccctctccccggagtgcgccgcttccaaactttgtctaaactttcactttcacagcgcggcggctgcggcggcggcggcggcgggcgagggtgaccggccgagcggcggcggcatggagtagacgcgcggcggcagcggcggcggcggcgg

SEQ ID NO: 67125 - DNA, 1194 bp, Homo sapiens
cccgagcccgagcgcggccgccgcctgccgggcctcccctcgccgcggccggccgccgcgctcccgcccgggcgcccagctatgtactccccgtactgcctcacccaggtaccggccgccgcccccgcgcgaccgggggaggggagcgggcgcgggaggccggccggcggcgcgggcggaggggacgcgcggcggccgggaagggggggccgagagcccgcgggccgccgaggggtgcaggctgtgccgcggggagcccaggcacgcgtgcgggcgtcaccgtgcgcgtgcgaccctggccaccgggcggactccttttgggggttccgggggtggccagctgcgtcgtggcgctgcccgtggagcgcaggcgggagtgcgtgtacgtgtgtgtgtgtgtgtgtgtgtgtgtgtgcgcgctcgactggggtgcgatgggcagcgggactccggctgacctgtgggctactgtagcgcgcacccgggcagcgtggtcgctggcagtgtttgcggggttgacagagtggcaagagggtggtcccgagggcgcagaggggacactgggtcccgcgacgcttcctggggagggcgcagcggttcccgagggtggcagtggccggcgtgcgtggcggcggcccttgcgtgcggccggggtgcctggggtgggccgagcggcccgggcgtctccccaaagtctttgtttaggcctcacatgggagcggggctaagaaaatggcggggctcccaaatttcggaggggcaggggaggggagaggggggcgggcgcgctgccagcggtggccgcgcctctccgaccccggacgtcgcagcctctgcccccccacccccaaactttcctcggcgcaaactttctggccccagcgacccgggctgctgcggagtggacccggcaggcctggggaatcccgtcccgtcgcctggaggcgggaggggcgggaggcagccgtggacacagccgacagtgctgcggccacaccgtcgggtcagcctcgggcacaacagcgccgaccttggcgcgttgctagagcgcgtcccgcctgcagcgaagttccctgcgcggcgcacggctgcggcaaaagcttcgaggatgcctgtcgggccacccaactctccctgggctgtggcctgaggctctaagagggcacagaagctgcccagagtcccacagtggcc

SEQ ID NO: 67126 - DNA, 1065 bp, Homo sapiens
tttttctgggtgtctgtgcgtcacggcaaagagtgtatccgtgtgtctcacacacgtgttggcctgtccgtgtcaacttgtgtccacatacgtgtcaacgcacgtgtctccagtgtcatcaccctcatatcactgtgcctcctgagcttgtccccgtgacaatcactgtgggtctcaccccacgggcgcctctcctgggcattcccttggcctccgagcaccatgtgagatgcctgctatggcggccgggcaagcggctgggagcgggctggctgctcagtcccttcccatgaggttgagcggccgcagtggccttgctgggggccccgcccgtgcccctggcctggcgtggacagaagcccgttgtgcggcagcgaggtgcgggcgtgtgttcgggccgcccacaggcctccctctgtctgcccggcgcacattgatcttggcttctgcctgtgtccgttctagcctggccagctgggtgtccggctgtctccgtgggcctgagcccactatccccgctgcccccacagccaggcaggccctgggccccacacccctgggccacccgccatccctccgaggctctgagggcgcggatttggaaactgaggtccccccttctttccccctttctctctctctctttcctccctctctcctcccctcctcccctcctcccgctccctctctccctctctctctcctcctgccaaacgcgtcttggctccgtctgaatatctctcctcctcgatttttggctccagctctgggcgcgttcactaaaggaagaagggctagctccccaacccccccttcctcaccacctcccccctcccgaggagcccctctgagggcgggagtggcctcgtgcaggggcctgggccccctgagtgggcttggccaggggggcacaggcctggcgggtgagggaacagggtggacagggcctggcagccagagggaggcaatgggcagggtgactgagctgcccggcggggcgggcgggcagggaggggtcgggggcacggagctggggtgtctggcttctggtggggctggcaggcc

SEQ ID NO: 67127 - DNA, 2498 bp, Homo sapiens
cgttggcatccctcgtcaccgctaatggagtgtgcgtggctgggtgtgggccgaaggaggaggctgagcttgctgggggctgggggagaagggagggacgtgtggggtgctggcctcccccttgtctgagagtgctccttcagcagccagacctgggggcatcacaaggtggcagtaccctgggcaccagatccctgccctggaagtactgctggcatggacactttctgagctctctttcttcttatttctattcatagcaccgcaggcccgtgtgtatgtggccggggaggaaaacttccactcgcccctgtgtgctccataggaagaaaaaaaaaaagaaagaaagaaatagaaacagaaaaagagagtgtgcaggcccgagagaaagactgaaaccaaaacacagagagaaggcgcagctgcttccccaaggccttctggggctcccgcccgccagcccgccgggagtcaggcctttatttatttatttttcaggcttaaaaaaaaatttcgagtcttccacaatcccagtcccccccaatgccccaccccacccccagatttgctgggtggctgctgccaaatggacccgagtgggagcctggaatgaaaaattcataactgctggactttgcttgttcattagacgtgaacttgtcgattgggcaaattgtttttggtctccaactgccgggggctctccccaccctccctgctcgcccggttccctcctccccttggacgcagccattggctgctcgtggatgtctctttgccaaataggtggatccttctctctctttctctctctctctctctctctctctctgtctctttctccccccacccctttttactggcttggcacaagcaaatggatggggattgagcctgaaaggagagagagagagggagtttgagagagagaaaaggagcaaaaaaaaaaaacaccccaaaaacccaaccagtgcgcacacacacgcgcacactcacacacacgccccatcccatccacgtcctccctcgatcctcgatctctccctcccccccttcttcctttcctccctccctcgctccctctctctcttttgcacgcgtctgccagcaacggtctgcagccggtcagaactcgtcctcttccccgggaatctgcgagctcccccttttcctccgatcaggcagctcgaagtttacacccctgtgccgctgccaaagccgaaagcctttttcttcagctgccgctttttccctcctgggttttgtttttgtttttgttttgcacgggggtggggtggggtgcgttgttggttgtggggagatggtgggaggctggttttgatttttaaattttgcatttttttctttttttttttttttaaactggaagaggatgcacaggggaagaaattgaaaaaaaaattttgttggcttttgtttacctggcgtgtgtggcagccggctcgctccctctctctgcttgctatccctgacctttctttctttttgctccttttcaaaaaaaatattaatttcccccttctgtgcaatggagcatggggggggggaggagggggaagggtttgagaatccacccaagcccggcccctattccccagaacaccaataataaccccctttaaaacatttaccttcctcccctgctcctcctcctcccccctccccccacccgcccccaactcacaactcttttgagtccagaatctcagaatcgggcgttgggctttgccgggtgcttcagatcaatggtaattatttaattttttccagttttatttttgtaaacagaaatcaattattatttaaacttcaaacaagcaaacaaccaaaaaaaaaaaaaaaaaccaaacaaaaccgagagagcccatccttctgtcacctgactgagtgggaaaaagggtgaaggggttgtgggaggctggggaaggggtcgcaagaagacccatgtagcttttaaccctaatgtggccgagacaagcaccttatttgtgctaacaagaagtgttttgttcattattactgtgattaacattagtattggtgtcgataacaaagctgaaatcacatatttaggatttaggtctgattaaaaaatgttggggtggatgttccaactggatcaggagaaaagaaaatgaaaacagcctggggagagggaagcctgatctgtttcctcactcgcttgctcgtggatgtcattttctgtcttcttgggggcggccaaaaatcgaccggtgtcggggaccagaggcggccccgcacgcccccgcgtgtgcgtccacgggcgtctgtgcagacggacactgtgccggggcgagctgacaggagttcacggctgcgatagaacatggagatgtcatgggcgcgacagagcctggcggggataccagcagcgtgtgtgtgtggacggcaacgttgtctgtgcgcgtgtgtgtgagtgagtgagggagagagagagagaataggtgtgtgtagag

SEQ ID NO: 67128 - DNA, 971 bp, Homo sapiens
aaccacccgtcgaacaccccctccctccctcccacaacttcaaaagaggaccaaaaaaaaaaaaaaaaaaaaaaaagagaaacacctgagagaccaaatagaggccttacaccctcacccatcctgtgccctggaggagaggacccaatcctggatcttccaccgggagcgcccgctctcaggagcgagctggcgcggccgcgcaggggagcgtgtgtctgtgtgtgatgtgccttcatgcgtcactctatttatgttgttcgcagcccaacggtagcggccagggcaaagtcccggggtcatttttgctaccgccgccgcctccagtggccagacctgtgccccttcctatgcctgattccaaatccaccagcactgccccagacggcgccgccttgactcctccatcaccttgtaagtggacgatgaaaccgaaaccacaacgcccagcgtccccggcccgtccaaacagtctccactgcaaaaagaaaagccttccccctccccaccaccaaagccccccaacccagagcaccatggacaagagcagagccgagccccccaaccacagcctccctcccgggcctcagtcgcaccagccagcaccccacgagccccctgcccgctgctcccagccggggcccctggcccaggcccctctggggggcgggagggagagcacagctggggcgcgcaggccaggggtgctggcgggggtgggagggggcggggaggcacagccatgccatcttcatgcctgattgctgtttttttttttttgttttttgtttttgttttttaatttttttgttgtttcgttgttccccccacaccaagaaaatcaaatgtaaccacaaggcgacgccaccaccatcccctttttgccttgcccctcacctccatccctgggcccttgggcctcaaagacgcagcaggccagcccgaccccttccccctcagtctcacatttg

SEQ ID NO: 67129 - DNA, 674 bp, Homo sapiens
ctggccccttcttgagtccttgtgcctctctctttctctctctttcttaattgtatgaaaacacaaagcacaggtcaggatcctctgagagaaaatcaacattgcaccacgtaggggtgggctatgggctgtatttattgtgaatctagtttgtgaggctgtggccccgagctggcggagggagggaagaggagggagtgacgggaggggaggaggtcagcgacctggggccgtagcggcaggcgaacggtgcctgctacccagctggaagccacaaggtggctggctccaggggcggcttttgttggaagttgagtgaagccctccccctgtcctcagcgtgcagccctagaggaccccagggctgaggggcagtggatcctgcgggagtctcccggggcgtggggagtaaggccccgggggtggggggccgggtgggccgggcgtgacgcgcggtcaaagtgcaatgatttttcagttcggttggctaaacagggtcagagctgagagcgaagcagaaggggctccctgtccggcccacgtgccctttccctcgacgacagtcgagggctcgggctctgtgggactgtgggagctagggtctgcggggcgcctgcccgggcgaggtcggaagctgcaggccagctgggcccgggccggagcgtgcccggcgg

SEQ ID NO: 67130 - DNA, 666 bp, Homo sapiens
ggcatgcaccacaatgccccgcgatcatccacagttttgcatactgttttgacatccctgtttgctcttggttccagagtccaggatgtcccagcaaggtgtgagactgttggcccctctgccctgtcttcctcagctaggccctggggaagcaggcctggcccctcactagtgggtccctgctggtgaatgaatgaatgaaggaatgaacaaaggaatgcaggctgggtcccaggcccgggatcctccacctttaggcccgctcccctcttaccccagcactgttcttgcagcctggtgagtgccctggctctgtcccgtcagggctggcagtctgggccagggtgtggtttccagcgtcaggccaggctctgctgtctcgcgagggtccggcctcaatgctccaggccccggcgttgggccgcgcctcctcgtgggcctcggaaggccaggatagccgaggtctccgcgtaggtcccccccagggaaagtgagcggctcccgggccggcccgccttctccccgcccccggcggcccggtttcctccctctcacccctggcggcgcagcggccggaggatgctggcccagtgcagataagggccaggctgcctggccgcgcctgataaggagcctggctgaccccggaggaaaccagcgggcggg

SEQ ID NO: 67131 - DNA, 2097 bp, Homo sapiens
taggctgtgatgcccagaacctaccgggcatctgcttggctcggctgtaccaggtgggccacgtcattgagctggacattccggcgtatgagatccacagcccgggtggaggcatcgtttgcaaccacagatctgagcccaggcacctctagggcaaatcgaatggaacgtaggcctgaagctgccaggccttccagcacatgcaggccttcctgttggagtaagcagaaaacctccctcacatctccacctccatcctcttctgggccccaaggagcccccaccacccacctcctatagctctccccctccaggagccctctgtctcccgctaaattccagggctgccagctcctatgctcaggccccacctcacagatctcccccacggccgctgtgcgaggttggtctcctgaggccaggttttcactctctttcagttcaaccttttcctcctcttgctctgacaagtccacgaccactttttgcgtgtccttctctcctggaaccttgactgcagccacccagaggcacaagtcagagaataacaaggtcccctctgagaaacctccccttaatctccaaaatatcgtccctgaaatccctgcggaaaggctgaaggagcagaacccagggcctgctatgtggctgaagcccctctggatttgggcggcagaagagcccaggcagggagataaacttgtgtgacccccgcccaccagaagcctggacctccactcactctggattcctttggccccaagctgaatgcgagcaaactcggtgatcacagcacatctggtgggagacagaggactagctcataccccgcccccgccatccacactgacccactagccgatgccaggctaacgtctgacccctgctcacgtcaggtcccgattgaattcctgcaccgggttataaaagacctcgttggcactgggaaaggcgattttggcagccccctcggtgactgtcgtctcctggacttcacgtggacgttcttctccgtagggcccggtgccgttctccatcgctgctgtattcggcagccctggagactgccactcgaaaaaccgggctctagagagcacccgggcggagcggaaagtgaggcttagccacagagacgatccttgcatgagacatccgctggcgcctccgcccgccaagcctggttcggggggcgggggagggcacagagagggtcagagagccgcattccgggcccggggatgtcctacatatctatgaggtagggactaggaaaacctgcggcctcggtaagctgatatcccctcgttttggggatgactggtccctgtggagccgatgccctcgtgcaggcccgccccgagtccgaatccctccccgcgctgcctagcccgtcctcacctgctctcgtagccacagaaaaccgaattagtcaaggtgcacgtttcccgaattaggacctgggcgccgccatgttggcacagtgggtgggcgaatcacatgatagtggttggccagtcaatgaggaaacgtacggtgggcggccgggatcaaaatgaaagccataaaggaagcgcgctgatcgtgctgttccgggggtgttaatcacagtggatcccctgggagaggacacgtccctagtcccatttcacagatgaggaagttgtggctcagaaaaggggcggtaagcggagaaacccaacacttattggtcctcttctgtgttctgggtgctatatacacattatttcagagcaccctgcaggaatgactcaggctctggagttggatttaccgggtttgaatctcagtcccatcacatgctctgggcaggttactcccgcggcttcacttttcttacctattaaatgagaatcgtggtttctcagatagagcaaagattaaatgacagattcctggaaagtgtgcaaagaaccactctaacattgtaagcgctcggtaaagttctaaccagtgtatgaaggcaggacagcgaagtggtcccggctacctgggttccagtctcagctcgccctgcgacttgttaactctgaacttaagttaccgcttttgcaaaatgggcagaacttttttttacca

SEQ ID NO: 67132 - DNA, 1907 bp, Homo sapiens
gtagcagttctcactaaaaaatgttactgtgtagtttaaacgagctaattcccataaagaatgtaacgcagtgcctgccacaataaacagcagtcattattgtttttgttttacaggaaactaaagttcggaaaggtagagcgacttgcccaaggtcgcgggactagaaggtggcggggccaggattcgaaccatcgagctgagccgacgtactggcgaggatcccccaggggcatagagaggagacggagccggttagaaggggcgcgctcggagctcggctggcctcgcctggagggcggggcccgagggcggtgcgcgggcggggccggggccgctcctccctggcctggctgcggcggcagcgcggcttgcgctcgctcggcgctcggctggggcggcctggcccacaatgaatggccgccgcggctgccgctgctgctgaggcggaggccgcggaggccgcggaggcggaggccgaggccccggcgcagcggggcgcgccccgggcccaggcccggccccagccgccgctgcggagcccgccgggaccccccggagcgcggccacggcgcaggtgaggcggcccgcctcaggcccggttccggcctcctccagccggggcggcccgagggctgagtggggagggcctgggtgctttctcggaccgaggaggagccgggcccgcagcctgcactgtgcccgggcaggcgagtgtgtggaggcccagctaccgcgggcggccttgagcgtccagcccgagcttcagggcttgggggcggcaggatcgtacctggaccgctcccccgtctcccagcgagggagggggccaggtcgggccggggcaggtaccggggatccggggaagttggagggtccgaggcggaaaagtgaggaggttctcgtggatgccggagggggagggggagggggaggaggagtcgggctccggccaggccgagtgggggaggagaggagagcggcgcggccggaggggggcggggaggggccgggcctgcaggtaccgcctgggcgctggaggaggtgggtgggtcaagttacaggcctgggggcggctgaggagaagcccaggaagtggggcacggcgggtgtgggcggagttacttcgtgtgggggcggataggagatcccagagatgttttccgggggtcacatgaggtcaggactcagatgtggggagggggaggctagatgtgggggcgatcaggtaaggtgagggactgctgtaggagttttgggagtcgagagagcagagccttttgggctaggctaggggggatgtgggggcaggtcaggaaaagctggtgtgaccagaaggtatatactaagatgcgccccccaccgcccccaactcaagtgttaaggggttccgtctttctcacacctcatccctgaagcctctagagtcctgaccctaccccttgggcaagcctctgccaactgttcaaaggcactggccagtgggtgtttgtgtgggcagctggagacagtctggaacacctagcttaggcatcttgtttatcacaaggtggcccttgcccacccccaccttatatatctacagggaggcagcccagcagacgttacctgggtattttaggatcctgcattctttctctaccttttgtggccagaagctggtggttcaagcctagtggatgggacctcacagcaaccatcgtatatattagtaccatggcctcccaggcaccaactccttgagcctgagttctgtgtgccatctccctgggggtgaagaattagagggaatgagcatgtaaaactctgttgatggtggtttggaggctcccgacggggtgaaggcagggcacagagaagagttaaggggatcaaatcaggcactcacaccctggcccagggatcta

SEQ ID NO: 67133 - DNA, 604 bp, Homo sapiens
gccttcttaataccaccgttatgacctcaattaaccttaattagctcccaaaggttttatctccagatacaggcacattggggctcagagtttcaatctgtgaatttggagggacatactttgtccatagcagagccctgagactgagcccagtcccctggaggtgaaaaccctttctggaagggccacactccccatccactactgcccttcctagatctcagctccagtgtcaccccttctgggcaaggtcaggcaccccagtgtgtagcacattgatctgtgtgaccaaggatgaatggccctgtctcctgctggactgtgagctccagaggcagggctactttgtcaccattgtggcctgcccaggcagggacctggcaaatatttattgagtagttgttgggaagtcatggaaaccgtgtgctgtgcccttgggtctcaccagaagatctgctcaggcccagggccaggactaggcactgtcctggccaggaaggtcccagctgccctgtggcctcctgcccttgtcccccacaccctcaggggtgctgatatgctgaattttaaggagagatgattctcatatggttttctgcccttg

SEQ ID NO: 67134 - DNA, 365 bp, Homo sapiens
catacccacaccaccttacctggctaatttttgtatttttggtagacagggttttgccacgttggccaagctggtctcgaactcctggcctcaagtgatccgcctgcctcagcctcccaaagtgctgagattacatgagtgagccactgcgcctgacctcatgtaatttcttgagtggtcatttagtcattatacaaacagtgattgaagggcatgtgcccagcactgcagactctgctgcacagtcagatgaccctgcctttctggcatttccatgccagtaccctgaagagataccatatatgtacctggtgcttgcaatagctggcactcagaggtagcacactgtgtcctagccactcttc

SEQ ID NO: 67135 - DNA, 7350 bp, Homo sapiens
gcagtgagccgagattgcaacactgtactccagcctgggcgacagagcgaggctctgtctcaaaaaaaaaaaaaaaaaagaaagaaagaaagaaaaaaaaacacactcaaaccttcccccactccccgcctgcaggacctttcctgacctggactgcctctcgcatccgctccacgaacacctttctctcctgcaggtccccggctgggagcttgaacttgcctgggttggcttccactatacgtgggctgagagtcaagggtcaaggccggagccagatatcatccccgtccctaggggtccagccctacccgaaggtgggctgccaccgcaatgggctctcccatgccaccctctgccacaaagccccaggatatcgatggtctcttccaggtcctcgaggtcccactcgatgctgcgcaggccattccgcagctcattggtcgtccagtccagctcctcgcgtccgaccgccgcgctttcctgcaggagctcgcaccagcgctggtacagcccgcgggccgtgttcaccgccttctgcacctcgctgcgggcaggggcacggcgggcgcggctgggggcaggcggtcctcccgcctgcctctgcccccgactgcaaacccaaacgcatgggggactccggagacccctatatacccctgcgtgcgcctcccactctgcaccccgacggccttgcccagcccgccgggcacgctggggccggcacccgggcactggctggcttgggtacagagcaccctccgccctcccccgtcgttgtcactcaccctcggactacaaaaaaggggtcttcgagagacatgtcagtcccttcccccccaggccgaacccccctcccggcctgggttcgcgggctggttccctcccaaccgaggagaacgcgccgccacccccgcccccgtcacgccaccatcgagagccggaccgccaggggagaaagagaagcctcggaggcccgacgtgcggacacttccgccctctcctcagccatcttggttgtgggcagaggcagcttccggtgcacatgcccccgccccttagccctctcgtgccgcaccgtagggggcggtgtcggagttctgtctgggcctattcgggtccgagttcggaatttcggttcaaggcccagttcctcggattgttcctgcgcaacttcagtttcccttccaggcacgggcaatgtaaataatgatagcctccctcatctctggcggctgggtattatggctggggaaggggctcattcgattcgttgaagcttttcatggactccctgagctggcacctgggagatcgtcccatcccagggtcccgagtgtcaggtttggctagggtctgggggagaggtggtcctcccttctccctgcgggggcgcggtgaggagcgggcctgctcctccggggagttctgccgcattctcccaatctctttcctgagaagtggcggagttgggggcacttcgaggtcgccttggggcgaggtggtcgtgagggggtcccagatatgccagcagcggggggaggtcacctttgagaaagtgcgtggaggtgggtttcttcagaagcgcggagtctttctgggtgcgagcctgggggtagcgggtggtggctttgaggatggtctccaggggggccctctgtgtgtggggtctccgtctgggtaggggccaggaatatcagcggagggactcagggtcgtccctatgtgtgacagtggcgctgtgtgttggggagcttcgggaaagcactttttttgagtgatagggggcctggtctcccctggagggtgggcgggttatctgagggagtcctcggagggtcgcccccttgcgcgtcagagttgctgcgtggggtctcagagatagcgcctgggctggggaaatcattgtggggtctccgtggtaaggttagcggggtggggacggcctgcgtcttcggcaggtcgtcgcagtctggcaccatcgttgaatggggacgagtttgggaagggtattttaggggggaataacttttgagttcccagcgtgcgggggaagggcgggacgggagggtgtcccaaggcctgagaagatcagtgtggggcaggggtcaggaataacctgggagggggccttgtatgggggaaataattgggaagaggagagatgggatgaagggggcctcagcgggtcgtctcctgtgtatgcagggtcgttctgcagcgtctctgggagatggcgtccctgggagccctcaggtcgcccctacccgctgcggggtgctttcctggcgtcacgccttcctggcccctggagggaaggaagtgaaactctcctcttcccccacccggctggaatgcgagtcaggaagcctggggctccagcctgctccggctgcccgggtcggggatggggaggggcgtggccggagcgcaaagccccgcccctccgcgccccccccccggaagccccgccgccggccgctaaggcgatcacgggccctgtcctaatatgggcaaccggaagcggcccgcgcgactgccctacgtcactccgtccaaatttagttgtggaagtcagcgggcgctggtggcgggaaggcgccgcgagccagtgcgggcggaaagggggcggggggcgcaccaccccttaaagggcccgcaccaggaatgaatggagccattcgaacaattctgcatcctatttttggaggaagtggaattagtatttcttggagagacggcgcgtagcggagggtagggcggagattttctatctgctctgtctctgcattgctgggtttccagctcccaacctaaccccgcctccccgaacgcggagacggaactcggcccccttgtttggggggcggcagccacgtgttcacggggactgtcgtgcgcgccgggttcgcagccgtgcgagctctgaacccacccgtggagctcctgtcgcgggaaactgcgggggaatggcttggtacgaatcacgggaacccgtagcccggggcgggtcaccgcctacaagcaagggctggcgtacgctagagaccgaagagctggaggccccagtggccccctttcacagcagtagcaaatattgtttgtttagtaaatattggcctagtgactctgccttggtttccccacttgaaggaagcagatagaacagtatcctccgaggagtggaggctggggatcggtgaattattgataaaaggagagctcttaacctagcctggcacgttgtaagcgctgttagcatgattattggtgcagaaaacactcattagacacacctggtaaatgctaagaacagtggccacaggggatgttcaggctggaaccagggtcttcccctgtgtgaagggaaacttgctgcccacgacccactggggcctccagacgggagcatgtgggtaggccgtgagctccacccccggcccccctcccttgggccaaggcgctgatgcatcggcggggctcagagaaaggagcccacccagaaagctcagcgtggagtcgggggacgctcctcctcgccagggttcccgtcccctttccctgctgggtaaatcgcattctgtctctttaaggagtgtttggccgcgacgagttggaaagcccggatgcgtccttcggttgggcggggtgtctcagtgacgtcactgggggtataaaagggcctgggtggcgggcgcctgggcagagcgtcctagcagtgtcactgcgtgggttggtttgtgtagagaggcgtgagcgagcccgttgtccggagtgcacctgctgcctgttctgtccctcccgggagcccccgccgctgtcgccgtcgagtcgccatggaagtgcagaaagaggcacagcgcatcatgaccctgtcggtgtggaagatgtatcactcccgcatgcagcgcggtggcctgcggctgcaccggagtctgcagctgtcgctggtcatgcgcagcgcccgggagctctacctctcggccaaggtggaggccctcgagcccgaggtgtcgttgccggccgccctcccctctgaccctcgcctgcacccgccccgagaagccgagtccacggccgagacagcgacccccgacggtgagcacccgtttccggagccaatggacacgcaggaggcgccgacagccgaggagacctccgcctgctgtgccccgcgccccgccaaagtcagccgcaaacgacgcagcagcagcctgagcgacggcggggacgctggactggtcccgagcaagaaagcccgtctggaagaaaaggaagaagaggagggagcgtcatccgaagtcgccgatcgcctgcagccccctccggcgcaagcggagggcgcctttcccaacctggcccgcgtcctgcagaggcgcttctccggcctcctgaactgcagccccgcggcccctccgacggcgccgcccgcgtgcgaggcaaagcccgcttgccgcccggcggacagcatgctcaacgtgctcgtgcgggccgtggtggccttctgaggaccccgagcggcgctgccggagcccagagcgcgcgtcgaaccgtcggcccgagggcgcagacctgaggcgaggccacccccctccatcctgggggaagcgcccgcgaaaaccgtggagagaagccgccgcccgggctgctgagaggcccggagagggactctgtccccggggagccatcgccttcagtgtgcagggacggcaccgaggagtctgagccgggggcgcgggcgccttccgcagagacctgcgcccacaggtgctgtcttagtggactgggacgtgaacctttcgctctccttctggactgggagaagggaggcttgggtgttgtgttttttgttttgtttgtttgtttgtttttaaagatctcctcagggtcggacttcattttgtactgtgggctgtgctggccctttcaaggtttttcaagagttggttttgcgtttccaacctcggagaattccaggcactccccttccccctccgctgacatacttgtataagcggtcatcgttgcgtcatggggcaggcgtggggagcttcctgtcgccttgcgtgggtgtggggcctgggaggaggtcctggggcgtgcacccgccctgggcagtggggaggagagtggcctgagttacttcacccccgcgtgctgctggttaatgtcccgcgtctctgcaccttcgggtgggagcggggactgatctactttcacattctcaagtttttctcatctgcattagaggtgcccagtaggttcccaggttccagcgtgcccctccctcagacacacggacacaatcagccgagaagttcctggtctgaatcacgagaatgtggaggggtggggggtgtcagtggaaaggcataaggctgagctgagaccagttgctggtgaaactgggccaatctggggaggggaacatccttgccagggagtttctgagggtctgctttgtttacctttcgtgcggtggattctttttaactccgtctacctggcgttttgttagaaatgtcagataggaaaataaaaaccatttgagtaaaaaagccggtgctgtctggttttctgctgtggtgggggaggggcggggttaaagcgtcaggggctggcagccgctcgctggggccccaagaaccggtctgaccggttaccacgtgggcgagagagggttgggcccccttttccttgcccgggcattccctaactggtggagccccgcctcccccagatttgggggttcccttgaaattgtcctacaactccgggacagggagatcggggctttctgagttgagacaatagtgctaaacacactgccccaagcggagctggggatcgattgcacgcactttgaagccttgaaaggtggtagatctcgcccccaccccctagaccaaactgaatcagctgtggccggggccctacagtatcaggtggagctgagcgggtgagctttgaagggctctttagtccccagttcccgtatcttcctcgaggaatcgttgtgtgtctcaggcagggacgtgcagcctcagtttcctcatctgtgaaatgggcctctaagcagcttctccacccggcattaggtttttaaaaatgcccattagagccctagttattttcttgggtcactccccagctctagaataaccaccccgaaacgagaaagccctttcaatataccccacgtaggtttaagagtggggttgtgggcgttgccccagggcgaagggagggggcctgtcgggaagacaaaggagtcgcaggtgcggggagtggtggcggcggcaggcgccgggaaagcgctcgccccgccccgccgacggctggctctgccgccgcaggcttcccatgaccccaggggaactgaccccgtggccacagggtagaaggaggggcaagccggcctcagaacgtctgctggtggaatctgggagctttggctcccctcccgcccaacccacaccccctttcctctcctgtgtggattgtgaaggagagcttctcaccgttctccagccaagctcgcccccacggctgcctgattccttcctgggaacacgtggggggacttttaaaaggcgccacctactccgagtcctgacccacccaactctcccaggggacgtgggggcactggagccccacaccgcaggcggtagctcaatgcacccgcgtcggagttcctcccccgcgagcgtggcaaggctcagggaagtcccgggcccctggggagggggccttgccgcgcatcctgtcgcaggaaccgccgggcccttccttccgcgggaagcggcttggccgacccccgcccccgcccgggcctcttgggggtttccggtgcccggccaccgtggggctggggactgaaagtgatgggactgaagatggggctggaacaaacacactacagacacatccccttaagacacacccatccccaagaccccactggacccatcagaaaaggcagcattgaaccttgtcacagcaaataacattggtgaggcctggactaattgattggacaatggctgtgaaaactaaaaaggtcacccatcctgtgaccagcaggttccagcagggaaccccaagcctgctgcaggagactccagaaaggtgtttgctgctggcttgtactaaattggcacaaactgcaaacagcacagcctacatgcccatcctcccagatgggtcctccccagaggataaaaggccggagccagacagaactacacacacaggccacacagataattcggtaccagaaacatgatgctgagtgacaaaggccagctgcagaagtcaggtaagaagcacatattctgggccgggcat

SEQ ID NO: 67136 - DNA, 2027 bp, Homo sapiens
caaaaattagccaggcgtggtggcgcgcacctgtagttccagctgctcggaagggtgagatgggagaatcgtttgaacccggggccggggggctgaggttgcagtgagctgagatagcgccaatgcactccagcctgggtgacagtgagactcagtctcaaaaaaaaaaaaatttttttttgttaatacttatcacaagtgcaattttacctttgtagaattaaaccgttgtttctgagttagtttcctcttgtagcctactgcctccaagtctagcagatggttaagcggtttttgtgaatgaatgatgcctttgcaaccttcgtttgagatctgtcctcttaacgtccactgtgtatatatgaggaaacaggcccacagagtttcgctctgcaagacagcaagtaaaggacagctctagtcgggtcctctatcccgaagcctcctccccactctgccctgccctgccgtgcaggacccaaaggaagggcgccccagttcagcctctgtagatctgggaaagggccgggccacaggtcgggaccaatccagaagcagcacccagaccggtttacccggttccaggaccttgggcgaagtccacccgcccgagggcagggacgacgcaggccacgccgcggcccagttgctagccaggcagggtggggatttgatcttgccaaggaaatgtgagcgggaggccgagcgttggaggtgggtaagtcgtcactatgcagggcggagccatcctgtgtctatcacgcccaagggcggtgcatgcaaattgactcccgcatttggcttttccccgggctccgtctccgcgcgctgcaacccgcgacttccaagaactccccgcgtagtcagctgcccgggccacgccccctttccggacccgccctgcccgccccagggaggcgggggcggagcttgcggcccagcgggaaggcggaggcgggggtcgcgcccaggtcccgggggcgtcagaggcaatgggaagtcgtggcttctgcaccgcccttgggggttcggctcccaatcagggaaaaagggccgagagaatgaaagagtaatgagacttgcgagtttgaggctcacactactctctttgggttgggggttgctgaagcctccacgtgtattcagggagccccgaacctcacacctctgtccaggggagctcagaacccgccgtgttctggaaagcctacaccttccccggttttttagtgtctaggggagcccacaaccctcacagccgtgtctagtagcgctcagatccacacacctgtgtttgggggagcccagatcttctctacctgtgtccagatgagttcagagccccgacgtttgtccaggaaagcccacctctgtccagaagcgctctgaccaggacctttcctgtttcctgaggctcagcctagggggtcatcccacccaggtctgtgttaaggggagcttgtgtctccccaaacatgtccaagtgagctgagctcaggagctgaggcctccccatatcgtgctccccgcctggccctttggtgaatccctttctcagaagaaaccctcaggggccctagccctgctgcccttccctgcactgtcttcgagcctcctggcccaattggcccctcccccagtacactgttgagtcttagttaagacataatcccagcattcactgtcccccatcccccagctctcccgcacctcggcggctggccgggcccccgggagtgccgtcatcccagccggctggccacccgactggcaccaattaatttcctcctcggcctgtccacccagggcctcggcctgtctggttgccagctgctcaccctcagccagcccgccccctcgggctcccagggaattgccaacagttctcctccttcctgcaacccccccacccccaatccaggccaccccacccagcacagttaatcagaaaaagctgacagttaggacctggaggagtgatctgaaatcagatggaggaggggtgggatgttaaactttcggaccca

SEQ ID NO: 67137 - DNA, 2010 bp, Homo sapiens
gtgatctgcccgcctcggcctcccaaagtgctgggattacaggtgtgagccaccacgcccggccggatttttcttcttttcttttcttttcggtggggaggaggagagtgtgaggacctttgtcctggttggtgaacttttgcttaaacccagcttctatctctggttctcagataaggaaccagctccttctgggagctgagagccgcaccccaggtctccttgccactcctgggctacctgttttctctttcctcatatccagggctgatcactcaccaggttccctcttagaatcatttgccacttcacttcattttcctctcttctcccctttctgcaggatgaacacttccccaggggtcaatctgtgcacgctcagtccaggggctgggtaaagacaaagttttttgtttgctgttgttcacttgtttatttaaatttatttattttgagatggagtctcgttctgtcacccaggctggagtgcaaggcgcgatctcggctcactgcaacctccgcctcccgggttcaagcaattctctgcctcagcctcctgaggagctgggattacaggtgtgcaccaccatgcccggctaatttttgtatttttagtagagatgtggtttcaccatcttggccaggctgatcttgaacttctgacttcgtgatccacctgtctcagcctcccaaagtgctgggattacaggcgtgagccactgcgccccaccctcacttgtttatttacttgttttgtaaacattatttactgagcatgatcaaactgctagactggagaggctgctgcaatctcctccctctgcccccgccatttcctggtacccatccttgctggtggtgtctgcaatcagcggggccctggctgagttcacgggaaaggaaatggctcattgcttcagcctttagaccggggggcagggagggcctgtcgggaggccgcctagtcaggggcgtgtcagaggccagaggggccggggcccagcagctggggcttggtaagctctggagcctgggctccaggccagctcgctgccaacctccacctgagaccaccccacccccaacccccttccttctctcccctgctgccgaggcgcgcccttccggagtgaaactttggtttctcacgacccggaaggcttgaagcaaacctgcaattactcactgcctggtctgtgcgggctgcagctctcagactcaggatgaggtggcggtaggtggggtggggctcttgggacccttttaccccttcgtgctgctggctgggggaggccactaaagtctgcgcgctgccttccacgcgttctccagacactttccaaatccctgcggacactaccttataaacagatactggaattttcaaagtactgtcatgctgtttgggaccagaaattccctcccatgagggttggatatgaagccagtttggagggggaagctgagggtgcatgcccctggatctaccaaagccttctcttcagtctgggaggttttttttctttttctttttcttttttgagacagagtctcactctgtcgcccaggctggagtgcagtggtgtgatctcagctcactacaacctccacctcccaggttcgaatgattctcctgcctcagcctcccgagtagctggacgacaggcgtgcgccaccacacctggctactttttgtatttttagtagagacagggtttcaccatgggtttcagagggtgcagtggctcacgcctgtaatctcaacactttgggaggtcgaggcaggtggatcacttgaggtcaggagttcgagaccagcctggacaacatggtgaaaccctgactctactagaaatacaaaaattagctggtggtggtggcatgcacctgtagccccagctactcaggaggctgactcaggataatcaggaacccgggaggaggaggtttcattgctccagactttgagactccatctgaaaaaaaaaaaaaaattaagccaggcaaagt

SEQ ID NO: 67138 - DNA, 620 bp, Homo sapiens
gcatgtgttttctcatcttgggcctggatcgagtccttatggtggaggtgatctgcgggttccagaatcttgggaagggattggtgagaccatagcatggcccattgcaccgtccctctacctggagtgaggggtgccagcctcccatttcctggtgggtgggcttgctggatggcagcctgaggtgggtggagtcaggctgccttgttctatttcctggttcccagggttgggtggtggcaatggtggccccggagccagagggcttggggtaccctgatcctgcctccggatttactgggtgggtgctagggtgtgtgctccaagaccgatggcccctgtgggcgtggaggagaaaccagagactcaagcagatctccctgcctgccttctgccctcatgtcccacttcaccttggctctaggccaggggctgccagaatggtgactcagagcgactgagaagaggagagaaacagaatggaggtccttatcatcctccaatctccgccatcccagcatccccataaaggtcaggacccttgaggccacatgtcaagaccatccacactgccctctcctgcttcctcctcctctacccgccctctttcagtgggattt

SEQ ID NO: 67139 - DNA, 1177 bp, Homo sapiens
tccgcccgcctcggcctcacaaaatactgagattgcaggtgtgagtcaccgtgcctggcctggacttttctttttaattgttaattattttttcttttaaatttttttttttgggatggagtttcacttttgttgtgcaggctggagtgcagtggtatgatcttggctcactgcaacctctacctcctgggttcaagcaattctcctgcctcagcttcccgagtagctgggactacaggctcctgccaccacactcagctaatttttgtatatttagtagaggcggggtttcaccatgttggccaggctgatctcaaactcccgacctcaaattatccacccacctcggcctcccaaagtgttgggattacaggcgggacccaccgtgcctggcctaattttttttttttttttttgccagtcttaactctgtcacacaggctggaatgcagtggtgtggtcatagctcactgcagtctccacctcccaggctcaagtgatcctcccgcctcagcctccgaagtagccgggactacaggcatgaggcaccatgcctagctaatttttgtaacgatggggtcttgccatgttgcccagggtggtcttgaacttctggcctcaggcgatctgcccccctcagcctccgaaagtgctaggattacaagcacgggccactgcacccagccactgacgggactttggattcatggtttggttccagaggtagcaggacctaactctccctggctggctggggcgggtaggggaaagagatggtttcaatatcttgaaccaccctgaactttggacctcctgaagttcaaggacctggagattgttgttctggatcacgatttaggagggggcggaggcgggggtggggtggacgtggcagaagttaactaggtctcaaccagcaggggcgtgtcctcacctcagggaaatggcaagtgtgactggatggaaaccagaaaccaaccggttatagattcaagtctcatcctttttacaattgtatgacattggacaagtaattgagcctttttgagcctttctgactctttattttcttttgagacggagtcttgctctgtcgcccagattggagtgccagggtgggatcagggctcactgcaacctccacctcctgggttcaagcaattctcctgtctcagcc

SEQ ID NO: 67140 - DNA, 893 bp, Homo sapiens
gagatctcggttcatttcaacctccacctcccaggttcaagcaatcctgctgcctcagcctcctgagtagctctgactacaggcacgcaccaccacgcccagtttgtatttttagtagagacagggtttcaccatgttggccaggatggtctcgatctctttctttttgttttttgagacggtatctcgctctgtggctcactgcaacctctgcccaggttgaagcaattctcccagtagctcaattactacaatggtggggattacaggaacccaccattatgcccggctaatttttgtatttttatagagactgcgtttcaccattttggccaggctggtagtgaactcctgacacctcaagtgatctgcccgcctcggcctcccaaagcggtgggattacaggtgtgagccaccgctcccagcctcgagttctagatttgttaatcagttacagttttctcacctttggctgtttgccagctggcctccaggtgacgctgtcgacctgcctcctcctccacttgtacagactgccacctcaggtcaaccaagggcctccaggccgtccctggagcctggagctcgggacaccccattgaacaaggcccgggacttaatcttgtgcagttttgaatctaatttgattgtccaattgattgattattatactgtggtctttgattggacaaggcggtccttgagactcaggaaacacattttggagaagaaggtgcctgggcacccttagaacatttttccaagctgggcattgtggcatgtgcctgtagtcccggctacttgggagtctgaggcaggaggatcccttgagtctacaagtttcaggccagcctgggtaatataacaataccctgacttaaaaaaaaaaaagt

SEQ ID NO: 67141 - DNA, 900 bp, Homo sapiens
agggtttcaccgtgttagccaggatggtctcgatctcctgacctcatgatccgcccgcctcggcctcctaaagtgctgagattataagcatgagccactgcgcccggcctatatgtatatatttttgagaggcagggtctcactctgtcacgcaggctggagtgcagtggtaccatcatagtgcattgcagccttgaactcctgtgtttaaacaatcctcccgcctcagcctcccgggtagctgggactacaggtgtgtgctaccatgccccgctaacttttaaaatttattttgtaggatgggctctcattatgttgcccaacctggtctccaactcctggcctcaagtgatcctcccacctcagcctcccaaagtgttggaattacaggtgtgagccactgcacctggcctcttacctaacttatttggtaatgaaacctgatctgattggacatgaagctctttatacttgttatttaccccatttgatgtaaatagttacacattttatggcagaaatattgtgtttgattatagggctgccttagacccagctgagggtgtcatgtcccacatgggaatctcaaaatattctcaactttgaaacacatctgcctgtaacgatttcaagtaaggaactgtggatgtgtattaatatccctcacatgacaaaggcggtggctgaaaggtcaatcaatttgcttatgactcattctgtggctctgggtggtgactcaaattctaaaaccggttttctttctacccaagatccaagctggttgcaactgagtcacttccaaggctcatcacttctccagtctctgagcccaagtggccaatgcctctagccacttcccccctgcccacctgctggttccaatgggaatgtgctggaaag

SEQ ID NO: 67142 - DNA, 411 bp, Homo sapiens
aagagccacgtgtggctaatgagcatttgaaatggggctcagtggctaaaattttcatttggttaaattttaatgaatgtacatttatatttaaatagcctcgtgtggctagtggctatcctgctgtaccatgcagctctgcagttgaattatagagtggattacataatcgagggcgtgcagtccgtcacatgatggtgcaaactagtcattccctgtgtgccctctaggtcaatgctccagcgggctctgtgccctcgaggcggacccttgaagactacaactcccagaatgctttgctccgtttccggtttggtttggctgaggggaagcgctggcagaagatgaggggagggaaagagattggaatattgcttccctgctccctccctggttctgacagtagtccct

SEQ ID NO: 67143 - DNA, 798 bp, Homo sapiens
ttttggctttcttcagccttctccaacccctcaaggcagcccaaaagtttggggctaaagaccccagggtgagctggacatggtagcccatgactgtaatcccagcattttaggaggctgaggtgggaggatcacttgagcccaggggttcaagaccagcctgggtaacatagggagaccttgtctctactaaaaataaaaatttttaaaaagtcaggcgtggtagcatgcacctgtagtcccagctactcaggggccgaggtggaagatcaaggctggagtgagctatgatcacaccactgcatttcaccctgtacaacagagtgagaccctgtctctaaaaaagaaaaaagacttcaggctgtaattgatcacagtgaacatcagcacatcgtatcacatgtcccctaataggctatactcaaaaggacgcatcatttctgtggaattcctgccagaaatgcataacctcataggcagagtagtcaaattcacagtgacaaaaaggtgctttccagggactgcgaggaagcagggaataggaaattattgctcaatgggtacagagtttcagcttggaaagatgcaaacatcctggagaaggatagcggtgctggttacacaacaatgtgatgtacttagtatcactgaactgttcacttacaaattgttaagatgggctggaggcgatggttcatgcctgtaatcccagtgctctaggaggccaagactttttgaggacaggagtttgagaccgccatgggcaaccccatctcccaatagcgagaccccatctcc

SEQ ID NO: 67144 - DNA, 577 bp, Homo sapiens
tggtggcaagtgcctgtaatcccagctactcggaaggctgaggcaggggaaccgcttgaacccaggaagcggaggttgcagtgagccgagatcgcaccattgcactccagcctgggtgacaggacgagactccatctcaaaaaaaaaaactaagctgttatataacagagacccaagaatgtagcagtttcaagaatatccaagaatgaagtcattttggactggggcccaccttaatgacatcatttaacttggtaatatctgcaaatagatttccaaatcaggtctcattcacagacactgagggataagactttgacatatctttgaggggacacaaggtaactcctaacagccatcacctcgagcactgtccccgttgcagggttgatgctgggatggaggaatgtccctgtttctactccatggaggagaaagagcacagagtagcccacacttggtgttagaaggcccgtacccagaaatgccatgcctcatcactgttcatttttcactggacggacggtgccctccatggctacacctggctacaatgaaggctgggacaagtaaccct

SEQ ID NO: 67145 - DNA, 1889 bp, Homo sapiens
acccgcctcggcctcccagagagctgggattacaggcgtgagccaccgcgccaggcctgattatatttttgacactaaaagtatcgtatgcaggaagacagctggcacacacggaaacttcatgcaaatagaatgaagtatgctctctaaaagacaaattagaagaaggtgccctatcctccaacttggagaacacagcctaggccggacttcagccccattctcatgccctcggccaggcacacttgttcagggcacaacctgcacaatcgtacacagtggccctgactatgtctgtatgcaactacaaaaacaataggccggacgcggtggttcacgcctgtaatcccagcactttgggaagccgaggtgggcagatcacaagatcaggagtcccagaacagcctggccaatatggtgaaaccccgtctctactaaaagtacaaaaattagccgggcatggtggcgggcccttgaagtcccagctactcgggaggctgaagcaggagaattgcttgaacccgggaggcagaggttgcagtgagccgagatcgcaccactgcactccagcctaggcgacagagcaagattcagtctcaaaaaaaaaagtgaagagaaaagaggatccggtatccaaatgtgttttatataaaatgaatcgttttcagtgcactgaggaagttttctatttaaagaaatcctgctgtgaactcttttgtgaagaatgctttcctaatggaattagtcaccactgagtcatttctgcaaacttcaggtttgcggttttgcctaagcaagatctggccggagaagtgagataaattatagatgtcgctaataaattacagattactcaaaggcaaaagaggaaagaaaaaaaaaaattgactcgtgtatatgaaccgaattgagtcaggggtctccaccggcgcttaatcatggccgagatcctcctgcttctgcctgtcctttggtagacacacgctacaagtcagcttctgtccatcgaggaagggaacgaactaacaacaaagaacaattaagagaaggttggccccgtgaaaacaagggaccattgaagagcgagtaaaggcttggccacgttctggccccgccccaccccggtcgccctgacaacagcgccggcgtctgggctgagcttcggactcgcagccagcctcccacaggccaccgcgcgcgctcacttgcgcatgcgcctcggagctggcttcaaccagcgaaggctgaacccgcttccagggtcctcgccgagctgggagttaggatccgagggggctaagagggataagaaaacttctctgggtgcccacgtggtactgagcgcccttgggagggctctggagaagaccatcgccttccagggtagctccctccctcaaaggtttgagatcatggtccagttctcgggtctcccagcctcagtttccccatttgtaggaaaggcgttcacagcctctatctcagaggaggctttgaggattcagagagctcagaagagggtaggctttgtggtgagcgctgggtaggacttcggggtgggagtggtgggctgaagagtccccgacaacagcccgaggaagtattattattgttcttattttacagggaaggaaactgaggtccagaaaagttatgactcgccccaaggggattgcctggcaggacgtgaaggggaagaggcccaccctggagtaaccctcactggagaatccagaggtgagatgagccttgtacctatctcagcagagggagtaggataatatttaaatattaagggtggggagaaggaatgaaggcaagaaataaaatgcccaaaatgccccaaacgccatccggaccataaaagtgatggcgatagtgttggactt

SEQ ID NO: 67146 - DNA, 1415 bp, Homo sapiens
cagcgcgcaggacagcacgcctgggagggcggtgccaggaggcgggcctcggattgggcctcacgtagtgggctggacagaggatggagcctcttggcgtaagcgcggttgggcggggcattcctggattggcccactccggcgtcgcagaacgcttggcgtatcgtccttcagccaatcagcgtggagctgctgcctcgccccgcctcacgccggcgtcctgggggcgcggagagggcgcccaggttcaccgcgctctcagcgcgcacttccgggcacggtcagggcgtgacgtcgggaggagggcaggtaagtgccggcgggcggaggagcggggagggccgggggtccggcagccgcctcaccctggcctcggagctgcccggcgcgcccttccgcgtcgggggacgcggagctgaggacccgatttagatgcccggagccggcccaggtcccagccaggaccaaagtccctgaggccccagctgagacctctgacccaagtgcccgggacccggtcccatcctagcccggatccatattatgcctgaagggtcctgggtttttgcatcgggaaaatgggaccaataagtccctatctcaccagattttataaaaatgattcttgtaaaaccgtgagcagcagaaatgactaaactgccaaacgtttaactcggcgtcaggcgctgccctgaatgccttaaccagccatttttacacataaggaaaatgaggcttagagagagaaaacaatttgccccaagtcaagcagataggaagcagcagggtggagctccgagcccaagccgtaagcccaggacaaacagggtcggtaattacttttgcaccaaggaccggagatatctacacgcccacccgatagccccgtctgccatttactggggtaacaaaaccatcttaagacacacacacaccctcgagctcctgtaaacggagtatttgctctttgcaggctcttcccgtgggttagttgattcacagcatccccagaaagtcagtcttgtcgtcgtcattcgccctttaccggtgacgaaatacaagcccagggaagcgcagtcactgaccaaggtcacccagctgatgaggagtggagctgggattcaagcccagggagccgtgtcccctaacgcctcaaggggcacttagctattttgttggcaaaagtatttttaggttggaagggaccttggaataatccaatctaaaggacacactttatagttggaggatacaagactaaggtgagggtagaacagtttatatccgggactttgcaccactgcctcaccacctcactacaccactcccactccatcagaagctcttccatcagcttctttctttctttttgttggagacagaatctcactcttgtcaccttggatggagtgcag

SEQ ID NO: 67147 - DNA, 1951 bp, Homo sapiens
gtcccataaatgctgccacttttgtggttccgaggaggcggctcactccgttcgggcttggcaggagtcgtggagtgggttcggccacgtggaatccgcgtcctgggaacccgtggaatccgcgtcctgggaacccgtggaatccgcctcctgggaacccgtggaatccgcctcctgggaacccgtggaatccgcctcctgggaacccgtggaatccgcctcctgggaacccgtggaatccgcctcctgggaacccgtggaatcgggttggatgcgcatgtgcgtgtctctttttccgggggaggctccgcccacggccccgccccgctcccaagtgcgcgcggacccctagctccctctgagttgcgctgggcttggctgctgcaccatgaccctggaggcgatccgctactcgcggggctccctgcagatcctagaccagctgctgctgcccaagcagagccgctacgaggcggtgggctcggtgcaccaggcctgggaggccatccgcgccatgaaggtgcagcggggcggcggggcggcggggcggcggggcggcggggcggcggggcggcggggcggcggggcggcggggcggcggggcggccgggttggaggtgggagtgcgcccgcgcctgcagcttccgacgcccaaatccctgccccgcaggtgcggggcgccccggccatagccctggtgggctgtctcagcctcgccgtggagctgcaggcgggcgccgggggaccgggactcgccgcgctcgtggccttcgtgcgcgacaagctgagcttcctcgtcaccgcccggcccaccgctgtcaacatggcccgcgccgcccgcgacctggctgatgttgcagcccgggaggccgaacgggagggcgctacggaagaggcggtccgggagaggtacggggatctggtaccaggcacggcgctgagcaggaattatattgactctttttaagtacagtgacccactatacagatggggaaactgaggcacggcgaccttaagtcccttgtccagggccccacagatggggagactgaggcacggcgaccttaagtcccttgtccagggccccacagatggggcccagagtctagcctgggcagcctggccctgaaacctaactccttaatcgtgcctcccctgaatacacgcagccccttatccgcccttggaggccctttttagtatctccgtgttctcttggtttctgcttttgaggaactttttttcctgtcctggtccccttcctgccatctttttccccccacttcctttctgctccagccctccctgcaatgtcactttaccccaccaagctcgagcctgccttacagcctttgcacgtgccattggtgcgggccaggtatccatagcgccctcctccaccattctatatgatccagctcacccgctgctctctgttgcctgattctgccggcttttccttcattttattatctcttcatcagctggctcactcaccccagtgtcaactccacaggagcagagatttttgtcttgtttactgctgggtcataccggaactgcttggtaaacatgtctttgcatgaatgaacggagtgacacttcggtggccctggccgaagggtccaggccccacagcaatgagaggctttgagcaggagggctccaggacagcagcgttaggcagagaggaggcgttggcctgggccccgggtcctggtggctggtgctgaaaactccttgtcaccccagagtgatctgctgcaccgaggacatgctggagaaagacctcagagacaaccgaagcattggggacctaggagcccgccacctcctggagcgggtggcccccagcggtggcaaggtgactgtgctgacccactgtaacactggtgctctggccaccgctggctatggtacagccctaggtgagagggcctcctcaggggg

SEQ ID NO: 67148 - DNA, 1258 bp, Homo sapiens
aacacataagctctcaataaacgttagcttatcattgtcaccgttttgttcgtaatgtttgaaaactccaactgtgatccactacactacccttgtgggatgctgtctctttaactctgtgccacgttgtatcccgtgagttcttgcgtttttccgccccgctgtatcccatggttccctgtgccttccggctacgactgctcacagtcccgcctcttccgctgcgtgccggaccatggcgcaggggcagcgcaagtttcaggcgcacaaacccgcaaagagtaagacggcagcggcagcctctgaaaagaatcggggcccaagaaaaggcggtaaggagcggcccggggacttgggggcgaggtggacccccggcttcccggcctcacgtgagcacatctttccccaggtcgtgttatcgctcccaagaaggcgcgcgtcgtgcagcagcaaaagctcaagaaggtgtgcgggggcgagagatggagcccggagggcggcgagtagcgaggggtggaacccggaggacggcgaggggggatgggtggagcccggggatcagtgaggggagagggtggatcctggggacgagctaggagcgaggggatagagccaggggccgcgttaggagcgaaggatggagcccggggcgcagagaggggtaagaggtggaagctggcgagggataggggctgggggacgtgctagggacgagagatgaaatctggaggccggcgagggaaggagcacagggatcggcaaagggcaagggatgaggcctggaggactcccagctctgtgggcctcccttttcttccttgtgcaaggggtgcaggaacaccacttaccacttcaaaagggcctcgtagaagcaagacctgcggcccaaaaagggttccaataacgtcagcctcttgctgttactgttttctttaattgaactcaggaagacagcgaggtgacatgggaagggaattgaaagcccagctttgtaaacctagaacagcagagggctcaaagaagtgtgagggtgcgttggttatcgtcatttttttttgagtcagggtctcactgttgcccaggctggagtgcagtggccccattatagctcactgcagcctcagcctcctggacttaggcaatctttccgtctcagcctctcgagtaggtagaattgcaggtgctcgccaatacgcggctaattttattttttttgtatttttggtagagacaggtttcactatgctgctcgggctgg

SEQ ID NO: 67149 - DNA, 3695 bp, Homo sapiens
cagatgggacaaactcctgcctcctgaggctcacagtggagagggagagattgaaattaagcaactaccaaaggtggatcacttgaggtcaggagttcaagaccagcctggccaacatggcaaaactccgtctctaccaaaaatacaaaaattagccgggcgtggtggtgggcgcctataatttcagctattcgggaggctgaggcaggagaatcacttgaccccgggaggcgcaggttgcagtgagccgagatcgcaccactgcaccccagcctggacgacaagagtgaaactccgtaaaaaaaaaaaaaaaaaaaaaaaaaaaaaccgccgaaacagataaataaatggtaatggtgagaagtatgaggaaggaaaaatgcagggtcctctgaggacattggcaaggagccgggacgggaacgggtgatggaagccatggccagcttccaggccagagacggtggcctacacaagctgagtcagaaaaaatgctcagaggtgctggggtttgattaagtgttagggtgaacctcatggaattgccattttaacaggccaaaaatggtaaaaaaaaattagcaatttcatatgacccaagatagtatctagggcatggaaaggaggggcggggtactatactagttttgaggctcaagggatgacctatgaaccccctaaccgagctttgtttctggagagggggtccgcggcccgcatgagctccctcagtgagcctgcgacccctccgcccccacaagaaccaaaacttgacccggtgcccagagaggttgagtgagtttctcgggtcgcacagctgggagggacgaggggctgagccactgccaagggatcccgctgctctgtctcgctcaccggccgggctatgttgattgtcccctcgcggcgcccggaagcgaccctcagtaaacaaagccgtgtgtgggcgcagccccagaagcctggggcgcgcagtccagcccaagagaggcgggggaggaatgttgtgaatgaaccccgggcccgccccgaaactccgcataaggcctgggccgcgggggtcctcccactctgattggcctctggcgccccgtgattgacagcgcccctcgctgtgcgctctggttgggtaaacaagaaaagactggcatcgcagtcatcgagtgagcagcgaggcttggacacgggtctggcggcgcagccaatggcgggggagggccgaggaggccgagggggggccaatagggacaggcggtgggggcgggacgacggcggagctaaagcggcggctgaagcagcttcattgttgtgaagagtcttaaaggggccgcatcaccctgccggcccggcgcgggtcgggggtgggtgcggtaggggtcccggggcggccgagcgcagaggacggacgggaaggagggcagggggcgcgggagccggcgaagcggagcgggcatcggaccgagccccccaaagaggccccgccccggccctggccccggccgggccggatggaaccccccgcggccaagcggagccggggctgccccgcgggacccgaggagcgcgatgccggggccggggccgcgcgtggccggggccggcccgaggcgctgctggacctcagcgccaagcgggtagccgagagctgggccttcgagcaggtgaccgcgggggaagggggcgggggcagggacgcacccccagcaccttccccacctgtcttctcctcccccacaatccccagactccagagctaacccaatcagagacaccccctgagattccacccccaggacccttaaccctgcctggaaacaccccctcatcctcctgtttctgtccttcaaacccagtaacccacccccatcccttctctgccatctctgcccctcagcgccccagatcccaaatcaggacacttccttcttctcctaccaaccccagatctctgagatctggcccccatggcccgcctacaaccctgggcacccctcttttcccgccttatcccccaacggtacccctcttttcccaccttatcccccaacggtacccctcttttcccaccttatcccccaacggtacccctcttttcctaccgcatctttattcgccaatcagggcaccccattcagtcttcaatcctctcttcggccccccgcttggggacaccctgtctccctccatcgtagcctctagagactcacactaccccattcctgctctccagatccctaccgtacaccccaagtaaataactcccccatctctccagattccagctcaagacaccccttttttccccattcattcctgccctcgagcctccagattccacctgttccttggggacccctctctactcctccagattcctctttcggggctgcccgtcttctcctggcttgccgcagggattactgaaatgccagggtccctcctcctccccacctcatccccctgacctatcctatctcttcccataggaaaacagcaggggcggagcctgggtggtggtccctggacaggtgcacctagaagctctcttctgtggcttctggtggcactgacaggatgtcccagagctggggccctttaagtcccctttttcagcttcagtgtgggcccccaaggaactggagacatggcccagacttgaacaggaagcacacacgggctctatcctctgtccagcttcagggggcgttctttcctgcccggcctctctggagttaggaagtcggcctggacggatgggtttgggccaagtgtggatgggcaggctctgattcatggactggaaaatccctccttagtcatttgccaactgtccctgaggcctgggctggtcattgcctctcccacttcccctagaaacccaggtggagtaggggctaaggagggccccttcattgcatgtgagacacacagaacaatctgaaaaccatctccgagcctcccacaaacctgccctggccaagccgagccctcagagttcttgacccacagaagctcatggaatcccctgcaaccctttggcagttgttcttgttcccactttgaggaaactggggcacagagaagttgagaaacttgcccaaggtcacccagccagggaatagcaagtccagattggaaggcaggctcagccagctcactgtattgcccagagcccacagcggtggccaggacaccccctcccctcctggggccccttcccagggatggggcatggaagggaaactgaggaacgacagagtctgtcttaggagttgaaacaactcacagctctgggaccctgaacaagtgaattcatcccactaagtctcagattctcccagctataaaacaggttcatgatttagtatcaatgtgccatcaagggtgttcaatcttttagcttccctaggccacactggaagaagaactgtcttgggccacatataaaatgcactaacactaacaatagctgatgagcttaaaaagaaaagaaaagaaaatctttgtatttatttatttatttatttatctgaaacgagtctcagtctgttgccaaggctggagtgcagtggcacgatctcggctcactgtagcctccacctcctgggttcaagcaattctcccgcctcagcctcctgagtagctgggactacaggtgtgagccgccatacccagctaatttttgtatatttagt

SEQ ID NO: 67150 - DNA, 1136 bp, Homo sapiens
gtgagccgagatcgccccactgcactccagcctgggcgacagagcgagactccgtgggtggggggcaggggggaagggcacctagctaggacgtttgatttaggacctggttggggccactgacccctgcccacccctgactgcagggtccttgagcccctaggaagggccaagatgggggtggggggcgccctggctccagacaccaatgttgggggtccttgtctccaaattgctgagcatgggaggctgtggcaggtgttggtgcagctggatggggaagacaccccgatcaaaagcgggaaccccgggtttagactcgacctcggtgggcggggctctggccaagagaagaaaaacggagtgggggtggtctgtgcgtggacactcgccaggggacgtggccagggcgtgtctgggatcttgcgccactgaagaggctcccagtcgtcaaatagagtgagggatgggatccaaaggacggcgagaaagcccgtggttgtctaaacgtccctggctccccgagaagcagtttcctcggggccttcctgccttttggatgaatggagatgctgtgtctgggtcactgccagagccggggcaggagaggacagaggcttcccggagcggcagggcccgtcgctagagggcggggcccgcagtcgggggcgggactttggcggcgctgtgcatggggattggcttttcgcaccgcccctccgctcgagtgggccaatcggagacggccccacctcctgccccgccgcgcgtattccagcaggtatgtgcgggcggacccgggactgccccgcgcgctccgtggcgccgcctcgaggtctgggacggtggaggtgggtggagagcccggagtgcaccccttgtggtccctgccgccttcggacctgggggaccctttactgtgcccctcaggtgtcacccacgaatgttcccatgttcctggggcgtcacgcaggtcccagccacatccaaatgtccccccttaagaactggggtttccttcatgtcacatccctcaaacccaagttcccctccagcattctcagataccaggcaccccaaatcttcccctgaggcctgagtaatcccgtaggtccaagttgcccccaaatgtcact

SEQ ID NO: 67151 - DNA, 2446 bp, Homo sapiens
caggacatcggcatgtgaacacatgtacccaggctggcccgggcagggcatgtgggcgagcggacagggtgtgtccaacatcacctcgcctctaagcctgggcacctgttgggtacagccctccagctggggcaggactgccagaggacaccccttatgccaggggtcccccagcccccagcctcaccctcatagaccaggagtcagaggctgccagctggggaaggttgggaagggggcaggtgacaaggagccagctgcacagccaaaacattcaagaagccactgggtctggggcctggctgggctgggctgggctgggctgggcaggaaggtcagttagggctaagggctttaggggcagccaaatctagtgctaaaatcagaaaacagtctggggctaagacagaggggtcggggttcagtctgggcccttttaacctcctccttcagccaaaaggcacggggaccccaagctgcacagggctggtccccaacctggctttccttcctatgcaaccttgaatgagcgcttttctccgaagggaaaggagacatccccccagctcccaccagcccctgcccaacaagagaccttccccctacccagcgggcgacacgtcaagaacttggaccggtatccacccccgcccccacccaaagaactctgagagacccccccaacccattcctcccgtccaaaggccaggtcggggggctaggagtggggtaggcatatgcatatccaagcccctcaacccaagccccatgtccgagccggacacaagccctcccaccctgacaactctctgcccaccttgacctgcccaagtcgcgcggggacccgccctccccaccgcattcccatgcgtcccctggggggtcggggtggaggggccactgggaagggaacagaggccgggccgcccttcccccgctccgtagggggcgccccgggactccgcggccgccgtcgccaccgtcagacgcactgtccccgatccccgacccaccccgggcggcggggcgctcaaggcgcgcggggcggcgccctcgccttctcgcaacgctcttggggacccgccgggcgcagccccactccgcccacgagccaggcgcggaaaagttgccggcgccgctgccgccgaggcgccgatcgctcccggcctccctcctgggtccctcctgacttccacttacccgcggggggaggggagccgggcgcgcactccgggctccggccgccgccccgggccgggccggccgaggctcaggcgggcgggctgcgggcccgagaccggccgggggcggccgccggccgcgctccaccccactcactggccggccagccgcggggccgaatcgcttttaaaaccttcccgtctcctccccccctccccgggccgggcagggggcgggcgcggggcggggcaggcgtcgccgtcatgtgcccccgagccggcccgcccccagtttctctgtcctgtcccccaactctgtcccgtcccccaactcaaggccaactttctccctccttgtcccgaaatcagcctgggccccatacccagcccaacttccccctctggaccctgaacttgagtcccagtcccgagttttaagcccaaggctctgtctgcgggggtagggtgggagcaaagggtctaaccccctatcccacctctggaacccctgttggtctaaggcctgcgcctgcccagggagaggcaacccaggaggccgtgagcccctgggaatagagattggtgaggggcggtttggcgggtgggctcggtcccagacccagggcacactgggcactgcagacccctcccggggaggggggcctgggtctgggtattgccctgggatgccaccaaacaggaacccccacttgctccagttccacagcgccttctccagccttaggaagttcctcctcttatcctacctaaccctctcctgctgccatagaaaagactttctggtcccaggccatgcagcccctgggtctgggtcccctccccctaggcttcccggcaccctcccccacccgctgggacctctgggaaactccccgggctcccggagtagctctgggagcaaggccctccctggatccctccctctttcccggtgtgcctgtctttcccgctccatcctccagcctccaccgggaggaacgcggctgcattgttcctcaggaggaggccctgcctcggggcctggcccagtgcccaggtgggtggccaggaacaaaactctgagatcgaggggcggggtgccctctgcaaccatgccagtctccttgggcatgtcccgctgccatctgccctctccaggactcgacaaaggccgatggacccctatccaccacccacgaccaccatcgtgtcacagtgggggtctggaacccgcaggacccttcccagacctgggtgggcattgc

SEQ ID NO: 67152 - DNA, 2156 bp, Homo sapiens
gcgccaggccctacaccccagctttctagctggatgtctttgggatggctttggggccaggcgattacacttcctaagcctcagttttgtcggctgaaaaatggggctgaaaatgcgcaatttgcagttgttaccaggctttgaggtgagacgtgtgatgtgctgatcgcaggtagaaagagggtaagtgatacaccaggtacacctggatcaagggaccctgacaggcccagccggcccacaggtcaccccagctcacatgcagggctgcctgctgggccccatggcaacgccacacacagagacatcaaacaggccctgccgaggaagtcccacgtcactgcggttagagtggctcctcccagcccagcccccggctggcggcagtgacccccatgccagtcagggcccctgcctcctgttgccctggcgaccagctgtgttatggactgagccgggatcccaccacatccctgccccctcaccagggcaccagccactccccacatccggagaaggacattacacggtggccccagctcaccgtgacaaactcaattgcctggtgtctggagcaccaggaaagactttgtctacctacataatggttcagaagggcagagaggtcccagggatctgtggggactcccagccaggtgcctgaaatccccggggaagggtcccagtattgctcaagggcactggtggggcaggtcagacaggaatagaccccaggcctggcccagcccccacctcaggaatgactcaccacccacccagctcccgatgacatcaaggcctggcctgccaccctgacctggccccaggccagaactgggggggcgcacccaagaagtgtcacatctggctgtccctgcctggctgggatctggtacgcagagggttaaggagagcccttctgggggtctcccccccatcccatcccccccactttcccggggatttcgggccccagcccctctgacgtcactgggggttgctatggcaactggccgaagttcccaaataaaattaccgcgggcgggttaagtttcctaggaggcagccgacgggtaaacaatggcggtggcaggcggggccggcgagaggccgtctccccctcttacccccgactctgctgggacctgggggtccctggggcgaggggcagggtccccctccctgcccaggatctgagagccctcgagccagcgaggggattggcgcccagatgagggacagcgaggccacgacccacatgagcgggggatggggacgaggggtctttggaggggaggctggggcggcggggaacaaagaggggaccggaggcctggggatccaccctccacacaccctcccccctaaccccgctcccggccggccgccagtccagctgtggctgttcccagctccctggctccccacatctggcgggccgcgcgctcacttcctgtcgccccggctgcctggagggaggtaaaaataacccgccccctccccctgccggcggcgcagacggcggatcctcccagcctggaggagggcgaggccgagcctcagccgggagaggaggccccctgaggccgcctcccgtccctcccagtgcctcgctgtcctggcaggaggggggcaagtaggggtgccacagagcctaggctgcgctgggggactggggaagcgcatcccatgagaaaggcccttagctgggtcaccaggaacccagggaaccatagtgtccaaccacccccaccaatcccgtgggggagggggttcaagttctgagagttgagggactgcagccaacatgcctgggttccaatcgagggtcacccacttcctaacctaacagtataaacaagttaccaaaaaaaaaaaaaagccccccccccgcacacacacgacaagagcaaaactgctccaggcctcagtttacctagctgtaaaatgggcatgatagcagtactcacttcaaagtgcatttgttgggttaggagtgtcaactcactctataatcccaaaactttgggaggctgtggcaggaggatcgcttgaacttaggagtttgagaccagcctaggcaacatagtgagacccccatctctacgaaaaagtgaataagtaaaatgaaaacacataaaaaagaaaaataaagt

SEQ ID NO: 67153 - DNA, 2380 bp, Homo sapiens
aagcgattctcctgcctcggtctcccaagtagctgggattagaggtgctggccatcacgctcggctaatttttgtatttttagtacagacggggtttcaccattttgcccaggctggtcttgaactcctgacatcaagtgatccacgggcttcggcttcctaaagtgctgggattataggcgtgagccgccgcgcccgacttcatggtgaacattacatgagttaatacacataggcccacacatgcatagaacaggcttagaacatagaacgtgctcattaagtgttagctagtttgggaggtcggcaggggtggggaggatgcaaaaaagccctcatcacagcgctcctgacagctcccgccaggccagctccccaaatcccttaggaaaatggcctcgacctctcagctgcaactctggcccagccgccatctcctgacctgaccgcccacttctggggagccccggtgggtctggattggagagagccaccctcagccctccccaccttcattggaccacagctgtctccttcaccatcacctccgtgcccaccaggattacaggcctgatctgaacccctaatctagggaagactacggagtcccaaaatccctcttagcgcgcaccccggcctgaggctcgaacccaggtccgcgctggagggcggtggcggttgccgagcaacgcgctgtttgttggcgcggggggcggggccggggccggcgcgcggtgactcaccgcggcgtgatgcggacgggcgcggcgcccagcagcctggccggcggcccgatctcggctggcctcggcgtccggaggggcccggcggcgggggcgccttagcccccaagtgggcgccggaggcccgtggggaagcggcggagcaggtcccgggctctcggactcggttcgaatcccagccctgcctcttactcttgactcttgatctgtgacttcaaggctccttgcctcagtttacccgtcagtaaaagaagcgacactggagggtgcagtaacccaccactggcatttaaagcagctgagatgatcacgcagtgacactgcggggcagcaagtttgggacacccagattctgcacgtgaatctcctgtgttaaactctgcaacctcacggagaatcaatttccgcatctgttacagggcagtagcaagaacaaacaccctgcctctcgggtggtttgagaatcccgtgaattcatagtgagacaatgcgtggcacatttcagtaccatgtctgctgccccacggagggacgggatgtaggaggttttctctgtggtccgagctcaggagggcaaggaggtgagggcaagactggaacccctagaagtgggtggcaagtcacaggtccagggcagggtggcatgaccatggctgcagaggcccctatcccgaagctggctcacagcacctgctgcgggcaggcagaaggggggcctgggggtgagtcaccgcccagcaatgaggcttgagtcacacagggcggggtcccccgttagcccccccagctgctcccacaaaggccctttgagaagagttccccaccccctactcccaccccctaggccctctctaggggtgggctgtggggccgaggccctgctgggctgcccccaggagcccggcctgggtctgggaggcgccagccagtttcagccatgtctgtgaaaagtcaccataggaagctgggtgtcccccggggagggggcttccaggctgcctgagtcactggaatggtggagggtcacacgcgcagggcccacgcacacagcgggcaaattgagtcagactgtctggtggggcgggcaggccaggacgcttcgagtcaggctgagaaggaaacctgggaagagacatggttcttccaagcctgtggcctctggcagagaaagagggtgcttgagggcacatatggtgggtttcaccacacctcctgcctaggcctcccctccttgcctgccccgaaacagtctcccccacctttctatccttcttaaacttggagtgagaaggacagcaagctggatgggattccagggaggcactctactagcggaagaattgagatttttttttttaattttattatttatttatttatatttatttacttttttttttgagactgagtctcaccctgtcacccaggctggagtgcagtagcacaatctcggctcactgcaacctctgcctcccaggttcaagcgattctcctgcttcagcctcccaagtagctgggactacgagcacacgccaccatgcccaactaatttttgtagttttagtagagatggggtttcaccatgttggccagggcagtctcgaactcctgacctcaggtgatccgcctgccttggc

SEQ ID NO: 67154 - DNA, 1793 bp, Homo sapiens
gcagcctcgacctcctgaactcagctgagcctcccacctcagcctcccaagtagctgggaccacaggtgagagcgaccacacccagctaatttttgtatttttttttttttttttgtagagacagggttatgctgtgttgcccaggcgggtctggaattcctgactcgaattcctgccctcaagagttccgcccaccttagcctcctaaagtgctgggattacaggcatgagcccctgggccctgacctgtttgtttattttttagagataggggtgtctccatgttgccctggctggcctcaaactcctgggtttaagggatcctcccgagtagctgggaatacaggcaaatatgtccacacccagctttaagataaaaaaaaattattattatttaatatttatttatttattgagatggagtctctgtcacccaggctggagtgcagtggcgcgatctcggctcactgcagcctccacctcccaggttaaagcgattctcctgcctcagcctctgaagtagctgagactacaggcgtgtgccaccatgcctggctaattttttgtattttttaagtagagacggggtttcgccatgttagctaggatggtctcgatctcctgacctggtgatccacctgcctcggcctcccaaagtgctgggattacaggcgtgagccaccacgcccagcccaggatcaaaattttttaagacaaggtctcaccactgccatctcaagctccggggctcaaaggatccttctacctcaacctccagagtagctggaactacaggtgagcaccaccacacctggctaatttatttatcttgtgggggtcggggcgtgagggtcttgctgtgttgcctagactggtctccaactcctggccttaagtgagcctcctgcctcagcctcccaagtagctaggactacaggcatgtgcaagcacacccagcttatttatacacatttattttattttattttattttatttttttttagagacagggtcttactatgtttcccaggctggtcttgaattcctggtctcaaccaatcctcctcctgcattggtctcccaaagtgctggtattacaggcatgagccacctcggctgaccactttgctttttctatttgttgactgagatggctataaagggactaacagactggtagcctatacagacagcatggataagctgggtaaagggatgattcacatcccaggactgtgggagatttcatcacactactcagaacggcctggaatgtgaaggtatgacttgttttatttctggaattttctttcttttttttttttctgagaccgagtctcgctctgtcacccaggctggagtgcagtggtgtgatctctgctcattgcaacctctgcctaccgtgttcaggccattcacctgcctcagcctcccgagtagctgggattacaggcgcgtgccaccacgcccggttaatttttgtatttttagtagaggcggggtttcaccatgttggccaggctggtctcgaactcctgacgtcaggtgatccgcctgcctcggccccccaaaatgctgggattaaaggcgtgagccacctcgcccagcctctggaattttccatttaatatttttggaccaaagttgaccaaggataactgaaaccgaggaaatcgaaactgcagataagggggacgactgtatacagtcaaatgtgtttagaatattcatagacttatgcaaccatcaccacaataaattttagaacattcctttttttttggagacag

SEQ ID NO: 67155 - DNA, 1433 bp, Homo sapiens
agcctgggcgatagagccagaccctgtttcagaagaaaaaaaaaaaaaggacagtaagcaaaattgttaatgggttgcatctgttaataaaagtttttgtctgagcagctgggaggatggagctgccatttccggagaccgggaagatggcgggagaccgtttgcagttgaggaaatgagctctgagcccagggcttcgttctggccctgaagtgtccctgcccagactctggtggggtgcggaggaaagcacccacatggcctaggctttgcctcctcggggctttctctcggtcgatgcctgagtgtgcaaactacacccacatctgagtatacaggggcacctccgaagacccccacggcctgacacatccacccagtgtccaatggccacagccttgggggacttcgggggctggagttccgggctgatggagttgagaagggctgcctggctcttacacccaccttgggtccccacggagacccccaaggggacaggaggtgaaatctcccagggagaggttcaggaagagctgctgctgtgtcgcagccctgggctccccctatgagtcagcactggcaggggccccaggaactggggaccgggggtgtgtaggggggagggcagttcccacgccctaaggcgtctggggcgctggggcttcccccaccgctcctcccatcctgtgctgggctctggggatcttcagaggagtctggggggtgagaagcccagggcggattggccactgggccaggatccaggaatcctctctcctggtctgacccagttcaggaatgcagaggccgcccgccccggcaaatgcgttgcagcaagaaggagagttagacgtagagaaacaccgagtgagttggacatttgtgtggacggcacttctagggggctttatttaagaaggggcccttccttctggggactctgcatttgagcagtggaggctccagcctggggtgtccaggcagagtcctcagctaccgtggagtgggaggtggcggggaggagggggaggagactgcgctgagagctgagatcagtcccgccggcctccacagctgggagggcgctggactctgctgccccctgctggtggctgcaggaaattcagcgagcaggacagctggccggtcctggagaagagacggggggaaaggcctcgcacagaaagaattccagctctgccttttttttttcttttttctttttttttgagacggagtctcgctctgtggcccaggctggagtgcagtggcacaatctcggctcactgcaacctccgcctcccgggttcaagtgattctcatgctttagcttcctgagtagctgggattataggcgcgtgccaccacgcccggctaatttttgtgtttttagtagagaagagatttcaccatgttggtcaggctggtct

SEQ ID NO: 67156 - DNA, 1501 bp, Homo sapiens
gctagaacccgggaggtggaggtcgcagtgagctgaggtcacgtcactgcactccagcctgggcgacagagtgagactccgtctcacaaaaaaaagaaagcatgaaagactgcctccaggagaagatagtgtttcctgtgaggtttgatgctgtctcactgggagacgctggaggccaaaaggacatagggaagatggtgtcctgcggccagcctttctgatgaacaacttttgggagtaacagatccggggaccccagagcacggcggccacgagagggcaccacagtcgcagaatcggaactcctgtgctttgtctcgggctctgggtcccagcggggccgcccggcggagccagagacgtcacggggtcgctgtctccggagcagcccctgggtggcgccagaggtccagcaggcccggaggccgagtccgtgggcaacttggggagcgttgagtcatcgcctgtgattaagcatttctctccctccccctccactaggtttcagaggtgccgggaagtctgagccttcgccctcctgctctccctccatgtccacctaggaggctgcctacacctgggcaagggcacccgggctcggctggatttccaggaagacccaccctatgacgactgcccccactcccagaccctccccccagcctgggattgagccctggggatgacccggggttggcaagggaagagctgaaatcgccctgtccttggggaccccaccctttgtgccatctgccgtttccctagtgctgggcatccagtcagccctcaataaatgcttatgaatggatcaacaacagacaagcctggtcttgggacaaggtgtagtgtgaaccttgctgggagtcctgtacctagatctccccttctccttctttgagtttcggcaccctggggtgctggggtgagctgctttgtgcagagaaacacaagtgggtgccttggggtagctgggggggttcatggcacctcaaagccagatcgacatcatgagaccctttctgtggacatttggtctttcagccaccccctgcactgacatgcaagatgggtggactcctcccatcccacccccagctccgtactggaggtgggggcttcatttgaggaagaaattgacacacaactagacagagcccccccccccgacatcctcatcactaaggaaggtgaatgtttatgtcaccatggatgccccagtgacaagccaggcagtttagagcaagggagggacatttagggggcagggaatgggaccatgtcctgggtgggcttgggcaggagcagaaggatggggctgttctggcagggcgggggggaaatgcatgtgggggaatccccacacccctgcctgcctcctccacctccagatcttgtcctgttggggcaacaggtggcagtgctcaggaagccagtgcgcccactgtgcagtccacattcctaccccgcccccgtcccacaaaccagccctgaggcctgtggt

SEQ ID NO: 67157 - DNA, 1328 bp, Homo sapiens
ccaccgagaagtgaggactccacaggccgagagcccacgtgaagccggagcccgtcggtgactgacagacgctctgaaccccacagatgtcgccgcccctcacacctgcgcgcgctctgcctctttcccgcgccccgcgaggtcccgccccgcgcatgagcgacgcaaacaccgccctcgcagcccgcgacagtcagcaccgccccagccaggcgcctgcgcgcccacgcactacctgccgggagttgtagtttcggctcggcagacccggcgagcccagtggccgcgctccggtgcggcggcgcccgaggcccgaggcggaagtgggacggccaagcagggaagcgagggctcgggatcgacggccgcggggcgccgacgaggagtgcaggactcaggaagggcgagtgcgcggcgacagagcccggggaaggaggcagggcaaggccgggcttgggggcaggtggtccgggcatccagccttgaagatgcacaagaggaaaggacccccgggacccccgggcagaggcgccgcggccgcccgccaggtgagtttgcgccccacggcccgacctggggatccctccccacccccgtcactcgctcagggaagggccccaccccccagggaagcccgatctccgccccacaggtaagccccggtccccgcctccccccaggtgaggctccaacaccacccaagtgtggcctactggccttggctccccagctcctggggccctgccccgggttcggggccacctgttgccacagctgctccagtcgaggaggggcagtcctcggacttgacacatcaaacccttgcatcagtcgggccatgtcagactctttttattccattgtacagatgaggactttgagactcagagacgtgaagacatctgcccaaggtcatagggattaacagcttggccagggctaagcacaaatccagggctgcagccataagcttatggcactgtggctggaccccttctcactctcccgacttctttgccccaggcaccagatagtttgatttttctcagttttgatggaaggagcccaggacatagcttggtgttcagatattagagtctggctgacctgaagttccctcctggcctctgtacatcggacacttgactttacagctctgagcctcagctttctcatctgtaaaatggagatctctataatcccagcacttcaggagatggaggcggaggcagaggtgggagagtcatttgaggccagagtttgagaccagcctgggcaaaagcaagacccccgtctcgacaaaaaaagactaactgggcatggtggca

SEQ ID NO: 67158 - DNA, 1150 bp, Homo sapiens
cacaggctcccgtcgccccgcccaagggcctggaccgcctgtggtctccatggaaacccgccagccacagggggcgtgacgccgttgagacagacagagatattcacctatcagatcaaagttatctgggcagggcgaacaaacgggacctccgagtggtacgtccttaaggcggggcgggaatacggcaacgggccgcgggggctgttactgtcgctaccaatcaagagtcgagatggctttgatggacaggcatagcgcgagtgcgggctttcgcccaaccggcgggccgctgtcccgaaaaaggaccaatgaggaggcggcaggggtggggcgaaggggccggttgctccggaagtggagggagggggtgaaaatggcgcccagctcgaaatcggagcggaacagcggggctgggagcggcggcggcggccccgggggagccggagggaagcgggcagcagggcggcggcgggagcacgtcctcaagcagctggagcgggtcaaggtgaggcctggagccggagtggggagcgcgccggagggtggggagtagggacgagggaggcggagggaggagggcgttcgcggggtgaggggttgggggcggggccccaggggagggggctcggatgcagggcctgggcggggcccgggggagatggcttggatggagggggctcagttgggggcctggatgcaggtggttgtgtcgggtgaccggcaaaggggctgggatggagggggttgggggcggggccccagggagggggctcggagggaggcgaccccagaggccgcagggagaatcaggaggaagggggcgatccaggcttttcaaagctctgctcccatggttgctccataatggaaccttcccgccccctttgcagagcccctgccgctggctttgggcttcctccgcctgatgttcctctccctgcccaagccccgaccacacatgagctgggagttccagtacctgggtgggcctccccattgaaagtgtgggagctccctggatagggctgagtcttcccccgcagagtgagagttaccgaagcaggctctgtctcctccatcagactggaaactcccagagctgggggatgatgtctctctcccccatcagtttgggagctctggaggg

SEQ ID NO: 67159 - DNA, 3119 bp, Homo sapiens
actgaaaattaatctccacctgtcctaactttcaaagagtccctgcctcctctaaaaagggccaggcctagaaaaagtacctggagaagttaggacccgccaacccccaccagaccaatctcaaactcttgggaaaaagcctgaaatgatccttttccttggaatgtattgactgatttaaaaggaaatggctgcagtttgcacaccgacactaagctcaaaagcaagacggagaataagccaactagacttggcctggctggctacttaaaaaaaaaattcctccccgagctggcaggatattgtcaccctaaaaagcagtggcaaagattctcctctcacaaacatggatagcttccccttccctctgaccgctcctgcccacgtggccctagaggctgggaccttgtcagtgacatgtgactcggttgacactcgtttgacacaaaaacatgtgtctggccaagagaagcgggtttaaaaaatctaagaaacttcctcaggcttcatttgctcccccattcccagtaggggagacctcgatgggcaggacccagaaacgttccatctccaggaacaaacccccgcaacctcaaaccaggaaacatcaggtctcaaacagcagcccagagaaaagcactcaggtttctgttcctctaaagcattccctcatggtcactcctccctaccatggactttgatttctgcaaaccagatcctccacgctaaagccaaatcgactcctagctcctccatgaaactttgcttcctctttgcttcctcccagagagaaggtggcaggtttaggagtgggctgcagtgttgaaatcaggactagctgacagttattttatcaaaccacattcagaaacggtagatacgaggaaaaggttcaaagataagccgtaagtaaaattcctggaaggaatgaggagtcccggtactgcaggaaaagggcgatgtcaatgattctccccattttacaggatggaaaactgaggcctcagatggacaggcacttgtccaagttctgagtcctgggacaactgcaaagctcttaaggaagaagggagtcgcttaaggatctggaaggcggaccgggtggtggctgcccaccctggttcccgaggtggaggttggggagacccagccggccccgcccataccttccctcctggtcccgcccacccaccttggccccgcctcgtacctccctcgctcccattggcccagcctccccaggcccgccccttcgcgctcccgacatataaaagccccccgccccggcctgccgacctccactcgccgcgggcctgcgagcgcccgcccctcgcgggggccgggccgcggggacgggggcgggtggtgtcgttccagccgggccccggccccctcccccacggtccagacagtcgccgccgccattttgaccgcccgccccttccccccggactgtgattacagagacacctactgccccggccccgccgcccaccccggcccggccagccaccccggggccgccctggttacctccgcttctccccacttctgtctgcggaaacgcttttcggaggtctcggagtcgatgttgggaaggggacgggacgtgctggggtccccgggccgggcctggggggtgggggtgggggtcggccgggcggttgttgttgttgactcgcgttgccgggttgcttggtcgccacgactaccgtggctatggcgcctccgtttccctcaccggggcaactgttgctacccaccctagttacgtcacgcgcgggggcggggcccggggtgattggcggcggccggagaagtgattggacggcgccaggccttgcagctaaactattagttccgatgcacgcttttcaacaccctctggacttcccggcgatctgatttatcagtatgaatgtccatcaaaagaaactgaaccctcaaaggcagccgggcccgtcactccggcagggaagcagctggttaagaataaaggggtaggactcgtgaggacgggattggtttgccgatgtaaaaccggcctcctggttcgactaaagggacgtcaatctaccaaaggtttgccgcgctctctggctggaggccgtgcgcatgctcggcacgcaaggccgattgggagttgtagtccgctcttgcgtacactttacatgtcttaccaaattaaaaaggcgagaaaggaagactccgctccagacttctctctcgctcggtgggccagtttctggcttcttgcgctgacgtcaggggaggaatgcagtgacgcagcgcagcccctctgtgacgacagcggcgaaggccggactcgggattcgatgacgtcactgggcgcgcgtcccccttccccactgcccatggccccgtcggggttgggtggaagcgggaggccgcggcggggttcgatcccagctcccacccgctggggtgacatcctcctccgcccaagccggccagacagcgcggccgccgcgccttctcccgcctcccggtcccctccagccggaaaaggtcaccgctgccggggtgaccgcggctatctctgccccgcaggcggtgcggccgccttgggaaaggtctctgcaaggcgggggacttcattcgcggcttcaaccgcggtagataagcaaaggtcagccccgacccagcccagggagcttggtccgcccaggagagctcaccacaacccccgccacacacacacacctcccacacatacgctcctctgtgcctcagtttcctcaagggactgtctgggtgctgcaggacgagaagagacagaaacagggcccggactagggtgaacatcttgggagcaaaaactcagtcatcaagataaataatcttctaattcaatatttgttaaatatccaaattaatgggaaaaaataaatctatgatgaacaaaacatcacaattttaaataaagacaggatccgccaacacagggattaaggtgagatgcgttatgcaagctcagggtcagatcttgtgtttaaaataaatttattattattattttttgagacggagtctcactctgtcgctgaggctggagtgcagtggcgcaatctcggctcactgcaagctccgcctcccag

SEQ ID NO: 67160 - DNA, 1100 bp, Homo sapiens
agctctgggcacattcgaatcttcccaaactccaataataaaaattcgaagactttggcagagagtgtgtgtgtgtgtgtatggttgttgggcgtaggacaggtttcggggatgcgcggtacgcggtaccacccctcggaggcccccacccccagacgcccaggccgcctccccactccccctcaagcagccccagccggggactttccgtcgcggggaaggggcggggaccctgagcgaaaggtgcggaggcggcctgccggggtggttcggcttcccgttgccgcctcgggcgctgtacccagagctcgaagaggagcagcgcggccgcgcggacccggcaaggctgggccggactcggggctcccgagggacgccatgcggggaggcaggggcgcccctttctggctgtggccgctgcccaagctggcgctgctgcctctgttgtgggtgcttttccagcggacgcgtccccagggtgagtgctggagggagctcgtgtcccgggcgctgccgctgcgctccccgcgaaggcgccagtgctccaggataagccacgcgtatgcagagcgaacggtagaggtgcaggcgccactcggctcctcccggggcagggacccggcgacactggggaatgggcggcagcgaggtcgaaccggagccccggggcggggtgggggagctctctgggtggttaacaggatgtggcgagcacagggaaagggggggtttgcacggagcccgggcaggggtgcctagcgcctcccttcctgctgctcatttccctaagcccccccaccttgcaattgtcagaagtccaagttctggggtgtgcaggcggaagggggggattcgaccccctttcctgagaccctctgactccctctccaggcagcgccgggccactgcagtgctacggagttggacccttgggcgacttgaactgctcgtgggagcctcttggggacctgggagccccctccgagttacacctccagagccaaaagtagtgagtacagggaggtgacgtggggaaacaggctttggaggtggccgctcaggccccaggctgctttggttgaaaggttccaggagtcaag

SEQ ID NO: 67161 - DNA, 1600 bp, Homo sapiens
cgtgagccaccgtgcccggccacgaagtcatgctttgcaagatatcccaaaggaagcccagattctgtgcttataggtttgcccctgggggagggctgaagtcccgtggtctcctgtaccacccccaagatgtaatctccctgcctcttccttgctgggggggatcgggttcccattgctaagcaaccaggtttgtagttggtgaataatgcaatggaggacctagaagggtgaggaaccgaattggggtccctagtgtggggggaagccccttttccaaaactctttccaaacctctgaagccccctctacccttttaaccttaaaaaactctcacccctcagctatgaaaagacttcacacaccccattccatcttgcttatctctaactaactctggaagaacaacgtaggcggcctgggcttctggccacccgcaagagttggtggccatttcatgaaggaggtcatccttgcaatgttgccattgtctttctcaggctgggagcttttaacttctgttggatctcaagccttttctcccaccttggacactgactttaggggcaaaacgtggaacccagtgaccctgaccttccccactccctgcaccacagcagtagccccaccccctggctggactttgggttctcagccctggcagcggaaaatccccgaagaggaaggggcagggggagcctatatctctctcccaccccttgactctttaaggaagggtgacactgatgagcctatggggttggctagccaacccctccactccccgggtccccttaggagagaccactggagctctcggctcccagacaaggccagcatcccccatgagcccctcccaaggccctgcccaccagcccccctgaccccccagacacttacatgggtgtggccagagaccacacctggctctgcagggccatctctgcccagaagttcactttctggtctccgagttctggacccaccacccgcttgcctgaaggtgccccggaggctgtgacttggctgcctggagtgggggggggctgcgggcgggcaccgggagagcaggtccagcgggtttgggccagggaggcggtaggcacaccagagaggggggctgggggctggagggcagttctggggaggtactatcagctgtcctgataaattattcaccagcctctggcctctttgttgcactcagctgcctcccggaaaacactttcacacacgcgtggtcaagcgtgggggtgagagtactgagtcggtgactccccctgccaccagagaatggcatttctacttggcaccccaatcatcttgagtctgactgcctgccaagactcacccacaggagagcaccattgcatagcacacaggctggagactgttttatttttttagagatgggggtctcactctgttgcccaggctaaaatgtagtagtgcgatcatagctcactgcagtttcagactccggggcgcaaacaatcctccctcctcggcttctcaaagtgctgggattacaggcatgagccaccacatctggcagataacattttttaaaattattttttaagaacaggcacagtggtgc

SEQ ID NO: 67162 - DNA, 4069 bp, Homo sapiens
tttatttatttatttatttatttattttgagacagagttttgctcttgctgcctaggctagagtgcagtggcgcgatcttggctcactgtaacctccacctcccaggttcaagtgattctcccacctcagcttcccgagtagctgggattacaggcgcccaccaccaggcctggctaattttttttttgtatttttagtagagacggggtttggccatgctggccaggctggtttcgaactgctgacctcaggtgatcctcccgcctcggcctctcaaagtgctggcatcacgggcatgagcctccatgcccggccggtaactgtatttttccttctgggcaccccagaatggtggggttgggggcaggttctgggaagagtctgcttccattagggggaaagtggaaaacgtccctaggggagggtggcccgcgcaagggcatcgatcctgcccttgaaccgcatgatccggccccagctgctctttccccctaccctggacgcctcctgtttcctgtctgggcctccccaggcgcccgggcccaaggtgaccgcctttcaactgcaaccgctaagctgcgcccacggcgcactgtgtccgtctctccctcctccctcaatccgggagtgcccttggcagcggacacctcccggatttttccgggaggagaggggaagccgcttctcggcttggcgtgggggcagtggtgcgcggctgggaacctcgctgagcccaagcattggtagggagaccccagcggccagtaaggcggctcctggcgccccctcgggccggagctgtgcgctgcaaggctggatcggagggagggcccaggggcctgaggagtcgctgcctgccggctggcacgaccaagcgggactgcccgggtcccgaaaatacggcttcgggggacacctcaccaagcggctagtggttcagaaccccagtccgacgcgctgctgggcccagtctccgggacgatgacggggacatggctctgaaaaagtgccagggtgcgctcagtagaacccagcacccagaatggccccccagagagcggggccgggtctagggaagccctcttccaagaagtcccgtgccctgaggtgactgggcgcgctagttgatgaaactgagtgccccaccgaggcgcccctgtcccgagggcggggccagggcggggcgggagtcctcctggcaggtgccgggggcggtgcccggccctgcccccgggggccgttcctggaggccagaggcgggtcagagaagccgccggtgcgggcgacgccttggaacccacggccgccactgccgccacaggtgcctcacagtgccctctgtcctcgctctgggaatcaaaaccccggttgggaactgaggcttccgaactgcttccaaccctggacacgaaggcccccaccggccggagaacgaaaccctggggtcgtctgaagaggagggccaggagtccccagggccagacagcgaagccccagagctgctgcggagctgaacaccgaggtccccaagccctccgcaaaggacgtggagatcctggagcaagagagcgaagtcctcgagccatcagtcgagcaggacgcagagagccccgggctgtccacagctgcgggctttgagagtcctgagccaggcagagacgaccctgggccgtccgaagcgcaaagggcggaggtccaggggcagcatccccctccaggccctaagacctcctcctccaggtcaggctcggaagccccccacctgcgttttccgccgtgccccgaggctccccagcgtcccccggaggagcggttcatggagacgcccatcgagcgcgaaatccgccgcagctgcgaacgcgaggagagcctgcgccggagccggggcctgagcccgggccgcgcaggccgtgaactcgtcgagctgcgcgtgcggccggtgctcaacctgccgggtcctggccccgcgctcccgcgcgccctggagcgggcgcgggcgggcgcgcagatgcagcgggacatcgagcgggaggcccaccggcaggcggcgctggcgcgccccgcggtccccgagccgcgcgcccggtcgccgccgcagccgctgggcgaactcaagcgcttcttcgaggccgcggcggggagcggctcctcggcgggggcgggggacggcgcgggcccgcagaggctgccagagcctgggggacggccgcgctcggccgtgcagggcgggtgccgggtgctgggcagcgccccgccgcctttcactccgtcactgctggagcaggaggtgcgcgccgtgcgcgagcgcgagcaggaactgcagcgccagcggcgcagcgtctatggcaccgcggagttcaaggagcctacgccgagcctcaccggtaagccgcgggcgtagcaacgccgggacccccagggttccagccgcccccaccgattgcccaacttcagtggcccctcctgtggccctccgattctcggggtctctccctccaagctcccagaccccctctcaattttgtctcttgcctaccccttctggagctccattactcgctgtgatccacccctccaccgggagtgatggactctctgatccacaccacccaggctgcgcgggggtgggggcattccagatgtcttcctttttgtcgggttccagggaaccctgactgggttctggcactcctgggtcctccctctgaattttcgggctcctgcttctccattctgggttcacctccctcctccctcgggttcctgggtgcctggagttgaatggaggctttcatggggaggcggagggtgaacgcctgtgtgtgtttaaggggtgcggccggcctttcatcctggctgccgccagctggtgagctgagcgccccttcccccgcagcgagcaggggcgacggaaagttggtggtgatctggcccccccgcagaaaggtctcggagaacggcctggagcaggtgggagcccccttacccgtgtgcctctagcgcttgtcggtccccccacccctccggtgccaggacgcttggtggggaaaagtgcatcctccctggagggccactctggtcagaactcagtctgggacgcatccccggggtgaagaggagacggtggtcttgaggcccaaaccgccaccccgagcctggatgcagtgcgcaggtccctgaggccggccttccttctggtcctctgtccccaggaggagcgcaaaccttgaggtttgaaaaggctgggacccccggccggaagtaacgtacgcgtcagaggaacagggcggggggcgtctagcattaggcctggagaagggtcggctctctgcattggggaagatgaaatcgacttgcctttgtgaaattgaccagccccctctataaaacttacagtcccccattgggaaactgaccaccacccacaactccgccagtgaaactgcccagcccttctctgcctaattgcaaactgaactaccctctcccttgactgttaagagggccggagttaccgcctcgattgccccactccccccacccccaataaagcctcttctttcagggcactgcagcctgtttttttctgggtcctcttcgtctggggtggggcgggagcacggcgggccgagggaggcccgagaaaaccccaagaggtgcgggccggaatgcgggaatgcgcccttaccgccctgctctggggctgcccgcctcccccggcacggccagacacggcctggcccaggtcctaccgccccctggcggcccgggcgcaaaatgtggcgcgcttaccgagttcacaccctctcgtttccaggcttcctcgtcaacatttattggtgccaacgatgtgccctgcgctgggcactggctagacagtggtgataagaggctgttcctaccctgggaacgtaaacaatagctactaaaaaaaagaggtggtgagggttcaggcttctcaacattattagttcctaatgatcaccgttcttcttgacctcatgggtcctcactatgagacgtgctcattcgtggtgttgggtcaagagtttctgctttccaaaagca

SEQ ID NO: 67163 - DNA, 2639 bp, Homo sapiens
ataaaataggggcatcgtcgctgcctgtactcccagctgcttaggaggccgaagtgggaggatcacttgaacccaggagttagagtttgcagaagttggaggttccaggattgcgccattgcactccagcctgggtgacagagcaagacccttccctccccccgaaaaacatcttagagccacaggaaaactcacagggactccctcaaagcggtatcagggagcatcaggatttccttgatgtcattcagaccacagctgtggactaaaaaacatccttgatgcagtcagaaattgtcaccagaaatacccatggaagagcaatagtggccgggcgcggtggctcacgcctgtaatcccagcactttgggaggcagaggcgagcggatcacctgaggtcaggagttggagaccagcctggccaacatggcgaaaccccgtctctactagaaatacaaaaactagctgggcctggtggcatcagcctgtaatcccagctactcgtggggctgaggcaagaaaatcacttgagcctgggaagcggaggttgcagtgagccgagatcatgccattgtactccagcctgggcgacaagagcgaaactagtgttggcattcaatattgattcatttcacctctaacgtccttttttatcatctggaaatggaggctaatactatgtgccagggactggaaggtaggtgctttgctcaaaatcataaataagggcagggctctgggtgtctcctctatgaaaatgctgccgggggcggggggaggggaggggaggggaggagaaccaaaagggtccctcttggattaaaggggtataacccgcagctgagtgacacctggctcaggaggacacccttcctccttgcaacgggccacaagtaccgggttgcgatcacaagtacccggttcaggtccaaggtccgccacttgctcgcaggagctttgagcaggtgagttcatttctctcagccagggtctcctctccagtccgagattagagagaggctgagagatcctaagcttggataccgtagggctctcccaccttgtccgcaccccggataccccaagaaagacgacgacctgtccggcccccaagtcccaaaagctggaagagaaaaaaaaagtctaactcgggcccttaggaaactgatcgagggcactttcctggggcgcgtcgggaaaagtagtcttctacgctaaaataaataacttccgggtcaaaatatgggagtgggcgtagccttaagtctcttcctccagtggacgttgaatttccccggtaccctaaacttgcagttttctgggttccggtgttgacgggcaccacttccctttttgcttcatgtgcgcctatgcgcatgcgccaaactctcgtccgcctattggcgaattccaggcttctttcaaaagactacatttcccagaaggccacgcgagtgggtggggcaatcccccgggggaggggcgcggcattcgcagcggacgctgagcctgtgacctctttctttcttttatttaacacaaaactgacgtgtccgcattcagggccccacggccaagccggactcggtgcagacaggtcagctcggcctggccctttggaaggcgaggccgggctgcactgcgagaacgagtgagcccctcccctgccccctattctggagtttggaactgtcaagttccagctcctaccctcttccccaggttcaagacccctgcgctgcccaccccgcaggcccggctgcgctcggaggccgggcctggcctgcctggcccgtgaggatctgcaccagcaggtcggtggccagcgtgggcgtgggctcctcgaagccgatggtcagcagctgctggtagtccccaagcggctgcgggcacaaaatcctggggtgggggggccagggatagacaggcctggacttgagtgccccctgcccctcgggagtccctccctttgagtgagaggctcaggtgaaagaggctttgtttcagctgcgggtgggaaaaacccccgggggaaacttgtttccttgttgatcagagacttagtaatggctcctagaggctgaataactggtcctgacctgtccattcgctctgctagctgtgtgtccttgggcaggtaacaacttctctgagcaccctgttttctttgttaaatggggccaatagcatagatctccatgggttgttactggggtctgcatgaagtgcttttcagggcacaataaaatgctatcactactaagggaagcaaagtgtttgggaaggtggattgtctttggtggggttctgcctccccctccagctcccaggcccacgttgctattgccctagctcctaccatgaataaaggtcatcctcggctggtcctaggggcacccatcggccgatggaccacagcttctggatctgtgggcacgaattggctggactctggcctgtgtcttcccaagtatctcgatagcacagaaagtagctaggaggggagggagctgtaattagaagtgatcagcttcctagctacttctgttgagggctttaattttggagttgaggtgggaactcatcagaagttgccctgaagttctcaggtaggaatgtgactccaaggccttttctcc

SEQ ID NO: 67164 - DNA, 1645 bp, Homo sapiens
tcagtttctcgagctcggcgcgcgtgcgctccggctccgggccgtgccgccgccgcaccatccggcagatgcgctccaggtccggccgcgccttgcgcgagcgcagcgagtcgatggtgtccaggatccactcttggtagtgcggggaagcggcggacgacgaggcggcggccgccgtggtggcggccgccgccgtctccggcgggggtagggccgggggccccgccatgcctcccgcccggcccggctgcaccgtgcgcgctgcctccctcccagcgcggcgcccccctccccggctcccctccctccgccgctgcccgcctcctccgcctccccccccggggggcgcagcgcctcggcggagcggcggcggcgctgctgtttctttgcaaaaaaaaaaaaaaaaaaaagagagagagagggagagagagagagaggaaaaaacagtgagagagaaagaaaagagagaaaaaaatatgcacacactcactcactcgcacgcacgcacacacagacccgcttctgctgggcgcgcgcggggccggggatgcgagggggaggaggggagcgcggcgcggccggcccctccccgccgccgccgccgccgcacgcgcgccctgcgcccgggacactccggccccccttccttccctccctccctcctccccgccgcccgccttcctccctcccacccccacgcgcccgcttttaaggtggagcccgggccccccgcccgccccctttaccctgcgctctcgctcactccggctcgctccggcccccccttacaactcccgcgcgctttttaaggaggcgccgcggagttggcccggggcgggggcgggggaaagcggcgggcgggggagggggaggggagtgccggggggagtggagagggggcgggcagggcgggcgggcggcgctcggccgccctccagccattgggcgcgggacccagacgtccccggcgcccagcccccctctccacgcctctccagcgcgctccgctctcgggaccgcacttaccgggaactcgccgcccgcgggccggggctgccgcgctcgcagggtgctgcggggaccctcctgctgccgccgcccccgcgtccctcaggcgcgcctggcccggcgctgaggatgcgggaaggggggcgcgcaccctctcccccttctactccccctgccagggccgcccccgccgccgctcggcctcctggcgcgccagccccagcgcctccctagagcgccctctcggtcccgggctggacgccgagggggcgcgccgcagatttggggaccccgaatctggggtcaaagggcagtttgacgctcgtttctcctgcggggccgaaggagtgccggaatttcagctaaaccctggttacaaggacttcaagccaggacctgatcggcctgcacgctggggtccgaaattccctttccaaccccctgggggtgtgtgggtgggtgatcgaagtcgagaacaccagcgacactttttttttaaacaaaactttattggtaatagttttcaaatatgtttacaacagcacactgttcaagaggaagtctcgtccttcgcagcacacaggttgaatcgcccccgcacccacccggggccccaccccaggcctgagaactcctc

SEQ ID NO: 67165 - DNA, 2317 bp, Homo sapiens
agctgcggcgcggcgggtgctggctgcggccggcggccccggagcgcgctgggcggcggcggcggcggccctcgggctggctgcgctagctgcggcgccgcgacccccgcccagcccctgcttcccgcgtctctccgcgcccgcccgcccgggaacctcagcccaagatctctgccgctgtctgtgacgcccccgcagcccgccgctcattggcctaggccgccctgactgacggctcagcgccgcctcccattggccctcccgcgaccttcccgcgccactataggctctcagcctcgggacacgcaccgcggactctcggccattcactcgctcgcgaggccgcagctgggcgggcagacgcgtccgattggccgagacgctggactgggcccggggtccgccctgcgaggccgccgattggcggaggtgccgggtccgccaagccccccagcagaacgctcagtgtcaatccgggggtgagagggcggggcggagacgcagtctgcgggcccgggccggcggggcggggcggcggaggctggctggcggccgcgcagcgctccgaggctcaggaggcggccccggcgggcgcccggccggccccgcgcgcgccgcagtcccccgcccccgctcagtgcggcagcggctgtcggccagccggagttggcgccgcggcctgcccggcgcagccgctgtccacctgccagcgggggaggggcgcggccggcgcgcgggtcagaggtcgcccggccgccgccggcgtcattcataaggcctggcgctgggcggccgaggccaggcctgcttgggggccaggccgcggggcctcctgggttttcccagccgcactcaggaggatgccgggcccggcgcaaggggtggctgggaaggggcgctcagtgtccacccctttgctgggccctagccctgggctcctgccagtagtaagagctggcacccacttaacgctccttcgcaccacactcccatcgcgtaggtgctaccatcatcactcccattgcacagatgaggaatctggggtacagccaggcagattccctgctcctgttccccgtctgtatttcctgtctgggcaatgcgaagggaacctgccccttccttcaggatcctctttcagtacacacttagcagaggacagtcggggtttcccaactgcgacactactgacggtgaggctggatcattttctgctggggggtgtcttgtgcaccactgggtgttgagcaacatcccccgcctctacccactggatgccagtagcccctcctctatcttcctgctggctgtggcaaccgctgtctcctgacattggtgaatgtgctcttgcggggccgaactgctcctgattgagaagcacttaagagagggtcaggggaggggagaagccaggtcaccccgactcggaagggctagctgggcttaactacaagccgatctgctgcttcgacttgaatagcctccaccttctccagctgctgtctgcccccatgttcccagatcaaccacagttccagggagggagagtcagagcctttctgtgaactatggggaaatggctgaccactccgcctctggatggatagatacatggtaaggtttagtaaaatttaataaaagcattgctgtttgtgtgttgggatcacgatgttaatttcctgtgggtcaagggcaaagtctgaaaaatcactcattataatctatctgcaggacagctggtttaagttttgacaaagaaaaacccctcctggaacctcagtctggaatacaactgtagaaccaattaagactggagtaggaagctggaaagaagacgtgggacagccaacccactggacagggcaagaggccacttctgggggagagtggacaaagttgcttcagtccaccagagacaaaagcacaaacaatcattctaaatgaagtgcttttaattttcagaccaaacatttttaatataaaaacattttgataatatacaaacagcaatcacaacagcatccacatggcagcaaggggaccagggcacagagagggggagcgggctggggagggacagttttcagggtcccagttgcttccctggcttgaaatcaccctggtcctagcagaggacaggttaaggctgccagaggcagagggtccctgaccctggcccggagacagactgcccaggcaggccctctgataccatcttccaaccatggcagcctccaggaaaagccagatccatttaggagataacaggaaggtggctgtgattgacaggaaaggcaacatggttcctcagcatcct

SEQ ID NO: 67166 - DNA, 1933 bp, Homo sapiens
agcctcaccgtccgccagggcttcactgcactcgaagctgatctcgaaccggaaggggctgtggaaagggctcgggttctccaggaccgccacgttcagcaccgacaccttggccatcgcctcgcctcgccgcgccgcagcaggggcaggggctgtggctgtggcggaggccgcgcctgggtccggtggggtcagtggggtagggctgaccaggtccactcccgcctcttctctccgagaactgaagtgcgcacctagtccgcgcgccgccttcaaatagccggcctccgccctctggccaatcaccgccaacgctccctggcggcgcgcgcaccccctcagccagtcctggagcgccgatcggcgcgcgcccagactcctcggaccaatcagcggagctccctctccgcagcgtgtgaggagggcgaaactatctccaagcttcttagcgtgtccgctggaaaccaatccccagcgtctccgacttggatgtcaacggcgggaatggacggagtcacagcgccggcctccttctggccaatcctgagggttcccgcaccggcgtggcccgcccctcgcctcgcttttccgggagatgcatcccgcagcgcgcagcgccgccacccgccgagcggtggcgcgcggcgctcgctaaagaaggcgggaagggcggtgctcgcacccgaagtgattggcaggagggagtggggcggagataaagagggttttctgagagtttattggctggattggtaatggtggcgggagcagaaggaggctcagctggggattcgctggagagaagcggaagtcgagcgccaccgcggtgttggcgagtgtgaagagagaggaggagcgtttgcggcctcagcgtctgtcaacaggtgagcgtttcctggagcttttctgagtggctcctgacccttgaggtccagcggcgcgggagtccgttgtgaacgttgcgaacgttcggagtggcggtcacgaggcgcgctcagacctcgggaatccggccgggttcggatcccgctttcgcccccgaggggttcggatcccgctctcgcccccgaggggttcggatcccgctctcgcccccgaggggttcggatcccgctctcgcccccgaggggtttggatccctctctcgcccccttgagggctcttgggaggtttcaagcggacggtactgaaaatgggagttccagttcgggggcagaccagtgttcagagtccgggctctgctactcagcgcccgaggcagcgcctccccattcaacgggggccgtggcaattccctgacatgattcatgaccacataatacatccggaaacttctctccaccgcctcccgtctgggccgtcgcccccggcctgggagactccaggtctcagagtctctgcccccacgggcgatcagtgctgcccagtggaaaaataatgccagccgcgcaccaaaattaggtgtaaaattaacattttttggaagccacttttttttttttgagatggaatctcgcgctgtcactcaggctggagtgcaatggcgcgatctcggctcactgcaacctctacctcccgggttcaagcgattctcctgcctcagcctcctgagtagctgggattacaggtgcccaccaccacaaccagctaattttttttctgtattttcagtagagacggggtttcaccatgttggccaggctggtctcgaactcctgacctcaagtgatccgcccgcctcggccttccagagtgctgggattacaggcgtgagccactgtgcccggccatatctttttttattattatttgtaattttagaggctggtcatggaggatttcttgaggccaggagttcaagatcagcctgggcaacataacaagacctcatatctacaaaaaataaaagaataagccaggtgtggtagtgcat

SEQ ID NO: 67167 - DNA, 1954 bp, Homo sapiens
agagagataaataaattggggtgaaccgaatctgctaagataaaattttcgagaaaccgggctggacaggatctaaagctcaaaactgattagatcaggaaaggatccggcggggttttccccgcccaaagtgggtggccatgaccgctaaggcgccaggagcgcatgaacttgaaaggtgacagcggggaactcacaacccagacacgccacgtgtacccagttaccctcaagtgtccccaggcaggctttccaccccggagtttattcccacctggggactcctatttccaaaagaaaatctttttttcattctgttttttttgaggcagaatctcgctctgtcacccaggctggagtgcagtgtcgcgatctcggctcactgtaacctccacctcccgggttcaagcgattctcgtgcctcagcctcccgagtagctgggaccacaggcgctcgccaccacgctcggctgatttttttttgtattttgagtagagacgaggtttcaccatgttggccaggctggtctcgaactcctgacctcaagtgatccgccctccttggtctctcccaaagtactgagattacaagagccaccgcgcccggccttccaaaataaagtcttatttgctctaaatctcagaatcccgaatcccgtaaaaagtagaccaagaagaaggtagactgggaaagggatcaagtccctcggacccaaagaaacccctgacaactgaaagctccaacttctcccacccaggccccagaccccggcgtcaccccctcgtccctctccaaatggccccaggccgccgcggggtctattcggacgaactgacagactccaagtggggctcggagcgccgtaggccatgacagcccctccgagaagcgggccccgagccccgagcaccgcgcgccaacggctggcccacccctagcgcatgcgccccggtgcccaacggccaacacacagcgctctgacacaccaaccgccccgcccccaccgtctcgcgaccctttctccccctccccttagatcccaacgtctcccctcgtcctctcgctctcagttcagacgtccccacaccgcggccccgcgcccgggatccgctgctcacctggctccccgttcttctccgcgcgctgctaagagacacttccaacttcggttttccgccgggcgctcagacacgagttgctgcgcttcctgcctcttgcgtcgggctgctgctctgctgactgggccgctgccttttcattcaagagaggccgaagcggtgattgggtcctgtggaagggaccgggagattattggcggagacgggaagaaagagggcgtgccttacgcctcgcgtttattggtcaatctaaaagtaggcgcgccccagtgagccgacagactggctccgacagcgcgcggtctcgtgatctgggtgtggtgctcggtgggagccgccatgtttagtactgataactgaagaccggatgattgcgttttggcgtgtgccccaccttttcgaagagtggcgtctgcgctgggcgctgaaaccagaactgtcccagttgctatcaatctgcggcctgggggtcctccacagtgtaggctctgaaaagaatagggagcttggaatgactcaaatggacagaacattttgcagtatttggatttctatcgctccacgatagttttgtctccttgattttcacgttagtagaagcatgcaataggttgtcttttgtgtctgacttttgctcaacaaagctgtttttttgagacggagtctggctctgtcacctaggctggagtgcagtggcgcgatctctgctcaccacaacctccgcctctcgggttcaagcgattctcctgcctcagcctcctgagtagctgggactgctggcgcccgccaccacacctggctaattttcatatttttagtagagaggggtttcgcc

SEQ ID NO: 67168 - DNA, 1050 bp, Homo sapiens
gcagcgtgcggtcgtctcgggacccggaaagaggaaaggtggggagccgatggggatgctccgggctcgggagaccgagggggcggacgggcgggaccccgcagccccgggggcctctgggaacccgtcccccctcggccccgccccctccccgggcgccgacctccggggtcacgtgaccaggcccggcggccgctggggccggagggcgcggcgcggggacgcggcggcctggccaggcgaggcgggagccgagcaggccggagcgggccgcgcgccggggagggtcgcgccgcgcccgccccctccccgccacgcccggggcgcacgcgcgctcctctggccgcccctccctccgcgcggggacccctggcgggcggcaggaggacatggccagcgacgccgtgcaggtaggcgcacctgcgtctggagtcccggggcgaccggacggcgccggcggaccccgcccgcgcgctgccgggggagcccccccagcccccggaacgggactcgggtgacgatggcaagggcgggggcctccggagcgcccggcgccccctccctgggccgggactgtggagccagcgaggcccccttctcggcaggtggcgatgtggactgggctggtttgggggcgatcccggaggcaacccctgctacaccctcaaactcggcctctcctggagaactagaaggggcgcggcggaggctctacttcgggtgtctgtggctggctgggcgtcccagtgcctctcgtccgcccccaaactcatccccctccccagggttgggtacccggcaggtgccgctccacctggggcacgtgcctggcgcagtgccctgggaggggaggaggctgctgggcccggcccgtgcccttcccccgcataacaaagctccagccacccccgcctctagacagctttatgatgttccagacgccacccagattggcacctgttggcggaagtacccgagtcactgcattaggtcgggggaatggggacccccactcccacccttgggctgtcaggtggaaccttctcctgg

SEQ ID NO: 67169 - DNA, 1741 bp, Homo sapiens
gccggagctactcagcaacaactgagccgtggagttattggtatccagtctagtgggtgtgactccagttctggaccctggggcatgagttccagtcccagatgtgccagttactagctgtgtgaccttgggcaagtcactccacctctctgggtaggctgcctcaccttttttacaagaaggcacagcacctcccatgaggtgtttagagtcaattatcctcatggtaaatgcctgacacggaagctctccaataaatgctagctgaggtggagtttttcatgacgattattattcagaccgtggtcctcactgcgtcccccccaaggccctggagggttcagacgcggttagctcaggggaagtgcccaggaaagggtcagaaacactgaccccgcgcctgtccacgctgggatggggacagtccagccgggggacggggggaggggcaagcccagaaaccccagcccagcgttgggaggcgtttgtcccctgcccgccagcaggaagggagctgcccccaccaccccccacccccgcttcccctgggaaggggcctccggcatccccgcgcgcagcctagacctccagtcgcgtccacggcgccggccccaccctgcaggatcggccggatcctcgcaggcccgcgacccccgaggcccccggagcagacacatccttctcgcagaggccactcacctgctccgccgccgccgccgccgccgccgccgccgccgctgcctccgcctccccgtgcgcacccggctcggccctccgcaaactccagaccgggcctctcccgcagcggcgcctggggggcggggccgacgcccgcggccggccaatcagcggctgcctctcggtgctcgcagccaatccgcgtcttccgcttcgggtggacccgacggaaacattccagagggatccctccgcctcgcccggctcttcccgactcctcccctcgccgcgaagcagtggaccgttccgccccgcctaagccgcggctggctgtaccaccggagggctgaggaggggggggagctgcagctgggccccggccaatcgcgagggaggaaggagacaagcggccaatgggaaggaagctggggcccctgaaccacgtgctgtcggctgagtgtcagtctcgggtgccctgggtggtgaggggcgggggagtcaggtgacctaggccaggtttcggggaaaggattcgaacttccgacgtccaggaaagcggacagtttaggagacctgggtgggggtcaatggcagtccccaacccagttccctgcccggcctcctctgccccagcctggccatcctcggagcggataaaaagatgcattcaatctctgggggcgggcgggggatcgagatgaatagggagggtcccgagtttccctgcttcctgggctgtacaatggacaaaggcattcattcattcattcgttcactcactcatcaaatatttaatgtgccagactgctccgtgccagactctgtcctacctctgaagacgcgtcagtgaataagctgaatgtgctcctggtagaggtaacagagcgtgcaaaagccggacagagagatacagcacgctttaggatactgcaatatcgtgggagctagtaaatcagtgtggaaaggcaagatgcaatgaaagacaagggtgagatagtttatctgcttgttggtttgtttatgtgctaggtcacagaaggtacccagccagcctttcatagat

SEQ ID NO: 67170 - DNA, 613 bp, Homo sapiens
tgaaagatgcacagtaactcatcgatgtggaatcttagctccaaccccaggacatgagacgtccctcaagggagtgagttctactttcttcaactttggggacagggcggactgagatgtgggggacaggagggacagcaccaagggacatagccccagccaggtgatcctggaggcagggctgagtcctgtggcctcaggttacagccccagcactgtcacctgcctttttggtttgtttgtttgtttttaattgagacagaagtcttgctctgtctcccaggctggaatgcagtggcgcaatcttggctcactgcaacctctgcctcccggaggttcaagcaattctcccgcctcaggctcctgagtagatgggattacaggcacccaaaaccatgcctgactaatttttgtatttttagtaaagacagggttttgccatgtgggtcttgaacccctgacctcaggtgatccacctgcctcagtctcccaaagtgctgggattacaggcgtgaaccactgcgcccggcctgacacctgcctttgactgctgggttttaggaagtgacacccagcagctctgcaggtcacactgttttctagaggggtcttt

SEQ ID NO: 67171 - DNA, 1727 bp, Homo sapiens
ctgaagcaggagaatcacttgaacctggcaggcgggtgctgcagtgagctgagatcgcgccactgcactccagcctgggcgacagagtgagactctgtctcaacaccaccaccaccaacaacaaattacttgtcgtttgaagccacccagtttgttgtggcagccctaggaaacggaaacccacaggtgtgtttcctaggagactgtgagtttcacgagctccatcctccctcccctatgccagatggccaagttttctgcttggcgcatctcctgagcctagcactgaggtgtccctcaggaactgtgcccatagactagtctacagattgtgaagtagaaacaggtcccccatgccaggcgcggtggctcacgcctgtaatcccagcactttgggaggccgaggtaaggcagatcacctgaggtcgggagttcgagaccagcctggccaacatggtgaaaccacgttgctactaaaattacaaaaattagctgggcgtgatggtgggtgccggtagtcgcagctactcaagaggctgaggcatgagaattgcttgaatctgggaggtaggtgttgcagtgagctgagatcatgccactgcaccccagcctggatgacagagcaagtatcggtctcaaaaaaaaaaaaaaaaacaaaaagaaaagaaaaagaaaaaaagaaacaggtccctcaggaaagaggggctctcccggactgaatatctgcttctccctggtgggaaagctgaaggaattggggtatgggggtggggtccctggcaagggtggtggggactactagctgacccgagggctgggttatccttcctctgcacataccatgacatgaactatcgtaggaaaaatgttgcaggtcctcttgtctgaattactttgtcacttaattactcacttaacaaacactcaaagggtcagttccggggcaagcatcactctggcaactggtgatacagattattaggatgtagttggtgacctcaagggaactcacagttgccacaaagcgggggacattttttagtattctcctgccgttgtctctcctgccccactgacaaagagggaaggtgtctcaactaataatcagggagtttgagaaatcagcctctgcttccccttgggcaagtgtgatgtcaacagactatgaaagtactttcagccaggaggggtggctcacgcctgtaatcctagcactttgtgaggctgaggcgggtggattgcctgagctcaagagttcgagaccagcctgggtaacatggtgaaaccctgtctctactaaaatataaaaaattagctgggcgtggcagcatgcacctgtaatcccagctacccaggaggctgaggcaggagaatcgcttgaacctcgggggcagaggttgcagtgagccaagattgcgccactgcactccatcctaggtgacagagtgagactccttctcaaaaaaaaaaaaaaaaagaaagaaagtgctctcaggtctgtgggagagaagatgagtgcatgctctttaaggcctagtttttttgttttttttttttgagacagtgtcttactctgtcgcccaggctggagtgcagtggcgagatttcgacctcaggtgatccacccagctgagccttccaaagttctaggattacaggcgcaagccaccgtacccagccaaggcctagattttaatagagaatatagatagatgcttcttgtttgt

SEQ ID NO: 67172 - DNA, 1331 bp, Homo sapiens
caccacacctggctaatgctcagctaacgttttaggagggtggatcacctgaggtcaggagttcgagaccagcctgaccaacacggtgaaaccccatctctactaaaaatacaaaaattagctgggtgtggtggcgggtgcctgtaatcccaactactcggaaggctgaggcaggataattgtttgaacttgggaggcggaggttgcagtgagctgagattgcatcattgtactccagcctgggtgacagggcaagactccgtgtcaaaaaaaaaaaaaaaaaaaagaaagaaaagaaaagaaaagaaaagaaaaaaaacaaaagcaagcaatcaaactgggactcaaatccggaagcaagaacgatgtgagaggagtcaggggtcgccaaacactaatttagatcttcacacccagctgggtggacctgccagaataaaggtggggaatagcacaggaatgaggaagctctttatgttcacagcatcttgtgtgagaaaaaaaaaaaaaaaaagcggagtgtacagtatgtactccttgtgtaaaaaaagaaaaatgtattccccgcagcatctcaggaaaggcgcaggagagacggggaacattcgtatccagttcgggggtgtggaatcggatggtagggtgggagggaggactttcactctctgtatcctttccagtgttgtattgtgattacacagtcaaaaaataaaactgaaaatttagaaattgtgtttatgcttatgtaagcacagactcatctcttggaggaagcacaaaaatggtttttttaaaaaaggaaaaaaaggccgggtgcagtgactcacgcctgtcatcccagcactttgggaggctgaggtgggcggatcacttgaggtcaggagtttgagactagcctgggccaacatgatgaaatcctgtctccactaaaaatacaaaaattagccgggcgtggtggtacgcgcctgtaatcccagctactagggaagctgagccaggagggtcgtttgagcctgggaggcagaggttgcagtgagccgagattgcaccactgcactccagccttggcgacagaccgagactctgtctcaaaaatgagaaaaggaaaaaaaaaaaaaaaaatctgtgatgccaatgccagtgtctatagtggtgcagtaggatggggaacttcagggccaggggaaggatgggaggactcggcttttcaccataggccaaatggacctattgagtgctgttctatgattataaaaaaaaaacactgctggtattgtaatgcaggtgggtcaaagaatgagtcagttgcacacgtcctgtcatggaaggag

SEQ ID NO: 67173 - DNA, 979 bp, Homo sapiens
cgagattgcaccaccgcgctccagcttggatagagcgagactctgtctgaaaaaaaaaaaaaaaaaaaacaagcccaagactttgggaaaagtttgcatgtgggtgcaccagatatccggccaagatagacaagccaagtagtggcctttgagcaaaaaaatgcatgtgtgaaaggtctttgggcccttttaccaccaagattttcccctcaaaatcccaccgtcccactcctcacactgctacctggtaggttgcttggccgtgttttttgtgaagttcccagaattgtatatacctcaaggcttcgtgcacctttatgtttgtgacacttcagtatgaagttcacagggacttggtgtataatggagacttgggggtggggatggcagccctgggatttgtgtcaccaatgaggtcaggtcagttccgcaataaatgtgaccttggcgtgtgggatactttggtaaacatctcttagctcttgatattccagggtcacctcctgattgggctggcgtctcctggcttaatgtggctgctcttcaaagtcacccctgcaatgtctttagggaaaagccctctagacttgacttgtccaacagttgccactggccacatacatgtgtggctgctaagcaactgaagtgtggcaggactgaggaactgattctaattttattgaatttgtaagatgtttaagtaaacggtatatagaacgttctagtcattgcagaaagttctcctggactggcagggctgcccctagcctgttttcagcgcttcaactgtttcagtgggaagggaaagcaactcttagcttgacacttttttgtgagacacagcctcgctctgtcacccaggctggagtgcagtggtgggatctttgctcactgcaacctctgcctcccatgttcaagtgattctcctgcctcagcctcctgagtaaatgggactacaggtacgtgcaccacgcctggc

SEQ ID NO: 67174 - DNA, 4482 bp, Homo sapiens
gggccctcccaccctctcatggtccacaactggtagaaaggtccagaaatccttgagctctggaaaggtccctggtcagtccttggggagctcagatagctatattggaagaacctgctcaagtacggttcttgatgtctggggaatcctttcggggaagatcacttcaaactcaataatgaggtccccacgtttctcgggtgttttggggagggggaggccttctccaggaacttttcgccgcatgccaggcctgataacatctttgaatacgacgggtatcgtcctgccgtccagagtggggacgttcactgtgcagccacacagagccttgaaaagcaaaaggacagcattagatggaagctggctcaagaggctcagctcttgcccagaggccgtctgccatagataagacccatcaggcctctgcagctaagacctggcccccaaatctacacgtccccaccacgaaagctccacaacagcgccctggtcagtcctgttcactgttgtgccccaagcctggcacgcaccacacaccccaacacattggttcagcaaatactaaactgcttcaaaaagcagccatcgccctctacagacaccgccccacctggcaccttacctcccggaggctgatcctggcaggataaatgacatcagagccatctctcttaaagatattgtggggcttgtcctttaaaacaaagacgatatcagctggaatgttgttggaggtctggtctccttccttggggaaagtgattttggttccttctttccaccccttcttcacttcgatggtcaatattttgtcttcgtttcgaatgctctttccgtcggggtttagccgcttgtgggagattttcatcttcttggtacagccgctgtagatctcttcaagggagactcgaaggtcgtgggtgactgggggatcttgcttctttcgggcgggctcttgggcagagcgggagcggccaaagttcacgttggtgaagccacccatgcccatagggaagccagagaatgggtcatcaatgtccatgccttcctccccgttccgctgcccaaaaaaggtgtcaaagggatttctgccaccgaagaactcagcaaacatggcatgagggtctccatggaatgtgtagctgaaagaggtaccattggcaccaccgccgctaccgccactggggccactcccctttaggcctgaaaagcagatttagaagcagtcagatggctgaacagcagactctctctcgagcttcccttacagggggaaacagcttggaagccatgggggaggaacttttttgtctgtcaggggagagcaaggaagaaccccaagtttctacctctcactgccaacagcagagacgcccccctaccaacagtatttccgcgtagcctgacagtggaaaaggactcatgcggttaggtgttcacctccaggtgccacctaggccctgccactcctggactgacccatcctcctggcaacatcaccaagagatggctaaagacacatggtccagggtcggctttcggtaagtgtttactctcaacgttttagggctaatggtgcgtaggaagagaagaaaaaaaaaaacaaaaataaatagggagtttttaaatcctcacacattagcattcactgccaccatccttgcacaaaaagtcagctccagatcaagcccagaagccagcctgaatcatcaacgggcacaggaacaaaaagccctgctctccttaccctccgaggcggccccgctctccggacctgggcggccgctgcctcctgcgtgccctgccggggccaggtcatcacttcccgggaattatcccaacccagcccccaagcccacgaacggggtcggctcctgcattcacaacccctcgccccgcagctgagccggaggcgccgccccgcggaccccggcggccgagcccaggtgagcccgggtccgcagcgggctccgccgcgccgtccccgtcgtcacccccggctcccccacccccatgcaccgcaccccggggctgctcggggccgcgggaggaggcgcccggggaggggcagccccagacatgctagaagcttctggccgagcggctgggccaaggctcctcctcccaccgcgcggccgccaatccgagggcggaggcccgcgaggccggagggcggggcagctcggccccacggcccggggcgtccttcccggggggccgccgagaggggccagcgtgcctcagtttccctgtctgtcaaaaggcggggccgcgcccctggccgcgagcacacaccttcctccccgtagcggtcgaagatctcgcgcttgcgcgggtcgctgagcacgtcgtaggcctcagcgatctccttgaacttctcctcggcgccgggctccttgttcttgtccgggtggtagcgcagcgcctggcggcggtaggcccgcttgatctcctcgtccgacgcgccgcgggccaggcccaacgtctggtagtagtctttacccatgaccccctcctgcggcccgccgacccgctgtcgccgtcccccggctccgccgccgaccagtcccggactctatatacccgtccggcggaagcttccagagcccgccagccccctccagaaccttccgccccgcccgcccccgcggcgccggccaatcgccgccgccctttcagcgacacgcgacatccggggcggggcctcgccgtcaacggccgcccgcgcggggccacgccccctcccgctccgccctcggcaacacctccccgcggcgcgcgcgcacaggtcggaggaggccccgcccacctttcgggacgagccaatcgcgaccttctttccctctctacgcggccccagctaccctgcgtcccgccctccgcctgggtcagtaggtcgggacccacagcgaacttgctgttccaggaaggggtggggcctgggactacccagtcctttccccgggaggcgatgaacctgctcgcccttgtctcgtggggcctgcggtgggctcccgcccggtgacgccggacgaactacctaacctgtgtctgcctaacccaggggcccccttctatctacaacatggcaataagagaacctatcaggccgggcgcggagcctcatgcctgtaatcccatcacttcctgaggccaagacaggaggatctcttgagcctaggagttggagaccagcctaggcaacataaggagactccgtttctatttaagattaacaaacaggccgggcgcggtggctcacgcctgtaatcccagcattttgggaggccgaggcgggcggatcacttgaggtcaggagttcgagaccagcctggccaacatggtgaaaccccatctctgctaaaaatataaaaattacccgggcgttggtggcacgaacctgtaatcccagctactcaggagattgaggcctgagaatagcttgaatcggggaggcggaggttgcagtgagccgagatccggccgttgcactccagcctcggcaacagagcgagactccgtctcataaataaataaaataagtaaaataaagtaaaatgaacaaaaaacccaccagcgctattctcccaaccgtggggagaaggattttgggacggaagactgcctctgttctcacctcctaaagcaaggtgaggatctggacggaagcgcatctcccaaggtcctcccagtcccgccttcttccctttactgccctctcaagatcacttgccgctaaatttgaaatttatcttgtctcttggctttcaatgtgtcttccctcccagtctgacatcgccacctgggcaggggccaggtcctgtctgcactgggtccccagtgcctggaacgcagtgagaacctcataaatattccccgttcttacacacgtgcttctttttcttccccaactacctttataatttggggggacataggtgtgtcacacacctttcaaggcctctgtttcctcaattgtaggcaacacgatcgcgtttggctctgaaagtctggggtgcctctgtcaaggacagagctgatgggaaaaggaggctcagaaaggggttccacctgggaagggcccagggaagtgggggaggttcctggaagaactgcctgggaggtcagagccatgtaacactggctctggaaccagacagctgggcttcattcccagctccagcatttcccggctgggtaaccttgggttagttactaggcctttgctggccttagcttcctcatctgcacaatgaggaatgaggatagcagttgtgcccacatcatgagggctttgaagtttatatgagtcaacatttgcaaagtgctcagagcaggcatggcacaaaggaagcattgtcaaaggggtgactaaccattttcttagtggtgggctcttcagccatcacctcattcctggcagctaaaagattccagtgacagctgcccctgggcagacagggactcctgaagaagaag

SEQ ID NO: 67175 - DNA, 1434 bp, Homo sapiens
aaggttcttgcaggttgggggttcccaaatggggagcttttcgcgactccgtttcgcctttccttccctcccactcaagagtctcctcccatagtgacctcctcgccaaccagactccgcagcccgcgaccccagcccctagccctctcctgctgttcccggtgtaccccgggggccgcccacctcagaatttaccccttcggcgccgcctgtcatgtggatgctgccttgcctgtcactcaacttcttaccccgcccccgcgtctggcctaaccgtcgcttaccttggtttccacagcgacgccatcagggggcgtggcaaagggacgcgcggggcagagacctcctttggattggtggatggtcaagccccttctctttagcccctcctacaggcgttccgcccccttcgattggtctcgcaagttgattggtcaatcccctggtgctagtcctagtcttggttcggaccggccccaaggagcaggggcgaacgtgggcgcctcgtgccctgattggccgacggggcgcgcgcggcctggaggggcggggcggacgcagagccgcgtttagtctatcgctgcggttgcgagcgctgtagggagcctgtgctgtgccgcgcagttaggcagcagcagccgcggagcagtagccgccgtgggagggagccatgaagcattacgaggtaagaagcgagaaacaggggccgtgtggccactgctgacccattctttttccttctttgcgggaccacgggaccccactttctggtcctgtgccccgaaggaagagccagacggcgcaggcgcagtgggcaagcgttgcgccccgggccactcgtaaattccaatgcgcatgtgcgcaggaagtatttataaatctgcaacccaggctgttttgggggtactttttcttgggggtctctgcaggggctgggacgcttgcaggttccttgcagctcccccagcgggctgagttgcagactttgtcatgggagccacgaaggtgcgggacccttgctcccaatccgagggagtcttgcacaaatcttgcgccacgccgccgtcaccagcgtaggaaggggctttgctatcagtattcttgtgtacgacctttggaccccttccctcgcccgggacgttcccgggagacttaggcggtgagggaggtgcagctccacggctggctttcgcagagcagcgaagctgatcttgctttctggttatcaaagaggtcatctacgtcaacccttgggtgtcaccaaggagaaatcttatacccacccacagccactcttgaagcccaagtcttctgactcctaacttgggtctctttttcccttaaaacgaagtcttctgatgtgcttatcgccctaggtgataatataatattaataattcaaccaattatccctgaattattgctgacttttaa

SEQ ID NO: 67176 - DNA, 833 bp, Homo sapiens
acatttgctcccttactgttcctctgtccccagcagagagatgattcttcaagaaaccaaagcagcctgtggcattccagcgattcctcattgctcaagggtaaaacctaaagcacttgtcttggctctgctccagcctgctgcttagctgctccccctaaaatttactctgttccagcctccgggtgtcacccgcttccccaaagctctgtgctaccccagggcctttgcattccccgccagggagcctcatgctggccctcagctgaaatcccatttcctcagcagggtcctcccgggcacacccactgtggccctctgggccctctgcaccgctgtctcctctccacagctcctggtacatcgtgaccccgtattatgtaataggtgctttgttcatgtccccttgagcaccagcaagcctagggggtgggggggatagcctctctcagtcgtgcgcactgtcatatcccggcccttggatcgctgcccgcacgctcttgttacacccgcctgactgccattcatcactgagcccagcagctggcacaggcaggcccgacgcagcaaggggcacagtccgtgttggttgcgtgcatggcgagtgcaaactgcacagttagcagaaaaggtttttgggagtgacagacacccctgcacacggttgagccctttgtaggtctccgtgtgacaagtacatccctgctgtgcttgggaaagggctgcggcttgggaaagggctgtgtgggttccctggcttcttcctgctgtccccgaggagcatcggaaatgggtcacaacgcagcaggtaaccgcagcctccctcaggcaga

SEQ ID NO: 67177 - DNA, 1115 bp, Homo sapiens
gactgacttctgcgatcccagcacttggggaggccgaggcgggcggatcacttgaggtcaggagttcaagagcagcctggccaacaaggagaaaccccgtctctactaacaatacaaaaaagtagctgggcatggtggtacacatctgtaatcacagctactcgcgaggctgaggcaggagaatcgcttgaacccgggaggtggaggctgccagtgaatcgagaccaagccactgcactccagcctgaaagaaaaagcgagactccgtctcaaaagaaaaaaaaaaaagactcgacccagctctgcgcgtcgcattcctgcccgaacccccacttgtcgcctcacttttgctccctggcttttgctcaagccgtgcccttgggctggaacgcctccacactgaggtggggtcatgcacgtcctgtggactcctagtctagacccaaacccagatacaacacctgaggttagagcccagccctggggtgccagccctggggtgccaggtgttcaggcacccgcgccccacgccctctggctgcgcctgcgcactgggcctcaccgcgctccttgcgttcggggaagccgtagtctggcgggaaggttggcatctgcagggggtcgggctccaccgaggcatcgcccaggtagcgccggaccaggtgggcccccatggctgcagtcgctgcagatccctgcagcagccgagggtcacctagctcctacccggaaccactgacccctcagtcagacacagcttccgggtcatttaggcagctgcggagatcatagagatgaaggactccagaggatcgctccggtccgcctggcgtcacctcgcggacaggcggaggcgggacaggtgctgtgtctcttcgcaggatatggttggacccgagaggggacttccctgagcctggaaatccatctgggcggggcagaaggggacggtgtgggactgaggcctccctcgaccctatctggggctcttctggtagcccgaggctaaagcacatattaaaattatttttcatatcattttccaaaaagttttttctttgaaaacattcaaatttctcttaaaaaaggcacgatatctattatatcgttaatgt

SEQ ID NO: 67178 - DNA, 1195 bp, Homo sapiens
ggcgccccaactcccgttgcctaagggtcagccgtataaaaatatacaaaaacaatcttaagtatgggtatatttttgtaggggattggattaagcccatggataaaggtggaaggggttggggaaaaggaaggagaaaagggtaagttaaatattgagcatccctaaagagacccggggaggggtcgggtgtgcccctctcaacccttgaagcccaggtcccctcatcccgccttccgaatgcaagttcagctcccattcccaccccaagcacaagccccgccccatttttgcccctgaggcgcacgacccgcccctactaccaccctgcaaaccaaggccccgcccactccgccattggggtgcaagccccgcccatcagccatcggagggcaagccacactccaccccgcccccgcgcacaggccccgccccacttttgccccgggacctaagccccacccctatccctgtctctcggacataggctccgcccccagcaccaccctccatgctctgtgggaccccactccagagcctaacctcatcccccgggtaagaatactagaatttctccttggaggctaaagaagacgttagtttctctgccgccgcctaaggctaccctggccacaacagcctgagccacagccacttccgttcccggcggccccgagaccggaagcggaagtgcgcgcggcggcggccgacggcggctgagctgtgctgcgcggcgcggcgcggtgcggcacggcacggtgggagtgtctccggctggcttgcaggtgtggcccggcccctcgggagggcggggagggcggggagggctcggctggcgcggggagggactggagggcctagaacagctccgcctgtgtgaggggtttcctccctgcgatcagccggtggccggcgtgaggcccacacagtcagggcctcgcatctgggcgcccgccgcccggtctctcgctctcaggtaccccccgtccgggcagacagggctgtcatcctgtcaaaagggaaatcccaaacagtccaggtcccacagctcagaaatgtggtgacaccggccccagctctcacctgtccttcccaatttttagggaaagtgcataaagacggccctaccttgcctacagtatgcaagataactgcgaattagtaattcacgttttatttgatatgatacttaata

SEQ ID NO: 67179 - DNA, 566 bp, Homo sapiens
gtcccatccagggagggtgggtgaggtggaagacaagggatcgggcctgcgccacgatcgtcacgtcccatcgaagctggagcggatccgggcacccggagcccccattccaacccctcccggccccaggcaactacatctcccagcatcgcccgctcgggccgcgggaaaggggaaaaaaaaaaaaagtttgggccaagcattcccggaatgtgcttcctgctggcgcggggcggggggcgggcggggaggcccgggcggggcggggagggcgcggggcggcgcggccggagcccggggcgcgcactcggctcggcccggcccgggccgcagcatggccgagccgctactcaggaaaaccttctcccgcctgcggggccgggagaaacttccccggaaaaagtcggacgccaaggagcgcggtaagcggagatcggtggggaacagggggcgccgagccccacccggcctgggagcggggtcccagggccccgaggacagacggtgggggggatcagggggagccccccgcaccccgctgcagactggggtgcctccagccaggg

SEQ ID NO: 67180 - DNA, 1685 bp, Homo sapiens
aagcttggtccctgctaggagagaaagggttgaggaaggggtctggagaaggggtaaatttcaaacagaggtgcaaggagtttagggggacacctgtggggtcagctctctccaaacatgtcacctagggcaaaccaccacacaatctctctgagcctcagcttcctcttgcagaaaatgaagacagaaagaacagcacctactttcaaggaaaaggtaaggggtaggtaagaaagtctacagtactgagctcagcagagggcaactgttatgaaactgtcactgccaccccctcgctggagcctgccctctgccccatttatcccatccaggttagggagcacagagtgctgtccatctgttctgtgaaaagagtcactggggaaggaggtaggtggggtgcgagtgccccggcagcggcagcttccgtgttctctcttaccagtggcaaagtccaggcctccatacacagcgtggcaatggagacagggccctggacagaacctcttaccagtccctctggactagtcggggctcgctttcccaccctgcacaatgagtgagctggaagcagcaccacgaggcccctccctctttgactgcccccagcccacctcccattctgtgccccgcaccttgtgcagcagctgatagaagagccccaggcggtgagcggcgcccagcaaggcggccaccagcgtcccgcaggccaggagcaggaaggaggggaataagctcccagcgggggcggcggccgcgggggtctccatgaggtggtacctaagagagaaagggcacttcccagacttgggcgcgacagggaacctctccggaagaaatcgcgccccttctcgcagcaggatccagggccacgacccttgccgccagtttctgtgcggccacgcccccaaccctgccagaccacgccctttgtgcgcctaggctcggggtgaagccatgcctctccgtgacaaggtcacgcccctcgcggggctagccccagtcctttacatcaccaccactcccacccaaactagccaccacaagtcaaggtggcgacgacagcaccacacagttatcttccacttacctacttgtcaatggacaggcggaagccccgcctctctttccacaaccggaccccaaatctcagccccagtagtgagcccgccccatgttacgtcaccaagaggcacgaggtcacgcccccgggttagcgggcgcgaccctccacgcaacccacgcctctcccttaaagagcgcacgggcccgagcctgatccccgaccccgggccaggctgggtcgaggtcacatcgcatcaggatgtggttctcccacaccagctcgacccccgacgctattcaccttcacctccaggatatggcgctgcctccagcagaattcggccccctccgtgtcacgtgacccgggagcgtggccgtgcccgggtggcccacttggctcagcggcgccccgtagtccggcccgatgcgcatgcgcacagtcggagccccgctccggggccacccgaaagagccttgcctctactggccgcctccctcatagaccccgcctccccttgcctttcattggctcgcactgcagacctcacacccattttatgttttaaaaccaggaggccacgcccctcagcggcttcaggagcccagacctttgggggccc

SEQ ID NO: 67181 - DNA, 933 bp, Homo sapiens
tggggtgaggtggggttggggggatgataggcccaaggcccttcaccagtgcctgcctggcaggtcctgcatactgcagcctggttccaggaggtactttccctatgtgacttgagaagacggaggccaaagaaactggggaaatgcccaccaggcaacttaagcttttggaaatgcacgggaacaatggagacgaaggaggaaagactccaaaaggctcagagtcagcggtggctcgagccttacagggcaccagtgagaagcatgctgtgggaagagcctcactgagccttccagggtctagaggccttgcctctaaagctcccactccttatctaggacagctctagaggtcagagtgttcttccgcacactgaacgagagctctcctggactgatgtcactgcaaggttcaggagggaagtagttagggtccaaagtcccagaaaaagagggatgggacaaagagagaaaacatacttggggtctggctttgcacacagagtagcaccacatgaatgcatgtgttggggattgtcatcaccctccaggagatgccacccacccagaggaccccagagaaccaggaaggctgggcaggacagccaggcagtctttacacagagaggcctgggcggctggccaggcaggcagccttcccgaaggcgggactaggcgtgtgctgctggacatgactaatccaccccgggggacaggcccagggctctgaggaattccataacttgatggagtcctgtccctttcacggaagaaaatggacttaagctatagcttgctgggaaggaatctggaactgaagaccgttttattaagagtccgtgtccaatgattaggcaggacctacgtagagggagagagaaaccagtgtgagagaaatggtgtggaatgtaccatttaagtcacaagaacaga

SEQ ID NO: 67182 - DNA, 754 bp, Homo sapiens
ctgcccagggacaaaaacaagaggatgagggaccctgactggtaaaaacctggtaatttctcaatacaattcaatttacagcaatttacatcttatcttgtcctagaaacatctttgctgaaatgctgattacacaacatcaatatcagaaggtctgttcccctcctaggtgctagagtggcatctacttcaaattcctgacagcggcttctttaattgtgcaatctgtgtcagtggggaagcacaaataggattacttttccatctgactggctcaggcagctggtgagaacagcgctcgtgtcatcagccagactgcgccgcctggagccgggccagtggccgtgcgccgaggcagctcttagaggccttaatcctccttcacgcagtgtgtatacaccctgccccccaccccttggaccagccaagtggtggggccccattacctcttgactctgcagtaccccagaccctgcaacttgccttggattagacaagccaaggcagagatatactggccttgctgctaggggagagtgtgagccacactcaagctctctgttccccactggaggggacacaggcacacaaggatcttgcagtcaggaggccaggaaactgggcgggacacaatctcaccaaccagaattccagtctctctgcttttgaaactcatcagcaggctaattaaactagtagcactgaaaatgctgcagcatcttttcactgcaaaagctgccagcaactggaggga

SEQ ID NO: 67183 - DNA, 1883 bp, Homo sapiens
gtgtctttagagagcagtggcgcggagagtaaactatggccgctgaagtggacagggagccaaaaggatctggatgtgaggcagcatcccaaagtgcagtctcctgaccgtccagccacactgagattctgaagcaccactccgtccagcggcagagctttaagttggaaaatccaggggcataaagggagacaaatcaacttactctaaatcctctgaaaattcccttaacaaaggagttgtgttgacagagacttctctaatctgaagagcaactgtttctccctggttctctaggcatataaccctttctgcccacctctcatggagagtaggctctgacggcagaagccccccccaccaacagccaccacatgaaacaaacagatacttcaaagccagaagatctttgttcagatcctgcccctgggcaggcacctcagccccaggtccatcttctaggtggatttcgtaacatctaccttgtatctgtgaggagtaaacaaaagatacataaaagcagccagcatagcttctaacagatagacgtttaaaagttccttcccctttgacacacaaagtcacaggatgtgatacagcagtagccctcagttacattagccctcagctacattcttaacaaaagacacaacatagcatggcagccaggcctggcatggtctccagttgtgccctcccgttgaccaggctgcacagactgcagagccttccaagctgctccttctgcagtcctaaatctacttgagagccgctgctaagaaaacatcagatggactatactgctgctccctaccttcctgaataaacaacgtacacacgatacagagaagcactgagccactgccaccgaacccccccaaaccctggcttcacagagttttaaaatcgccttggggtactgcggttgcttttcaagtcttttacccatcaaagcctgacgcacttccacacattcctttgtagtgtttactggacaagtgcaaagaactaagatacgctctgtatttacagagctaatgggcctctttcacagcaagttgacatctcatctgcttttggacatgcctttgctcagggatcaggtttagtgggagatgccccacctgctggcaaatggaatacagctgtggactctaaccaggcgtcctcacttcctctgtatgaagccagccttcgtcacagcagatgatgtaagaggcagaaaccagctggaaaattgcaggtgaaatggtaatggcagcatataaggaccatgcccaggaaacccaagggaccaggtgcagcacggtgaaagagtgctgcctacatgtgtgcccatccacaacctcaagcatttctgcaatcctgcctgcaagatgaaagaaaaggaagcattacaggagattctattacaaccagtggaatctgcagttgggagagccactatgaggcacaagatgatggcctgcctcacaagggttacagcagcacccaacaatcctgagaaaagatccctctgtgcctgcctctgcaggcccaatgactcatagccaaatttggactttattataagcaacagtttattaaggtgggctctgcaaaaggcacaaacacgggtggaggtccacaaacaaaaacacttagcgtaagcactgatggaatatttggcctgtttttgccttgaatcttagctaagtatgtacaggactgtagttaactcaacggctttcaagaaaaatgcaaaatgctttctttgcattcttaatataaaagcttgtggttggccgggcacggtggctcacgcctgtaatcccagcactttgggaggctgaggcgggcagatcacgagctcaggagatcaagaccagcctgcccagtatcta

SEQ ID NO: 67184 - DNA, 1005 bp, Homo sapiens
cactcaccgcacttcaaactgctaagtgggaaatgtccagtagtgcatggaaacacactgcatgccaggctgctcggactaataagtttactacaacaccgagggaccccagcgttatcttagttgaaactcacattccttgtaagtcactaccgaacaattatgtccacggctaacaacatttttaaagcgggattatttgcatttggcattacggcatgcaaaattcttgctcaattacttctcccgtttattcattgagactatttaaggtgctcttctaggcacaagatacaacagaataaaacaggcaaagccaagcaaacaaaaccctgccctcatccaacttacattctggttttgttttttgttttgggacggagtttcgctcttattgaccagactggagtgcaatggcatgaccttggctcaccgcaacctccgcctcccgggttcaagcgattctcctgcctcagcctcccgagtagctgggattacaggcatgcgccactatgcccggctaattttgtatttttaatagagacgtggtttctccatgtttgtcaggctggtgtcgaacttttgaccccaggtgatctgcccgcctcggcctctcaaagtgctgggatcacaggcgtgagccaccacgcccggcgcattctgctttttttttttttaagttaacaaggaaattttatctttccaaactcatctcttatgtattaaatgtcagcaccagcaaggaattccccacaattctcacctcgcaaatgtacactcttttctagacaccaaaaatcacaaagatttatgaaacattaggagctccaatgacaagcttatctttcctttttacagatttgccaggaacataaagacaaacatggtctactctacaagtttattcaaaatcagaaaccaaaacattttacattcacaaaatacaacacactatacagtaggttgtcagaagcagatttaacagcccagggtcttcaaatcact

SEQ ID NO: 67185 - DNA, 2299 bp, Homo sapiens
acggtagggaacttgacagctccattcacaaaaaactcccgaccattgttacagccccaaagagccactggcttacgaggtaaactgcgacttggtttttggaaccacggactggtagagccctgtcgaaggtaagcaaagacattccaattctcgtgaggcatacattccaaggggtcactagcatccaacacacacgcagagaaatgaacccaagaccagacaccccaccaggctgcacgaaacgtaaacaagtaaacaagcaaataaaaatcttaaaaaaacaaagcgtagtcttgagtaaaagggaggtcagccacccaggagaagcacatgactcatgcaccggcctgaactaaagtatttacaccgtccactacaacagagtggggtttcccatcttcaagcaaacccaagccttgggggcatctcagccgagtgaagccatgctatttccgtttgggaggagggggatcattttatttcgctgaatcacaactcccccacatccccaccccaaatcaccacaatcaccaccaccacacaacactgcaaataaaataggccgttgcaaggacgccggcgagcacggaccgagcaaaacaaagcgcccagcaaggggctgccaggctgagagtgggtgcgtcaagcgggccaagctcgcctccagggcaccgctcccgccctgaggcctggcctcagaccggcgtgcagccgcagccacctccctccgcaggggacctgcccctttctccgcagcactccggggaccgccgggaaggtgaagagatgggggtgggggcgcgctgccccggcccaggcaaaacgacctgggtgccagaaggagagcgcgccggccccggcccacgtgagcgccgcggccgagcccgcctagaggaccgcggaccgggacagctgcgctcgcggcccccgcgccaggccgggacttacccgggccgggcgcgccgcggaccccgcggcggccgcttcctcctcctcctcctcctcctcacttaacaaaatggcggcggcaggaagtgccgggcgcctcggcccgccccccgcccgcccccgaccgccggccccgccgcggcgcccgcgccccccacccgcgccccgccggccagcccaagcccgggtccgacggcaccaaaggcaggacagccgcgagcgaccccgccgccccgacaccaacggcgcaggccgccccggcccggaacgaacggcgcgggaggcccgcaggcccgagcccgcgtagccccggcctccccgcccccgcgccgcgcggatggcgtaggtggcggcgccccggccccattacgcaatgcaggttacgcggaccgcgccgcgagcctccgccagccgcccagtgtcgtccgccgccccaaagggcaccagtcctcacctgagacgctaggccgcacgccgcccccgccggccgtccgcccgctgccgccgccccctccccgagctgcctgcgcggcgccggggcccgcccgccgctctgccgagctcacaggccgcgctcgcccgcgggcaccgccggcagccgccgcagccgctgccgccgccactgcttcggctcctcggctgcgggagaccagaacaaacagcccagccgccgccgccgccgccgccgccgccgccagcgcactgacgtcaccgcgcacgctgcgcgcgcggccccgcgccgccgccgcccggtgtgcgcgccccgcccccgcgcccagcgcgaacgagctctggagagacagtggctgcgaggtgagtgggggataccgcggactgagggaggagaccccgcagagcgaaggagcgggctgggggaaacgggcggactgcaggctgggcctgcgggaaaagatctgaaggctgagagagacatccaaaatactaagaaaggtctgaagacagaccctcacagggagggaggatggtgaggagggaccccacagactgatggaggaggcggaggagagagccctaaggggggaccccaggtagggaggctgaggcgagagagctgcgatgggggcgccggggctggggtgaagtggaggaaaggaggtgagaggaggctgcgagcaaggccgaggcggatcctccttggctgcccctgggcagggaggtagcacctttctcctcttatgcccccctgttgatcttcttccaacccacctttttaaaaaaagggacatggtcttgctctgtcccccaggctggagtgcagtagtgcagtcatagctcactgcagcctcaacctgctggcctcaagcgatcctcctgcttcagcctccca

SEQ ID NO: 67186 - DNA, 523 bp, Homo sapiens
ttgtacagacagggtttcaccatgttgtccgggctggtcttgaactcctgaactcaaagtgatccgcccaccccagcctcccaaagtactgggattacaggtgtgagccaccacgcccggcccagtcatgtttcttcaattggttatttagattctgtgcctttaatagatggaactgtcaaatatggaagtgtttagtaactgagaggagggcaaaggtcctgaagtcaggttgtgggctgggacttagccacctgccccaaatgctaaagtcctgggatgaacactgagcaaaatgggtttcacaaggaagaactgggagctcttccaaccagccttctctccatgagcacccactttgggacttcgatatgctgctcccatcatgaaggctctggttcttcactacccctcaccttcaacctcactgtcagttggctctatcaatgaaatctctttttagcttctctcctggaaaattctcatgtaccttggattctttttttttttttgaaatggggtc

SEQ ID NO: 67187 - DNA, 440 bp, Homo sapiens
cttgccaacacggtgaatcccgacctctactaaaaatacaaaaattagccaggcgtggtgtcaggcgcctgtaatcccagctactcgggaggctgaggcaggagaaccgcttgaacctaggaggcagaggttatagtgagccgagattatgctattgcactccagcctgggcgacagagcaagactccatctcagaaacaaacaaacaaaaagaaaatcactgtcccatgtgaaccttaaggtcaaggattccccagcatcacatgatcactggtgatttcagtttctagtcagaagccacttaactcctggcagggagaggcaggcacatggtgtgctcacaatgacatcctttgggctcaacatttttgcaatccttttctattgtgggacaaaatcttgatggtaggatcatctctctacctgtctcctagctgtgt

SEQ ID NO: 67188 - DNA, 3196 bp, Homo sapiens
ggtctcgatctcctgacctcgtgatccgccagcctcggcctcccaaagtgctgggattacaggcgtgagtcaccgcgccaggcccttcctgccacttttaaggcctccacggatcccctggacctttaagtcccagagccttcgcctggccctaaggcatcagacagcactcttcacccctccacaccccccgcccactatggcatctgtctggtccctccaggaaggagaatgggaactgtgttctctttatttctgtgtccctggggcccagcactgagctgcgcgcgggtggccaccatgcctgttaaatgacttcactttgatgaggcaggaacatatccatgtctccctcaccagaacaactcccccgcccccggctaagtgcctagtgcgtgccgatacaccgcaagcacccagcaaaccctgttgtccggaatgccattcagagacaagggagctaggctcatgggttacgagacttgacccagtcatactgctgagttttgccctctgctatgctacgccttcccctccgtcataccgcaaaaccttctaaattcgcatccgtgcagcagaaaggcagactgcagattccaacagcaagtaaccaacctcgagagactgcttctctgtgaagctctagtgtaagtggcacgcactattaaccttaaaacgctcccggaaacacaagaaatcagggaagcttaactatctccagtgtgtctgaaaggttttcggcaggtaggaagagggggtaaaaaaaacctctccaaactaagaatgaaaagaaggaatacaatacctgcagaaaagatctgatgggaaagaagggaaagaatggtgaaatctacccaggctgcggaagaccaggagagccaggctgagccttcgctaggacccggaagacaccaaagcacaccgcgcacgctgccgcctcaggaccgaaacctctctctgcaatttctggtgctgggatacttttgccctgccacttctcaagatcgacaacttctcgagctcctgcagccaggatcagaccactagcttctctacaaccagtcgagctccacccagcatgtcccaactatcccctgtgggcaaactttgctcccaaaaggctctgattccagaagcagggagcaggcagctcgagaagatcggccctactgcaggccaagcgctaaatcctagtggggaaaggacacgttccctcctgcacagcccctcggcccctccaggccaccacaacagactgcctaaaggagaactgccaatgtcaccagccccagggcacatcaggtttccagctttatacgaacactcagcatctgcccctcaccatcctgtcccaagccagcacgcgccgggtacagagctggagcccggcgaggctgactctcgcgccggcagcactcggccccaccgcgctgcaccggggactaaaggcccgaccccgcgcagcccgacggcttccgggacaggcgccctgggccacgtgagcccagcggagaccctacacggccccgcgggcctagggcaggtcgggagagaggcggcccccgcggtccgcccgcggccccagacccagctccccgggtccgacctcacaaccccacgctgtagctccgcccccctagcgccgccattttgtggcgtcttcggaagaggaagccgggagtgcaaaccccggggtcgctgggggccggaaggactccgccgaaggtgaggggcaaaaacggcccacactgtctaagacgcccccacgaagcccaccgcggcgtctgccccaaccccgagtcccgcccgcctcctcggggcctggcggccaatccgcacgcagagccccgggagcgacggcgccaaagcccaatgagcggcgcgcgcgcgccctggccgcctctccggagggcccagctggggcaaccacgctcgggacgaaggcccggccggcggcagtctgcgcagcggctgcgtcgcccgcacagagccttccctccccgctccgcacccagcagccaacacaaacctccgtagccctggtccatgtcttcgacgcggcccaccagcagccccgtttactaggcgaccacagcacgcatgcgttcagcgcacctccgccatcgactactggaagaccaggcgcacacgtcactacttccgcgcgcccccattggctggtcttcacgagggcccgccctcgccgtcccagctggcctttcgggctgctacgatccagctccgtggcctaatgggagttgtggtcccaccgcggtgcccgacggcccggcccgcgcgcatgcgcaccccgcccctctgcccaccccgccccgcccgcgcggcacagtaacagagaaacccggaggtgggatgggaaaactttattaggtttggtttccagcttcggccacgcgggctccgcccgccccgagctcgggtcacggggcgcccccgccgccctcctcgtcgtcctccacgtcgaggcccgggatgccgcggatctggcgttgcagcgcccctcccagcaagggcacggcgccctcctcctcctcctctgggggcggcggcggtggcggcgacacggccccgggggctggctctgggggcacgggaggctgcgccggcacgccctctgcgccctccgagatccctgccgcttcgccctgcgccccctcgtccagggcaccgccctcagcctcctcctgctccttctcctcctcggggctgtcggtgaaagggttctcgccctgtggggaggggcgcggacactgaagggagggagcacaggcggggactaagctggggacagggcaggcccggaccagtgcctcaccttcaggtagcgctccagcttcttgctgatgagcttgttgttgagaatactgcgggccaccatgagggaggacttcttggactgctccatcatgagctgcgggcagggcagaaggagctggagaggctgctctgagtgccctacaagttgctgccccgaccctgccagcttagagggaccccaccccgcccctgcacccacgcacttccagccccaccaacggagggccactccacaagcatggaaccacaacctatctgatctttgttcaaattccctctccttccacaccacacttactgtaggtaaataaaaatacagatctatatatctctaactttacggctgtattacagaaatctg

SEQ ID NO: 67189 - DNA, 448 bp, Homo sapiens
ctttttattttggttttcccattaaaaagtgtgtataacaattataacaattatttctgggccgggcagtggctcatgcctgtaatcccaacactttgggaggccaagatgaccagcctgggcaacagggtgaaaccctgtctctacaaaaaaaaaaaaaagccagctgtggcagcatgtgcctgtagtcctagctacttgggaggctgaggtgggagtgtcacttgagcccagaaggtcaaggctgcagtgagctatgattgcgccactgcattccagcctgggtgacagagcaagaccctgtctcaaaacaaaaacaaaaacaaaaaacaattatttcttaaaagtaattatttggggtggcatggtcatatggaaataagtattattatatatacataaaatttcctatcttctcaactttcaaactatttctcaacataaaatg

SEQ ID NO: 67190 - DNA, 1647 bp, Homo sapiens
tccctttcaaatcccattggcctcccactggcctccctggctgatcttctaacaagccaggcagttcctgcccgtaagccttttacagcaaaagctccctgggccagatatctttattcgctccctccatttaggtctctgctcaaatgtcacctctttacagaaggctccaaccactccacgtagtggagcgacccccgcacggtactgaccaccctaaaatatatcctacactcgcttatttgcctattaagatcctcgcctctaagctgcttgaggaattcttgtctgtattcccaatacccagtctgtaccggacacggttcatttgacagacgcagagggaattaacatggaaccttgtcattccttgcagttcagcccctaggggcccaaggctccccgctcagcccaaacccttccaatatttacttatccccctagggcctggcgcctttcccagttctgaaatagacaaaagggggtggtgggtgggatcgggatgggggtgtagagctgcggcgtttttgcagagaaactgcgcgggggaggacgcgacaatggcgacggcagccgagcctgctgcctgctcgcaaggaccaaggcctgagaaagggaaacctaaggcgtcgaggtccaggagcgcaggccagggacggaggtggtgggggcggagacctcgtgcgctgaggcccggacccacggacacaggcgacagaagccaagacatcaggcggccgggagccgggacgccggctgcagacacagagagctgaggcaacgaggcgtgagggcagcgaccctgaggcgacgggccagcggcgccattttgtgaccgcagggaaggcagtgacggggccccaggggaggtgcgggcaagcctggtgcggcatccgcacgtccctgtcccatcccccacgcagagcccgaccccaccctgccaggcccacctgtgtagctcatggtggcgggcaacacaacatccgacgacgccggcttctgctgctctgaacatccgacgctgcgatagctgctgctaaccacagggtcccctccacacacacccgagccccgcctcccgaccgcattggctcataccggcctcggcttcacgtctattggaaggaaccgctgtctatctctatgcctcctcatatcagtggctggaagctgctggcaatctcgtgagagccccgccttgtccccgccttctgttattctaaggcctcagtgattggcctacagaagccggcagagaggcggagtcctatagaatttgagggggcggagctgtgcactacggaaaggcccaaggcccaagcatggtcgggctggaggagcgcccgtaccctggagacccgccagagggagtcgggtctacggctcagggcagggctgggatgccaactccgccaccgaggtgctgggtaggggacctagctaagtctctcaaattctctggccttcggctccaaaacaagcatagcaaagccatgttgagaagagaaaattaaaacagcaccaaacaagatgctggacacacgtttcaacattacgtgacaaagtgtgtgtaaagaaatcattctggtgccagtgcactgaataaatgtgattaatcgtaacaaaacgataatatatttatatggc

SEQ ID NO: 67191 - DNA, 1998 bp, Homo sapiens
acaccagggtcaggaggctggagaggccacacagaggcagggagccagggagccagggacagggaggtggcttcacagcacttgtgaggaatctccaccagacaagacagctggggctgcagagacaatgggggaccaggggtggcctactgatcacaagctgggccctaagtggggtaaggtgtctgcacctacagctatctgacttcggacagaaagagttggaatcacagaactttgtgttaagtttctgagacatctatcaggcccgcagcatccctgggtgaggagtgtgtggcagagggaaccaagggtgaattttcacgtctagttgttcaaaggggcctgggaggccagttgaactccaaatttagagttcagagcaaaggatgaaggaactgtgccaaatggggccttggaggcgttcagtgggatgtaacggggcagggggccatgtaggttctatgctcagtttgagtctcgcagaagcaaagagtaggcgctgaggactggggcaccgaggactttgtcaaagtctccgggtcgggtgggcgcgtctgtcagatggggcagggctgaagtgagtttccgcaccggacggaccggaaccgtggcaagggacgctcccggggctccaaagggggcaagggacatctgtcagacggggcaaaggtctcgaggagcggcggaggagtgtttctgaggcctgggaccctgcgagcggcgacagaaggccctgggcccacacaactaaagggcctgggggaggggggggtcccgcagactggacggaaggcgtcgggggcggcggcaccggcaggcgggattccgaccttcccctccccacaccctcccaagcgcgggctcttaccgggcgcgggagcggacgcgggcccgggccccggctccggctcggccttgggcccgtcccgcggcggcggtggcggtggcggtggtggtggcggcggcggcgggggtgggggcggcggcggcggcgcggggggtgccgcggggcccgggctcggggggctgggcgggggcgcccccgcgggcgcgcgctcccgggcgccccccgcgcgcggccccgccgccgccttgctctccgcttttgtcactcggcactgggcggtggaggcggccatcttggctccggcgcacgcggggcggccgccccaggcgggagcagctgagcgccgagtgccgagtgccgctgccgccgccgccaaacccgctccgccccgcccctcagggcgcgcccaggttggcctgccgagtgccgagcgccgagcgccgagtgccacgagcgaaaccgttcgtctgggccctgagggcggacggctgcagctgctggaagcttgtcgcgcgccctggctagcggatgcacccacgctgggcgcccagcggcctctaaccgccgccccagcccagtccccggacatctctatccctaggatgggaatcttccggcctcactcagacccccttaaacaacgtcaaaactcttaagagccccgacgggcggagctaggacctgccctaggaccctgccccattccctttccggaaagtctccatctccgagtcggggatcctggaaaacacctgatctccaaccacaagaatccctccagtatcatcctgttatccaaccgtcccccgacggtgccgttccgcagacctagggaaccccacaaggccggcaacacatttcaatcaccgcctgcttctctctccgattgtccccagctgttccttgacagttgggtggggctagaatcggaacattgccccgcccccaacctggcacccgccccctcctgcccacttagggagagggggcaggcttctaacgacagccttgcagcgccagtgcccagacctagccctaatgttgcatatccttacttaaggcaaggcttccaagatcttcccaatcactccctaaccgccaaccctctgcctcgcagttattcactgaaagactggtcatagctctcc

SEQ ID NO: 67192 - DNA, 1306 bp, Homo sapiens
aggcaaccggggcggggccggggcgccaggcctggttgcaggcgctgccctcgggggcctggggattcccagggggctcctccgtgggctggcagtcttggtgggggtccctacccaggcccggaggaagcacctgcggttgtccactgggtgggcactgcccgcggggaacgggcgggaccgcaacttcggagcactttggcagcgtggggagggggctcctacccggacgccccccaggggtcgcagaggtgggggctgcgccgcgcgggcccactcctcgggggtccagggtccgggggatgagccctccgcccgtgcaccccggggcaggagaccccgcgggacgcgccgaggtaggggggacacctgccccaagacccccgcccctccccccacctgcacggccccgcccccggccaggccccgcccctgaaggccccgcccccgcccccgccccggggggtcccgcctggcccggcccggcccggggcctcccccgccccgctacggctccgccccacccgcgggctccccaggccgggccgggcctcaccggggaggcggcgccgccggccaggtgccggggctcggagctcccctccttggtgcggccgtcgctgccgctaccgccgctgccgctcccggtgccggtgccgcggcctccgcagccgccgccgcctccaccgctcgggggacattgtccctttaaatcgctccccccgccgccccgcccccccggcgcgccgccgtgacctcagcgcgacagccccgccgcgccgccatgatggggaggtccggggcgccccccccaccccacccccccccccctcgccgccccggggggggcggccagcgggcgcgccgccatgttgggagtggccaagcgggtcacccttaaagggcccgcacggcctgagtccagggagaggccccgttaccatgacaacacccttgtcgtcccacaccccaatggctccttatcgtcccactggtacttccaatggtaggctcgctaaaagcactaaaagagtggggagggtgcagagaagttcccccatgggtcattgatgggtcattgataggtcattgaagactccacccagccaatttttagccttttgtcccctgccccccatcagctaccttccaaccacaagctcactccctccttcccaatcatccacactggacttcagcacctccatgtccctagagttgccctaggtcttcagtcctaagtcaccttctccacccagttcccaggatcacagcttccaggactaccccatcagacacacatcat

SEQ ID NO: 67193 - DNA, 1736 bp, Homo sapiens
tcctgcagctggccccgcagctgctcctgctgctccgtcaaggcccggatttgggtgctcagcgactccacgaggcgggacagcactttctgctcctcacgcagagcggccacctcgcactgcagctctgccaactgtggtgggagagcagctgtaatctgacccgttgtcccgcccctgtgtctccccggagaccctgacctcccaggcccaagcgctcagcgtcatcaccggcctgcctagttggggaacatccctcctgcggtacagctggggagactgaagctcagagagggtcgggctaggcctggggtcacacagcacagcgagctgggtacttgaacccagacttgcctggcccttcagtcttccccagtcgcgtccctgttcccactccccaggcgcggacctgggcctgaccttaccttgttcacaggtcggtgcgtgcccagtgcctggtttcggtcttgcggctggtccatttggcgctgccagggtaccgacggcttccgaggcagcgaggcggagtcccgggtccaaggccgggcgcggggcgctggtcccatgctcagggagcctttgggtcgcggccagggccccgcagattggcggcggcgggcaggacgccggaccgggacactctgcgtgcgctgcaccggccggggccgccgcaggggccgctcttcgtccggccgtggccgggcccaactctctgagcggcgaacgctgcgcagagactggctcttggagatgagaggggtgtgcttggggaggtcccggggggccaggaagccgggcttctcccctgcggagaggctaggggtgggatggaggatcttagaccctccactggcccctgagacgaccccatcccgacctgaccagaagtgacctcaccccccacgtgaacttgtcctttcttttttttttttgagacaaggtcttgctctgtcgcccaggctggagtgcagtggctagatcatagctcactgcagccttgaattctggagctcaagctattccccagcctcagcctcccaaatatctaggactaccagcacatgccactatacccaggtaattttttttttttttggtagagatggggtctccctatgttgcccaggcttgtcttaagttcctggcctcaagtgatcctcctgcctcagcctcccaaagtgctgggattacaggcatgagccactgagcctggctcctgtccttgacttctgactataatactgtcctctctatgacccttgacatctctccaccctaacctctcctctcatccccgacctcaaacacactgtgacctttgacccaaccctttctataacctgtgattcccgtctgaccctgggcttgacctctgctcacaatgatccaacttcacctctgacccctgtctgagccctgctccttcctgttcccacccatcagaccccagaccagacttgaggttacctggagtggacctgggccgggggcagtgggagacgcattggcactgacacaagcacaggctggccctcctcaatggctcgcaggatggtgggcagtggttccagggtgtctcgggttgtctggtgaggcatgcaggacagagactgagcaaagtctccagggtcagagtctcccaagccttcttgcctccctactctgggttcaggccatacctggtcaagctcagcaaaaattgtacagagctgggcatgcaggacagctaactggag

SEQ ID NO: 67194 - DNA, 956 bp, Homo sapiens
gtctgtggctggcagggtccttgggggtggctccctcctggatctcttagagacactcctggcaggtcttggcttaacagtctggaaaaagacaagggagtgtgaggcttgggggtggttgtggtatgtggctgggtctgccctcctggtggtggaaccctggatcagggaggggacagtggcccaaagtgagagagtgaggacaaagccaactataggccgagatggatgtgctagtcaatagcttaatgaaatggagtggcagtatgtaggtagcacgagattgtccaggtgtgattctaaaattgttttagtgatggcgatcaagggctgggatgaggtcatcaggtcaaagttgtgctggcataagagttgtcatcaggggttaaggagtcagggacgaaacaagcaacctcagagttgagattgtctggacagagaattgcaacacaggattaaggactggacagaggttgtgaaggcaaaaggtcacagcctaggttcatgttgtgtggacagagggccttcgggtaggggcaggggtgaggtcaaggttcggcgggccaggatgaggtggtgcagcctgacaggttgtgacttgggtagagaagtcatgaaggccaggctgaggttgtgagggcagaggggctgttggcaggtgtcagggtccatgccttggctggaaaggtagaggtattaggagctggggaaaggacaggctggctgggtctggggctgagctgaggctgcataggcagaagtcacaggatcagggatgttgcccgcagagtgacccgcaaaggctgggcctaggtttcctgaatagacgtgccgccgggaagttgggggcctggctgaggctgtgcgggcacagctgttacaggcagggggcaggggcctcgtggagcttgtgtagacggaggggcggcgggccgtgtagtgcaggctgcgaagac

SEQ ID NO: 67195 - DNA, 1862 bp, Homo sapiens
aaagtgctgggattacaggcctggccagtagtagaatttgaatccaggaagtcttactcgacacactctcctggtctagaatctaggttcttctccagtccaccacctaacctgtgtagctttgctcttctctgcaaaaaatgccctttctggcttctcccccaaatcatttctctttcttcctagcctagctcttatgtctcctcctccaagaagccttccctacttttgctctccaggccccagattccttcccttatccttgccttgactctgtggagctgggaatatctatgtccccatgctggagcttctttgagagcttgagtctccagcctcactccatgcagggcaagacatagatgggacagcagtacgccttctgcagagccaagaggtttggtcccaggactctgccccctgactcacctgtccctgggtctgaccacagtagcaatccgagtaggatccagaggacaccctgggccattgttgcaggattccagcttccaaggggtatttctggttggcctcggcagagaacctcggcagtgctggagggagacaggcacagagaactgagcagagcctttgaccactgtcaaagtccagcggcgaatgacagacctgcctctcgtagagctgtgggcgggaggcagcagggacatggggcagcgtaccctgggtcaaggtcatctgggcatcctggtctcccccagtctcttctgtccctcctaggctgaggtcagtggtcagtaagccaggcccatccccagaggggcctggagaccaggtggttcagactccataaactctgcccattctccagtgaggtggaccgaggcaacccctcaagtcctgtccctccccatagtgacggctctgtagccgctgctggccaccagaggggactctcagctgccgcctgctgtactggtaagaccggctgtgttgagggagaggagagaagcagaggcctgaagttggcactgccttctgcttttttttgcaaccaacacttcaggctcaggcacagcatcggtgcgggggctgaggacagtgtttgctgaggcctgaagttggcactgcctcctgcttttttttgcaaccaacacttcaggctcaggcagagcatgggtgcaggggccgaggacagtgtttgctgaggcctgctctgagcccatggggaccaggggctgtcacctctcatccagttccagcccttgatttcaagccaccagcagtagctgagagcaggggttgagcttgagtgttcaggaccctggcattgttccaggagctggcttctggactcacctgggctgacagtgaaatgtccttcctcttctccgggtgcccatgactgagacctgcagaatggacccatctcccctttattctggcatcagatggggcaggttgacatgactgggctgttgtgtatgtaaattgcttccctgtggggctcccacctcaaaaccagcccggggagtttccaggagacccaccagctggagactcagccagggcaggcctgggaatgtccagcctgagccaggcctgggattcccctgggggccacccctggggcctcctcaggtgtcctctttctggggacctcccagaaaaaagctgggcacatagtggaagctcaggatgtagggtgctaagtgatagagtgaatgggggacacttcccatgggagtaagagacaatgtcctcctccaagctcgtttcccaggatttggggataggagctttgcctggtagaaccatatgaaggttgtgggctgaggcagggactaggttgaggcatcctctttgccgcaaaatttaaggcagtgttgaaaatctaagtcatc

SEQ ID NO: 67196 - DNA, 767 bp, Homo sapiens
tgaccccgggaggcggaggttacagtgagccaagattgtgccactgtatccagcctggacaacagagcaacagagtgagactccatcttaaaaaaaaaaaaaaagtggctgtgatccccacttctgccctcccctcctcttctctgcccacctccctcctgagtgatctcgctgacctactgccatgccatccaccgtcttcccaaggcaggtgactcacagatgcaattctcaggaggtgccctcacgctgagcccaactgcctcctggatgtctccctgaatgtcatcccatgagacccacgagacttttagactgaaggtgacccacggtttcccaatcttagcactgtcaacatttgagcctggattattctttgggggtgggggtgttctggatgttgaataatatctctggccttcacccactagatgtcagttgcaccaccctgaattcccccacccccacctctaccccccacccagcagtatgatctcctgatgttgctaaacattccctggcggaaaactctactctgctgggatggccccaatcaactgcaaactcaaacagctgatgtttgtccagcctgtgccctgtgccaggagtggggctgaacaccacctcatcacatgggcttcttctgcattttatgcatagggagatggaggctcagagcagccatgtgactagctcaaggccacacatccacgaagcccactcttagtgctccaggccctttcacttactcctccttcctggtctcc

SEQ ID NO: 67197 - DNA, 1231 bp, Homo sapiens
tgagaaactctcaaatgaaaattttatatagtgtcgtcgggcacggtggctcatgccagtaatcccagcactttgggaggccgaggcgggtggatcacgaggtcaggagttcaagaccagcctggccaagatggtgaaaccccgtctctattaaaagtacaaaaactagctgggtgtggtggcccagctactcgggaggctgaggcagacaattgcttgaacctgggaggcagaagttgcagggagccaagactgtgccgttgcactccagcctgggtgacagagtgagactttgtcttgaaagaaagaaagaaagaaaaagaaagaaagaaagaaggaaggaaggcaggaaggaggaaaattttatatagtgtcataccaataaaaaggaaataatgaaactaagaatacagatcactgttggaagagaaagcagtggtgatggtgtgggcactgcaggaagtggtggggccgtggcacactagaagttaggtcatgctgaataggaagcatttgactttctctggtgcttttagctctggggctggttgaaggcctctctctggtgtggctgtccagggtttgtcccaactaagccagcttgagaaggggtcatgctttcagtttcttctttcacacgggaaaaaaaagaccaaacaggaaggtgcccagggcgtggatctgctggtgccccaggagagccagctggctgggcagcccttcttccccaaaggcagctggtattgcgtagggacagccaggtcaccgagtggccgtcacaacaaaccccagcacagtccagcccggccacagccacctcccctgttgtgttccctgctgctgcccacatcctttacccaccgtctctcggcccactagaggtatcagaaattccaaattttcaaagcagttttaatattttcagtgtatatgttgggattttataatggttcatggccagaaaaggttcagcacctcccacacacagacattgatccatttcctgttcttggcatctctgtactttgttggtccaactcagacagcaactttaaggtgttcagtgcagctggccaggcacggtggctcacgcttgcaatcccagcactttgggaggccgaggtggatggttcgcctgaggtcaggagttcaagaccagcctggccaatatggtgacaccccgtctctactaaaaagtacaaaaattagccaggtgtggtggcgcatgccg

SEQ ID NO: 67198 - DNA, 2658 bp, Homo sapiens
ctgagaagtcttctgccagacatattggagctcctttgtatgttatttgtttcttttctcctgttgcttttaggatcctttatccttggcctttgggagtttaattattaatctttttttttttttgacaggatctggctctgttactcaggctgtagtgcagaggcatgatctcagctcactgcaacctctgccccctgggcttaagccgtccttcaacctcagtctcccaagtagctgggactacagatgcataccaccatgcccggctaatatatatatatggtagatacagggttttgccatgttgcccaggctagtctcaaactcctgggctcaagcaatccacctgcctcggcaacctaaagtgctgagattacaggtgtgagccgccctgctcagcctaactattaaatgttttgagttagtcttatttggattaaatctgcctgcttttctgtaaccttcttgtacttgaatgttgatatctttctctaggtttgggaagttctgttattatcctgatctctctccacctcctctttaaggccaagaattgttaaatttgcccttttgaggctattttctagatcctgtaggcctacttcattttaaaattcttctttcttttatcttctctaactgtgaattttcaaatagtctgtcttcaagatcactaattctttgttttgcttgatcagttccgctgttgagggactctgatgcattcttcagtatgtcaaatggatttttcagctccaggatttctttggttcttttaaattatttcaatcttggttcttcttaattatttcgatctctttgttaaatttacctgataggattctgaattccttctttgtgttgtcttgaattttactgagcattctcaaaacagctattttgaattatctgcctgaaaggtcacatatctttgtcactctggaattgatcactggtgttgtatttagctcatgtggtgaagtcatgttttcctggatggtcttgatgcttgtgaatgtttgttgatgtctgggcattgaagagttaggcatttactgtagtctttgtggtctgggcttgttcgtacctgtccttcttgggaaagctttccaaatattcaaagggaattgagtgcagtaatctaagtctttgataaccacagctgtatctacacagggagcacctcaatcccagtaatgctgggactcttgcagattagtagaagtactgccttggttgtcttgggtaagatctgggaaaattccctggattcccaggcagagactcttctcttcccttactttcccccaaacaaatgtgtctctctctcgatctgtgctgatctgtctggagctaggggagggttgacacaaacacccctgtggcatctaccactgggactgtgctgagtcagacctgaggccaccacagcactgggtcttgcccaaggcacacagtgaccactgcttggctaccacctgtgttgactcaaggcccaagggctgcataatcagcatgtggtaaatctagccaggccttgtgaccttcccttcagtgcagtgagttccccacatatctggtgggtccagagatactgtccaggagctgtggcctggaatcagggactccaggtgctccatcccactgtggctaagctggtacccaagctgcaagacaaggtcccctttactcttacctctcctttcctcaagcagaaggagcttctccccgtggccactacggctgggaatgtgctgggtcacacctgaagcccgtatggcactgagtctcacccaaggcctgcaacaagtacaacccagctaccactgatgattattcagggcctatgtcctctttaatctgcaggtggtaaatcctgccaggactgggtccttcccttcaaggcagcatgtttcctttgtccaagagtgtgtttagaaatgttgtctgggagctagagcgtggaatgggagcctcaggatgctgtctggtgccctattcttctgtggctgagctggtatccaagctgcctctcctcaagcagaaggaagaagtctctcctggagcagcaagctgtgctgcctggagttgtgggagggatgatgcttgccaagactcccttggctgccctggctggtgcctcactaggttgtgtgcaccccaagttctctggctctgagcccagcgcagcaccaggacttgctccagaattgcagtccttgtagctggatttaccacatactgattgtagagcccttgggcctttaacaaacataggtggtagcctttcaagtttatttaggaccctggagcactttagcctgcaatggtggtactagctggaactcaggttctgaccactgggatggacaattcccttctgactagggctggcctaaatgcttcctctgtcggcactggctaaattctaccccatgttgctttctgctgtgacagggcagcactgagtttcaatgcaaagtcccatgatcactgtgctctctcccctccactcaagcacccagattctctctccagccatgaggccacttctgggagatggggaagtgttagtgtaggcaatttaagactcttttggccaggcacagtgggttactcctgtaatcccagaactttgggaggccgaggcaggca

SEQ ID NO: 67199 - DNA, 6373 bp, Homo sapiens
ccaggctggtcttgaactcccgacctcagatgatctgcctgccttggcctcccaaagtgcttggattacaggcatgagctactgtgcctggccagtaggcactctttatgtattgcaggtggtactgagtaggcactttttatgtagcgcaggcaagagtaggaactcttcatgtagagcaagcagcactcagtaggcaccctttatgtacagaaggcagcccacagtaggtacactttatggagcacaggcaacactcgagcaggcagcactcaatagaccctctttatgtagatcaggaaacactcagtaggaagtcaccatatagagcaggtggtatcagtaggcactgtttatgtagagcacttggcactcagtaggcatgtgttatgtagacagcaactggtgctcagtgggcactcttcatatacagggggtggcactcaataggcactcactatgtagagcaggtggcacacagtaggcactctatgaggaatatcaggaactgagtatacagggttaatgtagagcacctggcacacagtaggcacactttatggaaagcacttggcacagagtagacaggatttagcacctggcacacagtagctgcccttcatttagagtattggcacacagtagaagtactttccatgcagcctttgtgcagagtagagactggcacacagcagctcaagtgctagttgccaccctttcccttcactcctttttggggctccctcctcttaggagccctcattgtcccccgctaaggccctcatcgaacatcccatttcccagatgggaagactgcacccaggaggggcagtactgaccaaagtcagagcaaggatgaggcagaatgaggactccattcatggttccctggctctgcccttcccctgcctggaccccatccgttccctctcatcctaaccctccacgtccccgctctgtcctcctatactgagtccggcctccagatttgcttttccagctgagctcttaatctccagaatctgacccaggtaatcctcagtggggctggattctttgttcccgttcctagcagtcaggtctccaacagggccctggactgcctggaggcaagacttgaactccatccagcagcagggggatagaggcttgtctcttccaggttgcctgattcagcatccagaagtggtacacggtgtcctaccggcccagggttagagaggagcacaggagatgatctggaacaaggcttggcctggcctggctcgcttgacacctgaactctcaagttcatgcttttatctgccacacactcagtaggtgctctttaagagcaggtgtcacacagtggaaactctatctgacccctctcggcttactctccaccttatgtgggaggtgctgagacctgaggatccagtgcctgtgctgtgtcaccctgagctggttcctctgcatccagctggtctcccacacccaggttttggccagctgcccagacatgggagcggcacccaggctgtggggattggctggcccagcccagcccagcctagcctcccacagccttccctacatcaggggccaggggaaaaaacctcccagaagaaggggagaggaggttgtgtgggacaaggtgctcctgacagaaggtgccagggtgggggtggtgggcctggggcatcctagcctgtgatggagatgggcactgggcaagggattgggcgcacacataggggagccccagccttcccacattctccattgctgcccaaggcccaggcagctcctggttgctggcttggaggatgagtggttttctaactgaaaccaagcccctggcaacgtcctaatgattcaggctgggcctttctggactttaatcagtttctctgtctttctcaatctaagtgcttaccgggtaactggaggccacttggttgctggttttggctgggcctttctggactttacccctcagcccctgtttatccatccctgtttactcttactgttctatctccagcactgcccgtctctgcctctctccactgtccctggagctccctgggcccttccctgggcctcaggacctcactcaccaccccatctgccctgcaggatgccacagctgagcctgtcctcgctgggcctttggccaatggcagcatccccgtggctgctcctgctgctggttggggcctcctggctcctggcccgcatcctggcctggacctataccttctatgacaactgctgccgcctccggtgtttcccgcaacccccgaaacggaattggttcttgggtcacctgggcctggtgagtgtggcagcaggacgggtctggggtctcagggtggatggacttcctgaggggtaagaatgaggctcaggtgagagggggtgggctggggtctggggtggcagagaagcaggggaggcgtcttactcattcctctgcttactcatttctgtgaggtgccaacccaagcccttctcacctccctgttctcccactcttggcctgtgttgaatccttttcctgcctgtctttccacattaatgcacctctgcggggctcttgggcagggggttgggtgcacagaaaggtgaacccctggcgttcccacattctccattgctggactcgaggcctcctgtacccactgttcagggtcctctccctacctggcctatttcctcttatgagggtataggtgggccagaggagaggtgtgggctgtctctcacctccaccacatccggaggcaccttcctcttatcttgttcctccccagtaagatgtcccaatggggtcctgttgccaaacccacataaaagttggccactcacttcccctttcagaagccttccctgacctttctcctcccccagaccttgccctctgacttagacctgctctcccctttgcggaacgtggtctcaatctgctcattgcaaatggcaggattgatgggtgtgtccacaggtgaagtgggagggtgcacaggatgcactagcacagagcctggtgcagaagcttctcccaggtgggagccactgtcatgatggacagttagagtcacctctgctcccctagtgactgctgagaagggaaggtcccctgtgtgcagaaccttctccatgggaggaactggaacctgtgtggctggtggaggaaccagccagggcatgaagggatgtggggaccagccttagggacatgtcctgagtccacactgctccccacaaacctcccctgtgaggacctcctcatatgcccacctctgggctgaaatgactcccagaacaaggaaatttttcctctcaagctaagtgggcctctgtgagtggacagtgtgtcttttccttctgccttgggatgcgctcttgggacttgggggtggccccaagagagatagagcaggaggaatgtagacagatagataggtaataggatagatggatggatggatgcacagatagggtgaatagatggctggctggctggataagtaggtgggtagatagacagatagatagatagataacaggatagatggatggatggacagatggatgcatggataagatggatggatggatggatggatggatggatggatggataatacatacataaagtagtagataagatggatacattaggtggatagataggtagagtggatatgtaggatggatagattagatggatggatagatagctagatgattgatagataataggataaatggatgagtggatgaatgtacagataagatggatggatggatggatggatgggcagatagatatatagatagaaaagttagataggatgaatagattagatagataaatgaatagatagataggtaggtagatagataataggctagatggatgaatggatgcacagataggatagatgaatggatagatagacagatatataagatagaatggatggattagatagatggatagatacatagaaacataggtagatagatagattagatagatagatagatagacagatagatacatacatacatacatatatagatacatagataggtagatatgtagagatatatataggtaaatagatagatagatagatagatagatagatagatagatagatagatagatagacagacaggcagacagacagatagatagatagaagagggagtttatttcgggaattggctcacaggattatagaagctgagatgcgtcatggactgctgtctgcaggctggataaacagacactggttgtgtaactgagtccaaaggcctgagacggtggagttctggtgtccaagggcaggagaagatggatgtgccagccccacaacagagcaaattagcctttcctctgcatttttgtgctacctgggctctcaacagattgaatgagctctgcccacactggggagggtgattcttccttcctcagtttaccaaattgaatgccagtctcttctggaaacaccctcacagacggatgatcaactatctgggcatcctttagcccagtcaagtggacacctagaattaaccatgacaggaggtgacggcccctgccttgcttgcaggtcacccccacggagcagggcatgagggtcctgactcagctggtggccacctacccccagggctttaaggtctggatgggccccatcttccccgtcatccgtttttgccaccccaacatcatccggtctgtcatcaacgcctcaggtaccacctggaatacttggtggtgggtgctatggtgcatttgaggcctgcaagtccctctatccccaagccgtgtgtggcccctgcagtactctggtctctcctttccttctctctcagccatcttcatctttctttcatgtattcactaattcccatctcagcatctcctctctccattgccatctgaccccctgtcctggtgttctgggctgccctggggccccaagagacctcaacccaaggccctgtcctggaggaacccccaagcttaaggaggtggatgtggacagagacatccccaacttcatggggtcaagaaagggccagagggagatggatgacagcccagagaagagcaagttctctgctggggcaggctggaagccttcctggaggaagagttactggagccatgtctggaacaatgagtagggatgtttgaaaggagagtgcagggtgatgcaattgggcatcgttagtgttcaaggccccttgccaggtctagcgtcaccttgcctgtcacaaaggttagaacaatgaggacttgtggctggtggaggatctggactgttatttctgtgatgtccatctctggtgtgggtcaagtccttttaccccatcctgtagtttgtctgccctaagttcattgcttttctgctctaggccctgggaatctccaaaaggagactccagcctagtttggggccctctccttgacccctgtgcttcccttcttggacaggccaggctgagcagggaaacaggcagcatcctacagagaccatggctctggcctcaaaatgctgagtgactctgggctggttcccagctgtctctggttactgaggtctctttcagttgtgagtggtggaaatccaacctggtgtagtctaagcaaagaaagagaatctattgattttaaagtccagggaggatggccttcaggcatggctggatccaggtctcacacagtgttacttcctctcttggctttagctttctccacgccacttttggcttgtcttcctttcttggctttagctttttccacgccacttttgctttcaagacagtctttccctcatgacgtcaacaatgagtcctagaagctcaattctcatgggaaagcccacatttcccccagagttcccagaaaaggcccatgatttacttctcctggcctggatcaccagatcaatttttcacccagtccctgtgtttctgattgcctagtctcggcaggcctgggccttctagagctactgttttgggggcacaaagaagtttgatggttaaggaatcaggccatgggtgcagatagacccagtctcaggcctcaggtttgccatggtctgggactatgggcaaattactttatcatttagagcctcagtctcttcatctggaaaatgggatgaatgagagcccagggaacatggtgtgtggatccacatggggaaagagcttttctgtctgtgtaactgaaggactggagagtcctgcatggaggatgtgaggaggaagcccagtgggggctcagcactgagagggagatgagatgctgcttgaaattctcagggagagggcttccacctcttccctgcagatcctt

SEQ ID NO: 67200 - DNA, 1649 bp, Homo sapiens
cctccagctgggctctttatccccagaatctgacgaaggtaatcctcagcggggttggggctggattctttcttcctgcttcaagcagtcaggcctcaactcaggccctgggctgccaggaggcaggacttgaactcttgccaggctgtgaagccagagatgagaggcttctgtctctgaatctcctaagtctgcaccaagatgtagtgcctgacatcctccccgcccatgtttggagaggagcccagatgatctgggacaagggttggcctggcccagctcagctggctgccaactgtcatgataagtatatgcttttatctgaacacccttgtcttggaagggcagggtggaggtaaacttggggttcagagtcccctctaaccaccctccaacttcccctgcaaactcccaagaaggtactgagacctgagaattcagtgctcgtgctggggcaccctgagctgcacccagtgggcccaaccccaggttttggctggctgcccaggcacggaagacacacccaggctgtggggattggctgcctcagcccagcccagcccagccccgcctcctacggccttccctagatcaggggccagggccaaagacctcccagcagaagaggagaagaggttgtgtgggacaagctgctcccgacagaaggtaccaggctgggggtggcagggctggaaggtcctggcctgggatgaagaggggactgcctaaggctggggtggctccaagatgctggcatgggaaactgggggtttcctggtaactggactcctagcaaactcccaaggattcaggtggggcccttctggactctaatcggcccatctctttccctttctgtgtggttaccaggttactggaggccacttagttgttggttttggttgggactttctggacttcagatctcagccctcgtttactcacccctgagccctccctgccctgcccccagcagttcctgacttcgcccctatacactgtccccggagctcttccctgggcctcaggtcctcaccctgcatcccctctgccctgcaggatgtcgctgctgagcctgccctggctgggcctcagaccggtggcaacgtccccatggctactcctgctgctggttgtgggctcctggctactcgcccgcatcctggcttggacctatgccttctataacaactgccgccggctccagtgtttcccacagcccccaaaacggaactggttttggggtcacctgggcctggtgagtgtgacagcaaaatgtgtctggggtctcagggtggatggacttccagaggagcaggaatggggctcagtgagctaggtattgatggtggctggggtctgcgaccccagagaagcaagagagatggctcactcattcctctgctaactcactcattcctctacccactcactcctctacccactcactcactcctctacccactcactcactcctctacccactcactcattcctctacccactcactcattcctctacccactcactcctctacccactcactcactcctctacccactcactcactcctctcctcactcactcattcctctcctcactcactcattcctctacccactcactcactcctttcctcactcactcac

SEQ ID NO: 67201 - DNA, 1615 bp, Homo sapiens
tcctgaagccctggctgggtgagtacctgcaggtgaaaggggttggggacaaccttgcggggagggtaggggaagtgctgctcttgcccactgtccttggctgccctactaggagaagggatactgctgagtggcggtgacaagtggagccgccaccgtcggatgctgacgcccgccttccatttcaacatcctgaagtcctatataacgatcttcaacaagagtgcaaacatcatgcttgtgagtcccttgaagtctgggtcccagatggagtcttggggtggagggaccatggacacatctggtctggaattttggctcttctgggtggcactgggccattgctcttcctctctgagccttggtttcctcatctgtaaaatggggatgataatccctacttgaaaggtcatttacttggcacacagtaggttctcagaaggtgtcagtttctgtgtttttctcacagaatccctgtaaactcaagagagtaaaaatgaagattgtgtagtagtcattgctgattataaaccacttcagaactcattggcttagagccataagggtttacaattgctaacgagtctgtgagacagctggccagttcttctggatgtggaagggatcactcttggcacatgagcagctgtgggtcggggggcagctttgctgatcctggctcagttcattcacgtttggggcttcagtaccttcagactcatctgggatgggctcagctgtgacacctggactttcccccatgtgattctctgcctccagaaggcaccctgttgttcacatggcagagactgggctccgagaaactgagaggaggctgcaatgtctgtggacattgtctctgcaatacttcaaagttcaaccaggtttgagtctattagagttattacatcatcatttcaccacattgtactggccaaagaaagtcgaaagtcaaaagtccagtacagactcaaaggggtgtaaaatagaacgcatctcttaatgggagttgctgaaaaattactgtggaaagggtacgaatacagggagaagtgaagaattgggggtcaggattttgtgaagtgtctaggatttgttttaaatatgcaaactgataagttagcttgttactgtctcatgcattctaacagattcctgggtcagagacaaagggtagttgattactcatggcacaataagcaacatgtacttcttgttggtttgtatcctttttctgagtcaacctaaattccatgggggtgacactggtgggcctctacattagcctgctcatgcagtacattgcatgacatacaatgggcattaggcttagggaatctactttaatagtggcagaaacaagcctgatattggtccaggaggagtcattgccttatctctccaggtggttatctgcaaatacaactctgagaaatggctcaggtaagaacatcacagtcttgcattggtggcatacgcagcaaggatgctcagggctgatgaagaagtgcctcttccaacacagggatatttttgaaatgaatttattacaatggagatgaataaagcaaacatttactcatcatatgcctgagaaaatgtcatgtcccaatgc

SEQ ID NO: 67202 - DNA, 1582 bp, Homo sapiens
ttcactgactctcttttcggactcagcccacttgcacccaagtgaattaacagccttgttgctcacacaaagcctgattgggtgtcttctatacggacacgcgtgacaggaacctcaacccaaaggcagtctgatgaggtgtctaagataaaagtagcggcacaaaggcttttgtaaacagaggcgtttcatgtggttttcctttcctttccttatatgtgaaaaggtgacagaaaagaaatcttcctaaaagagtcagccactgctctgtggaacgatgatcatttaaatgccacgtcgatttgaaacgtacaacaaagggactaacagttgagaaccatgtggattgcagtggagacgctggcgttagagaatgcggggagggaaacgttcattacaagatttacggccagcccaagggggagcgaggctgggggaccgggtcgcggagacccggcttcgcacaccttttggaagactcagggagaagcgggggccgccttcggggggaaaggcgggactggggagcccacaggccatggctcctcccacaggatccccaggccggaggcgggatccccccatgatcctcccgtggcccccgcacaatctggggagatgcggagctgcccagagagggctctggggcgacagtcactgcgcagggacaggacaggactcccggagtcccagctgccggcccagccccaccctgcggccgagaggaccgagggccgagctgctccaggggaactcgggtcccagaccccggagtcgcagcggacaggcccgggtcccgccacagccagatccggctggttccaccagctcctcctccggtctcgggacgtccggccccgcacactcagcatttccggcttccgggtgtcccggcgtcctcccctgggcctgctcacgtcgcagaggggcggcgacggggattagaggggaggagggcctgcgcgagcagcaaagaccccaaaccccaaaaaacaaagaaaccgccagaaactgaagcttccacagcccgccacgtcccccggctacggctacgctcctgattggatagttagtacggcccctagtgcccctgattggataccgcttcaggtcccgccccctggggttagaaagacaggagacccgagaagacacttggctgcgtggagcccaaatgggcggttcctggcaactgggcttgttgtcttcctcgtgtcaggatgtaaaaagaaaagtagaggttcttcttcaaagacttccttcttcatctaattaagaataaatagtgtttgaaatgcttggtttttggtgccataaagaaatagcactttaacattaatttatttagcaaggccatttttactccctgcagaaagggtacactcgccagcagttttgccacgagcgtacaccgagcaaaggagacagggtcatttataacctgaggtgtccaccctactgctgtgtccagtttccattggctggaacgggacctcacattctgtgtttgtcctgattggctagcaacttagaacgttttaaaagaggcaaaggtggaggagaacaaaggaagaaggaagta

SEQ ID NO: 67203 - DNA, 849 bp, Homo sapiens
ttaaacactgggaagcacaggaaaagatgctcaacattattggtcattagagaggggaaggaaggggcgggggaggggagagaaggagaaatatttactgaattatgtctaggctctcttcaagcaggtgtcttagatgggtctccagaagcagattgagataaagagcctggtgttgggcctattgttaagtgtgagccttaatcggagagggggtgcggttcactgggaacctctagaggacagtgtagggaatgcactgagttattccaggaaaagggctggagggtggggggttgaaggattcatctgccagcaaccatcagtccttggttaagaaccaatcaatgagaggttaatttcccaacacttctgggcttgtctgagaggcagagtgagatccagctacaggaagctctgcagcaaagagacgttggcagttggaagacaggatagtaaatattgcaacagcaatatgcaaagagttacaggcagagctctaacagaatctactataattgaataaacagaacaagaacagacaggacaaaagagatctctctgccttatggaacttgcagctcgatgaagaagacaaacgataaaggattgcgtaccctatctgctttcaataaactaggaaacaaacactctctcagagcaataaaatgctatgacaaaaactgatcatgggataaaaattatctgggatggggggctgtttagatagaggaggaagagcttggatgaaaaggtgccatttcagccaatcctggaatcagatgagactcagtcacaaaagagctgggagaaaagcattccaagcacagggaaccgcaaatccaaagg

SEQ ID NO: 67204 - DNA, 1499 bp, Homo sapiens
taagagggagataagaagaagaatataagagaaaggtgccttcgggtgtagtggaagtgggagacggcccatgcctctcctctggcccagctgtaccctcataacaggaaatagtccaggcaaggagaggaccctggacagtgggcataagaagcctcgagtccagcaatggagaatgtgggaatgccagggactcgcctctctgtgcagccaaccctctgcccaggagccccgcagaggtgcattaatgtgggaagacaggcaggaaaaggattcaatgcaggcctggagtgggaggacaaggaagtgagaagggcttgcgtaggcacctcacagaaatgaataagcagaggaatgagtaagatgcctcctctgcttctctgccaccccagatcccagcccaccccttcacccccactccctaagcctcgtacccctcaggaagtccatccatcctgagacctagacccatcctgctgccacactcaccatgccctggtgtccccaaaaccagttccgtcttgggggttgtgggaaacaccgaaggcggcggcagttgtcatagaaggcgtaggtccaggccaggacatgggccaggagccaggaggccccgaccagcaggaggagcagccaaggggatgctgccactggccagaggcccagccaggacaggctcagctgggacatcctgcagggcagacgggatggacggtgagatcctgaggcccagagaacggcccagggacctccagggacagtggagaggcagggacgggcagtgccggaggtagagcagggagggctcagggatgggtaaaaaggggctgagaggtaaagtccagaaaggcccaaccaaaaccagcagccaagtggcctccagttccctagtaagcacttagaatgggaaagagagagagagactgattaaagtccagaaaggcccagcctgaatcactgtgaggttgccaggggcttggtttcagttactcggaaaccacccatcctccaggccagcacccaggagctgcgtgggccttgggcagtgcccctctccatcccaggccaggaccccccccaggcctgccacccccagcctggcaccttctgtcaggagcagtctgtcccagacaacctcctctctctgtctgctgggaggcctttgaccctggcccttgatatagcaaaggctgtgggagggctggctgggttgggctgggccaaccaatccctgcagcctggatgtgtctcctgagcctgggcagccaatcaacacctggcgtcaggccagctgggtgcagaggaatcagctcagggtccagatggatgggtagatgcacagatagatagagtagataggatggatacattaggtagatagataaagtagatatagataatggatatattagacagatggatagatagctattaatagatgatagatagatacatagataataggataaatagatggaatggataaacgtacagctaagatg

SEQ ID NO: 67205 - DNA, 921 bp, Homo sapiens
caccgtactgcataagcaggcaactattcaaacctctctatggcaccccgtgggatttaagtggtttggagaaattatgcaaaccaagaacatgctgcttgctatgccgtgagtaataaattgctgtttgtctctgacccaggactctcgtatctccttgcagaatccatgaagtattaacaaaactagcttatcagcttgcaattaagaaaaacatcctaagcacttcacaaaatcccaactcccaattcttcacttctccctttgcactgtgatttccagcaacttctattaagagatggagactgttttatgaccctttgagtctgtgctaacctaagcctggttgaactttgaaacattgcagagaaaatgtccagagacattgcagtctcctggcagtctctcagaacccagtctgtgccatgtgaacagcagggtgcctccgggaggcagagaaacacatggagaaaagtccaggtgtcacagctgaggccatcccaggtcagcctaaagctagcaaagccccaaacaaacatgtgaataaactgagccaggatcagcaaagctgcccacatgacccacagctgttcatgtaccaagagtgatcccatccacatgcagaagaaccagccaactgtctcacacacttgttaagtataataaacccttattgctctaaaccaatgagttttcaggcggtttgtactcagcaattgctactatgcaatcttgatctttactctcttgagtttgaaggatttctgtgagagaagcatggaaactcacaccttttgagacatactatgtgctggggacatgaatccattaccaccttttaagtagagattgttattcccattttacagatagggaaaccaaggctcagagaggaagagcattgtccccaaagcacaacca

SEQ ID NO: 67206 - DNA, 2226 bp, Homo sapiens
agtgagtgaggagaagaatgagtgagtgaggagaggaatgagtgagtgagcagaggaatgagtgagcgagaagaggaatgagtgagtgggcagaggaatgagtgagcggggagaggaatgagtgagcggggagaggaatgagtgagcggggagaggaatgagtgagcggggagaggaatgagtgagtgggcagaggaatgagtgagtgggcagaggaatgagtgagcggggagaggaatgagtgagtgggcagaggaatgagtgagctgcctccctctcttctctgtgttcccacaccccagccaccctcaaaacccagctccctgagccccattcctgcccctcaggaactccatgcatcctgagaccccagacccgtcctgctgacaaactcaccaggccctggtgtccccaaaaccagttctgtttcgggggttgaggaaaacactggaggcggcggcagttgtcatagaaggtgtaggtccaggccaggacgcgggccaggagccaggagcctccaaccagcagcagaagcagccacggggatgctgccacgggcccgaggcccagccaggacaggctcagctgcggcatcctgcagggcagacgggatggagggtgggatcctgaggcccagggaagggcccaggaagctccaaggacagtggaaaggggcaaggatgggcagtgctggaggcagatcagggaaggctctgagatgggtaaacaagagctgagatctaaagtccagaaatgcccaatgaaaaccagcagccaagtggcctccagttacacagaaagggaaagagagagagaggctgattagaatccaaaaaggcccagcctgaatcactgggaggttgccaggggtccagttaccaggaaatcaccagtctcccaggccagcagccttgacccaccccaaccttgggcagtcccctccccatcccaggccaggaccctccagccctgccactgccagcctggctcctatcagaagcagcttgtcccacataccctcctctccccctctgctaggaggtctttgcctctggcccctgatttccggaaggctgtgggaggcgaggctgggctgggctggtcgagccaatccccatggactgggtgtgtcttccaagcctgggcaaccaaccaaaacctggcgtagggccagctgggtgcagaggagccagctcagggtgacacagcatgggcacaggatccgcaggtctcaacatctcacacctgagtgggaggggatcttgaggaagagtcaaaggtgactctgagccccaaagtttacagccaccttgcccttccaaggcaagagtgtggcagataaagtcatgaacttgagagttcaggtggcaagagagtggggccaggccaaccattgtgccagatcatgttctgagctcctctccacatgtggtccaggagttcatcatgcaccatttctcagtgcagacttaggagattcagagacagaagctcctggcctctggcttcacagtctggcaggagttcaagtcctgcctccaggcaacccagggcctgggtcgagacatgactgacaggagtaggaacaaactatctaactgtgctggggattacccggtcagattttagagataaagagccccgctggaggagaatacctggaggctaggttcagcataggaggacagagaggggagatgggaggtaaggctgagaggggccatgagtggatggggccagggacaggagggcagagatgggggaccctgagtggagtccttattctgccctccccttgccctaactgtgggtagtgagcccctcctggactcaggcttcccatctgggaaatgggatgtcagataaggccttagagggggacagaggagggatcacaggaaaatgggccttagatggggacagatgaaagattctgaggagggagtgaagggaaggggctggcagctagcactttagctgctgtgtgtcagtctctgctctttgcaaaagacaatatgcaaagttcttttactgtgtactggactctaaataaagcacacctaccatgtgccaggtactctgtatacatgttgtgtactgtgtgccaagtgctctatgaaaagtgtgtccactgtgtgctgggcgctctacagaaaatcttgcttctttgttctcggtcctctatataaagtgaaatttgtgcggagtaacttatgtaaagtgtac

SEQ ID NO: 67207 - DNA, 769 bp, Homo sapiens
tggtagatgcaagttcattgccccccgccggacttggacttggtcattataataaatgggtcctcgcgtctccctgagaggcatttgcatagctcgagcatggccagatttgagttggtctgcttgactatcttgacttccttccctggccccccgaggctccgatccttcccttcagggtgagacttggggcatgctgtcttttgagtctggctcctggggagctggagctatcagcccctgtaaagcgaggtaggctgggacatatggaggaagaatctctgttccctctggtggcccctgcaaaactggcctctcttgctctctctgggactttccctttaactctgtgtctgccagtgaagctgctcttactttcacttttgggttggctcaggctacaagtgttttgcaataaggtgctaaacggggctggatccaggctggtcttgtctgtgctatatttaaccatgaatcaatacaaggaaattggtctggatgccctggctgtcctccgacccctgtcaccaccctaaatacacgaccaattatttccttgtctatagttccttcagtcggccatctaacaccaaaagaaggccattctaattctcagagagttctcaacctctggggggttaacttaattccataatcccctgcaaaatctttcttaaagttctgtaacatgcattccaatggagtaagttttgatgactttcctcccattcctccctttacagcgcagcacactcactcttgcacactc

SEQ ID NO: 67208 - DNA, 4216 bp, Homo sapiens
ttctaggcagaaagagggcaggcgtatttgttagaaagtttctctgaccccgtgttggggtcagaaccagagggagaaaggctggggacagggatgggcggagggatccacgcgcagagaatgagattgcttaactccagatcatggtgaggctgcacctctgaaactggaatgtgtgtatttctggaaaacatttggagtcttcagtttcccaaaagctgccattgatctccctagagtactggggaccccaataagcccaaaacagctggtcctcaggacgagggaaagatgtgaaaatcccactatcaggtagcatggatggcgtggtgcatgctatcgcaacccctgttctacagataaggaaactgatgcccagagagagacggaggactcttgtgaatattgggggggaccgcccctgcacctcggggacgtgaccccccccccaggctgacccgttcctcgctctgtcgtccccaggtggaggaggagctgacgcacctccagaagaaactaaaagggacagaggacgagctggataaatattccgaggacctgaaggacgcgcaggagaagctggagctcacggagaagaaggcctccgacgtacgtgtgcagggatgcgggagcccgcggcggggccaggccggagccccggggccgggaaggcggggagagccgcagggggaggaggaagaggaggaggagaaggcggcgcctcccagcgctttctccaaataagtcccgaaaaggggcactttccagcagctgtggccagcggtgccgacgtcaggccctcccccagcggtgctgacgtcggcggtccggccgggtgacctcatcgccccgacggcagccggcccggggggcggggagaggcgggggcggcccccgcgcaggcaaaggcttggggggccggggcgcggctgtgcagctctcgccggagccgagcccagccgagcgtccgccgctgcccgtgcgcctctgcgcctccgcgccatggccggcctcaactccctggaggcggtgaaacgcaagatccaggccctgcagcagcaggcggacgaggcggaagaccgcgcgcagggcctgcagcgggagctggacggcgagcgcgagcggcgcgagaaagtgagcgccccggcctcgggccccgcacccgcagcctcctcccccgcgcgccctcctttcttcccggcttcccgcgctgcccgcccgcgcgcagtcctcgggccgcctttttacgccctcggacgccgatcgccgacccacatccctgcgcccgcagccaggaccccctacttcctccgccgtcctccttcctgggcctgggacaggggagggggcgccgcctccgggtcgggcggggccggccaagcgggaaatggggggatggggcggagggggtgagcgatctccgggtggagaagtggagcggcgggagggggcgtatcgtgcaggctccgactccggggctggcgccggggtcccgggccgaggggaacccgcgaccggacttgtgggggagaatgaggatgaaaacgtggagcttccattgtctagggtttgaccggccgacagggatttcgacgggggaccggggatctggggagggggtcgcactttctcgcctctttcgcggcttcccggcttctgcttgcttccctgaccgttcccaggggcgcggcggcgacgtgtctgctccaggcggcgggggggatggggggtggaggaagttcagccccaagccgcccgcctttctccagctgattcctgcgggaaccggggcggcgggaccctgcctctctccagaaggccccgggaacgctggcgcggggccctgaacccacgatcgtttgagcgcctgctgtgcgcctccgccgcgagtcgcagggcccgagataaacaatgggtctgaaaaaggagggagtttcaccatcctctctgcatcatcctcctggctgtccctcgggacagatggtggcaccgccagggtctggggacagatttggattctggtcccatatcatgccacccacaggcttcatgacttggtatttgctctctaggagcttttttcccatctgcgagtaggactgataagaatcccgaccccccagagtagcagggagggtcccaggagtaaatctcaggcgtggagcctggcgctttgtaaataatcaattgtgttgttgttttttgttgttttgtttttgaggcagtctcactctgtcgcccaggctggagtgcagtggtgcgatctcggctcgctgcaacctccaccccccgagttcaagagattctcctgcttcagcctcccgagtagctgggattacaggtgcccgccaccacgcccagctaatttttttttttttattttggatttttagtagagacagtgtctcaccatgctggccaggctggtctcgaactcctgacctcgtgatctgcccaccttggcctcccaaagttctgggattacaagcgtgagccacggcgcccagcctcaattgtgttttctctgccctgggaagagctcatagacaaatggaggcaggggagctgactcactgatggagcgaggtctgcattccacgggttttctgtgcagttatgggagcatgacaggggaggctccaaaatggaggttgagctgggtcttatagaataaataagtttgctgggaccagagacatgggtgtgcacagactcagaggcaagaaagttgtatgatgagggtgggggggtgtgcggatagaggttgaagcccaaaagccctgaaagttcagtgttgaggctcagggtggggaccctagagaggcaaaagatgcccagccagatggaattggtggtgtgaattgccaggactggaaagagcccagatgggggctgcagcatgggccttggttgaagcctctaatcctgtaagggctgctttggcccaagaggccttagaaacccggtgtaagcctcaatcggtagccggtctggcctctttctcacacttaaccgacacagctcttgctctgatctcatcccaagtcatctcgctggaggacaattaactcggcttcaaaatggccctcagcctggagccaagatttaggagcaagaccgtctagttgggagagaagatgtttttggagagttgaagacttcttgaaaaagttcgaaaagttcttgaaaaagcaaaggatgcttctttccgtctgggagagggaaaacctctcccagggcaaaaggaactaagaccaggggtgggttaaaaaaaaaaaaaaaaaaacctttcactcttgtagaataagccaggagccggcgtgtggtagacttctgggcctgtttcccgacagctggtttcgtttagatttttgtgtgattaactgacatcttcctgttcctttgccacatgtatctagcaagcctcttttaccttataagggaaatcctttgtagcgtgtggaaggctttgattgcaggaaggggtggaacccaaaatgactcggccgtgactagcagtttttcaaaaatacatatatatgtatgcatgtacagatatgcgtgtatctcccaactccagacagctgaaaatctgccaaaagcgttgtttgccaggattcagaatttcccacataagggctactcacttcttaaaagacaactcatgaatcaagcacctctgtttgatctttaaaatcaattcctcgactgctaatgggtacacagttttttgtttgtttgtttgtctttggcgggttatgaaaatgtcctggaattcgataatggtgttggttgcagagtgtttttgcaacatcagttcctggcccagttactgaaggtggtaggaggagttaagatctaggcaattaaaaagaatgaaaggcacccattcatgggaaggcctcagtgacgtttcttaagacagtttcatcagtggttttcacaattctctgcatttggtgtttcagaggacactgcaatacgaaacacctgtgggagtgccctctttctgcttctaggaatctgaggctgagaaaccttcctgactctatttgtgtagtttttcggccacgttagcctcattctatttttttttcccccagtatgaactcagggcaggagagggagtggtttcctaataattttttttttttgagacggaatcttgctctgttacccaggctggagtgcagtggcgcgatctcggctcattgca

SEQ ID NO: 67209 - DNA, 1093 bp, Homo sapiens
tgggtgacagagccagactccgtctcaaaaaaaaaaaaacttcacaatttccttctgtttgctcatttctgatagatgccttgcattttttttttacatgccttgcatttttgcagaagctctgtcccagggagctcaaagcttatcatagtatttaaaaaaaaaaacagaaatacagaaagtgtagggactgcaataaagactagtctgcaagtctggggcccacttctcccagaattttttcaagagttccagtgtttaacattcggcctcagaaattccagaatcttggggttcaaatggaatcttccaaactgcccatcccacccagaaaggacacattcttcagaccatatcttccaatgtttttttggggaagtgaggttcccatataagggaaaatgccccattccaaaatacgacctttggacagggtgacgtcattggaaatccgaaataaactgaggggtggggaccagtggggggaagctctgtcacttctggttaccactgttttgaagcttcattgtggctaatccccctgcagaacctcaaaccacttagagatcaactccatagatctttggttttcttcatctgtttcacatggaacacagctttctcctagtctgtgctttgtttgctcacgtgtttttttcttcctcttgtggttcatctgtggcactccattccgacccttgccttctgtcccctgtacttctgaactgtctccctggggacctccgccctctagatgagttatacgctcagaagctcaagtacaaagctatcagcgaggaactggaccacgctctcaacgacatgacctctctctgagaggcagccaggtcgctgccctctgtccttctcacatggtgcctcctacgcccctgtgggcttctaggagctccggtggcctgccttctggtttgaacgtcagagccttcttctgatgtgtctgtgactctacaaccgaaataaagacgggcagtcctcctcttcatgccccctcattctcattttctccacttgctgcctttgagctgtagctgtgtgcccttaaccatagcctgaaacacaaagtgggtggtta

SEQ ID NO: 67210 - DNA, 1672 bp, Homo sapiens
cgcgtccggcttgggtcacttttcgagtatacagctcctcctctctccttcctccctaggcccccactgccccgactcgcaggccgcagacaaggctgagagcgctaccttgctttcccgcgctcgcctcggtgcctactgcgcctgcgcgagctgtgagggcgggacccagagacacccgccccaactactggcgtgcgccctctgctgtcgcctaacggaactccgggcgcgcgtgcgcacgcaccccaagccacgccccgccaggctgccggcgcgcgagcggttggcgccgctccctgccttccctctcctacagtggggcggggccgggccgcccgagtcgggggtggaaggcgggggccacataatgccacgcccccgcctcgtccccatttgaagccccgcgactcttcactgctggtcaatcagagcccgtgctctccctagtgccggccaatgggaggtgcgctcgggctgcttccggctccgcgctccgctcgccccctcccaaggtctccccgcgactggcgggacgcaggggcgggcgtcggccgcggtgacgcgcagcgggcctggagccaataaggggcgggctcggtgctgatggacggtgctggtggccagtggagaggcgctggccgcacttcccgtcggggagagagtgtaatatggcgaagacctacgattacctgttcaagctgctgctgatcggggactcgggggtggggaagacctgtgtcctgttccgcttctccgaggacgccttcaactccacttttatctccaccataggtaacgggaccggggaatggctgggggcgccggaggcccgggctgggcgcgcccctgaggggctggggctgagggatctacagggctggacgggccgagggcgctgagagggtcgagggggcctaaagggagaagagcagtcgcctgcaccgccgttcgggggttcctgggccgtggtgggggagaccaggtgcccattttgcagatagggagactgaggctccgaccctcagcccgctcgttagggcgtgttatgtcttgggctggggtcttcgcgcccgtcctctcgatctgtcctagcagcagccctcgaagcggttcttttgaggctcttgccttacagaagtggaaactgagtcatggggaattggccatgggaaaaagacagtggcatctcaccttaatgagcatttactatgtgccaagtgcttcacgtgcattttcacactcttcagttcttggtgttaagtgctgttatgagcccgtctgacaagatgaggaatctgaggctcagggagggcatggaacttgcccaaggccacacagtctgcacgtggtgagaatgggatttgatggaatttgaacctggctgtgtctcaacccaaaactcgaggcttagctctcctagagagatgccactgcacactcccagctgatgacaagctcagctaatgcaccttggagccgggactctaacccacaccattcctgctcttttctctggagcgttcagaggttgagcccctctccctgaccatgcttcccctcataagcgtattttcctctagaaggaatgataagaagagtcaggaccttttccctgcccacctttcatcctgctccaggaatgacagcaatggcaagtgacagcactgcc

SEQ ID NO: 67211 - DNA, 1003 bp, Homo sapiens
atagatcatttgtggtgtgaacttggccctgtagctccctggaatgggttctcaccagcctggctcggcgccactgcctcctcaggggcccattgattcctccagtgaaagggttggcatttgagaaagtgctttgtgaaccgctcaacaccgcgtagaccctgttgcgctttaatactttgatccagccatattttgccagtgtcttctgtgggccaggcagccattttggcaagagggctgcagaaaggacacaggtgagtcaaggtgcgtgcaggactggggtaccagcttctagcaaatgtgtattcaacccctgtgtgttcagtcactggaggtaatagcagtggatgagacttgtcagttccctgccccagggagcttacgtttgagagggcgaaagtccagtgctggggctggatggatggaattagcatccccaccctgggttcagagaggcccagccaggcctgggcctcaagtcttccccagcaggcacttgaacaaactcctggtggcaaaggctgggtctggctgtttctcatctacatgggccattatgatctgcaagcattatgcccaggtccatgcagcagatacatacatgtatgtcagttatgttaataaataggtaaagggagaactgatgaggatggtcagaaaggttcccctgaggagggaacttgaatgggaacctgaacaaagggatagccaggtagctacagaagaaagaactttccagggcagggaagagcaaacatcaaagccccgagtcaggagcatgcttggaatgttgaggaaatcgctgtgtggatggtgtggccagagagagcaggtcatgagccagagtgctgagaggtgaccaggttaggcaggaccttgacacacatgagcagctgtttccactttattcgagggaagtggggcagggaagccactgaaagaggctttaaaaaaaaatagctttatgagatagaattcgcatacagttcacccatttgca

SEQ ID NO: 67212 - DNA, 819 bp, Homo sapiens
tttgagacggagtttcgctcttgtcgcctaggctggagtgcaatggcgcgatcttgtctcaccgcaacctctgccccccgggttcaagtgattctcctgcctcagcctcccaagtagctggtattacaggcatgcaccaccacgcccaactaattttgtatttttagtagagacggggtttctccatgttggtcaggctggtctccaactcccgacctcaggtgacccacccacctcggcctcccaaagtgctgggattataggcgtgagccaccacgcccggccctactgttcacctcttaatctgactttgggagtcgggtaggtttaacttgcagttcatcctgcagacattggtagtaagtcaagctctggctgccttgtaagttccaagccatggaagtttctccacttccagcacgttggtgccatgtcaccctttgttcccaagtccaaagtgacactgcatcagcaagcagaagtttcactttcctcctgccttcctgcttctgctcttagcaatcgtggtgaggttagtgactcaaaactcttctaaggactgtagttgaaaaaaaaatgactggtttttttttttgtttctttgtttttttgagacagagttttgctcttgttgcccaggctggagtgcagtggcacgattttggctcactgcaacctccgcctcctgggttcaggcaattcttctgcctcggcctcccaagtagctgggattacaggtgcctgccaccacgctcggctaattttgtatttttagtagagacggggtttcgccatgttggccaggttggcttcgaaccc

SEQ ID NO: 67213 - DNA, 1116 bp, Homo sapiens
ttttctccatatattaatttggggttcagcaaacctttttctgtaaatggccaaatagttgatgttttcaactttataccatgacgcaactctgttgttgaagcacacaagcagccatagacaaaatgtacacaaatgggtgtggctgtgagccaatacaactttactgatggacacagaaaagtgaatttcgtatcactgtcacgtgtcatggaataatctttttttaaattaaaaaaaaatttttaatgtgtttatttatttttgagacagaatctcactctgtgacccaggctggagtgcatggcacaatctgagctcactgcggccttgacctcctgggctcaagcaatcctcccgcctcagcctcccaagtagctgggactacaggcatgcaccaccatacctggctatttatttatttatttatttgtagatatggactctccttatgttccccagtttggtctcaagctcctggggtcaagagatcctccccacttagcctcccaaagtgctgggattaaaggcatgaaccaccccacctggttggaatattattattctttgattgttttttgatcttttgaaaatataaaagccattcttagctcacaggaggtacaaaaccaggctttgggtcagactggcctattggccgtactttgccctgcagtggcggctgattttccccaaaggctgccaagtacagttacacagtctgttcactgcaaactgttcaggcaacaagggctgaagtccagccacattctgcttgctgaaagaggtgtatccactcgcaagaggtgcccagggggtccctaattatccccattttacagatgcagggactgagactagggaaattgagaaagtttcccaaggtcatgaaagaatgaatagaggaattttcagaaacagagtctgtgaactgtctgcgtaagagccccttcagatgtgcaaatggactgtgggcggtgacggagagcatcacctgaggaagtctggtgcccggaggatcatgttctggaaatcttccagggacagccgcccatcatggtctccatcagcctcatccagcaccttctcacataccaggctcacctcctcggcact

SEQ ID NO: 67214 - DNA, 1332 bp, Homo sapiens
tcgacaaaaaaatttaaatgaaaatattagccgcgctcagtggcgcccgtctgcagtctgctactggggaggctgaggcgggaggatctcttgagcccaagggttcaaggctgcagtgagccacgatcgcgccactccactccagcctaggtgacagaccaagatcgtgtctctaaaaaagaaaaaaaaatcaaggagagagaacaggtcacccaaaagtgcgcaaaacgctcaaaaaggggttgggtttccagcaccctgtgtgaagaatgggagaccggaagtgggcgccaaattcggaagtgtggcagcagataggaatcgaagggcactcattcgcttggctctctgtcccgcccactacccggaagtgtggcccgggtccagaaccaagagcgcatgctcaccttgtagctcagccaatcaaagagaagcgaggcggccattcgggcggaaatagtgtttgcaaacaggaagtgtggcactccagctaccgaagcactggagagtgtcatggaggcctacgagcaggtccaaaagggacccctgaagctgaaaggcgtcgcagagctgggagtgaccaagcggtgaggcccgagggcccgcgggattccgtcttcatcccccttagaccttttctcgggacccctggccctgatcctccgacccgccgcctcctcatgtctttttccaggaagaagaaaaagaaggacaaagacaaagcgaaactcctggaagcaatgggaacgagcaaaaagaacgaggaggagaagcggcgcggcctggacaagcggaccccggcccaggcggccttcgagaaaatgcaggagaagcgggtgagcagaagcagaaggcggcggggaggcgggaacacccggcgccgggagactggaaattggggtcagggctgggacgctccgagggcaggggagcggtcagaggagaccttaattacggggagaggatgctgtacgtgagtgagagaagagtcgccctctgccgggggagctccaaggatgagaagaccccgctggcccgagtgggcagcagaggggagagctagaactggcgttgaaaggaggccagagctggagacccgggtttggattccagtgctgtggcttatttgccctgcgacactaggccagtgactttcttatttccgtgcctcaagtttcctcttctgtacgagtcagggtagtaacttattctaagagggttgggaacttgagaggaagtcatgaaagtaaaaagcagtgcatacatgttcagtggatgccagctcttgatattaaatggccatgctcgccgctcgaagtcaccacaaagttt

SEQ ID NO: 67215 - DNA, 2603 bp, Homo sapiens
atgcttcaaggcccaggaaaggcctaggcacaactctgggtgggcttttgttacatcccagcctttgtataagggcactggctctcttatcttttaatatttaacttaacccttgtaatcccagcactttgggaggccgaggtgggtggatcacgtgaggtcaggagtttgagacaagcctggccaacatggtgaaaccacgtctctactaaaaatacaaaaattagctaggtgtggtggcacatgcctgtaatcccagccacttgagaggctgacacacaagagaatcacttgaacccaggaggcagaggttgcagtgagccgagatcatgccattgcactccagcctgggtgacagagtgagactccatctcaaaaaaaaaaaaaaaaaaaaaagcaaacaacaaaaaccctctcttggctgcttgctctgtgccttgagcaagaatccttccagcccaggagtcacttagcagtcttcaaacattctagtttgcttctctagagtttcggtcacatttctttcctaagcaaaacactatataattaccgagttgcaaaaatcatctttccaaacgccaaaacggagataagacagaaaataaaagatgtgagaggcaggcatcctgggtaaatcactctggtattgcagggttgggatccccagggtactatgatggctaactggaacagaatgcaggcatttctccaaagcccaagagttcataaaagcaaattaaatatgactcaatggattaatcaagggccaccagttgcattactgattactaactttgcagaaatgaaacacggtatgttgggtcaaggttcagtgaggctggttttcataacattccaggcaataaacaggcacactcattcattgataaatgttgacaatgacaggtggtgactgttgataaggtttgattgccattcagaaagtttgtttgacctctttccaagtaaccacgaccttacctctctcttttgagcttatcacaattggtgactgtacacttgtttcatagacttccccaccagactgtgagctccatagggctgggccccaggtcggtttcaccaccaggctctctcgcctaactcggcccacgggaggccgtttccagctgctctggctccatagctcagcctggcagcggccactgggtgccctgatttggtcggccccgccccaccgggccttacttccgggatgcttctggcgggagcaagaaacatggttacatacgacgtaatgcgcctgcgcacagtccgtcctgcgcctgcgcattcctgacagcacctcccggaccggacataacggtccccgcgcggctccccgaaccggaagtggaggtgagctgtcgcgggcggcgcccggccttgctcaacgcccagcagtccccaccgtcgctgccgccgccaccgccctcggccgctgccgaggcctcctgcagccatcatgtccgccagcgccgtctacgtgctggacctgaagggcaaggtactgagggctccccaccctccctgttgccaggcaaccggcaggggcctccgcccgcggggacccaccctgttgctaggtaaccggcttatgagccccatcctggtgtgaggcagagaggccggtagacctcacctgagagccccatcctgtttctgggtaaccgggcgggggtcttaagtgggtaatccccgccctgttgctacgtaacgcggtgggctgcagccaccgcgttgccaggtaactgactgcaccgccctctgctccccggcgccggggccgggggctcgggcctcggtggaggacccagaagcggggccgcagccggcctcggagccaggcagggcgtccaggggctgcgcgacccttggccgggggtggcgaggcgtggcggggactgggtgctctcgagccagtcccgccttctcagggcgttacagcttctgtttatcgtgcactttctctcagtaggaatttctccacgttcattgtgatagtgagttacaaggattaggtgaggtgagtggtgatcacgagtgccgttttatagagggagaaactgaggcatggagaggtgaagcaacctgaccaaggtcacaatggtcacagagaagtagcaagtctaggagtccgatccagaatcattcgtttattcagctgatatctggggagcacctactaatgccgggcagggtactaagcctggggtcgatttgtgtttagcaaaaaacagtccctttttttttgttttgtttttgagatagtgtcatgctcagtcgtccagtctggagtgtagtggtgcaatctccactcactgcaacctccgcctcccgggttcaagcaattttcctgcctcagcctcccaagtagctgggattacaggcacctgccactacgccgagctaaattttgtatttttagtagaggcagggtttcaccatgttgaccaggctggtctcgaactcttgacctcgagtgatccacctgtcttagcctcccaaagtgctgggattacaggtgtgagtcatgtgccagggctcaacaatctgtgttcttacggtgttcacaggctggtaggggagatggatacccatct

SEQ ID NO: 67216 - DNA, 1591 bp, Homo sapiens
aatgtgaagcccaacattgatcagtgagagaaacaaacatgggtgtcaggtcctaggtgaggcgggcaggggtgagccctaaagcagctgagagtgaagaggtgaaatggctgccccttcccgccccaccccacccccagcactttcctgaagtcccttgagtgggtgcctgctctggaagccacccaaagtcaacaactggtgagacccagtgctgggcttccctcccccgccttcttggaaggagggaagacacccgtcttagagcacgccaggggctgggtggtgcggtggaatgagtcctggtggaatgagtcttgcttccaccctggccactgcctccccagaggtgccagtgggctgcctgtcttggcttgcttattccttcagcaaacatttcatgagcacctagcatgcaccctgccctatgccgggcatagggtgtccattggcgccatggctgtggtgttaggggtgagctcaaaacccatccctgctgctcagctgtgtgacctgggacaggcaccttctcctgtctgagcctcactttcctcactggtcaaaagaggcttttatggagttattgtgcagatttgctgagcagatgcatgagacaggctcagcaccacccatggtccatgttagctctcccaggcctctcggtctagcaggggagtcacctagaagcagagacattaccacacagttggatccaggcagccacaggggcaggaacaaggtcccaagtcctgcagttgctcaacctcatctttagccagtggaagggggaggtggttatgaaaggctccctgaagagggcgacgctggaagtaggtttggaaggcacgatcatgtggaaaagaggtgttgcaaggggcagcctgctggggctgccaagccagaagtcctggctaatgctgagatgggagagagggaccaaggggaccacttcagttccaaccaggagccaccgtgaggagaccgtagcccagagaggcatgatcagacctgcctttcagaaagctccccaaggcagccgtgggcttccttcccttcctctgcaaccatgatgccctttcttattccacgacccacggacctcctgtttccaaagtcagcctcgtgagccgactgcatttaatcaacaataaagcacactgagaaattcatggccacgtgtctggtcaccgaggacaccagcgtggccacactgggctgggaggaagctgtcctagtaggaagcttctccgctttatctaactggcttctcagcagcttctgacaccactaaccacctcctcttcagtgctcccttccgcttccaggaggctgcgctctggggggtttcctcctgtttcttgcactgcctactttcctccttttctgccctccccagggctgtggagcggctcaggcctacgcgtgcctccccatgctgtcactcttcccaggtgggctttgactcatgtccatgggccagtgactctcaattttgttcacagcatttctctggagatctagtggcctctgagacaccagagaggtcccgccgccaccataaattcagcattcttctaaatgcactccctgt

SEQ ID NO: 67217 - DNA, 622 bp, Homo sapiens
aaagtgctgcacccggcctctgctccctcctctacctcccatcaaaaataggcaagtgagattggtcaactggggggtaattttaactgctgacaccaggcaatgtctggagacatttttggttgttgtagaaaatctggggaggggatgttactggcatctggtgggtggaggccagggatgctgctctgcagcctactgggcgcaggatggccccacaaagagaataatccagccccgaatgtcagtggtgctgaggataggaagttacagcacccaatactgtatttcccatgtatccagatgactcatggttggtgactttgtaatttgatttgatgtgatttgtatatgagtcaatgttacacgctgctactgtttgaatgtttgtccactccaaaagtcaaggagggctgggcacggtgactcatgcctgtaatcccagcactttgggaggccgaggcaggcaaatcatctgagctcaggagtttgagatcagcctgggcaacatggtgagatccccatctctactaaaaaacacaaaaaattagccgggcatggtagcgtgtgcctataatcccagctactcaggaggctgaggcaggagaatcacttgaacccg

SEQ ID NO: 67218 - DNA, 1749 bp, Homo sapiens
aagcaattctcctgcctcagcctcccgagtagctggggttataggcacccgccaccacgtccagctaatttttgtatttttagtagagacagaattttaccatgtttgtcaagctggtctcaaactcttgagctcaagcgatcctcctgcttcggcctcccaaagtgctgggatgatgggcatgagtcaccgcgcctagccaagctggccattttggactcaagaccttcacatttattcctgaggaaagggaaaaaaaaaaaaaaaagaaggaaaactccctctcactacacatagtttcaaaaactgccctttcagtggaaaagttttttacgtcttaagaaaaacctgattgtttaaagtcaggtctgcagtaaacgggcggctatttttaagtgcttggggacatatgtctgcaacccatggaaagaagagaagccgtttgtcttgggagcttgtccagaatgactggagtgacgtggagtgcggggttggaggtgggagtgggggggacacgagctgtcagcctgccagaagcacaaaaaaactcccaaaatattccagaacattccttctcgagtcgtcagaaatcatactatccgggccgcgcctcaaagttcccactcagcaagcagttgttttccgtttcattttccctcttcttttttttttcccctcaaatcacatttgtttttccacaatcgaaggcgctcacacacatctcgccctgaaattcagacacactgttctcacctagaattgtaaacagcaacctctccaccccctcccgtggccgggtgtttgggtgatgctggaaaaatcttctaaaggcagggagaaaaaaagggagttttccaaaaatcgacacagggcttacgttacacagagtttatgcaatcagcccctggaaacaactagacgggcctccccagctgcagaggctctgagtagcaataaagtcgtgagaagggaaagtcagcctttggcaagaatccccgactcccccatgaaagtgataagggcggtgtggaccgcagctgggaggccaactgcgtatttgaaatatgttggcaaggccaggttctcgtaaagcatcacagaggtcctgtggaatagattcctccagcctgagaccctggcgcacccttgggtcactggtggtgtgccaggattttatttacttatttgcttgctcgtgtgttaatttttttagagacaaggtcttgctgtgtcacccaggctggagtgcagtggtgcaatcataactcactgcagcttcaaccccccaggctcaagggatcctcccaccctcagcctcctaagtaggcacatgccacccggctcagctaagttttgttgtttttgtttttgttttaagtttttgtagagatggggggaggggttttgctatgttgcccaggctggtctagaacgcctggccttacgtgatcctcccacctcggccttccgaagtactgagatgacaggtgtgagccaccacaccaagcctcaacaggagggtgtagacactttctagcagcatctcctccaccctcctagggcccttgggggctctatttggttcctaatgtcttctcccattttgcagaaaacaaaacccaaagtgcagagagaggaggtggaatgtgattcagggataaaccacacagagaaagcctaaagtgaaatctgtctgctgccacgggatttcccttaaagatccctgtccctcggccgggcgcagtggtt

SEQ ID NO: 67219 - DNA, 1430 bp, Homo sapiens
cttcccatccatccagggttctgcagccctctctgaggctggagccaatctccccttccgtcaagggatccggggagaccgccaagcccggtgctcccctgagagtctctgagaggccccgacaccgcccccgctccaggtccccgggatgctcgcgcaggcgggagcccggggcgcccgggggatccctgagcgtcacgccgctgttgtggagcgcgtgttgacaacgtcgccggggagacgggcgggggcggggcccgggagagggggaggcgcggccctggcggcgcgcgaggggccgggctgtcagcgcaaggcccaggccgccgcagtggccacggccgctgccgcccgccggcttatataccgcggctaaatttaggctgcgcccggagctcgtccccatccgggacgcgtttccgccgccgccgctttggcccggcccccgcgcgcgccgcgcctataaggcttgggcgggcccggccgcggcccacagagccgtccccgcccgcccgcgccccgaccagcccggcctcgggcagccactcaccggtgtccccgtccgcgtcctttctccccgggtcccggccatggcgctgagtgaacccatcctgccgtccttctccactttcgccagcccgtgccgcgagcgcggcctgcaggaggtgagggcggcggggacggcggggcggccgggaccgtgggcggcgggctcggggtagtagaacgtgggctgcggggtgacaggacgcgaaggcggggactgcagactcaggagaggaggatgcgggccacggggatcgcggacttagggtggtaaaaggcaagcagcgccccccgagccccgccgcccgctcacgcccattgccctgtcgcccgcagcgctggccgcgcgccgaacccgagtccggcggcaccgacgacgacctcaacagcgtgctggacttcatcctgtccatggggctggatggcctgggcgccgaggccgccccggagccgccgccgccgcccccgccgcctgcgttctattaccccgaacccggcgcgcccccgccctacagcgcccccgcgggtggcctggtgtctgagctgctgcgacccgagctggatgcgccgctggggcccgcactgcacggccgctttctgctggcgccgcccggccgcctggtcaaggccgagccccctgaagcggacggcggcggcggctacggctgcgcccccgggctgacccgtggaccgcgcggcctcaagcgcgagggcgccccgggcccggcggcttcgtgcatgcgaggtcccgggggccgccccccgccgccgcccgacacaccgccgctcagccccgacggccccgcgcgcctgcccgcgcccggtccgcgcgcctccttcccgccgcctttcggtggccctggtttcggcgcgcccgggcccgg

SEQ ID NO: 67220 - DNA, 591 bp, Homo sapiens
aagcccagctatggcagggggtgggggagaggtgacagttttgaggggcttattggcatggtgctggggagagatgtaggagctatttttctgctaggcacttcctgtagttctgggggccccagcacccaggcaggctgcagaatgatgtggtgtgaagtgggaggaggaagggggcgttgtcagagggcaagatgtctataggctcacccctgactcagcacccagccctgtcaacacggttgagtcagcacccacgcccggcagccccaggtggagtcccaggaccataggctcaagctgatttgtcaggtgccagggctgggtggctccgattgccccggcctgagctgtgtcagctgtgccagaccagcgagcatcagccttggagctgggcacagcggtggctcatgcctgtaatcccagcactttgggaggccgaggtgtggggatctcttgagccaaggagtttgagaccagcctgggcaacatagagagaccctgtttctgggtgggtggggggcgggggaagagagagagaagagagaaaaaacaaaagacatttggagctgaatcattctccagtgcggg

SEQ ID NO: 67221 - DNA, 466 bp, Homo sapiens
gcttggtgacgggaggtcccacctgacgggccttccagcatctgcagtttgcaggccagccgggctgactccatgctcctgacacccctctatctgcccaacggagtccctgggcattcaacgtggtccacgcagcaccccagactggaagctcaataatatgcaacacgattccggcgtgttaactctggaagtttcgaagctaatgtttagaaaaaaccaggaactgcctgtccctccagggttgaccttggatctctggctgcacctccagagagcaccctggctcccagccacacctgccccgcccaccacctgagcctgggacacctgccttcctcatccggtagaacgagcccacacaggccagcctcggtccctctccatgcccagatctaaagcctttccctctgttcccccagcagatcagccatcccaggcctcatttttgaggccccaggtgtcc

SEQ ID NO: 67222 - DNA, 2304 bp, Homo sapiens
gctggaaaatcacttgaacccaagaggcaaaggttgcggtgagctgagatcgcgccactgcactccagcctgggtcacagagtgagactctgtctcaaaaaaaagaaagaaagaaagaaagaaaagccagttttctacagattggcgtaatgacagaggcacacttgttgatgtcacttacacaagaggaaagccctttcctcaccctctgatgagcggaggtgaggaggtagcagggccccagccctggtggtgccctgactgctgtcaccggccagtgggctcgagcaggcggctctgggccctgtgcctgtttcttcacccaagagacaaaacgttcccttctgtcaactaccctcaaagacagctggagagacagactgcgctcctggctgctgttccaagtacccagcctccaatcaacagatatcaccagcctactatgtgccaggagcccagatttcaggggctgggaacccagcagggagcaggaaagacagagctcctcgaccctcccggagcccatggtgtggcaatcataggacaaaatggtggctttggagcccatggtctgattcagacgcctgttctccatgggggtctgaccagttgttttacctctctccctctcagtttcctcatctagaaacaagcacagggacaatggcaccattgttggtcccacaacattccctcactcctgcatcagacctgtgccccaaatctctccccagggcccagagctgcctgcctgggcccactcactggtgagggcagtcagggtaccaccagggctggggtcccgttgccacctgttctgggagaccaggttaccagaatcagggaagtgggggggagggcatggtggctcacacctgtaatcccagcactttggggggccaaggtgggtggatcactagaggccaggagttcgagaccagcctggccaacatggtgaaaccctgtctctactaaaaatacaaaaatacaaaaaaattagccaggcttggtggtgtgcacctgtaatcccagctacttgggaggctgaggcagaattgcttgagcccagatggcggaagctgcagtgagccaagatcatgccattacactccagcctgggtgacaaagcgggactccacctcaagaaaaaataaagtaaaacaaagaatcagggaagtgggactctgagaaggcagagagggggccaggaagctgtgaagatggtggtgggagacagggcctgtgcaaagggtgggggcaggacactggtccacgcagtgtacagccagtcagagaggctgcacccagctgcttcctccaggcctgttggaacagaggagggaaaagacaaaaggaggcacaggcgccctcttcctcctgtcctttattcccagcccagtggaggtgattcatcccaccgctgtgggtgccacctgacttccacgagtgtgtcacactatgtcctaattttctgtgtgcctgggtgcccagctgcagttgagctgacctggagggtggggctcggttttatttatcttggtcccaagacagcacacagtagctcagcagacagaatctcatggtgccccagccccagagctggtcttctttttgactgtacctaaatgtggggtctcacgtggcttggagggtttcctgcaaagtgatgggttttgactcaactgacacagccacagcccaccaggctctgcccaccaggcactcccactgctgctgtcctggctccctgaaggtggcctcaacctgacggttgcagacactatgcctgcttcttccccctgcttcctctcccacctagaccctcacctgtccaaacagctaccccacatattcctttcacccccagccctttctactcttcctgaaacaacctcaggccaggttcctcttgatcacttcatgcccatatcacagagactgtctcggagctagaacccagctccaagcactccctgtgtaagcagccagatcatctaaaggtgtcactcctcaagaacctgccatagctccctactgcctctcataatgtggcccatgctactcttccctcaacagatgattgttgagcacctgagtgccagctgcagcctggcaaacaaggatgaataaaacaggcacagtctctgcccttgtggacctagtctaggtggttggggaagacagaccatcaatcaaccccgcaaagagaaaattataaacggctaaatggaaaaggtgtccatctccaccagtggtaacagagatgctgggccagtttgtcaggaaaggcttccctgaggaagt

SEQ ID NO: 67223 - DNA, 776 bp, Homo sapiens
atgccccagctgatatgaaaaggtgtagggattcaccagaggatgaagggtttggaaagagcattccagagagagggaatagcagatgcaaacgccttgaggcaagatgaaggatcgcctgcgcagatgacagaaagaggggccagggggccacagagcagagggaatgaggactgcaggcctgggaaacacggggagcaggtgtgctgtcagctgccggtagcagcgcctgatccagcctggctggtgtgcccaagaggaggagaagtgactttatgtcagcctgacctgcaggcagtcagtaaacagattctgttatcaggtctacattccacaccacaggcagtgcagatggaaatccgagacaaatgtctgtggtcatctgtgacctttactttcaccccaaagcttgtagtatcaagagctgggactcctatgaagggaaaagcccaaagaagctttaagagctaatggtctgcactccatgcaggagcaaacttcagggccaccactctgaccagcggtaaaacccagtccagcgcgaaggacagtgggcaggtctcagctcctcagcccccaccagccactggccactctctcggcaagcagacatcctgtcagttcggccgatttgtagcccagacacaaactctcacgtcttatttaccaaaagaccttcctcctctcatccctgagctgcctaaattaaaggaaggacatgaaccccaaagtcccagccgcatgttttggccctttgacctagacctgcagcctct

SEQ ID NO: 67224 - DNA, 3347 bp, Homo sapiens
aaaaaatcactcctaaagaggcagaggtgcagacctttcgaatttacgttgatattcagggtcagaaaagagtatataaggaaggagattctgagatgatgtcatggagtacagaacagactgaaaaagatgctgatgggaaaagtgcagacaggagtgggggtggagaaaacacacccctcctcccctaggctagcccgctgggttatccactttgctcaccttcacctggccatctgcttgccaagtgtgctctgtcacctaaatccaaccagatcacagccacctgctgcagggtgcttcccttttgcccccaaccaaaaattttggaattatacccttggttcccccagagttatctgtgaacccaagtgatctcctgagctagacagtaagggcctgggagggccatgcctcacacctgggccaacagtaacccatggtgtagattttcactcgagagcaagtgtaaagaagtgctgacatttccaaacgaagaaaaccaggccacgccttcattcaacaaatgtatagggaaaggaacaggaagaggctaagaagtcagtgacctggccaggcgcagtggctaacgcctgtaatcccagcactttgggaggccaaggcgggtggatcactcgagttcaggagtttgacacgagcctcgccaaaatggtgaaaccccgtctccactaaaaaaaaaatacaaaaattagccgggtgtggtagcacgtgcctgtagtcccagctactcaggaggctgaggcaggagaatcacttgaactcgggaggcggaggttacagtgagctgagatcatgccactgcactccaccctgggtgacagagcaatactccatctcaaaaaaaaaaaaattggacaggaagttttagaaagatccacgcctcccaaactgggagtgcttagtgctttctcatgaaatgatcttaggtgattttcccccgactcccgccttccccgccccccaccccctgactacatactctaaactgtagcacttagctattaacacctattatcggtaggacacttaacagtttacagagcactttcatgtcagtaacaagaacttgctaattaataatcaccgggttttagcactgttaacttagtgacagtgttgcaaattggctagctgtgcacttctctctccttggatcagctaaccagtcatgcaagcatgcaaccggcctatcaactctctttgggtttggaattcttaattgctgcggtctctactcccaaacgtccaaatctggcagagattaaatgatgacagtaattataggatcactgagtgcctctcatatgctaggcactgttctaagcgctttttcacgtgcttaattttcacataatcccaacacatttttatatctccattttccaaaggaagcaactgatgggtggaatggctaagagcttcaaccaaaggcacagagaaatcggggctggagccaagatttgaacacatgatctgaccctgtgtcctcactcttaatcaccatgctgtgctagatcattctagcaaaatgcttatatggtgctttgcacaacacaggtattcagcaaataaaggcagctgtgattagcataacacaggtagtttctagttcccacgagtgtcacctccaggaaagcagcgaccttgtctgtctggaagaatgcagcgctcccagcacctgacccaacgcacatttgagggatggatagaaaatgaatgaatgaaagtctctcccaaataacagagctgcctacgcatggctctttttcgcatgtctgtgtcgcgctatcgatactgccccttcataagcgcatcaggcgaatttgaggacacagagaggcgcccggagacgtacgatctgcgcccggtgcaggggtggcggaagcagcttccaaggaggcaggggatcagtctgagatcgcactgctgctgacgggtccgggctccggcgggaccctgcccgcccgggcgccgggaccggagggagacaaagactcgctgggccgccgcgccgacagaaacgctcgcacccctcgcccacccctccgggatgcagcccagcgcctccgcgggtccccggcctgggagcttcagcggcggcagggtccgggccctgggcggagaggacacgcgctgcgcacctcctcgcctcgccggtgcccgcgagggtcgctcgggcacgggaggccgcgggtcccggcctgtcaccttcagggccgcctgcccacccgcccgccgcaagcccttcagcacgcgccgcccccgccgccgcctggctgagtctcccagcgcctcagcctcgccgcaccgctcgcctcgcgccccgcaccccggcgccgcccccaggcccgcccggcccgtacctgctgggagagggggatgagcggcgccgccatcttcccgcggactcgggctccgagcgccgggggaacgggggcggggctgcagccacgcgtgcgcactgggacgacgggagggcggtgcgcaggccgcctgtcccgggagagggcggggccgtagacagggccacgcatgtgcagtcaggccgggaggggcgggggcaggggcggggccgcccacacgcagcctggaggggctgggcctgaggcatctgcgtcttccgtgctctcttgcccgttcccctactcctccttccaacgttgttcggactctcatgccgctggccgctgtccgagtcgaccatgctgtgtcatccctccagcccatgccgaggcctggttctctgttagggatgccgtccccctgccagtgcgcctggggaggcggtcgcccaccccgcggagggtcgggaccctcaccctgccccgcaaagcgccctgttcctaggatcgcagtgtgtgtgtgtgtgtgtgtgtgtgtgtgtgcgcgctaatttgggggacccgcaccctgcccccctcaccctgccccgcaaggcgtcctcctggctgtggtggcgggcacctgaaatccaagctactcaggagactgaggcaggagaattgcttgagcccaggaagcagaggtttcagtgagccaagatcacaccattgcaatccagcctgggcaacagaagcgaaactctgtctcaaaaataaataaataaataagacaagaacccacttgttgccaggtacagtggcttacacctgtaatcccagcactttgggaggccgaggtgggagggtcatgaggtcaggagttggagaccagcctggccagtatggtgaaacatcaatatggtgaaaccccatctctactaaaaaaaatacaaaaattagcaggtgtggtggtgcatgcctgtagtcccagctactcaggaggct

SEQ ID NO: 67225 - DNA, 701 bp, Homo sapiens
ggctacagagcgagactccgtctcaaaaaaaaaaaaaaaaaaattagccaggtgtggtggcacatgcctgtaatcttagctacttgggaggctggaagcaggagaatcatttgaacctgggaggcggaggttgtggtgagcagagatcacgccattgcactccagcctgggtaacaagggtgaaactctctctcaaataaatacataaaataaataaaaaccttgagcaagttgtgtgatctgagtcatgcagcatgcaggtgtaacctctgcttcttaaatcatagataaaccttcttcctcattgttcttgtttggcaaatgactaggacaaaccagagaccaggcctcctctatttgtgaccactgaccttagttacagattaactgcctccaggactgacctgtacctaactcagaccagatggcacaaaagatgccgtgactgttacatcttcagggtgaaatgttaaatataccttctcaaaagaaaaagaccaccttgactaatgggatcatggtcattatctatcaagccttgcctagaaagatgctgaaattctgttaagcttctctaaactttgtctatacaaatgatcccaaacttctacacttcagaacactgacttctattctttgggatctgtgttttccacacagttgtccttaaactttgagcttgaattagctctcttgaagct

SEQ ID NO: 67226 - DNA, 1900 bp, Homo sapiens
aaaacactaaaacaatcacgctactcctgctaatctccgtcatcagtctgcaaaacaacagcaaaatccctgatccagagcccaggggggaggatcgaaaacctcgttgttctccattacagtggcacccagcagccgctctgtgcagggccgtgggaacagcggaacagggatcgtgtggaccgagctgctccacttcaaagaataaacgacccgaaagaaagaggtttgtggcagagcccggactggaatccgagaaaggaagcgctcgatgggacggcctgagtgccggaggggactcacgctgctgctgctccagcgccagcttgcacttgtagtaactgtagaattcgcctccgaaaagaaacgagaatttggggttgtccttctgcttctccatagtcatcttctcaaactcgggcccattgcgagccacgaactgggcgagcttgtcgatgacatttcgaagctcctggtctggaggacggagaaaaggccacgcggggcgtcagcgaggaccgcccaaagccgggggactcggcgccccagcccccgtccgccttgccggggaccccaagggggtgggccccgaagaggccgcccttgtacgggtcccgataggggccacacgctcgccgggaatgcggggacccacgggagaggccgcaggcgaagccgcgaggccgagccccgccccctcccagacccggggactccgggaggcggggccggccaataggaggttccggggagagagaaacggtctctcggccggtttgggtctcaccatcggggggcagcggcatctccatggctccggccgcggggaacgtcctccggcgccacacgatcgaccaccagcgccgtctgcggaagccggccggaagtggcgcgagggagccgtttacggcgggcttctagggccgcttccgcccgccacttacggccgtcgctgggaaactccggaagtgagagcgggaggcaggcgggaagaagccgcgcgatgcctggcgcgcgggaggggctagcgacgcgcacgcgcagaagtttcctgacactttcgcagagtgggtccccgtcgcgcggcgccgcggaaaggctggaacggcgcgggtgggtgttagtcgagaccggggggcgcggggcgtgccccttggtcggcgtcgcagcccgatgggctggctggttgctacctccgggcgaccaggggcctggggacttcgtgcctgggccagggtctctttcctttcgcgggcacagtgaggagactgcgaggtgaggtgcgtccgggtggatcccgggctgcggcgactgtcacattctccccggccagaccggaggtggagcagaactgggggcgacgagcttgactgggattgcagctggacgtatttaggttcaaaacatcctcctcctggctttcttccgctccactctttggtcaggaagactggggcggggtaccccccaacccatgccctcaaattgctggcctagagggcacagcgcctttctaaaagctgcagttgggttgcctctaaaataatgaagctaacccttgctaattgtggggaaaagatagccagaagcagcaaatttctgctgtggacgtccgatataaactgatcctcttgagatggttaatgcttagttggctatacctgccccccgcccccgccgcttttttttcctttatccgtttttttttttcttttttcttgagacaaggtcttgctctgtggcccacgctggagtgcagtgtcatgatcatagctcactagccctgaactcctgtgctcaagtaatcctcccgcctcggcctcccaaagtgctaggattataggcatgagctactttacccagcctgtttttttctgtgcaaataaatgcacatgtattt

SEQ ID NO: 67227 - DNA, 2216 bp, Homo sapiens
gatctgaaagggacaacagtgttcctaagaccacacagcagagatcacagagggacacatactccacacaccactgctcacagggtgattctagaacttgagtagtaaaaggccactggagacctctacactgacttccctatttgacgggaagccaggcagcctgcagaccaggatcctgaccacgtcaccagttggcaacagggaggaaccccctggagctcccatctgcccagagtccctgcccggggttaccttggtgctctgcttctccttcataatgatccgggacaggaggaccacccagatgggcatggtggccttgactgcaaagagagggatgggcactcagggggctgcctgaatttcagggcccaacctgttccacctccacggcgggatgggagggcctggcagcccctcacacctcttcgccccttctctttcggtagggcttcctcctgccacggctgttgtggtctgtcctgcttacctctcagctctcttctcagctcctcttctccctgagaaccccgtgcgtgtccctcccctaccaaacccttggcagcccctctgctgacttctcagtccggcgggacgcgccccgggcggcgcactcctatccatgcgcccaaacccgaagcggcgggcccggccgccgcccccgaggccgggcgcggaacctaccggtgtgtgcataggacacgggcaccttccagatgctgacgtgcgctgacacggacgcgaagtacttgccgaaggcgagcggtagcacgtagcgcgggtagaagcgcggcggcagcagcgggccggacgacggatgcggactgggtccggggcccgagacgggcggcgcggggggcacgcgccaggcgcgcagcagcggcgggagcccagcgcacagagccaggatgtggcacagcgacacggtcaccgggaacgggaaggcgctcaggatcaccttgttgaccacgttgccgcccgcgctcagcgcgtaccacagcaggcacagcgccgccacccgcgcgccctcgcgcgccccaccactgctgctcgctgcgcccgggccccccgcgccgtggcccgcgcccaccgcggccgccgccatcctgcccgagcggccgccccttccagcccgtccgacggcccgacgccgggcgggggcggggctgggcgggggggcaggcgccccggtctacgccgtttcccattggtcgctgcctcctcgcgtcatccctccgcgccggccgacgcgccagccaccacgtctcgagtgcaggcccagtccactgtagatgcgcttccggcggagccgaggccggaagcggaagaaggggacacagacctgcgtccaagctgtgccacctgagacgtgggcggtcccagtgaccgggagccggagctcgaacgggacgggcgaacagaagcgcggagggcttcgcagcgtcggcgtctgtgcgtgggccaaacatcagggcctcgaccagggatacaagggcaaccgctaactagattcctgattcctgatggctggcggcggctgacaccaaaggtaaaaggccttttagggaaagaaaccatttgtgaaaagctcttgggctaaactcgctctgcaaactgggggcgcacgctcgtggccaaactctggcagtgggactatcccggagcacccgatccctggaatcatgttctggaaaccaccgcgacgtgcgcagttctcgggcgtggccctggtatcatcccactgaatcctaggaacgcggtgcggtaggtatcactgtccgcatttcacagaccgaagtccagaatggggaagcgacttgtcttaggcttcctggccacactggggaccgtggtcatggtagcgtccttggacacctgtctccaaggctctgcagaagggggaggtgccgggccctgacggctgatgtccaaggaccagccgggatggaccagccccaggaggccccagtggaggaaaacaggacgaggttttcagtaagatgatcttatactaattcaagggctataatttgttctccacatcgtgtgcctccaactttttcggggaaagggtgttaaaattccgttacagtgtttttacttgtcaaattagaagcagcaaccggctgggtgcagtgagtcaagcttggaatcccagcactttgggaggccaaggtgggcggattgcttgagctcaggagttggagatcgtg

SEQ ID NO: 67228 - DNA, 544 bp, Homo sapiens
ctcacgccagctttactgagagagcaagcccgtggtgacactttcaggaatcaaaggagccattactaacaattacattatataagcttacaataagttgtgataagaacaaaggaggaagttttcagtactgtgtactcaaaactcatcacttcctacttattttaccaaacttagtactatctaggtttctgaggttattcatgactactgtatgggcatggaggacatggtgtgctactgagtctctttcccaacctcacattcagtgatctcatgttagtggcttgaagccagccatggtgagagtatttccaccacagaaatcagtaaacactataaatcagggcttgattttatgggctccaaactagaaatctgcaaactcctgggccattccataacactgtctgtttttgtaaatgaagattttacttttttcattttacatgctgtttattgaggtaaaattcacattgacataaattaaccacatcaagttttactggaacacagtcacgctcattcactcacatactgtctc

SEQ ID NO: 67229 - DNA, 1094 bp, Homo sapiens
ggcagaggcatggaccactccagggtgtttagcagagccatggggtgtggcttcactgactgtgtggagaaaaccaggtgttgtccagtcatttttggtgggatggacctctgggaacatgaagaacatgactggtggccttgactggagtgttatgttgcacactagtgttctgaaccttccggaaacgtatgagaggggaactaatcctctccactgattgcagtacatagaggcccgcaatccactccacagccgattgctctctatagtgctcaagtgctcttcaggctagagcagcctacttttattttcatttttttacagtttaattgaaaagacaatggagcataggggaaaacaaaccaacccattccccctgccccaaccaacacaagtgcttccattttaccccaagttctagttctttaggcatccagcctatccagatgcctgagtcacaaaaccactcctttccccctcatggtaaggcctgcccatttttctatagagccttcagaatcacgctttcggctataggctatttgactctgtggatgcaccatgattctgaagcttctcccatgctgtttaaaaataaacttcattaaaaaaaaaagaagtaaatggagacaaggtcttgttatgttggtcagtctggtcttgaactccttgcctcaagcgatcctgccaccttggcctcccaaagtgttgggattacaggcgtgagccaccaagctcagcctgtaaataaacttccaagagtaaaattactgggtcacaggacatgagcatgtctatgcctcttgctacataaatagtttccaagagggtgacagtggctctgagctcctgccaacagggtgatgcaggttgttgggggtggggtaggagataggccgggagagataaaacagcaacccgctggcttaacatccagtcttgattacccaccaaggccattctgcccacatgtttttgtgcaaggtatatgttccaggtatcaattacgtcaacatttttctgtccagtaaaatcttggagatcttatgattatgattactttttgtgtgtttggtttttttcttgagaca

SEQ ID NO: 67230 - DNA, 2991 bp, Homo sapiens
ggaagcagggcctcccctcatacctggatgctactgcatcttcctaccgccctgctcctgccgcgggaagaatgacccctactgccaagaaactcttggagaaaatatgagaatagatcagtcttcccccccacccccccacccccgcaacaacacacacacacacacggaaggggagggggcggtccctccgcaaacagtagcctcagcaaaggggcacccgaggaagcgacactctggagttaaccccgacagtctgggtcaaaaaccaccaggctgagacccccaggtgagggaaagagcctactgaaacagagctcttgggtaaacgggagagaaaagtcctctttaattcactacctaaaaaatggagctctggcttggtcagagacgcaatgggtactgaggcccagaaaggcaacaggaaggatcccaccctccccgagatcatctatcgtcggcagcgaccccaagagggttttggcaaaggcgtgtctagtcacagaagggagacagactctccacgtaccctaggtacccggccaggggcaaaacagactgggggttctctccgaagccaggaaggtgctgccagccgagaggagggggaagaaggacttccctgatcacccaggaggccaagacatgggagacataggttccccgagtcataccccggacaccagttgcttcacagcccttctccctccccttcccgctccgggagggcttcccgggggtctcgggtcccggagggagggcgaggcagagaagcttcgtccagagcagtgagggtcgtagagctggagcagaaagggaggaaaaactctagcctcagctcccccgtctgcttcctccgcccaggccgcacggaagcctcggcctcacgtaccgagcgctgccgggctgcccgacctgcccccggcccgggcccgagaagcgagaggcagggatggcagcggccctcgaggggaggtgggcgccagacgggtcccccgaagcccggtgggcgaggggtacaggagagggggagggtcccgggcccatgcggcctccgtcccagctcgcgcggcgggtacttacgttgctctgggggtcgatggcctgcagcagccggtccctgatctgctgcggagacgccggagccgctgtcattgcctgggcgaggcggggggttgcggccgggccagcgggcgggcgggctgaggcgggggacgggggtcactcactcgccggcctccgggagccggagccgcatgttccccgcggcgccggggggttgggggcgcgcggggtggcggagaggggagccggggccgggtctcggtcccgggccgccgccgccaccaaaggaggaggaggagccgccggagccgccgccgctcgctgccgccgcctcgagaaccaaactccagtgagctgcccccgcgcggagtactctgggtagtccgcgccgcacgcagcgtcggcgccacgctgaggaggttgggagatggggcgggcggagacgccaggcctgggcggggctgcccgtgtgccacgccccgcgcctccgcgcaagcgcgcgcaggcgcactcgtccgcccgtgacgccccgcccagccgcccggcctaggcagccgttgggaggaggttgggcggggcaacggcccccgtccaggtcacggggcggggctttctgacggaagcgcgcgcgcaaagagtccttgaacccggacgctcgcagcggctacctcggggcggggagggcggcgggaaaatccttcctctgggagagccttcccggcgcgtgactgggggacgggagtcgcaggctgagcagctgccgagttttttgtgagggcgagggaaccagacgtccacgttgtgattctgcgcgcagaagggtcatcggagtccgggggtgtcgccgcggcccccccgcccctcagagggtgtgggaatgggtgtggtggcagggcgggggtctgcaccgccacgcgcgaccccgatcgcgaaaacgtgaggcggcaaagcgcctctggcagaagccgcccgccgtagctgggaaagccggaggttgcaaatctgcgtctacgcggcggcttctccacctcggcaccactggcatttgggcgggatcgctctgtcttcggggcgggtcccccgatctgtcggaagttgagcggcatctctggcctccgaagcgccccctcccccaatctgcagtcattgccgccgtcccttgtgggggcacagtccccccgcccccccaccggcagagaaccccgtgattgaaagacccttctacccgcctctgccttgagattctgtaaaactgagatgctcattctcttaaccaaacacgtcacagaggaggaaacggaggcccaaggtcacctagacttcggggttaagcccagaaccgcagatgtcaagtttaagggcgcccctcctccctccaccctgtttattgccttggtaattgctcccctctctctgggagctctgttggaaatgctcttgtgagacgggatggaaaggcaagctcggcggcctcgggagaaatcttttttttcccactgttacaggaagacctagatttaaaacaggaggaagacagctgatgagaaccacatgtgtgccttggagctgcccgacacctgttagtcttgtatttgttgtgcttctgggaaatattttcatttgcaaaaacggctgcttctgcacgtggctatggttgcgtgcttctgcacatgtgaaaagttttacatcacacttggaggagaaaagaaacacgggcaaaacacttgtcatttactgctcccaacctcgcccctcccagaatgcggtgcattgtgtacatggtgtacatggtccaagttggaaactggcccattcggagataattctctcatttctgataagcaaaataagcaaagccttcctcaggcatattctggtcttgcctctctcttaatttctaactcggatgtacagtatctttttttt

SEQ ID NO: 67231 - DNA, 2819 bp, Homo sapiens
tgtgctgggctccctggactcctccccaaagccctgcgtgtccttctttttcctacaaagaggagcagacagtgtccactttcaatgggacatagagtcctcagccccctgacccccagctcagaaggccacaaacactaagtttcagccctggccctgccgcaaacttgctgtgtgacctctgacgttcaatacccttctctgggcccccactgcccggacaatcacagccaggtcagcagccaccgaccgtttacaaagtggcccgacagtgcgggtgcagggcggaaggtccgcggtggggctatttcttgggggatggggcttaagctctccaggaaggtgaacagagggacaaccaaggaacggagagtatgggtttaaggtctctcggggggtggggggcgaggaagataaaccaggctggaggcgtgcccagagggcggatagggcggggcctgcggcttgggggcggggcctgagaagtgcgccgagatcacgcttatgagggcggggctacgggttccccggatggagccgcagtccggccgcgacctactcacagcttaaagttcagcaccgccccggcattcatcagcaacgtcctgcagagggagaattacagttactaggggcgcccccgcgtcctgcctggctctctcttcccagcctctggtccccctaattacccgaacagcaggatgtctccgatcatcgttacggccgaagcgtccgtcagaaccggaagcggaagccccagggagggaggggagaggagcacaagccgaccaatcctaaagcaacagtggcgagggctgggccaatcgaaggtcaaggctgggagggtcccgccctctgcaggccagacccccttaggggagcgcgagcgccccacctcgctggggaggccccgagagccagaatgggaggagcggggtctcctgggggcgggattgggtcacgcgttcgaagcgtgccgcgcatgcgtgaggtctcgatgccgtagggttagctgggcagcaattcctactcactttctggggtcccaaattgggcttctggacaaaaggaatcctttgactcctgagctgcacagggtgcggggtcctgacgcagtggggtccctagaaacgggtgccccaaccaactgggctctaaaatgagatcctcctgggccccatggggaacgggggttcccactgagctgccccccacaagacgtcctgatttgcagagccccaccggagacggggttcctgatcgaacggaccctatggggcagaaaagtcttgacggggctccacagaggaccgaggtcctaacctatctccacggggaacaggggttctgattcatggggtcccaccatggcgtaggggtcctcactgggctccaccgaagatcggggtcctaattgagcccacggggacaaagtcctggccgatccggccccctgggaacgggcgtcccgcgtgggtgggctccgtgagggacgggcccccagaacaggcagctccccagcctccctcgccttgcacgggtgccccgcaccccgcctcgctgggcggaacggggtagcgatggcaggagggtcaacgcctgggacgcccgaccgtccagctgcgtccgtggtgctgggcgtccccaccacctgtcccggggtgggccgtcgcccctcctctcccgcgggggccgggcctggggtggcgcctggcgggcgggggcgggcccagctgcgggggcgcagtcgccgggccgcgggcggcgggacggacgaggccggggccccgggtggcacccggcaggcgggcaggcgggcgccatggagctgctctcggcgctgagcctgggcgaactggcgctcagcttctcgcgggtgccgctcttccccgtcttcgacctcagttacttcatcgtctccatcctctacctcaagtatgagccaggtgagccggggcggggggctggaggggaccggcagcgggtggcgcgggccggggcagctcgggggtcgcagagaggggaagcccgtgcgtggtggagggagcgagggacaggttcaaggattgcatcgtgggagtaggcaggcgctagaatcgtggggttctctcacgccggggtgagcccgggggagaagcccccaggacgatgaagctgggggaggggaaggagaggcgtgcgcgggtttagaggagggggaacaggtgcttggggtcggggctcctggttgggtcagagctgcaggaacttgggcaaggggcgccggctgtggcgagggtgcaggtgggggtcggtgcatctgttctggccgcgcgcaggtgtgacctccctccttgaccttggcacgcggattgagagcgccagcggagtgtctataagggccactgcgctgggggctgcggtcaggttcagcgaaagtgacaccggttctcctccccactgcaactgcccagcaccctccactcccctcccttcccccacggtgctgaatctccgagcccccacgggaattcttccagccctggctccagatcctttccacttacggagcagaaccggccccaaggctgggtgacttggggtcagtgtcctccatctcagctccagactccacgctggggaggtcacaggagggtacagcctgcttcttaatttttaaaatgaggatgaatggcttccttagaacgtgttctatttttataaaaggttcaccgtgaacaaatgtttaaatgtttcttgttcaccgttattctagaacaccagcaacttactagataatagattttaggcttagaaaaataaaggaaccccaaacttca

SEQ ID NO: 67232 - DNA, 1121 bp, Homo sapiens
gcaggcggatcacgaggtcaggagattgagaccatcttggctaacacagtgaaaccccgtctctactaaaattacaaaaaattgggcgtgctggcgggtgcctgtagtcccagctactagggaggctgaggcaggagaatggcatgaacctgtgaggcggagcttgcagtgatctgagattgcgccactgcactccagcctgcgggacagagcgagactccatctcaaacaaaaaaagagagagattacattttgtgaccttgttatctcatgtcaatactgactgtagttttcatttcattagaataagttgtattaggggaatcgttggttttggctctggtcatgtaatgtacagagtagctgtaccttacaacttgatcataaagttgttctctgcaaaacgaaactagttgggaaagacagaatcaatatgatgaaagaagtggtcataccaggagacacaagttctaactccaaggtgtggccttagaagattacgaagatacaacataaggatagaactatttataaagattataaaggctttacatgagtaatacaagatgcaaggatttagtgaatagacattaatactgtaccccgagtgttgcattttcatgacctttttttttttttttttttttgagaggtagtctcgctgttgttggcctgggctggagggcaatggcacgatctcagctcactgcaacctctgcctcctaggttccagcaattctcttgactcagcctcccgagtagctgagattaaaggcgcccaccaccacgcctggctaatttttgtatttttagtagagatgaggtttcaccatgttggccaggctggtcttgaactcctgacctcaggtgatccacccacctcgccctcccaaagtgctgggattacaggcatgagccaccgtgcccagccctttttttaaaaagaaaaaaaaaaaaaaagcccagctataggacctaaggactcagcaatggggttttcaagcccccttctttttaatatggaattttaaaatacttcttatcttggaagagtttatgactcacaagaagttgcaaaaatggtacagagaatttgcaaataccctttacccagcttcctc

SEQ ID NO: 67233 - DNA, 899 bp, Homo sapiens
taaataaataaataaataaataaaacgaaatcagcaggggttggctgggcgtggtagctcatgcctgtaatcccagcactttgggaggctgaggcgggtggattatttgaggtcaggagttcaaaaccagcccggccgacatggcgaaaccccatctctagtaaaaatacaaaaatcagctggcgtggtggcgggcatctgtaatcccagctactcgggaggctgaggcaggaaaatcacttgaacccaggaggtggaggttgcagggagctgagatcatgccactgcattccagcctgggtgacagaatgagactctgactcatacacaaacaagaaatcagcaggggcaaaatgtgcatgaggcagagtacaggaaagaaaaggtgaaaatatccagttttcctctcccagtggaatcatgtggacagggcttcattctcccagcagcaatgtgtgacaacatgcatggtgtactgccaaccagggaagctcttctgagcctgggtatccaggatttttattgtggctcagaactagctaaccacctgtgtggctgacctcagtcttcagcccctctagaggtccacctgatgctgcatggcccaagacccccaccataaattacgttgttactacctggtgtggcccaaggccgtcctcaggcaaacaaagacagtcttatcaaggcaggacactccaagggcttagagggcatattccaggagctggacaaaggccagatctttccttggaccaggttaacccatcatgcataggatgacaccatctcaacctgccaccttacaatcaggagaagctgtggctgggcgcagtggctcatgcctataatcccagcactttgggaggccgagcagatcacttgaggccaggagttcg

SEQ ID NO: 67234 - DNA, 1155 bp, Homo sapiens
tgtaaaaataattctgagcttgcggggccggacaaagtaggcggcgggtcttggctcgcctacccctgctatataaatcattaattatgataccaatcttaaggagaaggtcttcagaagagtccctcaaagagcaccgcccctcaacgtcatcaaaccccgcctccaaaggcggaggctgcgcatgcgcggcaggacctcgggcgggggcggggcggggcgcagctccgacttcggacatggcgcacgctggcggtggcagcggtggcagcggtgccggcggccccgcgggccgggggctgagcggcgcccgctggggtcgctcgggctccgcaggccacgagaagctgccggtgcacgtgagtggcgtccccgccctccctcggggaacccatcttctggaccccgcgggcgggcgcccctcacccaggccccgcccggccccagccccacctcggcctcccctctgcactgccccggacccctcacccctcacctctcacctcggccctccgaaagcccagcccatccccttcccctcagggaccccggcccctcgtcccctcgttccgcggccagggcccaccgggaccctccccctctctgcaggtagaagacgccctcacctatctggaccaggtgaagatccgctttggcagcgaccctgccacctacaacggcttcctggagatcatgaaggagttcaaaagccagaggtaccagcggggcccctctccacctcaggggacccccctgggccggaatcgggcctagcggggtgagacctcccctctccagcctgcccccttagccgggtgaccttgcgcaggttgtccaatctctcagagccctagctccttctcgtaacaaaaatggaaatgggtagtacccaccttgtggagctttgtggggattcctggaagcaggacagggatctggggggaggcagggagggcgaggccgtgcacactcatagagtcaaatcctgccttgatttaatatgttgatttttatattagttttgttcatgaaagatttggtgggacccattttgatttttattttcaagcgctgtaaaatgttattgtcttgatgattgaaatttttggcaccctcttcccctttaatcttgtcctcaagatgcttctctgggct

SEQ ID NO: 67235 - DNA, 810 bp, Homo sapiens
caacacgacgaaactccgcctctactaaaaatacacaaaattagccgggcatagtggcaggcgcctgtaatccctgctgctggggaggctgaggcaggagaattgcttgaatccaggaagcagaggttgcagtgagctgagattgcgccattgcactccagcctgggcgactgatcgagactccatcttaaaaaaaaaaaaagtttttatggaaagtaacacagtgcacagaaaactccaacagtacaaaacagacacatggtttcctctcctccaaagctgtcgcgcccagcgtcctccgggaagtacctgggcagtgtcgcctgggtacagcttgtgcctgacaggggcaatgtcatcgtcacctctgcttgctggggttcccccgacagcctgtgctgccgtgttgttcccggggaggggctgttggcgggcacctccctgctttgtgctgctgtgtggatatcctcccaaggacatcttcctgtgcgtgtgtctggcagaaattcctagacatggaacccttgagtataagggcatgtgcgtcactatgttttttttttttttttgagacgcgtttcactcttgttgcccaggctggagtgaggctggagtgcaatgatgcaatctcggctcactgcaacctttgcctcccatgttcaagtgattctcctgcctcgcctcccgagcagctgggattacaggcatatgtcaccatgcctagctaattttgtatttttactagagatggggtttctccatgttagtcaggctggtctcgaactcccaacctcaggtgatccacccgcc

SEQ ID NO: 67236 - DNA, 2001 bp, Homo sapiens
gctgcgacctgaggggggtccctacaacctgtgcgagcctcagctactgcacctgtacctgggaggtgctactgtcaatctatcggttacggcaaggggcggtggagtgattcctcttgctggccaatttcacttcagtttgcacctggcacaatcaacactggcagaattaacaaaactagacaaatatagcctcatgatcattcatgcctagctctcggtcagtattcaacttctttcttgttcatggtgtgttaccctaggcaagtcacttcccctccctgggtctccatcatctcctcagtaaactgggagcacagaataaagcgcgtgggaggattaaaggggacactttggtcgcccaacacttgttcactgcataacgataattccaagagcgacatcacagtaaagacccaggcgccgatctaagcgcgtttcagcctcacgcgacgcctacgaggttgagctgcgtcatcggccccatttcgtagcggaggaaagcgaggcactgggcggtcaggccgcttgccggaggtcgcccagcgtcccagccgaggacgcggaactcagggccggtcgggtgtcagcgctccggagcatgcgcagaggcagcacgccatcggggtcttcaggggcccgcgcagttcctggcggggtcgaacccgaactcaccccgagggtcctaactccccacctccgctgcccatcctctccagccctatggcgtctacaaatccagacctgcggaagccccaactcacccagcgcctcgccccgaggaatccgccattttcccgccttccacctcaaggcccgacccgccggcttttcaaagccggacccgcccccttgcttgcgggtcggaccatttgtggagacgcaggaggggtggctgcgaggcgtgaggcagcgccggctaagtgtggagagcgcggccccagacgcgcgcttcgcctgtcctcccctcgcacttggtctcgcccaccatcggcggtagtgggtaggggcggtgggtgggacctgatctgtcggacagtaggggcggggcttttcgcgatgccccgcccctaggagcgctggcgtcacgcccccgtccccgcctctccggaacccggaagcgggagcgcgcgggggagcggcgggcgcggcggggcggagcggctcgagcagcggcgggctggcaggcggtcgtccggccggggacccggcccgggaccggcggcgcgcggcggccgaggccaggtgagtaccaggcagcctcgggttggcgactcgagctcgaagcctgcctttgggggctgcgcagaagagggacggagctgagggctgatgggggacgcgacggcaggggtcgagggggcgggaacgagcctgggggtcttggagagattgctggggatgaggtggaagcgagacggtgaaggagaaagtggatggggatggagctggtgagggagttcgagggcgtggggggggtgagtcttgtggctttgagcagcttctctgaagaggacgtggcttaagtggtaattggggggtcgcaggaaacggcgttgtggggaggcacggaggcgggaacgagaggcccaggctgggggagtgggcaaggccaggggcgggacagccggggtgcggttgaggggaaggggtgcgagaccgatctggggacgtctgcccgcgcgattgaaggaagggtgtctgagaagagggcggcgcctggcccccagtgggcgctcagtaaatgcggggggttctgaactaactgatgcggcagccggctattgggaagcggggaaatgggagctggaagggaagtaaacggagtagaagtcacggtaagaactgagggtaggcttagggagggagggcccggagaggagggaagagaaggaaggggttagagtggccccgtgcagatagatgttgagatgcagcccctggagattccgtccccccaccctcccctcttgattcgtgtccctcctgacttcacactta

SEQ ID NO: 67237 - DNA, 767 bp, Homo sapiens
aaaataaaaataaaaataaaaataaaccaggctctcaaagctttatctcatgacctggaggaacatacaaatgcactgacatatcaaggaaagaattaggttttacagctaaatggataagacaatccaaaatttattaaactatacagtatatatctatttccctgggagaaaacatgacagttacttactaacctgggggaaagttttaagagttaaatcttgtgtgtcccccagccttcttccctgtcgccactccctatccctgtgtgaactgttgcctcggcctcataagttatcgtttctttcagcctcagcccttctaacacttctgcaggaattctcagagcctctagtggccctgaccccactcagtcacagtgctgagtcatgcttctctttagggcagaggtcagcaaacctttgctttgaagggctggatagtaaatattttaggctttccaggctgtaatattacagtctgtgcctgaactatttcactctgctcttgtagcaaaagcagccacagacaataaggaaaggagtgtgggcaaggctgccttccagtaaaactttatttataaaaacaggtggtgggcctattgtaccatcctttattcttctactcacctcgtgaacgaactcctcttcatccttcagaaccccccccccccaccttttttttcttcacgatggagtctcactctgtcgcccaggccagaatgcagtggcatgattgcggctcgctacaaccttcacctcccaga

SEQ ID NO: 67238 - DNA, 426 bp, Homo sapiens
ggatgccagcaaagctccctccagcctccacgcctgcacagtctccagtatgccttcaacagccattagtcaccctctgtgagtcagacccccggtcctgccaggccaacctgcttggggcctcagcagcgggggctggcgaggccagttttctccagcggttctaagccgctcgagggtggtgcccacgccggcttccaaaacaggcttgagccaaatccacgtcatggcaataaacgtgcttcctggggcgactgtttgcaaagggatgtgattgtcttcactgagagctggatttctcaacctggctctgctgacattcagggccggatcgttctctggggagggagtcatcctgtgcattgaaggacattgagcagcatccctggcctccacccaccagatgccaggagcactccccacccc

SEQ ID NO: 67239 - DNA, 512 bp, Homo sapiens
tttggactgggggtacatgtgtagtttgttacagggatatattgggtaatggttagggttgggcttctaaaatacccatcactcaaatagtgaacactgtatccaataggtaacttttcaaccctcactcccttcctcccctttcccactatgagttcaacttttaaaaattctacacgagtgagatcatgcagtatttgcctttctgtgcctggcttattaacatagtatccctcagcttcatccatgttgttgcaaatgacaggatctctttgttttttttttcgttttgtttgttttttttttttttttttttttttttttgagacagactctcgctctgtcacccaggccagagtgcagtggtgcgatctcagctcagtgcaacctctgcctctcggtttcaagcgattttcgtgtctcagcctcccctgtagctgggattataggagcccaccaacatgcccagctgatttttctgttctagtagagatgagattttaccacgttaa

SEQ ID NO: 67240 - DNA, 1648 bp, Homo sapiens
aggctggtctcaaactcctgacctcaggtgatccatctgcctcagcctccctaagtgctgggattacaggtgtgagccaccgcacctacccgtctatgatatttttcaaggacatcaggcccactggtgtaaccaaggtgcagatgacctaaggtgtgggaaaacatgaaggctgcatgccaggccctggttcctgtgaagcccccaccctcatcctgtcactccagaagagaggcactgcaaggcataggggtactcagcttccaggtactgaggtgggctgggaaggggttctccatgggggtctgggcgttaggggggacccagccccaccttgctcactctcaggcagagctgtctcatgtgccccttgaggcaggtactgtcacactgtccatttcccgggggaagaagcggatccagaaaagttaaactctcccagggccgaggatggaatcagagctggagctgtgacctggaaacccataaccacaatacagatgagccctgctgaggtgggggaagccttggattcctgaatcccaggctacagaaatcgggaagggtgtgtggacgtgaaatagctccgactgggaagaatccaggtaggagtggggtgcggggaggtactttgagcaggcaaaacagaacaaaagggcacactgcacgcgggtctgacaccagaagaccccggtcgtcctatcattcccgaagggttaacatgctctcgaggaaaagcaagtgattcgcctaagtaagaatggggtggcgcctctcctatttttttaaaatagagatagagtagcgctatcttgcccgggctggcctcaagcaatcctttcccacctctgcctcctaaaatgctggcattacagccctgagccaccgcgcccggcccagcgccccgtctcaaaacaagatattacttccgctccaaacaaagatgggccagctaacgagcgcgggggaaacatccgcccggaaggccacttgaaggcacttccgccctctcttaacatggagccggcggaaggggtggtgtagggccgggcgataatggcggcgtcgaggctggagctaaacctggtgcggctgctatcccgctgcgaggcgatggcagcggagaaacgggacccggacgagtggcgcctggagaaggtgaggggatctcgcactgccgcgtagagcccgactcccggggggtgattcctagggttggaagccacctggcccgactccccggccccagtagcctctcgggcagcgccctttccggtcagtcccgccacgtccacctgtagcttccgcccccgtccctgggactccgcccctcccccactggccccgcctcctttacgcttgacccctcccatttgtcggccccgcccccccgactcccatgatcaggacatgggaaagacccccgggtgacaatccacttttcctccccagtacgtgggagccctagaggacatgttgcaggccctgaaggtccacgcgaggtgagtgcaggcagcctcagggctttcacatcagcacgtggctgtgctactggacatcccagtaccgctatcccagctgggacccttccctgagctggggaccatggacaggttttgtttttcttcttcctgccttccagcaaacc

SEQ ID NO: 67241 - DNA, 1645 bp, Homo sapiens
cccgtctctactaaaaatacaaacaacaacaacagcaaaaaattagctgggcgtggaagtgtgcgcatgtagtcccagctactcgggagccggaggcaggagaaccgcttgaacccgggaggcggaggctgcagtgagccgagatcacgccactgcattccagcctgggcaagtgagactcttgttaaaaaatttttttcatataattgctgaaaaaaataaataagtttaaatttgcaaaaccatcccgttttttcagacaaacttgagggtcgaggtcggagtcgaccatgtttcgaaggtgtgtggccacgcccagccaggtcagccccgcccccaggccgtcaggcccagccccctttcgtcagaccccgcccccagccctgctgagcgaccccgccagtcgggtccatcctgcagtaaatgcacaacccggacggaagtgcctctccgacagcagatccaggctcggagctccagacgctgggacaggtgacccggggcggtagcgagccggacggccttgcaggtggggcggaggtcccgaggagctcctcgggcgcggtcgtctgtgggctctgcgcgccctggaggtcgaggctccggcagcgcgggggttaactcgagccggtcccaggctgcgcggcgacgtcagagttcatttacatagcgcttatttgggttgcgcagtcgtgggcggggtctggacgtcgctgcggaccaatcgcgtgcgtctatgcaaatagcggtcgttctggggaactctgctcccgcggggtgagagttggccgctcttcggccgagctgcccgcgcgtcctttctccgtgcgcgtcgtcaggcgtgtcctctccgcgtgtccacccacaggccgcccgcagaccacccccgccgcgcgcgggacacgacgccccccgcaggacccgcccatcagcccggaaacccctgagctgcttctcccggaggccgatgcccacccgggagcccccaaagactcgcggctcccgggggcacctgcatactcacccgcctgggcctgggcccccggtgagcctgaccgggagggggtccccaggccgggcctctaggcaaaagatttagcccctccagtttgagggactccggtttcccgacaccccgatttaactccagaccacgattcctgtggcagctgcagggactggcgccccgaggcctcaaaaccagcgccccccgccctccgtgccagccccagccgggaccccacaaggcaaagaccaagaagattgtgtttgaggatgagttgctctcccaggccctcctgggcgccaagaagcctattggagccatccctaaggggcataagcctaggccccacccagtgcccgactatgagctgtgagtgtcccccatgtgattcttcatgcctgggatcaggagaggggcactgaggctggggctttgatagttgaataagagtttaccaaagagtagaaaggaaaggatcccttgctgatcagtagtgggattgtccctgtgaataagccactgcactccagcctgggcaacacagtgagatcccgtctccgaaaataaataaataaataggcgaggcgcggtggctcatgcctgtaatcccagcactttgggaggctgaggcaggcggat

SEQ ID NO: 67242 - DNA, 1434 bp, Homo sapiens
gctgagatcacaccactgcactccagcctggaagatggagcgagactccatctcaaataaaaataaaaataaataaagaaaataaggaaaaaaaaacttcaaagcaggggaggctcaggttagacattagaaagaactgccagcctggcccacgacacagtccccagaggaacctgaaacccagcacaggagatctcgtccaataggctagattctattcctgaaccccagaaatccatgcagaaatctctgggttctacttgaattctaagggggtttggcagagttctaggcccagcagcccagaatacgcccgtccacctgggtcccctgagcagagacagctgggcctcactcttgctcccagcgcccggggtcagaagaaagggtaagctgccctttgccttaatcgggcagagttcctgccttgggcaaacaaaaagcatgggtgaagggtggaggagaaacaaatcaaataaaaaaaaaaatccttgttcagaacgcggtggccgcgctagcagacaagaggtcaccaaggtgtcagggccagggaactggcctctgaggctggagtcgggggtaattggggaaggcagctcctgcaagagaatggggctggggaaagtcccttgtggggcgtccctggcctcttcagctccacggcagcaaccagggggccacggatcctaattggattcctccagcctagggccagactgcagcccacgggatcaagggatcagtggtaatgaggttagcaggcgccggcccccaccctgtgaggcacccagacccctgtgaaagggaggggtgaaagggaggggaaaaaggggaggaagaagctgtttgttcaccccggctccagcggctgtgatcgtccccagtgtgtccccagcacgtactcaccctccttcctcatgcccacccggaagcacttcttgagacggcagtactggcactggttccggtggtgctggtcgatctggcagtcacggttggacctgggggcacacagaagccagggctccctgagacccccatatcctcctccccgaaccagcctatgagccgcctttggaggctgcccctcagaaatactagtaggggccctctagactggagaggtagccccaaaggggtacaggagctcagcttgcaggtctgcaaaccagacaggataacccggatgagtggtgatggatgaagaggaatctgtggaaaagcagatgaacaccccagggagggcacattggcatgggttttgaaggatgaataggagttctccaggtgaatggcggggtgatcccagagagagggtacagccagagcaaaagggttgaaatacacaaatatggaggcctaaagagtttcattttatttggtcactgtcaggctgagcagggtcattgtccccaaaaagatgtgaaggcaaag

SEQ ID NO: 67243 - DNA, 5446 bp, Homo sapiens
ggtggcgcatgcctgtaatcccagctatttgggaggctgaggcaggagaaccgcttgaacccgggaggcagaggttgcagtgagttgagatcacgccatcgcactccagcctgggcaacaagagtgaaactccgtctcaaaaacaaaacaaaacaaaacaaaacagatgaatctcagctgcagatacccagccctgcccctcaggtggcgactgccccactgagcctcggtttcctcatctgaaaatgggaggtcagatattgccctatcatatgggatggactgggtcagaggggttcacgggggacagtgccaagacccagagcccagccggagaacccaacttaggaaagctgaggatctgcgcccactcccccgtaccccccctccaccactgcctgggtcctgcagcaccagccactgagcccctgggaagaggccccactagggcagagggagctcaggcagaaccagaacaaagcccagcggctgggtggtgggagggtccagggcagccgggtggaaacggcctggcctggggcggccctgcaggcaggcagaggcccagctcaggggcccctgacctcaggggaggccctgaaccttcagtctcaacttccccagctgtggaattgggacagatccatccctccaaggagggaaacagttaagttcttcctgttatcccacctaaagagtgcaagcttttttgcccaaccccatggcccaactcagcttcctccctgggcttctggcctccagtccaatttgatcagagccctctcctgctcacacaccctctatggctccccattaccctcagccagcatttcaggcccacctagctctgacttctcccatggctgcacagtccccctcttacagcacagctcccccagtctgccactaagtgttttgtctggaccacattctggcatgtccctgtggcctttcttccacctgccaactccatgcttcaaggctcatgtcccctagcctcctccaggcagccctctctgacctccaggcagagcctctgctctctccctgggaccccagatcccacagacttggggcatctgtctcactgtgtctcctccagactgggggcttctcaggagctagacttggagctggggtctctctggaggggctggcatcaaactacccaggctgggccccagcgagaccctgctcaatccatttgaagctcagaatggaatggtgatttcaccaggtcacacaactgacacagcacaaacctgtcagctccaagcaaggccccccccacccaaaattgctgctccctgacaccaccctcaggaagctcctgggaccccaaaactgcctgagcccccctcccttaccctccctaaagatatgaccagagagcaggcggttttccagcagcaagaatgaggccaaagtctagtggcccactttgtgctggaggagggagcaaggcagctctgccacacatggccacaccaggccagccctgacccgggacctggggccaaactccaccctcgggtacctggggccctatttggtggcctcagccaacaagccttccatcagccgttctccctggggccactccgatccgaactcagcggtccccaccctagccccacagttcccccacagtgcccccaactcgggcagcgtccctccatgtccaacgcaaagcaggcaccaggacctctctctgggcctttgggcctctgttttgggcagctgggaactgagaccgtctagacgggctccacagagaccctgcatgttcctggggtgcagagtaggggcttataaacggacagatcggatgctcgcccgggaacggtgagaaaagaactcccgggctggacaaccccgatcgctttccctggggaccttccgccagaacagctagcaaggccacgccctgccagagaggtctccgacctgggacagcccaaggctcctgctcggaaacgtttcactccctgcccgtctcagagacacccaaagtttgagggatttttccaggagccccaggtctgcacccacccctgggggagagggacgtttcagtcaattccggtggccctgccggccttccagtggcgatttccggtgacccaaggcccagagtgagcccagaggggttccctgagatgggcaagcccagctcccacccccacccccaccgctgggcccctcatgcgaagaaggccgccccgtgccaccccagcctccctccgtctgccgcctccgtagccacagcgactttggaagtgatatttgaccccaagggcgcgccgtatcgatccgcgcggccgcagacaatggcccctggacgctgcgagctccacggtccaagttccacgttcgattccctcgagggcatcccgcgcgccgggatccccgagaacgggtgccctggggttgggttaccacccctgacagcacccctacccccaccccagcgcggagatgacccctccccagagaaaaagcggagggaaggagaagcaagtaactggggcaaaagcctccagggaccacctgatggggggggaacctgcaacgatgtagcgccgactgtatacacaatcccagccatggaatgcgggaggagggtgctgtgcccctatctcagagggggcagtggaggcccagggaaggtcagcgccaggcccaaggtgaccgagcaggtcagaggcctgccccaggtcggggcggggtgcacggcggcggcgcgcggatggggggctcaccggcaggtgtagctgaggttgcggcggatgcttcgcttgaaaaagctcttgcagccctcgcaggtgaagacaccgtaatgcttgccgctcgacttgtccccgcacaccacgcagtccacctgcagccccggccgctcctcgtcgcccggctcggcgtcgctggcggcaccggggggcgaggccgagtcgtcctcggccgcgcgcgggtagccgcccgccttgtccacgccgttcgtgtcgccgccggggccgccccagccgccggtcaccatggccatagccccagggcagcggggccggggcgcccccaccgcgctcttccctccgggcacccctctcggcccgggggaccctacgcggcgcgcattcggccccggcgcgcggggggcacgggctgcaccccccaaaaaagttttgcagcaacttcctgcggccggtcctcgcgcccgggcggaactggtcgggccggttccaggccaactttcccacgcgtgcgcggggccgggcccggggccgggaggggcacgctagaggcgcgggccgggggcccagaggactcgcgtcccgccgccctggggccccggcgggggcgcgcgggccatggcccggcccgagccgcgcagggggcgtcctctggcctggccgccgctcgcccgggggctgcggccaactcagcgggccgccatccgagcgcgggaggccggggggaaagtttggccgcaagttgcgcggccgcccgtggcggggggggaggggcggcgggtgcgcgccggggctgatcgccgcgccccctgggtcccccggcgcccgcggctgccgctccgggcctgcagggccgctgggccggcgcctctggagctgccgcccccgctgcggccgctcctgcctggcctgggcctgcgcctgggcccaagcctcgctctcgccgccgccaccgccaccgaccccgcgcgccggcctcgcgctgcggccggtttgacacacagcgttccattcgcggggcgggcggggggcgggggcgggggcaggggcgcgcgccgcgggctgggggcgggcgctcgttgccccggcgacggccgcccttataagggcatgggtggccgcgcgcggcgccgggcgaacgggccggcgggagggacgggggccgagcgctgggccgcggggcctgaccctcccccgcctccctctgcccctccccccgcacccccgccctcgccctcgcccagctcgggccttaacccctgccgggccgcggcgggagcctcagccgcgcctgccctctgcccttccttgagcctcgccaagatgtctctccaaggccctcccctccacctctggccttggacgttgggtcgctcgatcaccctcgaggcgcccctcggaacctctccccaccccacagttcctggcaaagcaatgatggggggccagtggcacccggggggggggtacgcccctgcgcaagacacacgcgcgcgcgagacagacagacacacacacacacacacacacacacacacacacacacaccctagattgtgtttgcttcctcttccagaaagtcgccgcgtctgacccccaccccaccctttctctgctcgggttaacacctggtgcccggaatctccagggggaagggatgttgtggtctgagaccggctggccggggccgcgaggtcagggggcccctctgcagaatttctggcctccgggggcagggcgcccacccgccccgcgcggctggaggcgacaggcatgccctgtctgggggcctgcccctttttcccttttaatttccttttctttctgtgctttgcagaaagggcttggcctggcggccggctggactgcagatgtctcttccaggcgccctggagcctcgcagctgccgccacctccaactcaccccatcccccagtaccggggctggggcccgcccgaccagcatttattaagcaccctttgtatgcgaggcccgggctggcgagcctctggctctgggcaggttaacctttaaccggctggacaagcccttccaggagtgacctttcacctcggagtcttgcagccccagccacccagactgtggtcccaccccgccctgagcccagagctggacaccagagcatgcagctgggcctctgagagctctggccaggacagtgccttctgcgcaccccctcctctgcctcccagagccctgatgagacttgaagaattgccctccctggagtagggggaaagattcttagagatcttacaacacttaaaaagaaactgaggttctgggagagccaggcacacccagccctgggcctctcaacctgctccagggacgttctggctgcctgggaggtggaggaggaggcgttagtaaacacgaaaagcaggaaggactaggattagacatgagcaaggacttcccgaggtctagagtcgggttctgcccacagcctgatgtaatccctgctgggagagaggaaggcgtgggtgggcagagacgaccctttggttctgaggctgcatgggaatgtgactggtaatttgggatgagggcagggatcctaggccccttgcctggacctgctaggatctttggtggggagcattggggtggaggtctcagaagggattgaaaagagatttagatgagagacaggcgctgtggctcacgcctgtaatcc

SEQ ID NO: 67244 - DNA, 1440 bp, Homo sapiens
gctccaccaatcaccaatcagctcctcctctttccctaaatcggccttctccgtccctcttagcctatcacattgcaagctccacctctattccacgtttcagcctatcacggtagaagcactgactattgtagtctgattcggccaaaaacaaaaattcactaatttttttaatccaatcacatttcatactttgctccagtgtagccaatcacattccaggtcccgccgcacccagctccaggcagctctcactccaaaccccacccccaacccagtttcagcctatcagtttccaagttctttctagcctcaaccagtttctgtctctgcttgttctgcagcccgctgaactacatttcccaggaggcgtcggggctgcgccgtacaacttccggctgtaaagatggcggcttcctagtgagtcggcggctgatttagaaggaggttcaggctacggtgagccgaaggtgggtggtgaaagcgtgtggggcccgttcctaggggcccagctccctttgccccaagagatccagctcctcgcctttcctggggcttccgcctttatttctggtttctcctgcagtgtagcctccatccttcttgctgccgctaaagccttgtttttcttagaggtgtggggactgcaaggcgctcaaagaccatcttgggaagcccgtgcctatttcccagatagacaaactgctccattcgcgtcctgtttctctccaaggggaaccacagtactaatattttgcttctccctcatgcagacacccgctagggacgagggtgtcctagaggttattattcccttattcaccaagacattttcagttttaggtaacagaaaaccctactcaatctggcttaaggaagaaaaggaagttggtggcttatagattgggtctaacaggagctgggtccaggtggtcagaattcgatctgcagttttctcggtggagaccatttcgctttttaccgaggcaaaaggggcccctcacagctctcaactttattctaccagctctgcaactctaatgagagtctcttttccttgatgacactgctagaagttgcagagctgccactcaatggcctgatttgggtcatgtgcccatccctgagccattttcagtggccagagagctgggatgtgctcactggccgagtaggggcatggggctagcactacgttaaaaaaaaaaagaggaaaaaagaggggggactgttatcttatgtcggagtggctgctcggctgagaggtgtaaaaggcagccattctgcagctgaggaaagtgactccctaagaggagtgactcatcatcagtaagcggctcatcgcccctcttccttcttagtaaccaatcttttttttttttttttttttgagacggagtttcgctctttttgcccaggatggagtgcagtggcgggatc

SEQ ID NO: 67245 - DNA, 1406 bp, Homo sapiens
catctaaaatatgcaaatctttggtgagcccccagtgaggctcctggctctgaatttgactcctgaaaggtgaggccctaggagagggggatggggactgagccacagaaagccttgctcagctcccctagaccggggtgagccggggtctgtttcatagagggccaagctgaggcccagacactctgagaggaagctagactctgaacttcctccttggcaccctggattctggggatctgctatacaagtccccagaggtggcgaagaggatgggagaggcagggccctggctgggggcctccaagcctccatcccactccttgggccacccccgcccccgtgtccatggcaaccacaggcggttacataacctaagggggggatacccgagcagtgcacccccattgtcgaggtgtctagggcctggagatgggaccagctgcctgcctgccccctaccccaggttgggcgccgctaaggtaacgcacgcccgagactgagccgcagtggccccagacatactggaggggaagcaggccatgccccccacctcgagtggggccctaatcccggattgtggagggcaacgcacaggcgccaccccagccccgcttccccgcccccggcccccgccttccaggtgttcgtcatccctgcagcggggtcgagcccactggggctccgtggcttcctacgagcccaaacgcggggttggtggacaccactcctccgaagtggaggccccggggcttcgatctctccttttggggcccgttccccgctcacctcatcgagggccgcggggcccgggtcggggcggaggggtcccaggcggagaagccagcgtccgcctgctggcgccgtttacatggtggcgcggggtcaggccgggtgcgtctacgcgggcgggcacctgcccctggcggtcagcgcaggggcatcccgcggccgccgaaacagccggccctttaagttcctcccccgagtaggcggagccacgtgccgacgggcgggcacttcggcctatcgcagctgcggactgacctggcctagttaggagcccaatgagaggcggcaattccgtagtggaggcgggctctgggagcaacggccccgccccttttgggggttcaccgaggttgggggagggatggggcctggctcaaggcggagaagggggttgcagtctagggtctgcgggacgcctgggagtgtgcggccggggccctctctctgcaaatgggtctcccaagcccttgccccccagcccctgcctcccaattgccctgttcctctccaaacgaggcccccatactcttctctctgtattgacctttccattctagaagcagagactccaagatctttttccaatctccggtggggaaactgaggctcataaa

SEQ ID NO: 67246 - DNA, 2021 bp, Homo sapiens
acacctcactcagcccttggagaggaaaggatttttaaagggcggataggggaacaccaggcagagaggagagtgtggctgaaatgtaagatggtgtgtgtagagggttttgcatgcctgatggaagggctgagcaggttttacctggggaaatggggagccaaggatagtgtgtgagtaggggaggggttcagatctgagtatcagaaaatttttcttccttttttttttttttttttttggttctaacaacagaggagaattcttctagggcccaaaatgggggcaagattgccaaagacaagcttgcaatccctgagtttacagattgagaaagcccagagtggcgcagggaccaccccaaggacacgcagcgagcttgaactcaggcctcctcggcttcctgccaagaggcggagacttggctgcagccaggacaagctgccagccagctgtgtgccatctgcccagctcccgctgggggcgggaagaccaaccagccgcttcctgcagctgccaccagctgcgcccggccaccgcggggcaccctctgccggtcaataggagagagaactacagctcagctgccagctgaccgcgggagataatgccttgtgcgcacgcgcttgctcagaaggcgccgttcgccggctacctgttggtgtgtatgcagagcatccctgtgccccgcggatatagactggcgcgcctctgttgcgcaggcgcagaactacaacttcagggttttccccaacggcctcttttttgcacgttaggagaaactacatttcccataatcctttgttccagggctggagcggctctgggctccggaatcgcccgcagccggtactgcgggacccactgcggatatggctgtcttggctggatccctgttgggccccacgagtaggtcggcagcgttgctgggtggcaggtaagtcctcagggggacccttccccaaatcagggaataagggcggcttcggaggctggcgccactcttcactgcccgcgtgacctgccagtgccttgcgcattttgcagccaggctctgtctccgggagccgaggctcagagaggttgagcgccaaggtcacccagcgccccgtctgacctttctcgccgtccctctacccacgcaggtggctccagccccgggcctggctggggttcccagacgcctggggcctccccaccccgcagcaggcccggggcaaggctcgcgggaatgagtatcagccgagcaacatcaaacgcaagaacaagcacggctgggtccggcgcctgagcacgccggccggcgtgcaggtcatccttcgccgaatgctcaagggccgcaagtcgctgagccattgaggatcgcgacgcagtcggcgggaccctcatggaagcatcgccctcgcctcggaccttgcctggcgctatttttgcagggagctggggagcaggaacgcctcggacctgagtgctctccatattgtggggttgaagtctggatgggagcttgccaagtccctttttaggctttttaattaggaagcatttcgaacctgcgcaacagaccaaagaacagtacaaagaacatccgtgtacccagtaccctgactaccgactacctacaacccgtccctgccccatcctgagttcttttgaagctgatctcaggcatcggattatttcttctgtaaatatttcagaatgtatctctccaagatgagagctcattaaaagacaattacaaagcttatcacatccaaaagaattatcaataattttgaaatattattaaacgtgtaataaatgttcaaagttccacttgccttatatgtgtcataactcttttttttttttgagacagtttcccttttgttgcccaggttggagtgcaatggggggatctcggctcattaaaacctccgccttgcgggttcaagcgattctcctgcctcaccctcccgagtagctgggattacaggcatgcgccaccacgcccggctaattttgtatttttagtagag

SEQ ID NO: 67247 - DNA, 1476 bp, Homo sapiens
caggagtgagccaccgcacccggccgaacctcgcatcttaaaaacacacagacacacaaaagctctagagagcctcgcggagctgtaaactacagctcccaagagacttcgcggccgaggcctccgcccacttccggatctcactttcattgcttccaagtaccgggaggtgctttgcttcttcaaccgaacttgaccacaatgggaggaggcgtggcaaccaatgggcgcatgagttagctggatgcggccaatggaagcgtgcaaagcgctcctatgtgggggcggggctagactgcacaccaatgacagggaggtggtggcgccatcagtgtgggctgtgccgtggctggaagttactgtgaggcggcggctaagaaggcggctctggtggcggcggtggaggctgaggcggcggccgaggcggcgacggaggaaacagaagatggtgaggatggcctccaggcccccactccccctctgctagacaaaatggcgctgtggtcccacccacctctagtatccccctaggcccctctccgttctgcccggtcccctcaggtccggcccgcccctcccactcacctgtgaccttcgacccccggaccctaccgagagcttcctgctgatcccactgccactccttctccgacccctgaccccatccaggataccaagccctgacaactcattcatttccgggttgcggctccccccggaaatcgtctggggtggggatggggtcccgtaagaccccctggtctggcctcgttctcagcacgccggacctggatctcttcagttcaggagaatttgggaggccggcctgggccccggggcgggggagggggcttggcaccgcgatatgcagggctttgtcgccaaaggaagtgcgacatcgccgattgtcccggttccccgggccctgaccccacctccaccattctgggcccttacccgcctctaagaatgaaaaacttttatctccgatccgcatggattgtccctgtgaaatgagggtagcagtagtctgaacctcttagggtggtgacaatttaggtaactgacgtcgtaaaggactcaggatagtgaatgctcaacagatgagctgggtgactcgaggccagtgacgttctcttctagctgtcccctcattatgaagtgtggatcgtccccacctggctgttggaaggttgaaattccttcagggttcctcagtcatcctggaatttgggtctggtggttcttcggggttcagtctccccacctgaaaagtgggatggtgacccaccctcagagtggaactaaagcctctccacaacccccattagttggcatcctgagggctgggaagggtgatgggaagcttggtcaagatacctcaagtctcctttgtcccctgacccagagtcccagcccacaatccacagtccttgggatgtggtggggatgaaaggaagactccctttcaggaag

SEQ ID NO: 67248 - DNA, 1453 bp, Homo sapiens
ggccttgttttcacttcctcacactccaggttcctgctaccccagggcctttacacctgctgctctttctgctcggaacactcttcctcctgtgatcgaggtcattcctgactttggggggcccccagttctctgctattagtgtactgcttctctttctcatctctttgttgggtctctggcaggctacctgcagtgggactggcacacaggtgtccagtgcgtgtctgctgaggcacctgtgagggcccagccgtggctggcatttgtctggaatgaggcctcccccaccccctgcccccatgtctcgaggccttgttttccagcttagcatgacaggaaggctgcacgtaccctgccttcattcatttgtccaacgcagacatgttgatcctaaaggctgcccctgagggagctctgtgcaaagcattccccttgttgtcttatgactcagagtaaccctgggaggtggccctgttggaatgcgtctcttcacagggaggcccagaggctgggaagtccctcgtcccaggtcacacaaccagggacgggctaagccaggattgagagcagaatgcccggagtacctgcacctctcgccactcagccaccgggccctgtgtgagcccggccagggttcagtcagccctgtcctgtcctcttcccttggggaggtaccagtccagccagggaggtggacatgtaagcagatgacctcgccggggtgtgagggaggctctgggagaggctcccgaagtgtcgggggaacaaaggggccagggagggtgttggagctggtggggaggttagcaggtatttgccacatggaggcatgaggggcattcctagagggtgtgtgtggcagagggtgtgtatgatgggagtccagcaggggcaagctgggccagggctgcgaagggggacagggacccctcctcacccttcaggtctcagtgcctgcatccctgcgtctgggcagccctcctttatcccctaaatgggccagagctctgccttgcacctcacactgcgccctcgaggcaccctgtcctgcagccgcttcctgtgcactgtgcagctctttgccccacaccatctcaaggccaggcgcgtggccatggtggctcagtccagtgccctggtgcctgctagggccccagaagaccttgctgaatgaatgaagctggccccagagccgggtgctgagctgaggctggcatcctagggtgggaggggaggcaggtttgagggactttgaacaggtcctggggcagtaggtcatccagatgtgacggctgcctcccgggtgggagggggaggcccacccagccacattccggcttcccgagagggaccagcagaggaggggccagatgtcatagaattggggacactgctgttcctgcctgtcccagagggtggtgggaaattgtctgaatagcagcttctccca

SEQ ID NO: 67249 - DNA, 1441 bp, Homo sapiens
tccagaaatgcccttccccccagatcctcccttacaaatcttactcattcttgaggcccagctccgcctccaaaaccacaatcgatggggcgctcactagcagccctgagcgcttcaccacattatgacagcgccgtccttgcagcagccccagggactaggtgcggttcttacccccatttcacaggtgaggaaactgaggcccagagcgtttaagtcacgcgcccaaggtcacacagtcaagctgggatttgaacccaggaccgtatgattctgtattcttcgcggagaggctctctcaagcacatccctggcccgccgcgatcccgcagcccgggggtggcagggcgcagcccaagcctggggctctcggaggggcgtgtccgcgtctccgcgccgggaccccagcccgaagcaccgtcccagccccgcccgccgggccgcagccgcagtgccgggaggagccggcccctcgtccagacaccacgccaggttacgtttgaccctgatcctcctccccgtgtagttgacgcgggctccccaggcacctgcaaccctgtctggtccagccgccgcacacatacccagaactccggacgccggggctgcaggctcgccctccggcgggggcctcttgccacgctcgccctccagggacgtgcccccggcgccggaggcggcctcggccatggcgaggacaggtcaggtcaggggctacggacggcccgggcgacggggagccgcgggctcatggggccggtgcagccgcggagcgcgcgggaggaggagacaaaggccgcgcccgcccgcgccggcctcggtcctcgctcgcccgagcgctgcttctcgtccccgcccgagccgaacctcgattctccttcccggcccgatgcacgtcactctagggttctcagctgagttcgcccgcctagttctttggttcgcgtctccgcccgtgttgttttctgggtttccttctcgcccgcctacctcgctccctgctgctggtccccgcccgcactgatggtgcattctccaacttgtccccacccatgctttcttctggtccccgcctcggagcctcagtttccccatctgcaaactccggaccctggagacgctgtttggaatgtgagatgggcgtaagttgactaagggaggacgtgggaggggcgggccggttggggaagattcctggtgacaataacttcaaccaccccagtagggctgtgatacataattacagcaagccctgcttaggaactttgcacgcaccatttggctgcctagaacactcctcatgcactcttcgtccggttaacaccgactcccttcaggatgtaacctcggagaggatcccatagagttgtcaagtttagcaaataaaaatacagtccgtctagttaaatgtaaatttcagataaaagaataaatgttagct

SEQ ID NO: 67250 - DNA, 1388 bp, Homo sapiens
gaggcgggcggatcccttgagcccaaaagttggaggttgcaagagccgtgatcgcgccactgcactccagcctgggcgacagagtgagaccctgtctcaaaaataaaataaaataaaataataaagtaaataaaaatattgagcagggcgaggtaagggggtattagaactctattctgtcagacagatttttcttaacacgcaagtgcgccgcccgcccgctctgatccagaaccagagaatccgccatgcgaaggcgctcccggagaccccgcccagccagtgcctggaattccaccatcagcgctttattccgagtttcagtgctgtcctgggttaacctgaaagcaatctccgaggctcccctttctggctttcggggagccagagactgaccggacacttggctctgcaggtgcagacctggaccagagagacagagagccaaggaagtccacagtggagagagggctgtgctgggggttccaggaagacttcctggaggaggggatcttggagctaggccttgaagacgagtttgtcaaatgaggaagggcatccgaagccgagggaacggcagaagggaacgctggggaggggagagaatctggagagttccggaaaaagcaagtaggactctttccagaagttcgggcaagattttccctggatcagggcgtgggttctccagtactcgtccctcccggtcaccgagatgctctgagtttccggtctgaacctgaacgtaaagaggtgtagtccctcctttcttgaacgggaaaactgaacgcacataggtccttgccacgcctaaggctgcggagtgagcagatggaaaatgcgggactcaaaacctcccctcgctgtaatttgcactgccctgtgccaaactctgtcctttcttccattccttattcctattgtcagcctcgctgcgctaggaccctaaaaatttggtctcatgttgcccggggaacaacatttcgctacacctacctccataccgcctcccgctcccgctctcccttgcaccagccaatggaagcgagtatcttcagacggtgggcaggacgtatcctaagatacccaatggtggtcgagaatagttgagcactttactagtcaagccgcggagtgggcggggccccctgcccagacttgaagccacacaggcaggtcgggcaggcgggtcgcaggttgtaaatccatgtggcgggggctttggaccctggcggcccaagcggcacgtgggcctcgcaggtggggctacaggggaaggggtgcgacagcttggggtgctgcttggaccccagacccactccctgggttttaggggcccaattccctgcggcagagcaatcattcgcgttcttccgtgcctcaatcgt

SEQ ID NO: 67251 - DNA, 617 bp, Homo sapiens
actgtgcccagcccctcctgctctgccccgctcccgcaccgtgaccgctcctcttgctctgcccttccccctgcactgtgccccgcccctcttgctctgccccaccccctgtgctcggcttgggcccccaacattctgccggtcccctggtactctactcctccctcccgacctcacgcttcgcagctcccccagtgctctgcctggcccctctaactgtccctccacccagtgccttcaattgctcaacctgggatccccgctcagttgaccttgctcccgcaggctagagcaggctgacctcattctggccatgctggatgcttctgacctggcctctccctccagttgcaacttcctggccaccgtcgtagcctctgtgggagcccagagccccagtgacagcagccagcgcctcctcctggtgctgaacaagtcggacctgctgtccccggagggcccaggtcccggtcctgacctgcccccgcacctgctgctgtcctgtctgacgggagaggggctggacggcctcctggaggcgctgaggaaggagctagctgcagtgtgagccccctcccactcccagcctcccctgacccacagtttaagtgtgggtc

SEQ ID NO: 67252 - DNA, 2866 bp, Homo sapiens
ctcccttctccctttctcaccctcaagctcctccactttcttttgtccttgggccttctctgcatccagggaagccattagggccatctaagaagagttagaatctggggttttggcctggggagtttggctgctgcccctgggacctgggcctcctccctaggtcctggggacagaggggcttaaatgcaaacccctttcaggttttcttccaaccctctctgcaccatggtctccaaccttaaagaacagccacaaccacacactctcccagggccacccataagcatgtgggtcctcaaaatgggagttttgaggccaccccacgtggaaacttggaggctatcgataaccaaagtttagtggacatttccagattgcctgagcaatggcccaagaaaagttagagggccctaccaaatccagaatgcagtgggatttccccgcccaagtgacatgcccagcgagagtttcaagatcccccatatcaggacccaggtgaatatttcagtttcttagggatgaagtgaaaatttcaaaagccccctttttcagggtctggtgaggtcccccttcaaccctgaatagggatttctactcccccaggactggtgcccacgaggagtttcaaggcccccgacaccagtgccctggaaagaatttataaattcacctaagtcccagggggatactgaggtccccgatttgggggatctggagagttttaacaccctgcccctacaccagtgccctggactgggttaggggcccacaaaccctggtaggggaacctaggtcccttgatgtgggggcccaggagcagtttcaggacctcccctgcatctccctggagacccaccctgggtcagatttctggggagagattcttgtccctcccaccgcctagtactaggccatccaaaggagttgaggagcttaccacagtgtggttgcaggtggcggcctgggcctccacatcctgaaagcccttctgggcctcggtcagctcttgttgcaggagatgggtgacattgcgacactccatcactgcccgaaggccgtcccggcaggcctcgctgttggccttgatggtgaagataatcaagggcacccccagaatcacgatgatcaggagcaccagaattcctatccccagcagaagcttacagcgcttatccccgtcttccatgggcactctgcaatagtcatacgaagtagatgccatccagatctcccctttagagtctggcctggagttaggggagggtgctggaatcttctacgggccacccctttattagcataggaaacgtcctgaccaatagcaagttccaggaagtgctctgaccagcagctcttgcatgaggcacctacaggcagaggattaattaggttttcagtttcagtttcccagaaaggaggtgggcttttttttcaccctgctttaaaagcccttgggcccttcccagctgggtgccagccaactgtggctgcctgggacactccatcttaagtccctgtgcctctgctgtgtgttactgagtgcctaggccgtgccagcctgtattcatctgtactatgacctgaagaggcagaggccatcactgttggtccggtctccacctggggaaactgaggttgcacagttgcgtggtggagtgagggcagggcctgggtctgggggcggggcctgggtctgaccccagggactggtttttgtgttcaggtgtctctgtggtgacgagcagggcttcatccagtgcctctgtccccaccgaggggactatgggagacatggagggtgtgtgagcaacaggtgagactggagccagctgaaaactgggagaccgacccagccaacaaacaatgtcggtctctgtcttggcacctgcaggaaacaagctcctacttccagaaaaagtgctcctgggactccaggataccaggtaaactctctgagcctgtttcttcatctgcaaaggggaataacagggccagcctcagacactgtccatgtggccaagagagccagggcttcctacaggaaatcaggcccattatcggcacccaactgctgggcatgaccgctgaaaggggactgcatgtttttcttgtggcttcttcagccacatcctgaccacagcccagattctgttaggtctgccatttccatgtttttttttcttttcagcagggccagacagtaggcgaggtcaagtccagagcccaggcctcccagaaggcctggggaactccccccaggccctgactccaacatccctcagaaggaccccattaaagccacttagagccaggcatggtggtacatgcctgtggtcccaggctgaggctgggaggctgaggcaggaggatcactcgagcccaggagtttgaggctgcagcgagctatgattgtgccacggcactcaagcctgggtgatagagtgggatcccatctcttaaaccaataaacaaaaaaatcacttagaaccaagaaccaattaacaagctgtgggagatgatcttgctgaaaattctgagggtgaacttgtcccaggaggagggacctaccagcctggccaggactccaggtgcaaagacacgacctttgcctgacttatttgactaagctgacttatttgagcagcactgttctggcctgctaactttagggttagtttgggaccaggtcggaaatcacaattgcatgaattgcacattggaggccagggtggtgcacctctgggcaaatgaatttcctctcttagcattgatttccccagctgtaaaatgtggataataatagattgatgtcctctctaaattttgcagctgtaaacagtcccagccctgcaaaccgaaagtt

SEQ ID NO: 67253 - DNA, 1585 bp, Homo sapiens
acccaggggaagaaacaataaaacgttatgctttttactgttgagggagaaggggcagttagagtgagagcctctccttctccattcctggccagtgaataaaacctgattgccttttccgattggatgttccttctttgccacctacacaaagtggggaggtaactcggtttgctggtggcatcctcagtagctgggactacaggcaataaattcttttatacgtcgctttttaaacgtattgtgcctgtgaacaaatcttcaagttatacccaagatttcaaagctcatgatggtccatagtactcgctctttaaatcaatagctgcgtatcccacagatgatttcctttgggatgatttcccagaactggaattgcagattcttcacaatgcatttttagtagagaaggggtttcaccacgttggccaggagggtctcgatctcttgacctcatgatccgcccgcctccgcctcccaaagtgccgggattacaggcgtcagccactgcgcgcggccacaaagctcccaacttttccgttaagcaccgagcttttttctagactagcagctgaggccggaaggaattctggggaacgtagtgcagacttgcagagaacgagtctcttggtcctgtgccgtagcatttccggcggaagttgctgggcgcggaaagccggcaagacctttttttccgccatcatcgctcacgcgcgcaaccctggcgacgcgtggtggcgaggctccgcctccccacgccattggccagcagctcctcgggcacgcgtatactgcgcttccgggcaatctccgccccccccccccgcatggccttctgggagttgtagttcggtcgcgagcgctgccgtcgggaggcgctccgaggttcgaggctgtgccccgcgaccccgccttcggcgctcggctcgcaggatggatcccgtacccgggacagactcggcgccgctggctggcctggcctggtcgtcggcctctgcacccccgccgcgggggttcagcgcggtgagcggcgtcgaggggcgggggtcgaatgggggaggcagtcgctgtggggtgggagtccggcgctgacccgcgtcctcccggtagatctcctgcaccgtcgagggggcacccgccagctttggcaagagcttcgcgcagaaatctggctacttcctgtgccttagttctctgggcagcctagaggtaagaggtgcccaccttcggaaccaccagggtctgcccacctcccctgcccattcacggtgccctatgccaggtgcgctgtccccgctgctagccaccctcgccgtgtcccccttccacccccagaacccgcaggagaacgtggtggccgatatccagatcgtggtggacaagagccccctgccgctgggcttctcccccgtctgcgaccccatggattccagtaagggctgcttcggaggcgagagttgtccgggtcccttgcagggaggagcgggggaggagggacgacgggcgcgcggtatctgagcctcggctgccccctggcacacggggtgatgacagggttggctgaggactcagagccctgccctag

SEQ ID NO: 67254 - DNA, 994 bp, Homo sapiens
ttggcctcccaaagtgctgggattacaggtgtgagtcaccgtgcccagtttatactggtttttcaatctcataaccaggaggctactaagtgacaaatgagtgggcatggggggagtggtgtctccagcatggatctgctggacaaaggggtgattcatgaccctgggcgggacagagagggatggagcaaggcagtccgagatttcatcatgctcctcagaacagcacgcaatttgaaacttatgaattgcttatttctggaattctccatttaatatgtttgaactgtggaaacctcagaaagagaaactttgaataagcagggactactgtactctcaactgactctcacctctgctgtccccctcgcgtgtcataatgttggcatcttgtttgttgtctctacctcaggggacaggaggtgacagagcatttgctgggagaggacactgagggggtgaccctcgtgtgcagatgagcaagtgaatttttttgttttgttttttgctttttggtttttttgagacggagtcttgctctgtcgcccaggctggagtgcagtggcacaatctgactcactgcagcctccgcctcctgggttcaagcaattctcctgcctcagcctcctcagtagctgggattgcaggcacgtgccaccacacacagctcatttttgtatttttagtagagacagggtttcaccatgttggccaggctggtctcaaactcccgacctcaggtgatccacccaccttggcctctcaaagtgctggaattacaggcgtgagccatggcacccagctgggcaagtgaattctgactaatctctctccaacctcgcaaccacttcaggaagtgtcaccatggtccccattgtacagatgcagaaactgaggcacaagaaggggaatggactcattgccaggggctccaggtgagacagtggcccagtgaactttcttgttccaaagcctctagctgcaatagtgtcta

SEQ ID NO: 67255 - DNA, 2404 bp, Homo sapiens
tcaagaagtacagtcttgtacttcttttattaaatttatgcctactttatactttatgatgctatggtaaatggaattgttttcttaatttgctactgattttaaaatccactacctgtgtgagttgaactgcgcttacacacatcactgaaatatcccactctcagaagtggcccagcctccccaggcccaccaggccttcttccccttccagccctctgtccaggcaagaactcgattggaggcctttctgggcactcagagggacacaccaccacactaggagggttagcttaaaaaattcaacaagcatggccaggcgcagtggctttcgcctgaatgctaccactttgggaggccgaggcaggaagatcgcttgagcccaggggttcaagatcagcctagaccatatagcaagagcccgtccgtccggaaaatgtaaaaaaaaaaaaaaaaaaaattcaacaagcatattttcatcccctacttttttttgagatggagcctcgctctgtcgcccaagctggggtgcagtggcacgatctcggctcactgcaacctccgccaccccggttcaagcgattctcctgcctcagcctcccgagtagctgggactacaggcgcccgccactacgcccggttaattttttgtgttttcagtagagacggggtttcaccgtgttagccaggatggtctcgatctcctgacctcgtgatccgcccgcctcggcctcccaaagtgttgggattacaggcgtcagccaccgcgcccggcggtgcaggaattttaaaactcaccaaaatacgccctccttcagaaaatccctgccacctcgataggacgtcctcttcttgagctcccctctccggccctccctgatacagcaaggttgagcattcgggcactggcttcccgaactcacttcgactcaggcacagcaggcaaagattcaatgggtagggccggaccgactgcccgaccttcgcggtgcttcacttgcctcactgcgcatgtgccaaagacaatcacccaaagtactcgaaaccaagcggcagggccggcccttgcgcaggcgtactagcgacggccgtagggagcgcttcctcctccccgccgccgccctcgccatggccgcgccggccccgggcctcatctcggtgttctcgagttcccaggagctgggtgcggcgctagcgcagctggtggcccagcgcgcagcatgctgcctggcaggggcccgcgcccgtttcgcgctcggcctgtcgggcgggagcctcgtctcgatgctagcccgcgagctacccgccgccgtcgcccctgccgggccagctagcttagcgcgctggacgctgggcttctgcgacgagcgcctcgtgcccttcgatcacgccgagagcacgtacggcctctaccgggtgagagctacgggggccgccggggatcacgccgagagggccacagccaccgcctacaccccggctacggaggccgccgggggccatgccgaaagggccgcgcccactgtctgcacctcggctacgggggccactgggtatcatgccaagagggccgtgcccactgcctgcacctcggctacgtgggtcgctgggggtcatgccaagagggccgcgcccaccggttgccctcggctacgggggccactgggggtcatgccgagatggtcacgcccactgcctgcacctcgactacgggggccgctgggggtctagccgacagggctcgcccgcctcctgaaccccgcctacagtgggtcccgcaggacctcactgcgccctctgcctttatctaggcagggctagaaatggtctacttgcagtccgtcttcctgcttcatccggtggccaggcagagggaacggcacgggcaagggcctggaagggaatccgagtggcccatgtcaaacgatgcccataactcagccccgtagcggacgggggcacgaggaatcaggtgtagagcctgaatctcagggtcctgatctctaaccccagcgagttctcggggatccctgggcagctttgccgctctgatggctctgcttccaggctgttcatctttggctttgagcctcaggattctatagaatcagaggagcgcgctcttttaaagacagggtaactgaggcttggaggagccttggcctggccgagggaagagtgggaggggcgggctcaaaggccaggaacctcaagtcacttgagtctggcagcgtcaagggacaccccatgctgggtgtgccgtcttctctttgcatagaatcttgagctgatgatggttttgtgggttttttattaagagaaaaggcttactgaacgctttatatgcatcaattcatgagtccgtaccacagcctatgagatgttacactcatttcacagatgg

SEQ ID NO: 67256 - DNA, 1445 bp, Homo sapiens
aggctaaggtctcttgggtcccaaaccaggtcctaagtagccaagtccgcctggtggcacagcccgggttttatacatggggaaattgggcggcgcatctggcggaggtctcagtggtaggaggcgcctggaggaagcgcgggttcctaaccctaacgctacccctaacatcccttccacgcgctccgagcgctatgtgcctttaagatcggtgcgggggcggggcgtcctgggtagggctgcaggtgacgtcactccgggccttgggactcggagagcgtctggaggcggggcctggacttcacgcccggcgcgctcctcccctttaaggcgcgcggccgggcggggcccctatgacccctttaaggcgcggccagagtcctcccgcagaaaaacgacttaaaggagacgcgtggcgcgatggcggcggccccacgcgcgggccggcggcgcgggcagccgctcctggcgctgctgcttctgctgctggcgccactgccgccgggggccccgccgggcgccgacgcctacttccccgaggagcgctggagcccggagtcgcccctgcaggcgccgcgcgtgctcatcgcgctgttggcgcgaaacgcggcccacgcgttgcccaccacgctgggcgcactcgagcggctgcggcacccgcgggagcgcacggcgctatggtgagtcgagcccgctgtccccatcaggcgggtcacgcgagcccctgcttgctgtccccataggggtgggtccacgcgagcccctgcccgctgtcctcttctgggcgggtccgcgcgtgcttcctgctcgctacccccatcgggacggttctacgcatgcccctgcccgctgcccccatcgggacgggtccacgcgtgccccctgcctgctgtcctcccatggggccagacacagccctccccacaacacaagcgggaccgagttcctcctgctggctcctttggggtgggctgggcaccgcttctgcctgctggaccctactagggcagctccggcctcactaactggggctctaactccctctggggcacgtacacctccaaaggacggagcccagagcccccactggggcgttgccagaggccacatctaacagcaagcctttctgtgccggctgctgcccttaagcttgaactcagcctggctccaggccccagtcaaacccctgccctcagaccggcgtgggtggagtccaggaccagatggcccaggaggaagtggatgctttcttggtagggaatggggcagagctctgaagaaacctttgactggtgacttctcactccctgcctcagttttctcaaatggaaaatgggtccgggtgcagtggctcacgcagtaatcctagcaatttgggaggccaaggtaagcgggtcacttgagctcaggagttcgacaccagccttgccaacatggcaaaaccc

SEQ ID NO: 67257 - DNA, 1338 bp, Homo sapiens
ctacacatcccttaaagccctacctacaagatagatttcttttctctgttcaagccctgacctagagagctgggagcatccataggcaccgggttctgatgcggcctactgtcatgtgatgtgagttcctggagggcaggagttctgacctacatgcagcaggcacgcaatcaaagcttgttcaatgaaaaaaaaaatgaatgaatggtcacttgggagaggcggctcccaagcggacacccaggagtcggccaacccctttaacgcccgcatcccctgctctccacgacctcaaagggcctgtaagtggtcgacaaaaaggggcggggatgcggtggttccgggcggggtcttcagcccttccggtgcggcccctttaagaggcggggcctgcggggcgggcgccgagaacgccggggcggcccgaagatggcggcggtggctggatctggggctgccgcggctccgagctcactgctcctcgtggtgggcagcgagttcgggagcccggggctcctcacctacgtcctggaggagctcgaaagaggtcgggctggcctgggggcccgcgggagcccgggaggcgggcccgttcgcgcgtctgggcccggggccggcggggtggggcggcggcggcggcggcggcgggacccgggctccggggcgggggtcgcgggcctggggctgggtccccttcaccgttaggcgcacgacgcgggcaaaggcggggtgcccgtgggtgcccgcggagaaagtggcatccgggcctgggctgggcagggctgccccgccccaactccgggtgaagataggggaggggacacgggcctgggcttggggacccttgcagttggaccacggctccgcttcccgcctgactggcctgcccgggggtagggcctggggtcgctttggatctccaggtcttagcagcttagatagagatctcccggagggagaagcagatatgggggaggctgggcctggagccccggggcccgctttctgttgcctcacaaggagctgctaattggggtgtgggcgggtgcggcctgccctggggatttggcacctagggaggtgagtcataggcgcacctgccaggttcacctgcagccacttggctcagtgggactggcgggcgtgatgcgcccgtgggtggagatgggtgttcatcccccatccctcggagcatctggacctggcgtttcattgcatgtaaaatgggacaggaacacgcacctcggttcatgtgcttgaggagtgtttagtgagcacctgctatgcgccaggcctttgggcagtggacacagggatatggccgggatgatagacagg

SEQ ID NO: 67258 - DNA, 738 bp, Homo sapiens
aggaaggatgattataggagttggggcatcaaatgggggcagaggtggctgcagcacctgccctgtctggctacaaacagcccagggacttcccagcccttcatgtcttctcccttgcaggtcttagcacctaggctgtaaattcagagaccacacctgcccagtgggtgtggctctgggtgtcagagagtagtggcatccatggggccactgggtgtcagacatccatggggccctgggtatcagagctgagctttatagaggtgacaaaatcaaaatctgtttgccaccacctcctcataatgtagcctaatctgggcatgggttcttccctgtctgataagtggcgggtacatggcacctcctagtagcttttatttgccttcctggggacacaaatgaggctgggcaccttttaaaatgaagaaggcatctgggcatggtgactcatgcctgtaattccagcactctgggaggccaaggcaggtggatcacttgaggtcaggaattcgagaccagcctggccaacatgataaaaccccatctctactaaaaatacaaaaataagccaggcgtggtggtgggcgcctgtaatcccagctattcgggaggttgaggcaggagaatctctggagcccaggacgaggaggttgcagtgagctgagaacatgccactgcactccagcctgggagacagagactccatctcaaaaaagaaaccaaacaaacagggctggg

SEQ ID NO: 67259 - DNA, 1641 bp, Homo sapiens
aagaggaaactgaggtcgcccctcaacttgggcgggggactcctgcagtccagatctgggattcagggcccatgggaagccacctggccgtctaggtctggggccagccctgggggccatcacttcctcccactggcctgttctcaaggtgacaccaggcagggctggtgtcaggaggaagaggtgtggcccccaggtcaggcagctgggcccccatatggcctaggtgagcagttgggtgtttgctcagtccagcctggacaccctccctcactctcacccctagggtgtggcatttcctggcaggtgctctgggtgtgggagaaccaaaagggggccttggtgcttctctgttccaggccagagttcaggaatccagacaagccaggtcagcccaggaggagcaagtaagggctcactgagtgacatttcctcctgccaccagcctctgaggcccagagcaagcaggaatttgctcactcccccaaccccatgagccagggaggatgcctattgtggaccctcttcctggtgggaatctggcttgccttgattgctcctcatgatggtgaggtcactaccaacgtggcaaactaaaggaaatctcatcagctgggagttaaagacaggaactaggctcccacccaacctttcttaggtggatttctaggcctctctgtgcctcaattttcctatccataaaaatggagctaatgcagccctacttctcagcacacatatagagtttagatggacagatggtggccaggctgcacacaggacctggcatattgatcctagtcctaattatgcagctcattatgttatcatttatagcatgtatctttgcacacagaaataatatcatgaatatttctgagctctaagtacaagacttggagaagagctctgaccagcctgaaggtgtgggggtccaggaagtccccagaggaggggcccaggagacctcagttcccccatcactcctggattgtgggaagggtctgaggttgaactgcgatgcacggcctggcttcccagcctgtttccccatctatggagtgagcccaaagatgccctttgagactccactgggccagggctggtgttattcaggggcccctttccagtctcacataggtgccccaggcagttcctgcaatggggtagggctggcatggatgacatacaattagtcatccatgacagagcctcgggacctagaaacccgggacaccaaagtctaaagtgcatgtgtcaccgtgcccaaccccacccctttttccatacccaggcactccctggtgcagatattgagtatatattgacagagaactcactagtacacatggtttcactaaagcagggtccggccattgtgaacttaaaggatttactgggctatttcttcttcttttcttccccttctgtttgcaaaagcaactcctgctccttgtaaaaagggaccagcctatcattactgggaaacccaaactggtaagaactggtgaggaaccacccacaggggctggcagatcagggttcaaatcccaccaacccgccctggcctcagtcggctgtgtgaccttgggcagagttgcaccctctctgcacagatcgtccacctggaccctaggctcc

SEQ ID NO: 67260 - DNA, 2139 bp, Homo sapiens
atcccagctactacgaaacacaaatcggaccccaaattaacaaaaacagcattccagagcttattcaatattcgtgctgcaacatcgctaggagaaaaatatattatttgtattcccattttacagataccctcaggtatctggtggagacctccgtaacacacctccccggaggatgaggccccgagtgtgaagcatcgggatctcacggtaaacaccgcagccacccgaggtagcttaggttcaatgcttaggcatcctgcaggcggcgcgcgccgccgcccctagttgcagccgggactggcggagtgcctacaactcccgacgtgccgcgcgcgcagacgctccgttgcggtcgtggtggaacaggtggagcttgcctcgttgccttctgggaaacgaagtctcgctgaagagaggcggaactttgagtagcaggtggatccatagccaatgaagacgcgggtcgctttgagtgcggggcagagaagccaatggacgtgcggcattgagagggcgggtcttccggtagtgaaggcctggtgaacggctgcgcgacagaggacacttccttttgcgggtggcggcgaacgcggagagcacgccatgaaggcctcgggcacggtaaggcgggcgcggcgcggcagggggccaagggatggggcacgggccccatcaggggcctgcataagtggcgtgggccgggttggtgccgcgcgcttctgtttgggccccccttggccgcgcgccgccttctcttgttgcacccaacatggcggccatcgtgggagccgcgtggagagagcgatgcgtgacctgggccagctcagggatcgcgggggcccaaggactccgggtcttcttcccgggggaaggaataagtcgcgcagcatagaggccctagccccggcacctcgtcgagccgccaagtttctgttttcctttctgcaacgtggacgtggcggtagagcaatagtgtgttttctttctgccggaatggctgtgagaagcagatgaaaattgctaacagtgagccgaaacggggagcgtgaggcttaacgctgtggtacatactggatagaatcaaacggctctatggcgcagagataggagaacctggactcccatggagtgggtgtattatgtccagatctccagcttcggtttccttgctgtcaaaggggcgggccccattgttcccttcctgaacgtgtgccgaggccggtgggtcaggttcacagtaaaagtaggaactgcgataatttgtgactatttttcattgataactagtgaaaagctggcgagtcagtttcagaggtggtttctttgtgccatatcacagagcctggacttgaccaaagattctcacctctgcatctgtaaaccgggagtcttccctgggccaaacgtttggattgcagttgggaaaacggaggcagccgcagctcgcgtggcaacagtgcagggatcccagggctggggagagacctgaggtcttgtcctagttctgcctggaatgggctgtgagatcccatgctggtcactgggcctcagggtgaaagaagatgttggctggatgttttgaggtgcagagtggctgtttgacggcgactgcaaagcaattcaggactgcagcatgaagaaaggaggctgtgggtctaagccacagctttcctggtctgaaacccttagcccaggcaaaggagaggcaggcaactcaattaatcctccctggagacctccctctcctcagttcattttgtgtataaagttgtggtcgggagtgtgacctacagtcaccaagaatccacatggaggccctagggtggccctgcctcctgcttcccgaatctgtggtcactagatgtaggaaagggagtgaggtggatctccacagttgcctctgggtgctggccttaccctcactcctgtttcctttcagctacgagagtacaaggtagtgggtcgctgcctgcccacccccaaatgccacacgccgcccctctaccgcatgcgaatctttgcgcctaatcatgtcgtcgccaagtcccgcttctggtactttgtatctcagttaaagaagatgaagaagtcttcaggggagattgtctactgtgggcaggtatggagaggccgggg

SEQ ID NO: 67261 - DNA, 2409 bp, Homo sapiens
tgggggaactccctgaggcaagactgcgcctggcaatttgtaagaagggggctggtgcgacctgagcagagagctaatgggagggtgagggaagccaagggagatggggtgggaggtgggaggagtcttgcgggacaatgggaacccaggggaggcgttagagcaggggaggtgcatcgcgcactgggatttaggtcccagcaaggtcgctggggggatgccttttagggaatggactctgtggtcaactactcctacctgaactgcccccaaagcatttgcttttccctctccacagtcaggaccagtgtaaccttagacccctaatactgccatttttactgttgagaacaccgagaagtagtaaatgcagaaaatctaaagtatagtgcctaagacaaattggcgcctcaaacctaatttctaaataaaattaataaataatattgcagaagtggggagcaggtcagcaatccaggaagaggcactggcaggagcaagagacggaatttgagcctactcgcggttatgagcctactcgcggttacattttggccaaactcaattcctggtctctctgagcctcggtttccctacctggactgcgcggtgtgtgttaatttctctgccccatttatctcccctctcctagccccgccccagcgtcaccagtgggacgcagagactcaggactaggaaagcacttttaaagcgttaagggattgcgaagagctacggagaggcttcctcagggctatactgggtccacctcccctcatggaccgcgggcgcgctctggcggccgggccgctccaggctgaagccgccggaccacgtgtgtagtcgcagctgccatctttcatccgggcatcggccatcttggtaaaggcaatgttctagattttcgcctctgcccgcccctcctggttcatcaacatattaaatgagcgtagggaatgagggcgtattaagtgtcctctttttgaagagacaaagaagtggctgactaccctggcttgggtccgaggcccagccatctttttctttaccaaaatggcggcggtactgaggcgcaatgagtgcgcgccgccaggagctcagcgcgcaggccccatgatgacgtcacggaggcgcgaccgggccggcgctggggtaagaaggtaggagcgtctgcggcgcgggcggaacccgggttcggggagcagaggcgcggggcgggggctgcttggcctgggaccatcccctgggaaggctggaggaggggtgctgggaggcaggagcacttctggcgtccagtctgaaccgcacctagttgggggcgatgcccatttccagactagacgattgaagcccgacgcgacagcatgttcgaggccacctggccccggactgcccctaggcagcttctggtctcgagagggacagagttgggcgcggactcccccggcctcttgtagggggattagtggtgggggacttcaaaagggatagccgggagggctgcttagaggaggcattgttgaattttgtattctgttattttaccttcacatccgtggggtcttaatccccatgggtcttgattcgcttctaagtgtgcccctcgcccagcctgagccactccctgggtaccgcctgggctcccagctcctgccatctggggagtccacctcctcactaaccccagagggcttgtgtgacccatagattgggcttcccggctctaacgccctccacaccttcccatctccctggaatacaaatcgcccccttttccagcctacctcctgcatcccgcgtgcaggctgcgctctcccccactcattcagacttttccttagatgtctcctttaggaagccctttgacccaggctgggtcagaagccctctccgggcttccccggcgccctgcgtgtccttattaggactctgattgcatgtgttggctcttctctgggagtcccatgcaggcagaaagctcatttgtgccacctctttccccagcatcgcacacgtattaggtgcccagtacatatttattgaatgacgtgtgcaagtgagtgagtgtttactacacagagaaaagtgtctgtatttccagcttgggctgtcataactaataccacagactgggtggcttaaacagcagaaattgccaggcactgtggctcacacctgtaatccaggcactttgagaggccgaggcaagcggatcacttgaggtcaagagtttgagaccagcctggccaacatagtgaaaccccgtctctactaaaaatacaaaaatcagataggcatggtggcacatgccaacatggtgaaaccccatctctataaaaatacaaaaattagccgggcgtggtggcaggtgcctgtaatcctagctgcttgggaggctgaaacaggaga

SEQ ID NO: 67262 - DNA, 1172 bp, Homo sapiens
ccagacacgactgggcacacagggcctcggacgccaggcaaaggagtggggcttcaccccaggacgatggggagccccggtggggttatgagcagggcagagagccgatcagagcggcgcgtggcaggctcttccgggcgcctgcagagggacaactggtggacaagagtgaggatgaaactcaggacaggagctgagagggtggtcgtcagccctcgggcacaaagacaaggtgatgacgtttgttccctgttacagaaaggcccttactcccttcggctcctagccccggccccggccccggccccgcccccacccccgcccccgcggaatcccaggctcgcgcgtgcgcactggcagcagggaatccccagctccgccgcagagagcgggagggggcgtgagaggggagttccgtgcgcgcccagccggccccgcgtgcgttgccaggacgaccgggcggggccgcggggccgccggtcgctcactgcgcctgcgcgggggtgctcgccatttgcgccggggctttcccgtcgcgcgccagcagaagaggggatgccgcgcccagcgcgcatgcgtcggccccacccgacaccccccgccccccgcccccaacccacccaccctgagggccggggaatcctcacccgccgcagtgcgcatgggggcggggcggggaaaccggttcaaaccggagtggggtttgccgaggaggtggcgggggagggagcgagagcggggtcttcccgaggttcccactccggcccccgccgttgccttagcaaccgggcgcgcgggccgcagtgcgcgggcggcggcggcctcggggaagccgggtggctctgcgcctgcgcggggctccgcgcctgcagccggggttccccctcgagcaccggggggacggcgggggagtagaggatgggcgcgggggagcgggtgctggggaggaagagaccgtgggggaagagacggcgcgggaggaaagaaggggaggaggggtgggtgccgaggagggggcggtgggggaaaacgcaatgggtagggactgtagggaggggtgcagggagaggcgagcctggggatgcgcgccagggagggggtgacgggggagagcgtagagggagggggacgacaaaggcggagggggatgggagggggagcttagggagtag

SEQ ID NO: 67263 - DNA, 1886 bp, Homo sapiens
ttagctgggcgtggacgactcctgtcgtcccaggtactcaggagactgaggcaggagaattgctagaaccagggaggtggagattgcagtgagccaggatcacgctactgtgccccggcctgggcgacagagcgagactctgtcttaaaaaaagagagagagaaagagaaaagtaaacaaggcaagaaagaaagagaaaaaaagaaagagaggaaggagggaaggaaggaaggaaggaaagaaagaaaaaacagagaaaagtaaacaaggccagaggtggcaaggggactctgaggaagtggcatttgggcgtgggcgggatgggtgggagaacggatctggtagcggaacggcccagtgcggaggcgaagagagctactcgaggtggattttgtttgagggacagccatgaagtgacaatgacggggagactgaggcggtgccgggttctgggcggcggggggggcaggggtagtgaggggcgaatgagaccatagggctgagatctgcggccgcctcggtgcctccccagccacctccgcccctgcctgcttctgattcaacagcgccgaccctacaaaaacagggcccgcccatctccgaggatggcaaagtcaacagtgcgggcacgcgggcggccagtccccggcggcccgcgtgcgtcacgggggcggatgcagaggaccaggaagttcgccgacgacgcgcccgccctgggccaccggcgccggcccaagttcgccgggggggcccggaggaagcttgggggacgcgacgggggaacgcggaaaccccggggatctgcaggcgcgcccgggccgtgtgccttctctccgcgtgtccaaaccgtgtccccagccgcgcgccatgcgctctgggggcgtgcgcagcttcgcgctggagctggcgcggggcccgggcggcgcctaccgcggcggggagcggctgtgcggccgggtgctgctggaggcggcggcgccgctgcgggtgcgagcgctcgaggtgaaggcgcgcggcggggcggccacccactggttggagggtcgcagcgtgggcgtcaacgccgtatccagcgactacgcggccgcggagacctacctgcggcgtcggcagctgctgctccgaggtgagacactcgtcgcgccgcccccgcagcagccgggaccccctcggccgcgaccctcttcagggccggaagcctctcaacttagaacctatgcggtcgggtgatccttttcaaggagggggaaacccccttcccggggtcctgaccctcccacaggtcaggagttcaagactagcctgggcgacatggtgaaaccccatgtctccaaaaactacaaaaattagccaggcttagtggcgcgcgcctggagtcccagctacaggctgaagtgggaagatcgcttgagcctgggaggtagaggttgtaatgggctgagatcgcaccactgcactccagcctggacacccaccccgccctggtcaggacccccactaaccgggaacgtctacccagggtctgggtgttcccttctctggagccagactccctcaacttagactgtgcggtggggagacccctttcaaagcagggggaccctcctattagagtccaggaaacccgcgggaagtagagtgggagatctccctggtggaccccagtgtccccgttgatcccaggcctggagtccctgattctcagagaaggcccccaactcgtgttacccagggccccacctcagtttaccccacagggtctgcagcgctgagttcttccctggggtagggttgggggtctggtggtatttcccggtgaggaggtggaaatgcatcccagaggggaagagatgaagtggggtcacattctcctgggagtctgggtc

SEQ ID NO: 67264 - DNA, 3083 bp, Homo sapiens
tgttatacatttaaggaaaaaacagtgacactggaggggcgaggccagtggaggtgctgtgtgacctcgggcagagccccacccatctctgggcctttggggtccgtctgcgaaatgaattgagggaggcgctggctcagtagtcccttcagggttacctaatcccgcttctcctcccggacttaacggcctactgtctcccctctagtatccattgaaacctggcctaaggtcccagaccttcctttcaactccaaagacccatcctcccaggcagccttccaggctgatcactgtgcctccaactccgtcgttcctgttccgatccccatcacgggctgagggtgaccgtgtttgtttatgaccgccccctccacccacacacctcactgaggtggtggaagtctcctgagccaggctcagaggcggacagtcacggcaggggatgggttcagcggcagcgcattacgctgccacgagagggcgccagcgtcccgcagacgacgcagaggcaactcccgctggagaaactccatgcgacttttctttggggaaactgaagcccagagagaggtcacgccgtcccgtggccacaccgcagctgtggacctgggggtgcccgagcgtcccctgcattcagctctgtggcgggacgggggctgaggatgactggagcaggcacaagggctgcggggaaggtagggtttgccagaggctgaaaattgggaagggaacatcatttcgtaggtaccgctcctgggcgaatgcgccgaggcgcgaccgagtgacggtatgtcaagagcaggttgatgacccgggagcgaggctcttggaggagtccagctggggctgcacgatgatccatgcacaaccttctgaggtcaggactgatttttactttctcccggctctacagaggtggaaactgaggctccaagaggttgtcatttgcccagagccaccagctaagcgggacttgaatcaggaaaggggtgcagcaggcaccagtgtggagggcggtcccacccacctcctccacttctccctttgcatagcgggggaaacaggcctggaacagtcataggctctctggccctcaactggggcgagagtcccccgccccaaatcgggctggacatgcctcgagtcacgtcaacgaggggcggctggtgagtgattaagccgagaggctgaaggctctgctaggtgacctcaggcctgggccctgcctctgcacctctttttttcctctttacccccggggtccgcgagagaccagctctggcagcctaagggcttcagtttctccccggggtccgcgagggaagggggcagccggcggtgagcaggggcgtttgttattttgctccacgcctgggcagagccacgccccttgtcgcgctattggtggagtcccttcccggggcggggaagagacggtgaccccacccccccccgccctgccgtataaaagcggcgccgacgcacggcgcggggattttctgctccggttggtgagcgcgcctgcgcgttgacggcgattttgcgttctgaggctgcagcgtcggcatcttgagctgccggttcgcgagttcgaggccaggttccgcctgtcgtgggttcgcaccccggacgcgatgctattcgacaaggtgaaagcgttctcggtgcagttggacggcgcgaccgcgggcgtcgagcccgtgtttagcggcggccaggccgtggcgggccgggtgctgctggagctgtcaagcgccgcgcgtgtgggtgccctgaggctgcgcgcgcggggccgcgcccacgtgcactggaccgagtcgcgcagcgcgggctcgagcacggcttacacgcagagctacagtgaacgcgtggaggtcgtgagccaccgcgccacgctcctggcgccaggtacggatggaggacccctgctccaacaccagttgtgtgcctcccaccacctggacggcggtacctccgtcagccctgggaccccagcgcaaccgctcagtcgcctcctttttctcctacctgcagataccggggagaccacgacgctgcctcctgggcgccatgagttcctgttcagcttccagctgcccccgtaagtcctctggggtgcagggttgccctaagcctgcagccccttccagattggtacctccaatactggatatctgggcacctctgagccccaagactctccccctgggaggcccccggagtgtctgtgtctccttctccctgcctgcttgtctctgtatcttgtcccctgaagtcccgtccctccaccctaggaccctggtgacatccttcgagggcaaacacggtagtgtccgctactgtatcaaggccaccctgcaccggccctgggtcccagcacgccgggcaaggaaggtgttcactgtcatcgagcctgtggacatcaacacgccagccctgctggtgagtggccacccttggggaggtaggttgggagtattgtaggaaggggcctgcctggctgctgggcgacaccaaccaataagatggaggtcataggtgggccctggcagggagggaggcaggtgtgggaatgcgtgtggaatccactgggatctgcacccatttgccgtgtgactctgggcaagtgtcttgaagccctctctgagcctcagatgcctcttctgtgaaatagaccagagctagggcttaccaagtgtgaattacacaccaaacacttggcttatacatttcatttctggctttataagatgggttgtgttcctggctctatttaacggatagttcctggattgttaaaaagaaaccaagccctgcccaaagtcctccctcagctgggggtggtttggaagctccacagcgactgtggtttgcacaaagtgactcatccatgtcactttcctctacaccgacaggcacctcaagcgggggctcgggaaaaggttgcccgatcctggtactgtaaccgtggcctagtctccctttcggccaagatcgaccgcaagggctacaccccaggtagcaggcggaccggactgggttgggacgggggctggtgttggggttgcaggaggggaaac

SEQ ID NO: 67265 - DNA, 1811 bp, Homo sapiens
ggatccaaacccactcttgggggacatgaggccgcgctgcatgacttgctgaacggcacagggacccctcgaggaacaaggttgcacaccagctttcagccaccatgactgtggggagtggctggaccaagggctgacctccccgactgcatcaaagttggggaaccaagtctcagagtgaggcgggggcctttcggatatcacatgggacagaggaagagcccggctggaatctgacttacctggaccgctgtccttgtgaggcattgaatgcccagtgcagtatccgagagactgtttaataacctgtcttcccagccaattggtggtgctggaatcccctaggagccttcagtctgggagaaacagagccagacatagacagttccagcatcacagaaccagaagaagagacctgcaactgtgagagtccagacaggaagcagagaaggcgtccttgcggaaagggcattttagctgaggctttggagtacgaataggagctcagcaggcagacgaatgaggaataaaggtcagagaaggtcagagctgagtgacgtttggaatccaccccgtttattgtagaactgggggttcagagggcaggtgcctcagagttgaggccacacagtgaggtctggtgggtgaaaggacccaggaacgaggcgttcaggaaagcaggttgtcagagctatgtggagtctgtgggtggcaggggcagccgctccagcctttgaagactttgaaagccagagattcctggcgcaggcttggacttcctgggagctcctccaagtacccaggggcatcagagctgcctgggtgttacatggcccagggaacccaggttcagggtaggacaggcaagaccagatacccaatgtgcaaagtgaaaacactgggctccctgttaaacgatgaagaattcaagacagtgacagcattacgtcacccctggggacagaggtcagcctaaggtgacacacggggactactgtgcttccggaggctccctgtgtcctggaggagaaaagcattagagggggcagctggacaagctcccaactgcagagtcccagccctggctggggcagggccccggcctgggactcagcatttctgatatgccttaagaattcattctgttttgtacaattattttttaaaagtaaacgtgtggagaaagaatccgggcttcttggtttatttccgcccccgatctggctgctgagggaactgggactgccatccctggtcactatcttggagactaaattcctggccaaggaaggcaaaggggctcatgattgagaaggggaaactgaggcccaggactgggagggggttggtccaaggacatatgaggaggctgagctggggtgggagctgagccctgggccccatacctgcaccgcctatcggagtctcagaggctggcgggggctgaacagtggaggacaagcagagaactctatcctcagagagtggggagcagggggctggggctgggaggagccgcctgagtacgggaacatcctgtcatctgagtctaggtttggtttttgtgggtttttttctgtttgtttttgtttttcagaaggagtcttgctgtgtcgctcaggcatagtgtagagtgtagtggtgtgatctcagctcactacaacctccacctcctgggttcaagcgattctcctgcctcagcctccaagtagctgggattacaggtgcctgccaccacacccggctaatttttgaatttttagtagagacggggtttattttttttttctttctttcttttttttttaaga

SEQ ID NO: 67266 - DNA, 3331 bp, Homo sapiens
attgtccaagctggagtggaaagcctcgatctcggctcactgcaaactctgccacccgagttcaagcaattctcatgccttggcctcctgactagctgggattacaggcacccatcaccacgcccagctaatttttgtatttttagtagagacagggtttcaccatgttgcccaggctggtcttgaacttctgacctcaggtgatctgcccatcttggcctcccaaagtgctgggattacaggcgtgagccaccatgcccagctcagatgaagattctgatgggggtggaggtgtcatcccttgcacttgctcccaagacctcctagagtcagacgtgtcccccatgcagagtcaaatgctaggtctctatctctcagtgtctctgtctgtttcattctgactctcaccatcttttctttcccatctctgtctctctctcaatatctgtcttgcttactgtctctgtctctgtctctcagtcttattgcctctgtacttctgtctctttctccctgtctctgtctccctctgcctctgattctctcactatctctcttggctaccatctctctgtctctttgggtccctgactctctcaccatctctgcctcctgccctggcccggccagctgggggacaaggggtgacaagcagtcagggcgcccgctgcttgttttcccacccacgctggcagggagcccagcccagccgggccactgttcaggaatcctccagcctccccgctccagccaccaggcgcggccaccgccagcctctcctcccagcacattctgtcccaagcaaagagcgccagagatggggtgggggtgggggtgggagggggacgcattcctgctgagctccagttacaggacagcttgtcctggtggccccaccagcacaacctcctgatggctccccatcctgctgtggggttagaccttcctgaatgaagccaaagcccctctgccagttcgtgcccacctcagggcctttgcaccagccataccttccacctggcactctgtctccctagatctccccaagacctcctccgcctgcacatctgagacctcacatcaccttctcagcaagtcccctctgtccctaggcccgggcaccccaaattcccctcctgctgccccagtgcatttaatttcctggtcctccccatgtccctggggttacatattcacttgtttgttgatgtggtgtctattacaccaggtccccactgtgtcccagcaccctgaacacacagtaggtggcttagtgaaggtttttacaattgacatctattcctcccaaagctcagcccgcccaggctcatccatgtggatccacagttctgaccaccccacctctgcctcaccctgcctccgccacccctgcaccctaatgcagcaggatttcccaagcccccctgccttggcccagggagttatctccaccagatccacctttctgagcgaggagctgggtgcattgaggggcaggggcggctggagttcagatgcaccttttgagcgaggggctgggcctctctgtcgctgggctccaggcacagggcagtcatgatgtacacacacacgtgcaaacacacacgcacacacataagcctgtcagcaacatagaaacaccagccagtgaactcgggcacaagcagccgggcacagagtgttcaccaggtgctcacatgtggagtaccccaactcctaggaggatgcggttatggcctggatcctacaggtggggcccagacatgggctttgaacccacgccagggtatgcacaaacctatccaaacacacgcgtgtctgccctagcttccctcacccgggagtcacccccccaccccccaccttgtttttgatgttcaggaaagtccccagaaagcactgggcccgggcaaggggccaggaggaaatggtgactcagccggtggccatcagtgcctgccacgctgggctgggtggactgcgcggcccgatctgggaggatccacagaaaacaacaataaaagatgagggcgtgggtgcggggtaaaaaggactcagcccaagaatgatcagagaggggatggatccccctgtgctccaacacttcaaccctgctgggcctgattgacaagtggggaaactgagacacagggaacaagtgacttcgccaaggcccaccagccaagatggtacaggcaaggggatccctaagtccttaacacaggggtctggaggaatgtctacctgccctgcccttttttttttttttttttttggagacagggtctcactctgtccgtcaggctggaatgcagtggcatgatctcagctgactgcaatctccgcctcctgcctcagcctcccaagtagctgggattaccggcgcctgtccctatgcccaggtaatttttgtatttttagtagagatggggtttcaccatgttggccaggctggtctcaaactcctgacctcaggtgatctgcccacctcggcctgccaaagtgctgggattacaggcgtgagccacagtgcccggctccctgccccactttctgagacccagatccacttcctggtttcctgtgtggtcatgtgaccacacttggccaattggagccttttgttatcacaggcacagggattgggtcagggctgggcacgtgatcctgcctgagccaatcatgctacgagtttggagactccctggaagaaggcctagaagtaaggaaaaccatcttggacgcatgatgatggcagtggatcagagtcccaaggacactggtgaagatcagagcaggactcacacaacctcagatccctgtggagtcagggtggaaccagagggaaggctgaaggctggagggtcctgagaggccttgcagaaagagaggacattggagctggggctttgatggatgaagaggaactagggaaaggcatttcaagcagagggaacagcctgtgcaaccacagcaggcaggtgggagctaggcgtgtcctcagccaccccagtggccccatggggctggagcatagagaggcatctgcaaatgtgtttatttgtttattgagacggagttttgctcttgttgcccaggctggagtgcagtggcgcaatcttggctcactgcaacctccgcctcccgggttcaagcgattctcctgtctcagtctcctgagtagctgggattacaggcgcacgccaccacgcccacctaattttttgtatttttagtagagacggggtttcaccatgttggccaagctgatcttgaactcctgacctcaggtgatccacccgccttggcctcccaaagtgctgggattaca

SEQ ID NO: 67267 - DNA, 1177 bp, Homo sapiens
gatcacttgagaccaggagttctagaccagcctggccaacatggtgaaaccctgtctctactaaaaatacagtaattatctgggtgtggtcccagctactcgggaggctgaggtgggagattagcttgaacctgggaggcagaggttgcagtgagccgagattacgctgctgcattccagcctgggcgacagagtgagactctgtctcaaaaaaaaaaaaaaaaaaaaaaacggaaaaaaaattgaatactgttttggggtcatggttaaagctgaagtttaccaacccctgatgggtcataagtgtcatgatttgtgtttacagagtatcagaactttgtttaaagttaccagctgataaaatatgaggacaggtttatggctaacagggtttcatcattgacagatagcaagtatcaggattagtcttttttcacaaagtatcagaacacagcaagctctgatggctaatcaggtgtcagaacctgggtttaagtccaaccctgccttggggcccacggcaccgcggtaaccaccaactactgtccactctcaggatactgtttactaagtatcgagtgacaggctgatggcaaagtatcgggtcatggatgtcacactgtgagttgggcactgtgacagcgtctctagatgccagctgtttacagtgacaggagactggctgtttacaggggatgagtcagccccacttccagatacccaagtccagatggcgggtaggattggcacctctccaggtgtttacagggtactgaggtcctggcaagctgggcttctctcctgcggccacctctagccagggtggggaatgagtcccctgaaggctgtgggacccatgatcctggttagattctccttctgcttgtccctggctgtgctgcctcaggcacattacttaacctttctgggcctctgccacctcatctgtaaaatgggcatgatggtgaagccaggttgccagataaaatataggctactcagctaaatgtgaagttcagatcaatattgaatttggttttactgtaagtatatcccatgcaacatttgggatatacttatactaaaaaaaaattattcattgatgctatggtttgaatggtcccccaaagttcatatgtttgaaacttaatcctcaaagcagtcctttcaaccttgt

SEQ ID NO: 67268 - DNA, 916 bp, Homo sapiens
cagtgagtttgaacctgggaggcagaggttgcagtgagctgagatcgcgccactgtactccagcctgagcgacagagcaagactcttctcaaaaaaaaaaaaaaaaaagactaagtggagatgagggttcagtgcacccccatctcctggccctgctgcccatgagccagaccctgagctgacagattggtgcccatttcctcttatggattgatacggggctcttacctctgggtttgctcagcccagcagcaggcagtcagagccagaagttgtttgcaaaccgaaaccggtctgcggcttgggccacctacttgtgaaaccagctgtcgctgtttttcctccctgtgagaaagtcccccagtaaagctgcgcgggggaggagaaggagggtggaggagggccgagtagcttcctgggagaccttggggtgtggaggcgctgctctggactttggtttgcccatctgcaactgggcaccatggggaaaggggattgcaggctcctggctggggagtttggatttggggatgctggacaagtgacttcacctctctgagcctcagtttccttatctgtgaactagtgagaaacacatggccaccagagctgctgcaaaggggcatgtccctctcttcattcaggccttggccccaaatgtcgcctattccaggaagccctccaggactgcctgatcaggaaacaccctccctctgctgcatctggtcatgtattctactttattcatcacacttttcaacacctgattccacattacagatgcatcgcttcaggtgcataatgtcctctgggtcccacctttgtccccagaccatgagtcctacaagggcaagattgctctcagttgtccccggctgtgtccccagaccacagcccagggcctaaagcacagcag

SEQ ID NO: 67269 - DNA, 974 bp, Homo sapiens
ctgggactacaggctcccaccaccacacagttaatttttgtatttttcagcagagatgagatttcaccatgttggccaggctggtcttgaactcctgacctcaagtgattcgctcacctcagcctcccaaagtgctgggattataggcatgagtcaccgcgcctggcagagatacaaattcctgatggcagaggagggagagagagtgtgggtgacgatgacaattgaactgagacccaaaggaggtaggggagacatatgggcgtctctgggaagatggtccccgggaaagcacagcctttagacaggccccgaggcaggagcctgtctgactcaccggaggagcttggaggaggctgaggtggcctaagtcgattaagcagggtggggagggaagaggcgatggtgccgtgagaccaagcagggccttgaggtctggggggagaactttggcttttactctgaggaaggtgggagccacagaggcttctagacagaagaaggacaagccggactcaggataccagggtgggggtatctgtgggggataaagggagaagcgaggagaccacagaggggtgccactgctggtcctaaggagcaatgatagtctggaccagggagaagggaccttcatgagaagggatcggatgtgggagcaattttgatggtggatgggtggaggaagaagattcaggggcaccagtgtgagcccatctcacaagggaggaaactgagactctggggacagagggatctcagtaaaggagaaactggaagaaaccagtggaacgttcagaggtgaccagggtccaggagggagcccccgcacctccctgagtcacagagattgccagcttcctcctgatgcaacctgaccttccatctctctctttgtttgtttgtttgtttgttttgagacagagtctcactctgtcacccaggctggggtgcagtggcacgatccctgctca

SEQ ID NO: 67270 - DNA, 1527 bp, Homo sapiens
tgagagatagggagagacagggagggaggaaggaaataggaagctgggggtggggccaggacacagtggctcatgcttgtaatcccagcactttgggaggctgagatgggaggactgcttgaggccaggaatctgagaccagcctgagcagcagagtgagtgctctttctacaaaaaatacaaaaattagctgggcttggtggcacacacctgcggtctcagctacttggaaggctgaggtgggaggattgtttgagcccaggaggctgcagtgagctatgatcacaccactgcactccagcctctgggtgacagacagagacagtgtctcaaaataaaacaaaatgaaaattagccaggcatggtggcgggcacttgtaatcccagccactcggaaggctgaggcaggagaatcgcttgaacctgggaggtgaagattgcagtgagccgagatcgcaccagcctgggaaaggagagcaaaactccgtctcagaataataataaaataaaataaagatcactcctgtttagttggttaagaagaaaaaaaaaagaggttaggggtacaagaccagccactgggagaagagggccctcctacccggccagaggagccccctgcctggagctcctgatcccagcacataaggtttaatattattaaaggtgatgatatcttggagggttgggcacctcgttcacctagctccttctcacctctcataggcctccccggggggttaactaccccattgcaccgatggggaaactgaggctcggagaagccctggctgcacaggcagttggaagcagagccaggactcggctggatccttgagacgtttgtcgactgactgtgtgacccttggcccctccagtctccaacccggaggagaaacccgcccctcttcccgtcccccacccccagcccgcccggcgggtgttttttttttcctcctcctgggtattttggtttcggcaggaaccgccccggggagcaggcggttcccgctggcagggtcagcccagggcggggacgggagccaggagcagctccaggccagggaaggtggggaggactcggggaggaagcctggccgtggccccgaccactgggaccaggcaggtcgcgtccccatcccaatcttccggtgcctcagtttccccacctggaaagcggggctctgcgtgatcgcggcacagcccgtggaggcgcgtcgcgcatggggccgggcggggtttccacgtctccgccaaggttctgtccactcagttattaaacattgatggatcggggacagagccagaggccagtgccccaaaccggggcgggaggtggggaggggaggaggggggagggacaggccagaggtgggggctgggggcggggaggatggggagaggtgcccgcaagaggggtttatcaagatcaggaggattctcaggtagcacacccaaagcacaagccagcaaaggaaaatagatcaacccgactccacacaatgcaagacttttcttctgcaaggc

SEQ ID NO: 67271 - DNA, 1274 bp, Homo sapiens
caaggcaggtggatcacttgagaccaggagttcaagaccagcctgggcaacatggtgaaacctcatctctataaaaaatacaaaaattagccgggtgtggtggcacatgcccacaatcccagctactctggaggcggaggttgcagtgagccaagattgcaccactgcattccagtctgggcgacatagccagacgctgtctcaaaaaaaaaaaaaaaaaaaaaaaaaaaaaaaaaaaaaaaattcccacaactattggaaggggaagaaggagaccctaatggccacggtgatggtggtgatggttccatcaccatgactgcttgaactaaacgccgtgagttgtctgtcctcagacatattcaagcagtcagagagaccttcgaggggtagattattctcctcccatcgtgacagcttggttttctgagcgcagagcagctgaagtcaggcctggggtaacgccacacccccgcgacccttccccgcctctcccgggagaccttgccctcccagctgggtcatccggcagcccagcagcttccggccccctccaattggctgtaggggccgatggcgtcactggttgctatggcgaacacccagatcacgacgtgggcagcctggagcccaccaaagtaaaaatagtcgtgtgtccccaacgtggccgccctgatgtgtgtggagggagggtgtcctgagacccagtttcctgcctctcactccactaagagacgtgggcagccggctttcctctgcacctaagtttccctgccagtaaaacagcccctgcccgcggttcgtaggaggtggctcagtaaatgcaaggacatttaccaggtattatgacagcttccatggtcccttgctgagctcaacaatagtacaacagcacacaacagcagcaatagtaatggctgatcatgattaacccagaaccctcctcacgtcatctccagttacagatggggaaactgaggcacggggcatacaaataatttgcatggccaggaagaaacagagaattgaactggacccaggtctgggtgtccccagattctaaacttgtgccacatggcattttgagaatttaataaaccctcgtgattgaccgggtgcgatggcttacactgtaatcccagccctttgggaggctaaggtggatggatcacttgaggtcaggagttcgagaccagcctgggcaacatagtgaaacctcgtctctgctaaatatacaaaaattagccaggcatgctggcacacacctgtaaccc

SEQ ID NO: 67272 - DNA, 2524 bp, Homo sapiens
ctggactcaagcgatctgcctgcctcaacctcccaaagtgctgggattacaggcatgagccaccatgcccagtctaggttaccattttttatccccaaatcttagagaacattattgttcaatgctttcattcatttacagatgaaagaaaccaaaggccggggtggggaggggttttccttgagctagtggtctggaagtgtgtgactgtggacaccccatctttgggagctgcttttgcctgagttgggggtgggaatcactcaatgaacatttttttgagcacctgctgtacactgggccctgctgaagccagaggggatacagacaattcaatctcagagcaatggttgaagttttgtactcaggagagagctcaaccagagaaagagacagaggtgctgggggtggctttatcctgaagatctggggcctcttggaggaagtgacctttgagcttagatctggaagaagaggaggagctggcagcggggaagtctggggagaatggcattccaagcagcaggaacagcttgggcaaagtttctggggtgccagtatgcttggcgttagaagaacagcatgaagacaagggtagctgagtggagtgagtggagatgaggtggcaggacagaaggaggaggtcctgggaatggggtcagagtggcccccaatcccaggccatctgcttctgttccagtggggatgatacagttggtggggaggtgcttgaaggccccagtggttgggggttgctgggggactgggacattgccccgagagccggcactgtttccagccttggcccaagctgtgggcagagtgttggaccgtgaatcaatgaggactgccgagggcaaagtcctggaccttggggcaggacagagccaaagactccacaagggatgtccactccctgccaccttccctgtgccccactgggtccaccggggcctcaagagggccagagtgagacacagacacccccagaccgtggggtttgcgctgagagggaggaaggacagagctggcggcgcctggtgctggtgggggtgcaggtacagcttggcggaggaggggctggtggggttgggatcgtatatgggtgagggggcgaccttcctggcagaggaaacagctggaagccagggactggaggtgtggtcagagcctctagtgtgcgcggggatgcggagacccgagcgggttaggacctcagtgctgagcagctggccgggatgcggggttggggagttggggcggactgcgctcagatcccggctcccagagagccccagggccggggcgagggcagaggccgggccggggcggggagaggcggggtcaggccatggagcaatcgcgcggaccgcggagccagtgaccgcccttcccttccggggcgcagctcgggggctcccaagccggcggcctcggcgtccctgcggcagacagggcggcacccgcggctcccctttcccgctgcgcgaccctcgctgccgggccgggcctgcgcgcaggtgcggagctgcgatccccgccccgaggcggagccagcccggcccccagcggcccagcccccgcgtctagtctgccgcaccagccaggcgtctgtccctgcgtccgtgtgtccgtccgtcggtccgctcgcgccacgatcagggcttccgggggccaacaagggggcgtcggtaccccgccgcacagaggcggcctctgcctcggcatgaagtcccgcagggacaagctgcacatcccggcgctgaccctcgagtgagtgttgggcagggcgggggtatgcggggtgcagggaggacaggatgacaactaccctccccccacgtctctgttcgtgtcgcccagaaacgcaccgccgcctccggggagccctcccgggccatcggtctggccccgccctcacgtcctgagctgaacccagaatccccggtcttgggcccctactccctgagggaaccgcagccgccatccggagatccggattcggccacacgaaggggcggccgccaggttcaccgtccccggcctctttctttgcagtctgtctccgagcagccagagcccgtccctgctgggtcccagcagcccctgcagcccctgtagcccctccttgggcctgcacccctggaggtaagtgacagcgcgtgtgggcggggcgcagacatcgccctggcaccccagagccttggaaaccctccagactcatcggtctcctcaagatactgcaggttggtgacatcacctctctgggcctcagtttacccctccacataatggcactgcgatacgttctaggggcttaatgggaaaattccatttttagccaggccagcatctgacaggtggccaaggaaagggaagaacttaagctgttgcccaaggacttcgccaagacaggtgccggattcccaagcggctcagggcactccctgctgaattggcctggactcctgggtggtgacctcagggagaaagctcctccctctaaaacacacgcacacccaag

SEQ ID NO: 67273 - DNA, 729 bp, Homo sapiens
ttttcagaggagaggacgcagttttgccaggctagattccaagcagtggggccagggtgggcgtggtagcatgagccggccaggacgctggggtgggtcttgggtgccgcactgagaaggggtcagtgctctgggagagaggaaaaagatggagggagcgattagatttacattttagcagaaaggagccaaaatgcctgcccctagctcgaggttaaggtgctgccaacgccccgcccccgccgcccgcggtcgtagcaacgcccggcctcagccgcccgcggccctagcaacgctccgcctctccgcccgcggccatggcagcgccccgcccactcgccggcacgcgggtccgccggcctcgcttccgcgtcgctcgctccgcctcccgacaggccccgcccccaacggccccgcccccgcactcgcctgggcggagttccagtcgcgctcgggggcgcgcgcttccttctcgccgcccccccatccccgcagccccgtgcgcccccctccctgtccggctccgcggggctcctggggccgatcccaccgccgaggcctcccttcccggcctcgggcggctgcggcggcacaaagggaagcagcatgtccgaccccagctactggacggcggtggcggctcccggccatcggagccgcctggcaaaaggcgcgctgctgcagcgctccaagaggtagggggcacggcgccggcgaaggctcggcggc

SEQ ID NO: 67274 - DNA, 1543 bp, Homo sapiens
gttgcagtgagctgagattgtgccactgcactccagcctgggtgacagagcgagactccatctcaaaaaataaaaaaaagaagtgacatgtgagcagagacctgcaagaacctgagaatgagagaaagccatagagacagaaaagagaaaggtggctctgagcatagggcacagctgtggcaaaggctgtcagtgggtaccaagcctgccacgttgcaggggcagaggaggccagtggcttggagtacagtgaagtgaggggaaatggtggatggtactagaaaggggtaccctgccttctccctccctccctcattttacctccctccctcattttagatgagatcatgtggccagagggagatgaggcccttccagcagacgcccaggacctcatcaccaggttgctccggcagagcccgctggaccgtctgggcactggtatgtagtgtgggggagaacccaggtgggtggctccttcaggccctgggacccagggaatggagggatagcgcccggggtagacaagagttctacttgggaagctgcatggaggagggggtttgcagctagggttttgaaggatgcacaggagttctccaggaactatcacaagaccttggaaagaatagaaagtagctgggtctggtgcccatatggagcactgagcctgaataagtgtgtgaggctgtaaagtcaccaggacctgtgtcaaaggcccagcccagaagatcccactgtcccagttttcccagccacctggttaatcattaagggaccgtttgagactcatgcagccacccatcacgtggccactatggctcctgttcatgactgaggctttgctatgggagacggttgggtccaaggtcggggatcatcacctgctctgtggagcagaagtgggagaagcccgggaaggaggccctcgtaaggctctgggctttctctaggcggtgtggtcccagatggcagcagagagaagggcagaatctttggaacctgggcagcctgggtgcttttttatttttttgagattagatctcactctgtcactcaggctggagtggagttgcacaatcttggctcactgcaacctccgcctcccaggctcaagcgatcctcccacctcagcctcccgagtagccggaaccacaggcatgtgccatcatgcccggctaatttttatacttttggtagagacgaaattgagacgaaatttcaccatgttgcccaggctggtctcaaactcctgacctcaagtgatctgcccgcctcagcctcccaaagtgctggcattacaggcatgagccaccatgcctggctgctggcctgggtttgaatcctggcttcgtccctctccaggctcctaaatgacagcggatttttgttcccatttttctggttctttgttgttgttgttgttgttgttttttgagacagagtcttgctttgttgcccaggttggagtgcagtggtgctatctcagctcactgctgcaatctccacctcccaggttcgagcgattctcttgcctcagcct

SEQ ID NO: 67275 - DNA, 3408 bp, Homo sapiens
ccagcaggagtcgtggcagaacggagcatcagccagaccctgttgtgggcgttgtcatcaagggagcttgaatggagggtctggtgtcagatacagccgactccagccccagctcatcccccatgatgctgtgtgacccactgggcactctggtgagggagctttccagacatcaacagcccactctgcttccctttctgagtcccctgtccagcactgcctagtgttggagggtagaccaaggctgtgcatgattcaccccctccttccatcctggagctggcagtgaataaaagcccgtatttacaaagatgagctccaacgtctggatttgtgaggggctgagaaaggaggaagggaagagtggggaggggagcggagtgaaatagacccatggctcaaagtcattgcaagtgggttttgaggactgcatagcagttcgctgttgagattcttcctgatgccatcgctggtaccagcctcctgctaccctctccctgcgagtactccatcatagccctgcctttaaaagcttcctccagacatctgggccctgagctatgttttttatttttatgtttttgagacaaggtctcgctctgtaacccaggttggagtacagtggcgcaatcacggcacattgcagcctcgacctcctgggcgccctgggctatgttaataaaataaataagcggcggggcgcggtggctcacgcctgtaatcccagcactttggaaggccaaggcgggcggatctcctgaggtcgggagttccaaaccaccctgaccaacatggagaaaccccgtctctactaaaaatacaaaattagccgggcgtggtggcgcatgcctgtaatcccagctgctcgggaggctgaggcaggagaatcgcttgaactcgggaggtggaggttgcggcgagccgagatagcgccattgcactccagcctgggcaacaagagcgaaactccgtctcaaaaaataataacaaaataagcaatcgtcgcgtcctttctatcctggtcttagcttgcgctctgccataaaactccctctagccgaacccggcccagccctagagcaatccgttacttccggggcgctcagccggcatgcaaacactcttggctacagccccatctccgagtgcgttcggctatttccggaaaccgtcggcatctaggctcaagtccgctaaattctagtgcccgtaggggtcgagatcgttggctgtttccggacgctctgggttgccatggaaactccttcaaccctggctttctccgacttctgctttttgcggcaggccctttccccactctactgccccctgtttgctgagcttgagaacgcctcatttgtcccctggaaccatctatgcttcagtaattcccataagctggcggtcgcctctgggtctaaactcccaaggcctccattgggcactgagcacattcggttatttccagaaacgctccgcggtcttggggatcagcctcagttgtgccagtgcggccgtagagagtgttcggccatttccgaaagcgctcgggcgtctctaagcccagccgagcccagtctcggatccctcgccgacccgattgcactcggctacctctggaaacgctcggctgtctcgggggcaccctctagtccaccagtcccgcgggattacgttcggctacttccggaaacactcgggtgcccccttacctcaggctccgcctcggcctcggttcatccgcccggctcgaatgcgctcgggcatttccgccgggggcgggccaggccgctcggaaccgtggcggcggcggaggcggggatcccgcggctgcggcgacggtggccgcggtggagccacggggcgggcttggcttggtgtgacggcggctgcggcggcggtggcggccgcgaccaggtgagtcctgactggccctcgtggcgggggcggctgggagtgtgcttaaatgcggggcgcccgggggcagtgccgggccccggtggaagccagaacgcaagcgccaggctgcgtcgggccccgcgggaactgggggggccgcaggcaagggggggcctcgggctcggctccgcagcggtgcagcctccttgggacggtcggggcagaatggggagagactccccgcgtccaagataccggactggagccgaggccccaaatgaagggaggccctgcctggaatggggcttcgaatagtaccgaggggcgcccaggcattgtgcggggcagaatggggtgcgggagggccgggggtcgaacccacttccggtcccctagccgggtggccgggtccacgcagacccaagtgcgcgtctgtgtgagcgctcaggccctgccttcacccgcggagcccccagccctgcctgccccgcccctcccgcctcccggattcggggagcgctgctcccggggcgcgcacaccggggcgtgggggcgggctggcaggcagatccaggcggttttctgggcatcccctctcggggcctcagtttccccacctgtagaatgagggtaacagaggcctaggaatgggtaaattgggcacccgagaatgtggcgcccctccgccctgctcggacacctcttggggttccccgtgactgaaggatgctcagagcctccacctgacactcgggcctcttggtggatagcacctatccttatagccaccctgaatccttgacaagcaacttaacccactgccaaggctttgcatgtgccgttccgtctgcctgtcgcgccttcctatccgctgtgatgatccattctctagaacagcacgtccatcccccgaccctagccctgtccatcacagggcgtctgaacccgcagggctaggctgggaatgtgtgcctatctccgcctccccaggctgggactcctggggaataatcaatgccctgctgccggcagcctcccctcctcctcagctgcagtacccccaccttctcctggctccctgtccctgcctggggctaaggttccttctaagcacctccccatctgcattttgtgcctactctgggccccaggctggagctacctgccagcccactcactcctcctctgcagagactggaggtccatttgcttggactcacctcgaggcctttgcttgtgtagaggcctcttcctggactttgttccctacctcttagttcagctggcctgacccctctatggagctcccaaagcacccggagtggcctccattgcgtcctccctgccctaggtatctggccacctggctgctgccccctcatgtccaactgggccaagtcggcagatctaggtgtaagtcctggcttcctcctggcctactgcacggccctagatacctccctgctctgagcctcagtttccccatctgtaacaggggtgatgaaaagc

SEQ ID NO: 67276 - DNA, 1095 bp, Homo sapiens
ctctcgggggcctgaatatttcagttactcccccaaaaccccggcctccatcccatccccagcctccatccgacgtcacccctgttaggtcacaggcccactctgagagtgggtctcgggcctcaagtcccctagccgcccctagaaggtctaggggtgcgtggagacaccaccattcctctcagcctgtgtctgtctcaaaggccccacctcacctcccctaaaggtagtcttgcgccagggctcacgtgcctgggcagggctgattgccaaggggcccaatggcctcgtgactggggacccagcacctggcaggggtgggggtgggacactcagaggaaggagtggaggagggagagacgctggcccgggacccgaggggcgtgggcatcgggaggcgggcccgggttaggggcgggaccgccgcctggttaaaggcgcttatttcccaggcagccgctgcagtcgccacacctttgcccctgctgcgatgaccctgtcgccacttctgctgttcctgccaccgctgctgctgctgctggacgtccccacggcggcggtgcaggcgtcccctctgcaagcgttagacttctttgggaatgggccaccagttaactacaaggtagggacggcgacagggcgggcaggctggagggaacaggcgccctgtcggggcacgcggctccttctttctccccagacttcacaggggaagaccagggccccgaggggacgctgtccctgccgggttcctggaaaaaccctgttcagttcccggcgctgcggccacactccctccgtgccgtttcgctttcgcatcccgcatctgagaggcgcagctgcctccacccgcctagtcccgcccaagggttcaatgagcgcctactgtgtacttttggggcaggagctggggtctccttttgtggcccagggcacaagttcagcagctggccaagggccgccggcatgcattcttgctgctacccttgatgcattcattccagccagggcagggctcgcgtgtctttgggacctattaggcagatgccctagaggctgagcgacttgctcaccgctccagcgacatgggccacc

SEQ ID NO: 67277 - DNA, 2430 bp, Homo sapiens
ctgggattacaggcgcccaccaccacgcccctggctaatttctgtatttttaatagagatggggttttaccatgttggccaggctggttttgaattcctgacctcaggtgatccagctgcctccgcctcccaaactgtttgggattacaggcgtgagccactgcgcctggccaatccccaccttcttgactgaccatttaaaaaatgtaagaaacacctttagctcatcatgagcagcacaaaacaggcagggacaggatttggccctgaggcaggagaataggtctggaggcagggaacataaggccaaatcaaatggaaacaattcagctatgacaggaaatatcttctccatttaaagagggcatacatccagtaaatgactttgtaactttacttcatcctcttcatttacataggacgtacattaagtaaccagtgaaaacctctagagggcatttaaaccccagaaaattcttaaacaggtctcttgagtccgtatgctccactggctcccaccctgcggagtgtactttcgttttcaataaatctctgcttttgttaagcttcattctttccttgctttgtttgtgcactttgtccaattctttgttcaagatgccaagaacctgcacaccttcaacagttaacagcccacaggcagtagtttgcgactctagtagagaatgcatagggatttccattgaaaatcattttttaagccagttacggtggttcacgcctatcatcatcccagcaccttgggaggccaaggcgggtggatctcttgaggtcaggagttcgagaccagcctggctaacatggcaaaacccctgtctagaccaaaaatacaaaattagttgggcgtggtggcccgtgcctgtaatcccagctgtttgggaggctgcgacacgagaatcgcttgaacccgggagggagaggttgcggtgagccgagatcgcgccaccgcactccagcctgggtgacagagcgagactccatttcaaaaaaagaaaaaaaataattgttccctacgggaacggtataattaggatataattgtttctggccacagatcacatcccttctggttaagtccaggagaatctggaaatacgtagggcaaccaggccagaaggcgttgtaactgcctaagattgaccaaccctaacgcgggaggcgggacgacggtcactgatttgccagcgtgacgccggtctgcgactggccagtgccgtcctgggcgtgtcggtaggacggggctgcgacggtttcccataggctggcacagaaaggggcggggaaacaagagtgcaacgttaccaatcggcatgcgggacgtaacgcaattcttttttccgattggtccgtgaagctcgggaggtcgttgggggctcgaccttgggatagaacgcctgccttttattggtcaatactcttcgggccgggcaatgtggctccccgaggctgcctgcgattggtgaacgcgtcgcggctcggggcggacctgcggactgaagatccttatgcgattggccggggagccggaggggcgggcaatttgggatcgacagtgactcgcgactggtcggcgcggcgaaagcagagcggcgcgccggttccttggttcctgagggcgatggcgcggggtggctggcgccggctacgccgcctgttatccgcggggcagcttctattccagggccgcgcgctgctcgtcactaacacgctgggctgcggcgcgctcatggcggccggtgatggcgtgcgccagtcctgggagatccgcgcccggcccggccaggttttcgacccacggcgctccggtgaggacgccacgctgcttagtccttcaccccgggcgacctttgatcccgacacccgactgcgggccgtgacccctgacccgtggcctcagtcccccgcaggacccttgccctgaccgcgcctctccccgggtgtctgtctccccgcagctctgggtctccatcacctcccaacccccggaggtctctgcccactacccaggagcctctggagccgcgcctcctggtggggcttgtagtggaagaatgcacgggtgggctcttccggttttcccggtgaggctgaggctccgggatggcattgggcttacccaggccttagccagggagggagagagggaatggactgaggaacttgccggcccgacccagccccctgacttacactcttatagcgagcatgtttgcggtgggctgcagcatgggtcccttcctgcactactggtacttgtcgctggaccgcctattccctgcgtctggcctccgaggcttcccaaatgtcctcaagaaggtcctcgtggatcagctggtagcctctccattgctgggcgtctggtacttcttgggtaaggagcctcctaagcctaggctttgcctctcatag

SEQ ID NO: 67278 - DNA, 1556 bp, Homo sapiens
ggtgcgttgatgtggggctgcgcggcggcggcggcagcagcggctcaggcccctgcagtcctccgtgacgtcctgcaaagggaggggcggagcctcacatgtagataagtccgtgacgccatccggaggcggagccgcgcgtagagatgtggcccattgacgcacgcagagccagatggggcagggctcctgagcagattgacgtgcaaatggggcggggcctagcgtgtgcatccagtaggggcgggagcggcgcgggggccgactccgcctctcgtccgcctcctgtccgcctcggggaggcggggcccctcagcgttctctcactggcttaagctctcgagcgacgggcgaagtagccaatcagagattgtctacgccctcctcttgtccaatggtggcatctgggagattgaagggccgagaggctgaggccttggctgagccccggtcttcgaggggcggttcccttacccgcccgcacccaccccaggtaggggactcttgaggccaccgtctagtccaaggtgctgtgacccctgttaaatgcccctgactcccaattgcagaaaagaaaaatcgaggcccaagagatgttttataccctcacatatatggggttcaaaataaataccaaagaataaacaggagtcaagagggacccctgtcccattcccgaggcgtaagacccccccactgagggaggggctagtaaagactccacccctcccccgtttctgaggtttgaaaagaaagaagtagaggtcaagagagcctcccctccccaccattcccagaaaaggaggaaggggctgatggactctctgggaaccccctcccctccctgcgccccgtcatcaagaagaaaattcgaagaaaaggtttagcagggacagagaagcgacctgtcccggaaaccccttaaagcctgcggtaaatgccccgggaaacagggagggcacgagccgaagcctccagctcttcaaagctcggattcaaagacccgggggctgggagaccccctccctccatcctgggaaagcaaaactcagaggatggagccttttgggagctaagatggtccatcttttattcctccaaatctttagggaaggaagtcagaatttggggagggaggaggagcccgaaaccccagcccccactttgggtctcctgctccccctactccagctttcaaaccctccaggggtgtgtggcccccaggagagtcctgatcccctagattctccccccacccctcccagtaggcggggctggagcgtgtgtgtgtggcggggggtgactcgtcctgtttataaaaagctcgccagctgcggaggcgccgagagaccagaataacttagcgcctcgaggcccagccgccgccaacccagtccccagcccgcccccagtgccctgggagtactgggacgcccacccccacgtccccgcaccgtttacatttgggaaatttattttttctttttagggtaacatgtttgctccctcctcccccactcggactatagaagtatcaccaatccactgcagagaaa

SEQ ID NO: 67279 - DNA, 907 bp, Homo sapiens
cgttccaggctccaccctcagcccataaggctccgccccacggccgccgaccacgcccccagctagccgggtcctgccctaggctcccccactcctccacttcatcttcagcctgaacgttccgcctgttatcttccacctccgggtctttgcacaggccgtgctttctgcccggcccaccctcctccctctccacactacctgtcccgttctaccctcaaaccctgtctttccctctggctcctcctctttggggtcagaggtcagagaaagggcgtagggcaagaactggggcgctagagaaggcggtgacctgggggtgggttttcaagaagggcaggcggaagcggcaccgacaggaagacaaccgggaccgcctgagactcggagctcccggccgagggccagtgtccggctggtcccggccaagacttttgggtcaaaggtcaccgtatccccgtccacgagctgggtcggcaccccgcgtaggctcagatctgggtagaggtgggggatttggcagcattcggtccaagtatgaccgggtctgagttgggtctgatcacgtcgaattggacttggtcacgaagagtttgttcgatgagttcgggagaattcggctacgtccgattgagctcgggagacttcggataagttcgagcttgttcgcctaagtccggttacgctcggtctgcttcgaacaagtccgggtgacgctcgggccgggtcgggcatgttcggtcacgtccggctacatgagggctagttcgggcatctccgactaagaccggccgcgctcggcctgttccgtccgactccagcgggtttagcagcaccgggatgaaccccacggccagccgaaggggcggggcttcttaacccttccctggcccgtctggggtgcgcc

SEQ ID NO: 67280 - DNA, 2275 bp, Homo sapiens
aagccaagcgactggctcggtaattttgagtaaacccctctgagcctcaatttccctatctgtcacaagacataagatcaccatcctcaggttgccaaagagacacaacaggctcagctgggcgcagtggctcctgcccgtaatccaagcactttgggggaccaaggtgggaggatcgctgcagcccaagagtttgaaaacagcctgggcaacatgtctctatttatttaaaaaaataataataaagagacataacaggctctccatgatgtcccccatcacaggtgaacaaatccaccatcaaggctttagaggtccctagagcccctgctgtgaggggccaaggagctgacccatcatttgcagtcacccagaaggcccagaagggctctaaaggcactgggggccagaggagaacgacagggtcccccacgaaccctcgcaaacaagtcctccaccagccccactcacccgcccctgaagccaccagccccactcacccgcccccaaagccaccagccccactcacctgcccctgaagctaaacctagcagtctgaacggccagtcttggagccctggtgccgcagcagctttgtgactcaaagccaagttctggccaatccctggcagctcttagggggtggggattctagaaggcacagccagaggttggggaacaggatgcagggcagggccaaaggtcatggtggttgctacctacaccggctcatcctgagtacaaagggttctcagcacagagggaaccccaaatctccccctccatgtacctagaggcagtttcagtctttcatcccacgggcattttctgagcacctactatatgctggaatttgccccatgtctggggatacaaacaactcaaagaatttgaggctgtaaaatggctagatgggaagggaccaaaaagggggtgcaacgggccagtcagggttctcactgatgtcttgggtgtggctctgagactgcgggctccttggggtggggccggacttgatctcttgggatccccactgggcccggcaaaagtgggtactgaccctgagccgcagcgctataaggggaagtcaggctgctgtcctggatcacctcctggggctgggctggggcccagcatgagtcaccgctggctgggccaaggctgacacgcaccttggactcagtgcagctggctccagccaaagccagcctggcccagaagcctctgcctggcttccttggggagccgctgggggttgccgggacaagaaccagcaggggtgcctgacctccctctgcagcgatcaccccctccaaaaccttccctatactgtgggtgtgactttggacaaaatcagggacatggcagatggcagttgggtggggtttatatcctttgtctgttttttgagattgagtctcgctctgttgcccaggctggagtgcagtgctacgatctcagctcactgcaacctccacctccccgggttcaagcgattctcgtgcctcagcctcctgagtagctgggactacaggtgcatgctatgacgcccagctgatttatgtagttttagtagagataggatttcaccatgttggccaggctggtctcaaactcctgaccacaagtgatccgcctgctgcggcctcccaaagtgctgggattacaggcatgagccactgcacccagctcatcctttggatgtttcatcagaacaggtcccttctgtgctgtcaacgagctaaacacaaactgggagttctcagggcaattggagaccgtaggagcccagtaaggtgctggcctagcctgagggttactagggacaggcttccgaggactgtgcagctgaggctgggaggtggcgctcagctgcatgactgggggaagagtagctggcacagaactacagctgcagccgtgcaaagaccctgaggccaggaaggcaggatattgggaatttgggtggagaggctcctgaaaggagacactggccagcccagggactggtgcagtcaggactttttccaaaaaggtttcaagtaaggagtcagatctgtgatttagaaaaagcccttcacatcacagctcatgcctgcttgactcccccatcagactggagggctggcctcaactaggtgtcaataaatgctggggacgctgggcgcgatggttcatgcctataatcccagcactttgggaggccaaggcgggcagatcgattgagcccaggagtttgagaccagcctgaccaatatggcaaaacctcgtctct

SEQ ID NO: 67281 - DNA, 4416 bp, Homo sapiens
tttctccatgaccaagggacggtggccattctctccaagtttcttcatctgtaaaatgggtacaattcagtggccctccctaacagggctggctaggtacacatggccaccagccctacttgctgtgtgacctcggccactaatgttcacatccctcagggtccccaatgagttggaagcccaaagcgcagggtcttaacagcaaagggcagagcaggcaggagaagcaggaagcctcgggtcaaagctctgaaagtgagggagtccaaggtcagactatctctgcacagtctccttaaaaggctgtgtgatgtcaagccagttgctcaacctctctgaaccttagatttcctcaaagtagggagtaggatgttgggaggaggaggagaagcgaacttcagggagatacttggaaaatcccagtcctggaggcagacctcttgggttagatcccacctgtgccaacttcctcctggtactgggtccatcagcttgtcctgggcctcagcatcccccgatccaccaaaagagaaaagcttacactgtaagccaagcactgctctgtaaacataaactctcttaatcgtcacaactttatggggcaagtttttcgactgttctccccattttatacggacaggcaaaccaaggaccaaaaggttaaaaagtttactaagtttctgtctcttccttcctgctttgggctggggctgtgccctttccacctcgaaatctctccttcccaaaaggcaagggggcattagctagttccaaacgcagatcaaagaccccaagacccctccccaacctggacatcagccggccccgcgccaaggcgcgtctagggggcgctcgctgcgcgccagatgtgcgggccgctctcagacacccgctctctgctccctccaacaaggggaggagctagggacagagggaggagagaaaggcgggggtgtaggggggaagcgaaccaggccccgcccagcccgccaggccccggcgggggaagaaggaggcggagagccgagctggcgtaacgagactttactgaaaacagaaaaccgggcgaaccaaggattacaaacaggaatgtggactcgtagcaaaacaaaacaaaacagaacaaaaaagggaggggggaccggtcgaaagaaccgaaggggggagcgagatcgaggaaaggggcggagaatttttttttcttcttcccatttctttaaaaaaccaacacaagaaaacacacacacacacaaccaacgtttgttcccgagtagaaacataaatagggcagaatcgaacactctgttcttctctcttccaaagaaaaaaaaaaaaaagtaaaagtaaaggaaaggcagggtttgaggctgcgccccctcggagcccccttccgcggcgcggtgtacaaaggggcagccgagacgcgcgggtttgtgcaacacggggcggccgcgcgggggaaagaggcagcgcgagggcgggggggtcatgcgctcgcccccccgggagcagggggtccagcttgtcgagtcctgggcaccctcggggggggggaatccccgggggccgcgccctctctgagttcctgggcacactcggggagggggggtccccagggccgcaccctctccaagtccggggcgcccacgacacccccccgcgagcccgccccttggggagggtggccgcgcatgcgccccgcgcgcggactcagtacgcgggcacctggtgctggggcagcagctggcagccgctgttgacgtggctgaggactttctgcttgagctgcgccacctgctcgcgcagcaggctcgccgtggacgccagctccgtgttctgactcttgagggtcttcactttctcttccaggcgcgagatgcgctccagcttgcgcttgcggcacttggaggcggcgatgcggttgcgcagccgcttgcgctccgccttgatgcgctcctgcgtgtccatgtcgatgggcgacaacggcgggctctcgccgaagctcggcacgtcgggcaccgtctgtggctcgtccttgagcgcagccaggcgcggcggccccaacgcgcctgggggtggcggcggcgggaagggcacaggttcggcagcgaaggcgaccgtcgcggcgccccccgcgcccccggcgccgcccgcgtagctgctcaggttcgcgtagacaggcgcttcgggcgcggccgccgccggggccagctcgccggggggcgcggagcccgtggccgtgcccgagggccccccggcggcggcggcggcggcggcagcggccgcgcccgcgccgagctggttctgcttgtgtaaatcctccagggccttgacgaagccctcggcgaactcctgctcctcgctggccgccaccttggggtagaggaactgtgagctcgtcggcgtggtggtgaccagcccgttggactggatgatgaggcgctcgagctcgggggaggccagcttcagcagccccaggtcgggagaggcgagcaggccgtcggggggtgccgcgctgggggcgccgtcggcgcgcaggggggtaggaggcggcgcggccgcaggcttgagcgctgccgccacctgctcactcaggctcagcgtcagcgcgtccttcttcatcatgctgccggccgcggccgtcgggggcgccccggggaacaagcggcccggggacgcgaagctgccgccgctgccactggcgccgccgcccaggccgctcagcgcctcatcgccgtagaagggtgtttccatcctccgcctcccccgccgcgccggcccgggggggagtggccgcggcctcccggggggcccgcgcccccccgtccgctcggccctgcgcccgccccggccgcggccgcagcgcccggccctccactggcggcggctcctgcgccgcgccacttgtgcgccctcttatagcctcggctcggcgcgatgagctcaccgcccccgttcgccattgggtgcgggtgacgtcgctcatttgcatggaggggcggggccaagccgccgacgcccgcccggccgccgttgccccggcgacgcgcggtaaacgccacaacagcgcgctgccttgtgggttgacgtcatgggggcggccgcgcgcccgggccgggtcaccccgccccgggaccgctgtgtacgaccgatctccccggcgccgcctccgccaaggcacgtcccgggtggcgtgatgggcccgggccaccaggcgcccgcccgccccgaggccccgccccgtgtccgcgcgtggggccccggccgggcgggggcgggggcgggggcggtgccggcctccggggactggagggggatggggtcccgcatggctaaataactccttggcgcctcctgctctgctgtgccgccagggcctcccctagcgcgccttctggagaggctttgtgcggatacggggctggaggcctggtggggctgtgtccgggggctcgccgggggtgtggggaggtctgcgttcctcaccctccctccttccttccctccctccctccaccccgcgtgtgattgctcaggaagagacgggaggggagaggagggtcgccagaagttgctgaaagcgcttggatcctgatcattttcactgagtgcgttctagaaccaggagtcctacttcctgcctttacagatgggaaactgggctcagagaggtggagtgaccatcccccgagagttagctaggagtcacagcagggcccgggctgtgactaggcctgagctcttgtccacccttagaaccctagaacctgggagtccaggcccctgcgcagccccttccttccgccgcccacgttttaaccccaggtctgccagggctgtgatgtcctgggcgagggtgcccaactccaggggctgggctgatgaggcaggaatgccgggtataattattacatgcttgttaccactatcatggctgttagggcttaatgagccactattaagactggctgggaagggggtgtgagggaggagagatggacccaccccaccaatactcacaagggatccttaggacatctggatctgacctacagcctctgcatgcacccctccagctccccacctctgtctgaatggagcccacaccctcctttccctgacctccttcccctcactctctctgatccttggcctcccagttgcaggactaatcgtacctctgggcctttgcacgtgctatgctctctgcttggtactcccttcccccagtgcaaagatgtgtcttcaggaagtgccccaccctcagactttactcctttattgtagcctctgaatctgccagaatgatggagtggaccatagtccctgaaggtcagggacattgcctatgctgagcctgctgacagggcctcgcatagaatggatgctcagtattaaaggtgaatgcggggctgg

SEQ ID NO: 67282 - DNA, 2753 bp, Homo sapiens
gtgagccatctagatatgctttgtccccttttttcggatggacaaactgaggctgtcagccaagaaaggcttcagtatgtggaaggcagattcgaagccagttggccctgcacatcgtgggctgcatttctgcaccaagactgggggttcctggagcgagcttaggggtccggactggtgcagacggggcgctggacctggcccccagccagcggaagggatctgggccccagatggggagtagatggaactggaggcaaggcaggcggcagggggtgaagaggccgctgccccaggctgcggggatggggaggcaccggcagggtccgcgttgattcagaaaggaccccaaggaaggagcaactttgggggaccccaaagttgtctgagtggtatcaaaggccgtgcacatggggcccttaagcgctacagcaggggcaatagtggagagaccccacgccttcccgcctcccgctgcccccgcatccccttcctcccgcctcccgcctcccccctgctcctcgcctctcgctctcccggggaggaagtggcgagaatgcgggggtgggcaccctattctcacttcccctggggaagggcggggcctgcggggtcctctccgccgccgggagacggcatctccgcgtacaggggtgggggcggggagccctaggagctgggcaggcgctgctcagtccctggccaggtgacgtccgtaagtttcctggtcttcgatggttctcgaatgaaaaatggggggaaagacattgagttggaaacagcgagttgttggggagagaggaccccaccccgggccggtactagcagccagacacggacacgccctgccccggaggggtcagggccaggccgaagggagggaagtcgcagtaaacacagggttgggttggggcgggaggcgcattccaggcggagggaacggcgcgggcagaggcctggaggctggtggaggcctcctgcctcgcctagctgcggggtcctcagcgtgtggcccctcccctaatgggagggggggagaaaggatccggggggagaggtctcggagctgtcggcggcagtggaagagttaacttcccggggctgccggaccccgccgcgagctggcgggtggcgtcagcgccaacgtcagggcgaagtggtgccgcgtagacgcggacgcttcggccgcccggcccccaccccacgcggcgctggaggccgcggggatgggggcgggggcggtcggccctgcaagcaatttactgggctctgtgcagagagggaaattgaggcacgggaacggccgtggcctggctggtgctaagcccgctagcccgcgtcccacactaccgccccctcccagctcctccaggtcgccggacgacctggagctggtttgggcttgttttccattgcgcaaatacctgcgaataaacgtttgccccgagctgcgacttggcacatcaccacctctgcatggcctcagtttcctcaaccggataatggggagagttgacatttagtgtgggcgctgggttcggccttgaaaagggggtgtgggaggggactgcaccccaagaaagaggctggagcggggacacctgcgaggctgtctgtgaattccgggctggttctccagccccctcctctcctcccgtcgctcactcccctcctctccctccccttcctgcttcagcttcccctcccctcttccttatccccttctccctcccgtctcccccgatctcctctccaccccctctctccctttcccccgcccgcccagcgaggccgccccaccggactgctaattaaatgcagagctggggggaagggacggcgcgtggttaaccccttccccgccggggccctgaaccggggatggggaagggtgtccgccaccggaatttcctcccccccaggggcaggccttaagctctaggacaagcccatttattgagtgggtatatcgaggccaaaggaacggccccaacgttctgggtgaggctgtactaaatcgggcctcctgattggagggccagagcttcgagatagcggaagagaaaagcaatatcgtggcttggaaataaaccaagagaaaaaaaaatgagttggaaggagagacagcgggagagggaggctggaaaaaaatctaggagcaagacagagacagagagacaaccaggtaagggaggtggagctccgggtgtggcctggaggcacccaggcaggctcccggtaggaggcggcttcctggaggaacctgtggtggaataactcctggccctggtgttagcctccaggcctggctcacgcactgactgctgacttctgatagggccttgtggcctgaaaggaaggtcatgcctgcctttggagccatcggtcaacccaagtccccgccctgtccctgaaaacatcagagaggagcccagcgaagcgaagtgtgggctatgtgctgtgaggtgactcagtggcccctcattcttgggacgggaacaactgaaagaagtgaatgatataaagtcaggtggtgagaaagcaaatgacagcaggcggagggagtgtggggtggggggggccagaggatccatgataccagcagcagggccaccatgaggatgccccagggaagggtgttcctgaaagctggagtagcacgtgcaaaggccctggggaggaatttgaggtatttgtttgtttgttttttgagaggagtctccctctgtcccccaggctggagtacagtggtg

SEQ ID NO: 67283 - DNA, 1093 bp, Homo sapiens
aaagtgctgggattacaggcataagccactgcacctggcccatttttttaatttttaattttttttcccaagacagtcttgctctgtcacccaggctggagtgcagtggcatgatctcggctcactgcaacccccacctcccaggttaaagcaattctcctgcctcagcctcccgagtagatgggattactggcgctcaccaccatgcccgcctaatttctgtatttttagtagagactgggtttcaccgtgttagccaggctggtcttgaactcctgacctcgtgatccgcccgcctcagcctcccaaagtgctgggattacaggtgtgagccaccacccccagccatttttttaatgtttaaggaaaactgctgggcagtgaaggtctccccagacaatgtcactgagccccggcctccccaacctggtctgagatttcagggggtttcagaagaagctgacctttgagaaggctctggggccaggatgtctgagttacttgatgctggaggggtggggcaaggagggtctggccctggtggtgcagaggaggggagatgagggtggggaagacacttgaggacgtgaggagtatttttaggtgctgaatgcagccctgaaatatttccacggccactcccgagagcgagctgggtgactatttcggtgcctggttccagtggaggcggggcaggggtgagtcactcactgcccagtggccgcagaggccaggcccaggctgggaggcggctcgaagggcaggatcgcaggcctgcaaggtgaacggtcactggcctggggccaggcttcctaagccagcctccagggcacagaggacagcggcctttctattccccatggcactggccaatccagaggggccactgcctgggtgccctgggacaatgagctgctcacgccaaccccatagttgtaaagatggagggtcccccgtgaggttctggacaccccacaggtgctaggcgagatgccatcttagattatttcaagcatttattgagcacttgctgtataccaggccagtcctaaaatgattactggcatcctcccttcatgcaatctgcccaata

SEQ ID NO: 67284 - DNA, 1470 bp, Homo sapiens
tggtttcttctttttacagcatttatgcatttgatatgcatatgcttgtggctggctcactcctgtggaagggaaggattgccggggctgtgtcaccagcacctgggacaaggcaagtggccctagtgccaggctcgtgccaggccctgggctccaaaagaagaaggtggggagggaggtgacagggacacaggccatctgggggtggctgtcagagtagtgctgggaacagcaggtgaagcccagaggaggagaggaggaggagagagaggagggggatgggggatgggagtgggggatgagtggaggaggatggaggaggaggggaatggggaggaagatggggagtgagaggagggggatgggggaggagaaggagaaggaggaggaggaggaggagagagggatggcttcccacagctgcctctcgggggccactgcccaaggccagcctctgcacttttgtccctgaagcgggtgtttggctccaggatgaggtggcgtcagcagccgacccgggcctgtcgcactctggcgggggactgtgggctggccctgcagagctcagcccccggctgagtcacagcacagcgccaggcgtgggcctccctaacagaaagcaaactccaggcgagaaggtctgggggcgggtggggaccatctacgataaaggcagccccagttgggtgaggagggcacagaccatcggagggacagaaagacctggaagccttggatttaggaactagactggtgcttttggtttcttttcttgttgagggggctgaggatgaggctttgtgaaaccaaccaggaagaatgaaacacagagctggtccgacacccagctcgagggaggggggccggaagcttctggaagttggctgcccctaagcaggggccactctagcccacaaggccaagttggcagaggcagacgaggggactctgcggctcaagtcacgggccaggagcccgcagctgccgggctggaaaggtcagagccggctctgcgtctggctgcgccggcaagaagccacaattacgcaggcaaaagagcccggggattagccccagcacctgggaccctgaatggtgagaaggcacctagggggtgttggaacacattctgagttcagagcctggtcagggagaaaaaaccaaacggagatcaggaaggggaaggggccttcgagggctttcccatcccaacttcccaggatgcctgaccccagagctcctggatttgatccacgcctcgtgacacacacaacccctgggaggaaggagcccaggccccttggagagccccagaggcctctaagggccggtgagtctaggacatggggcaggagctgcaaatggggcctccctgctccccacccttccttccctcctcctctaaacattgccccacccacctcgccctgtgagcccagccccctgcacggcccacactgtaggggcatg

SEQ ID NO: 67285 - DNA, 1988 bp, Homo sapiens
cagttctgatgcagccacccctgggggaccctcctggttactgaatctcccactgtctcacagagtctggaagtcacatccccaacaagggccttggtttctctcattgaaaaaagaaggaccagaagctgatgggccaggaaactcccagctctgaattccttttccgatctgcacagtgggggacacgggcactttctagcccagatccagaacttccagaatcataaacaatgggccctgcagagacctgggccgcaatttttccttctttgtattgggaggatgtactttgtccacccctagctcaaaacgcccccttccgctggaatgacatgctatgtgacccaaggagaaacaccacaccccagcaccaggcctgcttttcagccagaaaccaagaggcctaggaggctgtgctgctagcatcttgcaagctctgaaattcctaaaactaagtttcacaactcagactggccccctacttcccagcactctagttttcaatcagggaggtcagactgggcccgaagcgtaagggaccccttccctgcccaaaaactctctgctgcatttggcggatccccaccttttttttttttacttcagtttccccacctgcaaactgggaaaactaactaaggcgaggccactgtactgtggatacaagtccgtgcaaccctaaatcccagacacgaacgtgatagagccacctgcagtctccggcctcagtttcccagcctcgtgccggggggcgggactcgaggctcggaccttacgttcgccccgcgccaaccaagcccacagcgcccgcccgcagggatcccaacgactgctgttcccgcctcccggtgagaccccgcagttgccctgccctcaccatggtgccggcggggaccgggctcgccggccacttccgccgccgccgctgcacacgctcccggcggtcgtcgccgcgccgcgcgccactaagctgaaagaaagtggcagagacgcaagccagtcagcaccgggctcgaagggcggtcaaccaatccacgcggagtagggcggggcccgctgggcgaaagggcggggcgggccgtgttcccgccggaggaacgaggacgagagccgtaaagtgccgcggcttgtaatgcaaaaggaggcggagcaacgcgcgccggcgcggggtgcattgtgaggaaatgcgtgcgcaggtgaaaccttcgtcggtctcctgggctccacgctgtgggcaaagccagttaatgcctttcgtttgcagtagagagagagaaatcgaggcttcgtggtgattgggccgtgcctgatgttgcccttccgactcctagttttctgattctgtaattatccagggaacatcatttaataggttggaatcctgaccacgaccctcggggcctcagtttgctccctgtaaatagtagtgtctgctccaaaacgttgcttactgtaaggatgaaatgaatgaaaccatgtaaaagcacttaaaacagcgtctggcacatattaagtacttattacctactctgtgcctgtttctgctcacagaatgaacaaaacacaaaattcgtggccctcagggagacagacagtaaacaaagtaaataggcgaatgctattagttttctggggcctgctgtaacaaatgcccacacactgcgaggtttaaaacaacagaacgtgattttctcacaattcaagagatcagaataatgaagtgaggttgtcagcacagttggctccctctggaggctctgaggacaatctgtgtgtcctatgcctctctcctgggttctggtggctgctgggaatccttggagttcttggcttgtagatgcagccttccgcgttctgcctttgtcgtcacttggccttctctgtgtgtctctgagtctcaaatgtatctctccttttttttttcttttttttttttgtagtagagacagggtctccctatgttgtccaggctggtctcgaactcc

SEQ ID NO: 67286 - DNA, 969 bp, Homo sapiens
actccagcctgggtgacaaagtgagactccatcataaaaaaaaaaaggaaagaaacagggtctatgaggtgtcccagcatcaacatggcgatgaaggtagcagcaaaccgcatgctgggtcatcctttctgacttttctagacttttctacatgcagtctttctttttttgcacaacttgcaaactcctattcatcgttgaaacctctgcttcggtgtccccttgtggcagccagtggttactgcagtttttttgtttgccctttcaacagtaagggtggccaatcagcgttccccatccccctggctacagggattggttaaagaaagagcacggaatttaccaaggccaatgagattctcccctgggaaggataccgagggctgggagggagaagagctggttcctggggagttaaagggaaagtccagcaccccttaggctctgtcctctggaagaagctttctgcagaaataatccagcagacacaagacaacggaggtactcggtggaaagggaagtatggtttgagcccctggatccagctatagttgaagccacagctatgatgagcttaaatgagcccaagaagttttttttaattgcttcatccacttggaatttgcagtctgtccctggcaaaagagccagtactaatgcatatctgctctgtgaactcttccttagctgccttgctcaaaagctaatcattccttctcttatactttgaactttagtaccctccactgatttccatcattgcctggtttatgccatgttgtaattgcttgtttcagccctctcaactttgacttgtaggagcaaggacctaagaggtttcctggggctctatttggggctgttcaggacagtttaccctcccctatcatcatgaatgcatgacccaggctggggcaatcagaaggcttccctggctggctgagcatggtggctgatgcctgtaatccc

SEQ ID NO: 67287 - DNA, 1498 bp, Homo sapiens
ttcctggcctgaatgctgctcctgtgaccccttgaggcgagtgacctcggggaagtggcattctgtgcctcagtttccttatctggaaaacgggccttgctcgcggggacttccctccctaattctgcgcagtatgcatgcatagggcaggccctcaatgaacccttgcagaataaaggaccggctcatccccagcacctggctcagtgcgtgcaagcggctacacactacggcataagatgttcccattttgcagacggggaaacggaggctggggaataccgggcctagccgacgggggcggggcgcagggcgcgcacgctgcgtctcgggcccgggggcgcgcacgccgagcggctgaccgggggcgaggccgggggcttgacaggggcgtggcctcgcgcggccgagaggctgcagcggcagcagctgtcgcgccagtcgcaacagaagcaggtccgaggcacagcccgatcccgccatggagcagccgaggaaggcggtggtagtgacgggtacgctggctgatgggggctgtagcggcagcggccgggggcagaggcgggggcggctccgggactgcggggccgagaggggcaggtgctggaagtcctctcagatttggaaggtgtcatcacccgcgggagccccgcgcagcccaggcttcctggaaagtggaggaggaggagccttgggggtcccagggtcgggagtcagggcagtcgggcgcggggcttggggggccgggcaaaagcccggcgctgcgcaggcccccctggcgtcctttcctcccaaggtggggatggtgaccctcctggcacctgcctcctctgtctggcctgcgggctggactggacccttcctccctgccccttccgaggtccagcctgtccccacaccgctcccccaacccctggccccaggggacaaaggccgatttgcgggcaggaagtgtcccagtgacaaatgaacctcccagtcactgctcgccgcgccctgcgctcctggggggctactctcccaaggcaggggcaggtgggggtccggggacctcgggctctcccagctgtcccagggactgtcttcagcggaaacctttttgtgttttgtgccagggctgtttgttggtgagtcagggcccctgctgtcaccgactcccccccacccccaaaccaactgtttctcctccctgagactccgcctcggggccacgtggggcgccaacttccgctggggcctcagagtcaaggagtgggggggtcattttgacctgctgtctggaggggtcagagtgggaaatccagcaaaggtgcacacaggtgttttgtggctgttgaagggagattgaggctgatccaggagattcagggaagaaggaagaaacaaggcacctgcttaacaggtgtgtataattgggaggagggtcactgcccccatcccttccagccttcctttatctggttatttattccagcactttttgcatgagctgattaca

SEQ ID NO: 67288 - DNA, 831 bp, Homo sapiens
cgggcaggccatgttaagtcctgcccctgtctgtgtgcagctggtggtgcatgtgggggtgtcaggcatggcgaccacagtcacactggagaaatgtggacacaacaagggctacaaggggctggacaactgccgcttttgccccggctcccagtgctgcgtggaggacgggcctgaaagcattgactccatcatcgacatggatgctgtgtgcaagcgagtcaccacgttgggcctggatgtgtcggtgaccatctcgcaggatgccggcaggtagggccctgtggggtgggagtgagtggggatttccctcctccacccactgagcctggtgtagaacaagccaagcgtgttgaccttggcctctttggaccaagcactcagtgtatactaggcacagagccaagtatttgtacgtagcaggtgccgttggttctgctcctgggactcatggatctgcccacttctccccaccatcacggtccccaccaaggcccccagcatctcccacctggacactgccccagcctccatctcagtcttcctccctgctgcctccaccccaacccaagcagtcagtttctgtgttaatttcctggagctgctataacaaatacccacaaactgggtggtttcatataacagaaatgtattgtctaacagccttggaagtcagaagtccaaggtcaaggtggtagcaggactggttccttctggaggtgctgagggtgagtctgtcccaggcctctctcctgcagctggtggctgctggccatccttggcttgtagacacatcgctccagtccccgcccctatcctcacatcactttc

SEQ ID NO: 67289 - DNA, 3744 bp, Homo sapiens
aatagctcactctgcccatttccccacatgtgccacagcactgggagttatcaagttttttttgtttgtgtgtgtgtgtgtgtgtgtgtgtgtgtgtgtgttttaaagagacaggatctcactctctcacccaggctgagtgcagtggtgcaatcatggctcactgcagccttgacctcctgggctcaaacaatcctcccgcctcaacctcctgagtagctgggactacaggcacgtgccaccacctctggtgattttttttcatctttgccaacctggggagggaggagagtgttgttccatcttgtgggttgctggtaaggtcttcccttggatttggatgggtgctgtcaccttggtctacggattgcccctctgaccccgttttggtctctctcttacccgccacgccctgcggcttagatatctctgcgactttacctactacacctctttgtaccagagtcacggtcgatcagccttcgtccacgtgcccccactggggaagccgtacaacgcggaccagctgggcagggcactgagagccatcattgaggagatgttggacctcctggagcagtcagagggcaaaatcaactattgccacaaacactgagggacgctcaggtctcctaagacctcatcctgctggggaccccacgaggggacatccaccctctggggtgtggccaggaaaagacaagctcttcagcttggggatccgatctggaagagagattctgatctgcccacctcctcttcctccttctctacaaaagctccggttgattcgagggaagtggtgaaaatttttttttctcccattttcctccctgcatctggggacacagctgccgtgaccagggaggccagcctgggaggtccagatgcccagggagaatcttggtctggtgaatccatgagctgcgataccacggctggggccatatgttcacctgctttcctgtccgttggtgaaggaatttcagaattcattttatatccaagactggcttttaccaaatttaaaagcctctcaatgcgtcctcgaccttgaactgtgctcaacagcctggccctttctggggccaccctgggatatggctggctggctggctttctttctttctttctttctttctttcttgctttctttctttcttgctttctttcttctctctctctctttttttttttttttaaatagtgctagtttgggcacagagtaatttatattccctttggttaaaatgcaggctttttagccaacaacaaaagtgttttccccccacccccactcgcccaccagggtgatgccacttttgcctcctgccctgaaaattggacttaagatgccatgtcttggccaggcgcagtggctcatgcctgtaatcccagcactttggaaggccagggtgggcggatcacctgagatcaggagttcaagatcagcctggccaacatggtgaaaccctgcctctactaaaaatacaaaaattagccgggcatggtgatgagtgcctgtagtcccagctactcgggaggctgaggctggagaatcgcttgaacttgggaggcagaggttgcagtgagctgagattgcacagctgcactccagcctgggtgacagagcgagactctgtctcaaaacaattggacttaagatggcatgtctttgttttagggccaaaaatgaggcccccttgcttaaggcatggggtccgtggccaggcaacggggtgggactgctgccccagatgtggccatgggggtcgtggtcctttcaacaccaagctatgagctgtcgccatggagaccagggccacctgtggaaaggcggattttgtctgcttttgacttttcttttttaatatgtaaaactccacatcagcggaaacccccccctacttctggcctggagcttcagggttttggtgctgggacgagtttgttgttctccttagcggggtggcgcggggggctcaaaacgggggcgcgggggctggagttggcagagctctgcatgtcccggcatgtctgagcaggaggaattccgggcggccaaagggttttatgtagattgcttttggacactcgcccaggagtcaggagttgatttttatctcacttcctggtaaccttgaacttaccaggcagggatgagatgacgtaaacttcctcagatgatgtaagttcagccacatcttgctgcccattagggagagaggacgacccccacagtgaaagtaattgagtgaaatgcacgttctggaaatcagtttctattttggcctggaggaatgtggctatactgcttccctgagtgtgacacagttggaatctaatcttgttggtttcccaacatctaggtttttgtttgtttgtttgtttttatgatagggtcttgttctgttgaccaggctggagtacagtagtgtgatcatggatcactgcagcctctacctcctgggctcaagtgatcctcccatctcagcctcctgagtagctgggactacaggcatgcaccaccacacctggctaatttttaaattttttatacagacagggtttcaccatgttgcccaggctggtctcgaactcctggactcaaactgatcctcctttctcggcctcccaaagtgctgggattacaggcatgagccactgcacccagcccagttctttcttaaaacagctgagagttttgttttcttcagcgttcaccttccttgtctccagttccgatgctggcagtggttcctacctctgttgggtttctagatagtttgggaacggggttgatgggtttctgtgaaacacattttccaagtcttgggctttctctggaggggaaggtggatgctggcgggtgacttgcagtgggcgcctggcagtgggtgtggactgtaactgacaggtggaaatgagtagggacactattgttccctccatgccagcttttttttttgctggaaatgccccctccacacccctggtagctctgtgtcctgagaaatccagagtgtgggagacatcactgcatctgtccccccagcttctgtgaagggaagctgtggcctcttttgaatgtggggaacaactgaagactcaggggtcacccagaggtctggtggaaagcaacttcaggtttcatcttgctctattcctcaaaggtctggtctgtgggcctctgaggagaaaacaggtctagccaagacagggacaaaatggggaaggggatgtgccaggcctgaactgagctaagcacctgccccgggctccacacttccatctttcttttgtcttcatttcacctctgtgtttaaagcactgtgtgacatagctccttagagatataacctattgtctgctcattgtcacgtgtgtgtgtgtcatctttgtattcttgcagtggtttcacatttccttacccagtcaagccagtatcccatccttcctcataatgcacaacatttggctcattttatttttctcattgttattttttatttttattttttgagatggattctcacactgttactcgggctagagtgcaatggcgtgatctcggctcactgcaacctccacctcctgggtttacacaattctcctgcctcagcctcccgagtagctgggattacaggcgcccgtcaccacacctggctaatttttgtatttttagtagagatgcagcttcaccatgttggccaggctggtcttgaaatcctgacctcaggtgat

SEQ ID NO: 67290 - DNA, 619 bp, Homo sapiens
aaaaaaaaaaaaagaattccctgctctgcttttctgctcgttgctggcatagaaacatctagaacagaaagtatccactctggggcagatgggagagctggaaaagtagattcaagatgccttttagtcttggaagtttcttccaggaagcaagaccagctggtatgtttacacctgcactccagtgccctggggaggtgaccaggtggagggggatggctcatggaaatctgtcccgcacagctggcccccttttggctgccactgtctagactgttggcctttgacctctctgcctcttgtggcgtctgaacctagacgtcccttttggagacagctggacaaagccctattctccgcagccccagcctctatcctgaggcctctgggagctgcgtgacggccagcatggggtgctgatcatggtcaaggaggcaggtctttgccaggttgccccatgcagccacccatcctcagcatcctaacttgagggggcaggagagggctttgtttttataatccggattaaatttcccttccctgggcacaagtgcctcatgagggcccggggctgctggttgggagggaaagcatccccgtttttgcagtgaggaggccg

SEQ ID NO: 67291 - DNA, 2628 bp, Homo sapiens
cccacctaaggaggcccctcaccccgtggctgtcccagtcattcaggaagtgtccactgtgggctgagccctggactggggacacagcaaggatcaggcagctgggagtacagcctggaggtccccccttgggatgagggctgcacaggcagttaaagggtccaaggatcatcccaggatatggctgagaggctgcaagaggctccatcccctagaggccccctccgccctcgcctgggtgctcccagccttactcaaaggagcaggtcggcccggtgcgttgtctcacacctgcaatcccagtgctttgggaggccgaggcaggcggatcacttgagcacaggagttccagaccagcctgggcaacatagcaagattctatctctacaaaagtaaaaataaatcttataaagtagctgtggactgggcacagtggctcacacctgtaatcccagcactttgggagaccaaggtgggcagatcacctgaagtcaggagtttgagaccagcctggccaacaaggtgaaaccccatctctactaaaaatacaaaaattagccaggcatggtggtacacatctgtaatcccagctactcaggaggctgaggcaggagaatcccttgaaactgggaagcagaagttgcagtgagctgagatcgtgccactgtactccagcctgggtgacagagtgagaccctgtatctaaaaaaataaaataaaaatgaaaagatgaggatcttggcctccattcttgcccttccactccattccaactgctgagcctctcacaccctctgtggctccctttcgcctacaggaaataggatttctgtactgggcatttgaaccccattcccttgtttctgctgacccccagcagtctcaatatcccctacttcctcttcccagaaccaccctccccaaagcccttatcgatgcttggaggattcctatgcatccctcaaaatccaaggtttgggaaagatgctgcagtggtctcaagacatcctcagtgtgatgacagcctggggtgggggtaagggggcaaagtacagcaccagaaatcccaactgagtccccccacacgtcttccaccttcccaccctctctttcgggttctggctccctgcctccaggcaatcaccagtttttaccaggagtgcctcagacctgcccggacatgtccaagtcccctagaagcagggaggggtgggtgaggctgtcacctctcccttccctgtatggtgctgataagggcgtggggaggcagagacaggcagagatagacatgatgagagacaggcagaaatggagggagagccagggagagagagacacaaagagaaaaagtggaaattctccagatattttgtttagggtgaggacacggagacacagagagggacttagccagctgaggatgacgatttgggatgttaggtcacccaggtgctgtgctgtgtaactcaggcacagagctgccctgttccgagcctcagtttacccctgtgactcagagcagatctccatacccccatcacagggctgtgtatccgagctcagccagagcctggcatgcagtaggtgcttcataaatacacactgtggacagtagaattatgatgggagcgagcgtgtgaactgggttgctaatgtggagcgtgaagagggaggcccagggttactcggccaatgggttccgggcagcaagcacgtgggggaagcctcagctgaccacttcctggccagtttatgcaggaactcgcacagccggtccctgaggctgagcccaccacttccgccccccatggtcccagccctgctgactcatactcagctgccacggtccgctttccctgctgagcacgggggtgggggcgggggggaagagggggagggaagggcacctgaccgaggccagaggcccagaaaggacagaaggtcatggctggggagaagcaggcaggagaaccgagtcttggccttaactggctggcaacgtaaaacctgccctccacaaggacaagatgaaaacttggggatttggaggggacaacaaattagactcaatcacaatttcaaacttttggatgtcaatatatccatcaagaaattgaaaagaggcctggcatggtggccgatgcctgtcatcccagcactttgggagaccaacgtcggaggatcacttgaggtcaggagttccagaccagcctgggcaacgtggtgagacccggtctctacaaaaaaatttaaaaattagctggacaggggccaggcgcagtggcttacgcctgcaatcccatcactttgggaggccgaggcctggatgacagtgagagactctgtctaaaaaaaaaaggacaggtgcggtgcttcgcgcctgtaatcccaacactttgggaggccaaggcagatggatcacctgaggtcaggagttcgaaaccagcctggccaacatggtgaaaccccatctctactaaaaatacaaaaattagccaggtgtggtggcgcatgcctgtcgtcccagctacttgggaggctgaggcaggagaatcacttgaacccgggaggcagaggttgcagtgagccgagatcgtgccattgcactccaggctaggtgacagacag

SEQ ID NO: 67292 - DNA, 4384 bp, Homo sapiens
ttaaaacatgcgtggtcatgatcaagttctaattacagacaaagacttccttgagattggggagaacctgccttggactacggggaccacttcaactctcttgggaatgatttttctttaggtgggtgctggataggggtgtttgtgattttattattaatacttttgtgtgtgcctgaaagatttcacaatgacaaataaaactgagaggaaaaggtttggcagttccccattaagttcaatacagggttactctgtgacccagtaattccactcctcagtagagagccaagtgaaatgaaaacaggtgttcaaacaaaaacgtgtacacccacttttacagcagcattcttcatcaaggcgaaactacagtacaaatattgtaagattccatttctgtgaaatgttccgaataggtaaatctataaaggcagaaattaggccaggtgcagaggctcatgcctgtaatcccagcactttgggaagccgaggtgacaggatcgctggaggttaggatttgaagaccagcctgggcaacatagcgagatcccatctttacaaatttttttaaaaattagcaaggcactggctgggtgaagtggctcacgcctgtaatcccagcactttgggaggccgaggcgggtggatcacctgaggtccggagttcgagatcagcctgggcaacacggtgaaacccccgtctctactaaaaattcaaaaattagctgggcatggtggtgcatgcctgtaatcccagctactcgggaggctaaggcaggagaatcgtttgaacccaggaggtggagactgcagtgagtcgagatggcgccattgcactccagcctgggcaacaagagtaaatctccatctcacaaaaaaaaaaaaaaaaaaaaagcaaggcacagtggcatcaggctggggtgggaagatcacttgagcccagccattcgagaccaacctgtgcaacacaggaaaaccccattctacaaaatagtaaaaaattatcagggcatggtggcacatgcctatagtcccagctactcgggagagtgatgggggaggatcacttgagcccaggaggtcgaggctgcggtgacctatgattgtgccactgcactccagcctgggctacacagccagaccctgtctaaaaagaaacaaaacaggcaggacgcggtggctcacacctgtaatcccagcactttgggaggccgaggtgggcggatcacctgacatcaggagttcgagaccagcctgtccaacatcgtgaaatccccctctctactaaaatacaaacattagccgggcatggtagtgggtgcctgtaatcctacctactcgggaggctgaggcaggaaaattgcttgaacctgggagatggaggttgcaatgagccgagatcgcgccactgcacgacagcctaggcgacagagcaagactccatctcaaaaaaaaaagaaaaagaaaaaaagaagaaactctcattgatggagtgttcattgatggagcactttttgggagtgggttgacatgctcacaggtgtttttaacctcacctcgtctctgaagaggtgcagataaaagtcacctggtgaggaaaatgcctttttaaaaacaatttttagagggccagcacggtgactcacgactgtaatctgagcaatttgggaggccgaggtgggcggatcacttgaggtcaggagttcaaaaccagtctggccaacatggtgaaatcctgtctctactaaaaatacaaaaattagttgggcatggtggcacatgcctgtaatcccagctactcgggaagctgaggcaggagaatcactttaacccaggaggtggaagttgcagtgagccaagatcgcgccagtgcactccagcctgggcaacagagcgagactctgtctcaaaagaaaaaaaaaagagatggggtcttggggtctcactgtgttgcccaggctggtctccaactcctggcctcaagcaatcctcctgctttggcctcccaaagtgctaggattacatgcctgagccactgtgttcagccagggtgtcccttttctgagactgcattctttccaccttgcccaagtattgcaggagaaccacaggccccatgctgtgctggcgaaaatctcatctcatgctggcctgttagggtggccatatcctctcatttcagaggctctgagggagatggaacaggctcagcggctggctgcttggggctctaaccccagccctgctgtcttctggctgtgtggccgtgacgagcccacctctctggcctcagtttgtcatctgtgaaatggacataatctatccaccacatcaggctgtataaagattaggccaggtgtggtgcctcacacctgtaatcccagcgctttgggaggctgaggcaggcagatcacctaaggtcaggagttcgagaccaacctggccaaaatggtgaaaccctgtctctaataaaaatacaaaaattagctgggcatggtggcatgtacctgtaatcccagctacccaggaggctgaggcaggagaatcgctggaacccgggaggcagaggctgcagtgagccaagattgcaccactgcactccagcctgagtgacagagcgaaactccgtctcagagaaaaaaaaaaaaaaaaaagatatgtccaagtcctaacgctcagtatctgtgaccttatttggaaagaaggtctttgcaaatgtaattaaactaaagatcttgtactgagatcattctgaattaagaatggacctgtggctgggcacagtggctcacacctgtaatcccagcactctgggaggctgaggtgggcagatcacctgagatcaggagttcaaaaccagcctggccaacatggcgaaaccccgtctctactaaaaatacaaaaaaaaattagctgggcgttgtggtgcacacctgtaattccagctactcgggaggctgaggcaggagaatcacttgaacctgggaggctgcagtgagccgagattgcgccactgcattccagcctaggcaacaagagtgaaactctgtctcgaaaataaaaacataaaaagagtggacccatggccaggcacagtggctcatgcctataatcccaacactttgggaggccaagatggaaggatcgtttgaactcagccgtttgagaccagcctgggcaacatagtgagacccctgtgtctaaatacaaacacaaacagaaaacaaaaagaacccgggctggctgcggaaccccctagatggcacaggcacatcctggctttcgaggacagtcacgagcatgagacagcatttcttcttgtcctcggggcctgcaggaagtttttaagtaatctgcttttgtgcctcttccaaatctcctcctatgaccctgtttaccttacatcacaagaaacaatcaataaaagtggtttgtgttcgtgagtgccgtgtgtttgacaaaggcgttgataactgagagctggtagtggaggggggagattttgggagattggggccctgccaggtggacggactggcctgacctccggcccctgtgctctgtttacttccatcccagctccacctctggggacccatggaagctgtcggtgaggaacacaggatccgacctgctgagctcatctctggccacctgcctgcatccgccccatctctcctctcagcttggccatgaggcgggctatgaggtcattggttaaagatttggggaagcagagccaggcgagtggccagatgtggtggctcatgccatcacaggatcccagcactgtgagaggacaaggaaggaggatgcttgagctcaggagttcgagaccagcctgtacaacatagcaagacccccgtctctacaaaatataaaattagccagttgtggtggcacgcgcctctagtcccagctactcgggaggttgaggtgacaggatcccttgagcccaggaggtcgaggctgcagtgagtgggtaacagagccaaaccctgtctctaaaacaaacaaaaacagaaacaaaaagtacactacttactgtcctgcttctcaccattccagcctggtagtccttttttttttttttgagacagggtcttgctcagttgctcaggctggagtgcagaagcgtaatcacagctcactgcagccttgatctccaaaaagactaccagcttggctgggtgtggggactcatgcctataaccccagcattttgggagccagaggcaagaggattccttgagccaaggagttcgagaccagcctgggcaacacagtgagaccctatctctaaaattttttttttttgagatggaatttagctctcgttgcccaggctagagtgcaatggtgcaatctcagctcaccacaatct

SEQ ID NO: 67293 - DNA, 1148 bp, Homo sapiens
gccgaggcaggcggatcacctgagatcaggagttcgagaccagactggccaacatgacagggtgagaccccatctttacaacaaatacaaaaattacccaggcatggtggcacacgcctgtaatcccagctactagggaggatgaagcaggagaattgcttgaacccgggaggcggagattgtagtgagttgagatcgcacaactgcactccagcctgggcaacagagcgagactccaatccaaaaaaaagaaaaaaatcccctaggacagggctgtggctgagaccctgagggctggaggcttggctggccttgcacagcagcgggtgcatgctggggtggggagaggcctggagaccctgtgactccactgggggccttgctgtgtgaccccctagtgagtccttgtgtctcttacccacgcatgcctgtcacatgcagacacccacacacacccagtatctgccggacagggcagcccttcctctccgcagccaggaagctggacataggcacaagggctgacgcctggggccaggaatcctgcctgagcattaggagaaggtctggaaccccagggggaagggcactcctggggcatcccctgcccctctaccatctggtggctggactctacaccagcctgccctgctctaaaaccccagctcctcaattctgtgccacctcctctctgggcccagacaagagcagattcatccctgccccaaaggaaccaccagtcttgggtcagcagagctgggcacagacacttccagtgccgtggggctgtaactgtgataggtctgttgctccatgcacttggcaagtcaacagctgagaaaacaggttgcaacatggaaagagttttaatccgaccggcgtggtggctcatgcctgtaatcccagcactttgggaggctgaggcgggtggatcatctgaggccagcagttcaagatcagcctggccaaccaggtgaaacctcatctctactaaaaatacaaaaattagccaggcgtgatggtgcgcacctgtaatcccagctacttgggaggctgaggcaggagaatcaattgaacctgggaggcggaggttgcagtgagccaagatcataccactgcactccagcctgggcaacagagcgagagac

SEQ ID NO: 67294 - DNA, 2879 bp, Homo sapiens
tggctcactgcaacctccgccctctgggttcaagcgattctcttgcttcagcctctcgagtagctgggattacaggcatgtaatcccaccaccaagcccagctaattttgtatatttagtagagacagggtttctccatgttggtcaggctagtctagaactcttgacgtcagatgatccacgtgcctcggcctcccaaagtgctgggattacaggcgagagccaccgtgcccggcgcagaattcttttttttagagatgaggtattgccatcttgcccagacttgtctcgaactcctgggctcaaacaatccacccacctcggcctcccaaagtgctgagattactgacataagccaccatgcctggcccccagaattatgaatcctgtgaggatggcttcaaggtgagcgctgagccagacaaaaggatggggtttgggagcaccctgcttagactggaaagataatgttggagaagacttcctggaagaggggctttttgcgtagagttttgaagaatgagtaggagttctccagaggaggatgagtaactgcaataacacccagtttatcaagtgcctcctatgtgtctggccctgtgctttacccctcatttgaccacctctccagtgagagtctcagtcctttttttcctggtgaggaaacaggcatggcagagaggcatgacacatcaaggttgcccttcctggctccatctagcccgttctcctctgcttcctttgtttttcaccatctttagcctttgaccccaaccaaaaagagaagagaggaaatcccatgggcatagacagccacctcttaaactcttgtctggaatttttcacatagtaacaatgtctttttttcctccaaaaagactcccaggctggaatggtgtcctcatatcgaggaagaggatactgaggcccagaaatgtgccctagctttactaggagcgcccccacctaaagatcctccccctaaatacacccccagaccccgcccagctgtggtcattggagtgtttactctgcaggcagggggaggagggcgggactgagcaggcggagacggacaaagtccggggactataaaggccggtccggcagcatctggtcagtcccagctcagagccgcaacctgcacagccatgcccgggcaagaactcaggacggtgaatggctctcagatgctcctggtgttgctggtgctctcgtggctgccgcatgggggcgccctgtctctggccgaggcgagccgcgcaagtttcccgggaccctcagagttgcactccgaagactccagattccgagagttgcggaaacgctacgaggacctgctaaccaggctgcgggccaaccagagctgggaagattcgaacaccgacctcgtcccggcccctgcagtccggatactcacgccagaaggtaagtgaaatcttagagatcccctcccaccccccaagcagcccccatatctaatcagggattcctcatcttgaaaagcccagacctacctttgagcctcagttgccccatctgtgccctgggtaggaatatcctggatccccttgggtctgatggggtagccgatgcctgatttgcacccacaacgtgggaggttataacctgtccccaagttgcaaatggggaaactgaggtacagggatgccagggaccctcctgaatgtgcacagcacctgggaaacccggggacggggtcgggcgtgcggtgtgggcatggtccctgacctgggctggggccaggatccaagagaaacaatgggggtgtggtgcatggatagaagtttgtgatgggcagagccagctggagctggttctgaatctgatgaaatcgcttgtcaaggcactgctaaagtcacatgcaacgagcgacttgttaggggaggaggagagtattttccccatctctgtgccctccatggaggctccaggggtgcagggcactggatgaggtctgggctgtggtgggacccaggagggggcaggcagaggggcacactcttagcccgccctaaacccatctgtgccgtgtgactccggcaaacctctcacccttgctaagcctagcaactaggttaaggcaccctcaaaccccagtctccccagtctccctaacacttgtaccagcctgaggggctgtgattcctagaggctcagtagtctggaatgtgatgggtttggcactcttcatttctcgggattacacctgtaatcccagcactttaggaggccaaggtgggagcatcgctttaggccagaacattgcagcctgggcagtatagcgagaatccatctctaccaaaaatgtttaaaaaaaattagccagacatgatggtgtgtgcctgtagtctcagttattcaggaggctgaggcgggaggagcacttgaatccaggagattgaggctgcactgagccatgagtgccccactgcactccagcctgggtaacagcaagaccataataaataaataaataagtgaagcaagtaagtttttgactgccagaagaaaagcagagccatggttggaatctcaggctgcctgaatatcagatatacattaattccttcaagtatttactaagcacctattgtgtgccaggcacagtgtcaaccaagctaagattctaagtagggaatatgaatgatacacaaggaaataaaatagggtgcttcctattttaggcaggctggaaggaagaggaggagccagccatactgagattcaggagattcaaggggagaaatgcccttttttttttttttttttttttttttgagagggagtcttcctctgttgcccaggctggagtgcagtggcacgatcttggctcactgcaacctccaccgccccga

SEQ ID NO: 67295 - DNA, 1212 bp, Homo sapiens
tgtcttcccacagtgcggctgggatccggcggccacctgcacctgcgtatctctcgggccgcccttcccgaggggctccccgaggcctcccgccttcaccgggctctgttccggctgtccccgacggcgtcaaggtcgtgggacgtgacacgaccgctgcggcgtcagctcagccttgcaagaccccaggcgcccgcgctgcacctgcgactgtcgccgccgccgtcgcagtcggaccaactgctggcagaatcttcgtccgcacggccccagctggagttgcacttgcggccgcaagccgccagggggcgccgcagagcgcgtgcgcgcaacggggaccactgtccgctcgggcccgggcgttgctgccgtctgcacacggtccgcgcgtcgctggaagacctgggctgggccgattgggtgctgtcgccacgggaggtgcaagtgaccatgtgcatcggcgcgtgcccgagccagttccgggcggcaaacatgcacgcgcagatcaagacgagcctgcaccgcctgaagcccgacacggtgccagcgccctgctgcgtgcccgccagctacaatcccatggtgctcattcaaaagaccgacaccggggtgtcgctccagacctatgatgacttgttagccaaagactgccactgcatatgagcagtcctggtccttccactgtgcacctgcgcggaggacgcgacctcagttgtcctgccctgtggaatgggctcaaggttcctgagacacccgattcctgcccaaacagctgtatttatataagtctgttatttattattaatttattggggtgaccttcttggggactcgggggctggtctgatggaactgtgtatttatttaaaactctggtgataaaaataaagctgtctgaactgttccctgtggtgtccaggataagggaaggtgaccttgagaagatcctcctctccctgacctcagtttctctaggagacctgggagggggtaagtggaaaggctcaaggaatgagtggcaaggtgttctcggagatgccaagccattggaaggtgcttacgacacctgtgggctctaagggcagccttggccattcctgactccctgactctctgtctctatttctctatctccttattgctgtttcttttttctttttattttttttagacggggtctcactctgttgcccaggccgaagtgcagtggca

SEQ ID NO: 67296 - DNA, 1200 bp, Homo sapiens
ctgggtttcaccgtgttggccaggctggtctcaaactcctgacttcaagtgatccgcctgccttggcctcccaaagtgctaggattacaggtgtgagccaccatgtccagtcctctccccattttataggtgaggagactgaggctcagagaagtaaagctactcacctaagatcccacagccttcaagcggcagagctgggatttgaacctcggccatctgggtgtggagccttattattcaccactttggcaggtgtctcagtggcttacttacccttgttcatcccactggtgctcggctgctggctggcccacaaacatgttctcatagtcgggagtggaggggcaggatggcacggccacttggggcttgggggcgctccggctgccgtaccgtggctgcaagcctaaaccgggcttgggcccatcctgagcagcccagggtttgttcagctcccggcttctggccactcggcatcgccagagtctccaggccagcacagggccagcgatggcaagtccaagaagcaggcacccgctgaccaccactgccccgatagttgcagaggccaggccaggggcgcagctgacctccaggaaggcagagaggttgtgctgggagctggttgtgtcccagcagagcagaggcttctggccagagcagttgtctcggcggatgtcgtgccaggactccagggcacagttgcagtcggcctgcaggtcaaggtcacagcgggcggccagcgccccatccacacgagacaaggggttgcgtagcacgttcaggacctcaagcttctgcaggtgggcaaagaaggtcactggaagctctcgcaggccgttcccagacaggtcaaggagaatcacgttgctggcccgcagagactggttgtgaggcaggctcaggctgaggccactgaaattcaggcacgtggcactgaactccgcgttccagtccacatccgcggaggacacggtgcacgacggttctaggctgtctgactcccgcagcagcagcggcaacagcagcgtccatgccagggtgccccccattcaagcaacctacgtagagacaccggaatcctagccctgacctcagccctgtggtcgccctcgcctccaccgccagtgtttattattatagctcagaccagctcaagccgcttctgaaatggtaaaacgcagccccagtctggtc

SEQ ID NO: 67297 - DNA, 551 bp, Homo sapiens
tgtttgaacccaggaggtggaggctgcagtgagccaagatcactccactgcattccagcctgggcaacagagtgagacctgtctcaaaaaaaaaaaaaagttcacacttaataagaaaactgcaaatcacaaactgtttgtcttcaccaatcaaattggcaaaaatccaacaatgcaatgacattctgtgccagccaggctgtggggtgcgtccatggtgtagcactggtggagggcaccctggcacaggccaccggaatgataaactcatgtgcctgctgacacagcaagtccacttctgggaatccctgcctgaatatttgcatgtttacagtgtgaactgactaacgaataaaaaaatgtggctcagcctggacgtggtggctcatgcctgtaatcccagcactttgggggaccaaggtgggcggatcacgaggtcaggagtaccagaccagcctggccaacatggtgaaaccccgtctccactaaaaatacaaaaattagctgggcatggtggcacgtgcctgtaatcccagctactagggaggctg

SEQ ID NO: 67298 - DNA, 1081 bp, Homo sapiens
aggtgagtgaacgtgtgtgtgcacgcgcgcgtgtgcagccgcgatcagctgtgcgtccctgggtggccgtccgggatcctgacccgcgagtgtgtagccgcgcccccaccccccgcggcgggcactgcgcgtgcgcgctccggcggcgggacccacccgcgcgcccgccatcgcccctttaagagctgcgcccgcgggcggcgtagaggcagcgggcgggggcgcgcgcggcgggaggaggggagcgcgcgtttcccggaacagcccgcgcggaggaaagggaggaaaaaaagccaccctgcggccggggccggagctggagccgccgctgccgccgccgccgcggccgtctggagctcccccgcgcggacgatgcctgccgtgcccgcctggggctcggggcggtgaggcccggggcgcggggtagctatggcgacggcaagcgcggcccgcggcgccgcctgacaggtgtgggccccggcggcggcggcgtggagcagcatgtacgccaaggggggcaagggttcggccgtgccctccgacagccaggcccgcgagaagtgagtgcggggccgggggcggggctcggcgtccgcgctcttccgtgggctccggcgcgggcgggcaccgcgcggggcacgtgggcgcgggcggcggggagcgcgagcctgagcgcgctcgaggggtcgcgagattggcgggggcgcgcgacccccgaggggcacgagattggcggggggcgcgcgagaccctgaggggtcgccggagttgagggttggcgggcgacccgaggggcgctagacgggagtggacgggcgagaccggagcggctccaggggtcgcgagattggcgggggcgcgcgaaacccgagggcgcgagatttgagggggcgcgcgagatccccgagcgggtctcgggggtcgcgaggcctcctcgagacgtgggtgcgcgaggctgcggacgcatggggatcgaggtcagcgaagttttccgggacgaacaagagtgtcggctcggggaccccagtcgcctggggtagagctggagagcggctggaggggcgcgccgccacctgtctgc

SEQ ID NO: 67299 - DNA, 632 bp, Homo sapiens
actgtacactttgctgctggagggacatagagggatagcagaggggatgactgtgtggcaggtgcaagggctgagcccctcgcacctggcaactgtgggctgctggacctgggcgtgccctccaggtggtgagcagagctcagcgtgcacctgcgtgtccagggcaaagccctgcaggacacagagcacccaggcatcaccacagtcacattcttggcaaacagcggacaggtcagggaactgcagggccaaagcctgcacaaccggtcagagcttcccccaggccaggcccttgctgcctccactgactgcatgtcaaaggtcactaagctgaaaacaaatgacccctggcttgacctgagtctctggggcatcccagtctctggccagacaggacaaagacaagatggccagcagggcctgcatctcttgctgctgacaaagttccacgcccttggtctgtgccccacccagatcatcccgtcctttccactagacactgaattgcacgctccacaaggcagctccaggacagggccagccagaggagcccatgggccaccccaatcggccatccatgagcaaagtgtccatgatgacgctcagcccttcgccccttcaggggcctgccc

SEQ ID NO: 67300 - DNA, 660 bp, Homo sapiens
gtgcttggggcttacagcccagggcctcaacatcatggacaacccgggctccctggccatacaacatgtccacccggactcagtgttgaccaggaagaccaacccctgcacccacatctggggtttcactcagagggaacccctctgctcagcaaagggaaatcacgtgctttcttcggaaggaggagagagaggaattgaaatgcccccgccttttcttaaagataaaactcaaaaagccatcaaggctgtcgtctgctctgagccatctccctcctccctgaagcccggcaccctactcctgccgtaatgagttcccatgactcctggagctctgcctggactaagaggcggggtgctgcagctctgtaaacaaacagcactgtgcttcccactgtcaaggcctgttggcttctcaactgctgaaaccgtttccaagttgatgctgagtggccagagctttcctgcagtgctgggtcgctggcaacagggcctgtgaggctcatttcctgcctgttgccggctgtggtggcgttgggcaggagctggctggtcaggtgagggtgggggcagcctccagagacagacatgggccttgccctaggctgcatgcccatcttcagggagcctgttgatctccctgacaggtgaaggtcccca

SEQ ID NO: 67301 - DNA, 1551 bp, Homo sapiens
caggcctcaaagctgatgctcgggagagtgtcgtgctgctggcgaaaaggggaagacacacagagggcatggcggttggcgtccttcaggatgcaggggtgagaaggtggggagagtgttaggaaaggtttcccggagccagacaccgaggttctcacaggccctgcctcccctagcacacgaagcgctatggagccctctgattaacgggctgttttgctgctggttaatggttaccagcccgggaccgtggggaagccagcgggatgggagcagcccaggaatgcggccactttcttcgcactagccaagagcttgcccgggttctgggacaaggtttgaaacgcagcccctgctcagccttctgaatggggtcttggttgctccttggggactgctcatgggcccagtgacccacgtaccagtgggctgccatggggccctcagatggcccacgcacagcaggtctgggtatgtctgaggtcagtcccggctccaggttatagggtgtggggaggagttgccataaacctaagcactagtccatgctcacagacacagagcccaggccacaggggctcatcctaggcgcttccgcagggcccaaaggcccgctctgcccttcccgctgacctgaccatggccaccagggggcgttgcttccaccaccgctcaagtccctgccagagtccgttcatctcttccctttgaaatccatcccaaattggggcctgctgcactccccacctgaccccagacaggagcttgggcgatgctggctgactggatccatgaaggaacaccatccagggggcgttccgacaacgatgagcccagtgcaggctctgtggcaggctgccggcagcatggcccaggaccaagagccccaaagctaacagcccactaaagtgaagcagctggccaggcgcggtggctcccgcctataatcccagcactttgggaggctgaggtgggtggatcacctgaggtcaggagttcgagaccagcctggccaacatggcaaaaccctgtctctagaaggaggttagctgtgtagccaccccaggtctctctcagtgacttgggcccctgctacacatgttattaggctccaggtcaaggcacatggcatgctgcacgcaaggacaccactgtgtgcttcggccatggccaggctgcagtgtgtcatctgacgggctcgctgagatgggggttggggatgaggggcccccccactgctcaggttggggtagaggggcatgggtggtcaggcagcagcagaaggcacagagtgactgctgtaggacaccagagggcactgtggggctgctctggcagcaagcccaggccagcccgcccctgcccccaacctctgacccctgagagaatgtcctggggaaggtaaaaaggaggtggccaaagggtgaccacaagacccaactggggctgatggaagtgtggggttgtgtcaactggctaggctgcagcccctggagattcattattccatgacatcccgtctaggggtgccctggaggtactctgtggaca

SEQ ID NO: 67302 - DNA, 1505 bp, Homo sapiens
cgtggtgtcatggccgaacccttgtcaggggggccaagcgcctcgttacctcatctatgaagcaggacagagggtcaggaacagactgtagcacaggtgatttccctgctgccttagaagctttggggttggcctcaggctgcattaattaaataacggggtaactcagtagcacatgacacctgcagggtactgcccatctcacacccaagaacacccagcaggggagagccatgcctcaggccaccgcctgcccagtctctgtagaccctctgaggggtcatcacccccacaagtcctctcaggccctcgagtggcaaaaatccaactttcattacccagcatgaggtatggaactgggagctcctgagatacaaagtcacccccgctgctgtacttcaggccagggccccaggtgggagctggggagcctggtagggccgccacagctggcctgacacagtcagcaggtcagctgggtcttcaaggccggacaggcaggcactgagctgtgccgaggctggtgctccccagacccaactggacttcagaccctgactcggagaacagacctcaacacagcagggcagtgatgcctgcgccctgcggtcacttggcctgggcgcccactggggctactgaacacagactgggagactcctgtaggcagctccccctcaatgaggacactcctgtaaagacagcaatgcctttgggaaaagggtcgagggtgcagagcctgggaggcagtgagagtcctcaatgctgagacagaggaaagggtgaggaggaacctctccagggccagaatcccctgatcctctcccctccggcaaagagcacttccggggatgaagcaacaggaagtggcttacgaaatccacctccaggccgagtgaccagtttacaggaagtgtggtgggtgaatcttccccagggcacgaggcaatgtctggagccatttctggtcctcaccactgagggcggggacagtccccaccatctggctcgggggaggccagggatgctgctcagcacactgcaggcaacacagaacctcctgccccaaatgtcaagcagtgcaggggctgagaagccctgggctgaccctgccacgggaagcgaccatcagagcagaaagcagaaaaatctatgggaaaaaagacctgctcccttcaacaaatataaaatataaatggaaaagttacgggtgaagaagaacgtatctgattgttggccaggcatggtacctcacacctgtaatcccagcattttgggaggctgaggcaggtggactgcttgaggtcaggagttcaagaccagcctgaccaacatggtgaaactccatctctactaaaaatacaaaaattagccaggcatggtggcatacgcctataatcctagctactcgggagcctgaggcaggagaactgcttgaacccggtaggcggaggttgcagtgagctgagatcaagccactgcactccagcctgcacgacagagtg

SEQ ID NO: 67303 - DNA, 698 bp, Homo sapiens
ggggttactccctccttatggatggggaaactgaggctcaggtgaggccatggctgcgccccacaaaagcacctttcagtactactgggccaaacattagaacttgataccagagctgtgacggccatgcctgagtgtgtgggcgtggttgtgaaaagagccacccgtgagccccaagaggtggccgggccactgcctcatccagaaaactcccctgcatgcaggaagagctcaagggctgctgtgcagagacactgggtgaggaaagagctcaaaatctccctgagggatgactcaggagacagagacctgaccagactcagcctcacactgcacccagagtgcttcctctacttcctgtggtaacagagcctgtcttcctgggctcgagaataaataaaaccaggtcaagtgcaggtaacaacttttttttttttttaccttattagaaacatatagtttggcaggagctacagagatcatgggttggaggcgtggagtagggttggggtttggcacaagtccaggcacaggcccttccccagtgtcccctgccagcaggtggggccagctccaggctgctgctgtccactcaggtggtgcggactgggggaggtccttgccaaggccaggcgggtagcacaggaacctgtggctgtggcccgtcataccaagtcttccactatgggcaaacatca

SEQ ID NO: 67304 - DNA, 1435 bp, Homo sapiens
tcacacgtgggggcctggctgctgcctggccaaggttaaggacacacactctggccagacgctaggtctgaccccactcctatccatgtggacaacccgctcactcacatccccccgcctgatccaaggggctcactgaagcactgactcctcggcatccagggaggcctcgcctggtggctgcagcgtgcagaggatctgcgggctgtcacggcggatgcaggggtcaactgtgctggcacctctgctaagcatgcatcacttcattttggcctcctcagccacttgtgccaacaggccagggacggcacagagaggctggaggggtgaggctgaggaggaggggaggtgggcaaagggcatctgtcagccatctacctaagggtgtgctcactgacgcacagaggccactcctgctctgtttttccaaagcaatctgtgactctcgggattacccacatctcaagtcacatcctgattgaaatccatgacgcgtggcttgctttgctaaatttcccctacattttctacagagctcagcattcttcaactcccatctgaaattgccatgtacatctcatccctgtcacgttcatctctgcctgggaggaaggggaagtggctacagactccagaacctgcagcctgggtccggtcatcagagcagtgatgctctctgtcattggtcagcagaggttaggcccacctgtcaggcctcagaagagcctggcaccgcccacagggtggatcaacgggttaataagtcacagcagaaaacctgaggctcgactttaaataaacagaactctcccagctgcatccctgccaaggcccgagagtgacactggcacatgagctatatctccccccaccaacacaccccatgggctgtcatgagaaacactgcatataccagaacccatttactctgggacactctccacggagccctgccaccacctgtccagtggacagggcctgagggacacaaagcccccacagccctgagcacccgaggagccacctggcctggggatgtgtgatgcctgcgcacaggaggctctcagcccacagctccagcagaggaaaaaactcttgccttgtggagacaacccaggctttgactattctgggctgccagggctgtgggagcagcaggtcaaggttcaggacatctcaccctcctgccatcatggccaaacctcaggcgactgagaacgatgggcaacttctgtgtgccagagggcagtgacataccaggacatcaggggaacacaagccactgtcccgtagcccccactcctctcccatcctctcctcccctcccctctcctctgtggtgtgctttcttctgcatctgccacagctcacccaacagcaaatgcaatcccaactagttaggctcttgttaggactgaagatagcttttgctatt

SEQ ID NO: 67305 - DNA, 1178 bp, Homo sapiens
aaaaaaagcaaagtgacaaaataaccacatgtcatggccatctctgtcattcactgcacctgcaggtcacaggccatttggatgcattgttctacatttccctttggactctgtggctgactacacaggtgagattgaagacaaccctgtccatgagattcagagaccaaggagaaagtgtaacaactgaattcatcaaggcagaaagcacaacggggagcaagaccctaaaacaaaggacacagaagaggccaaacccaaaatgtgcagtatcaatcacaagtctgtgccctgccaggtgccttaaacaaggctgatgccccctgagaagcagacctctgaaaactagggtctcttccctgggcagctgcttcgagcccagggctacgtggagcagagaggcaatcctgtttgtcaggctggcgggttcctccctcaaggtctcccagtcgggatgtcacaatccgggtgtgatgtcaaaactgcttcaaaggtgatgaactacggccttggccgtgagtcaacagaggggtgggtttccgagtgagcgctgcctgctgtttacacacaatcacagccacggcaaccagctgaaagcacagtcaagggtcacgatgccgagtgcagagctcagtccctcacacacactcttgcctgcctcctgcagagactgccagctcgggcccacagactcaagctggcttgtcctcttctagcaccttctgggagaatccacccagaaccaccaaatgctcaccttgaaacacacaggcaaaccataccctggtgcaccagtgggccactcctgatgcctcctggcagcccacctgttccaccccagcccatccagcggccacagtccttcagaggtggcagagcccaggccatgacacttggattctgagttctcagctacttcccagctgggagatcctgcctggtgattcagcctcctccagagtctccacccatatcctcacctaagaaatgggaactgctcccaccacggggaagatgggatgaaatgcagtactgtgggtggcacagccagcactggcggggtggggcaccctccacaggtgtaggtgcccatcacctttccactttcttgggggagggggtccagcatagccagcaaccggaggaatctgctcagtcactcacgtcaccaaggttcg

SEQ ID NO: 67306 - DNA, 3396 bp, Homo sapiens
tagccgggtgtggtggcacgtgcctgtagtcccagctactcgggaggctgaggcaggagaatcgcttgaacccgggaggcagaagctgcagtgagccgggatcgcgccacctcaatgaagcctgggcagcagagtgaaactccatctcaaaaaaaaaaaaaaaaaagaaagaaagaaagaaagaaagtggccaagccacttaaattaccagacagctttttgagaaaaatccaagtttgaatcaccccaaaatataatccagccagccaagttgctctggatggcttggaaaagttcttctaggaagcccctcctggctggtcaacacactgccctacacagctgggctccgagccagaggagtttaacagtccacagttaccttcaccctaacatgaggaagatccagcttagagaggggatgtaaccaataccctaaagtaaaaatagcagtgtgacagcatgaggtggacacacaggcggaccttctggactgaaaagcaagcgagggcagcatcagagagaaggcggagctcctggttcctaaagcacagaagacagtggtgaccaggtaccaagtccatcgtagttatatgactcacgagctctcccccagctgtttctaggaaagcctgccttcctgcaggacaagtcagaatcgctcagggaaaaagacccagggccagaattctaccaggaagagaggctctggctggtcatgggccagcagctgctgtcgctgccactgtctcctcctcacctgcaggggcgccttagcctcatcttggggagtctttttgacaaggtgcgaacttgctctttcaaaaaaaaatgaaatcctcattccatgaaggggaaaactgcgacaccgggacagggaggaaattgcccaaagacatgggaagaagcacggaaggggtgggcaccgggagagtggtggaaacgaaacagggggaagaaattctcggcttagctaatggagctgaacaagttcggggcaggaagaaagccacattccttcctagttagtctccctcctcccccgcccgcggcacccccccacccccaccatcaacagtatacacaaacacacacacacgcagggagcagggctctctgagcccgagactagacccacccccactccctttagggcaatgaagcccccaatttccagaaaaggagttacaaggttcctaaaccacttcccctcgggacctgaccactggtcatctgcaacttctgacccagcacagacggggggagggggggccatgacacaaacagaaatgaaaaaggcaggtttctgaccacggccccagatgcgccccaaagtcaggcccaagagaacatacacagcagcctcccctccccaccaccagccaggtggcagaaccgaaacgcctcaaacttcccccagatgggcccaaatcggcctctgagaagttccagagtcagcggccagatgtggtagccagagcttcctcctgggtggcagggatcccctacatgtgccctgaggataacatcacagccgcccccaacacttccactctccaaggaacctctctccggagagagagggtcacctgggggtaaggggagcagaaagctgggacaagctgtcagtttctgcccaaactccccgtcccaagaaccaaagtggcccaacctgagtggcttcatcggaacgcgtcaaagccagcccccagctgcaaagccttccacccagacagaacagacccccacaagtgcctcgctgaccaccccctgccgggcacccagacgatcgctgcttcccaggaggacagacacagtcacccccaccaacggcgctgccccggccccagatggaaaagcccccagcttccccctatcacggtgccgggaccgtgcggcccaccgcctcctcgccccgccgccaggtgcgcaaactggaccctgcccaggtgcccagcaggccagaaaggccccggacgccgccaggtgccgacaccgacgccccccgggcccggcgcgcgagtctgggcccctcagcagccccgggccacccgcctgtattgcctcctagtgctgagaaggaacgcggttctcagcgctccaggccggactggcgcccactccgcgccccgccggcccagggacccgcgagcagcaccacagacctagcgtctccgagcccggacgcctcagtgaggggagcgcgaggccggcccgcgtccggacgttccccactggcgcgccgggcgccatgccactcacctgtctggcgcggtagctctcgaaggccctcagggcactgtcggtgagcttcacgtggaacaccgacaccttgctgccgtcgctaacccgcccgcacgacagcccgtagctcctatcctccttcagcgccgccatcttgcgaccatctctcccccgcgcccccttcccggctccagcgccgccacgccggccacgccccgccccgccgcccgctgacgcgctgcattattcatgagacgcggctggccacgccccccgagtccgaccaaaccaacagtcgccgccacaccggcaggcagcgcactacattattcaggagacgcgcctggccacgccccatgagggccccacaaggcccacagtcaacgccccaagttgttgcatattcataaggcacttatggccccgcctcttcaggccctaggggtggccacttccgtgaacgaactccgcctcaacacgcgcacccctccaggccccgcctccatagtattatacataaccctgactcagccagccaggcgcgtcaaagccccgcccctacagccgctgacgtgatgcattatttatgagatctctacagtcttccgtctttggcttctgtggaaagccgcagagagggcgtggaggggcggagccggctcgaaacacgtgggtgggtaggccccgccgcgggccgggagggtgggcgtggctatgtaaacggagcgcgcgcgttggacgctgggttggacacataaggcatcccttaggcggggtggatgggacttccacccagggaaggtgctggaccggtaggtggaagaggagctggtaaactttttcttatgagatgagtacttttaataggataaaatcctacatccccacagtccctgagcgatggtgcagtccagcttcattttcctattttaatttttttttgaggggtcttgctgtgttgcccaggctggagtgcaatggcgccatcatggctcactgcaccctcgacctcctgaactcaaactgatcctccttgtctgggtctgctgaaatgctaggattacaggagtgagccaccaagcccagacttccattttcttttcttttctttttttttttttttgagacggagtcttgctcatcagcccagac

SEQ ID NO: 67307 - DNA, 510 bp, Homo sapiens
cctgtctatggtcaccccatccccatatccacttgcattctacaacactccactggtctgggatataccacgagtctgtaacaggccctagcttaggggcagttggggatctacccatattctgggctattctagaatattctgagtctgaggctctctggggctggaagtttctggcacggagtggacacctttgcaggggagatggtggagatctgacccaggcggtcacctttggcgctggaggtgatagccttgatggcgaggtcgtaggagttggcggccaggacgaagtccgcccgctggtagtgggcgttgccgcactcccgcttccggttggccagggccacgcgctcctgccccgtgagcatctccaggtcaggcccgtccacagccgtcttcagggtcacctccaggcacagggccgcgtgcggggggatgtatgggctcctgctagttgggtgggagcaggcaggggcagcactcagacctggtgacccctaaacccgc

SEQ ID NO: 67308 - DNA, 2196 bp, Homo sapiens
caggcctcagtttcctcatctatacagtgggtgtaacaacaaccccagcttgttgggagaaattaacccatgcatcaagcccttggcatcaggctcaaatagtgttagccattattagagctaattattatttaatgtttacaaatactccaggaagtagggaagattcccctcaacattttgcagaacaggaaacaggccagaggggcaaaggcatttgcccaaggtcacagagaaagccaaaggccaaaggaggatttgaacctggggcttcaggccctgtggctttgcctgattataagctgagcgaagggtgctgggatttttgtggagaggacagcctccgaggccttagggaagccatttttagagcctctaaggccactgggggaaattgaatcttttaccagggcctcccacctccagcctcttctccaaaggggagaccctccccaaaagcaccaactgtaatcacccagaaaccccaagcgttttttccttccacactctgaatctaacactatcccccacaaccccaacatcagggaccctggcccaaatccttccccaggagaccatcctcctctcatcaggcctcggtcccaccccctcaaagcagcctcctttccaggagtggtcgaggtcccaccacattctacagcctcttccttgccccagacctcctgaaccaataaccaacccctccgtcccccaggccccaagctcagaagagtgtggcacagccatcaaaccagcccgccgcatcccctccctaaccctcacctgcctgctcctcccgggctcggagccccactttgagagaccctcccagcccccacccccataattccccgcgcccgcacaattcggcctcccctcccaccccccaccccaaccaccaccgcccccagcacgggccagctccccccacagccgctccgtctcgccgtaaacactccagtgtccccagacgcccccccctttccgatcccataacaccccacgctctcctgacgccccacagccccggccgggccctcagtcaagccgcgacccaggcccccaacgacccacgcctgtctgacgccaccagtctggggcacccgacccccgcacgcctcgggcgcccctggccctgcacgcctccatcgggacccccccactggatcccctttgcccccagtgacccccatccctggccacccccgcccggccgcgccccctcgggcacccccgacccccgtgcccccccggctcgccacccccgcggcccctcgccccgcccatcggccgcagcccccggcgcgctagcccccggaccagcctaggccagggcagcggcccggccggcacggcgcccccagcaccccaggacacttgcctctggctccgggacccccacttggggtcctgcgcccccctccccgcccccagccgcggccgccgcgcctcgggaaccaggttcggccgcttggccccgcccctgccgtgcccattggccgccgctgccgcgactgccgcacccgttggctcatgcagacgtccgtcccgggcgttggcacctcccccttcctgcttggccccgcggggcgttcttaaagggaccgaagcctcccggctgctggggctggggcgggggctggggcgggggctggggcgggggctggggcgggggcgggggaccctgggctggaccccaacacgggtcagtatcgcgcagcctgtgcgactcctgcctctcctctgagcttcatcctgaccatctgcgaaatggggataaacacccccatctatgcactctcaccttgggggctgctgggggcacagtccactctaaatgttatttccttaaagagttcaagcttgacgggcagggcagctctggggttgctgaatgacccatcctgaagccttagttacagaagtgaacctgagggcctgaggaggagtgacgtgcccaaaggcatacagaaacctccctcccatcccccacacagtttaatgtctagaaggttgcctggtgcatactggaggcgctcgattactgctgcgcaggcgactgagccagcagggccactgggaggagttcctcctctatgcactgtctgctggagggtgataaggtccccatggctcgggaagaaggtggcatccttgattagctaagtttttgtggatcttgttttgaaaccggga

SEQ ID NO: 67309 - DNA, 1989 bp, Homo sapiens
gaggttgcggtgagccgagatcgcgccattgcactacagcctgggcaacgagagcgaaactccgtctcaaaaaaaaaaaaaaaaaaaatcctgagtcccgcttgacaccttttgtcaggcaccaccacctttctgggcgaatgcggtagtaccgtctgctctccctgctgctgtcctgaaatccattcaggcacagcggccgagagctttataataaccgattccaggtgttaggtgctttcccagccccgactcctgcgtcctggacccgcagtcctctgcttaatacctttgctttattagaaaacattctcctctactccgttcagctattcgctgagggcccgccaaccgccagcggttgtcagtggcctagaggcagcggacgcaaacacggggagaggtgcaatcgtctcaagtgactcggcgggcggggcccacaaccggaagcgggtgggcgaccttcacccacgtgcgctgcggcttcgttcgccagcatccaagatggcggcagggcggggcccaaggcgcggcgcgaattgtgacgcaggcgtccggcgtgctccgtgcgcaagcgctttcggcggcgattaggtggtttccggttccgctatcttctttttcttcagcgaggcggccgagctggttggtggcggcggtcgtgcgggttcgcgccgggccgagagcgggttgggggctgcgggaggctgcaggggcctgggcggcagaagaggcggccctgagctggctcatgcgggccagtctcggcagggtggctgggcagggctcgcgaggccacggctcggagcccagaccggggcccaggaggcgagcgccgttttggagaggagcctgcctgctctgcctgccagcgtgaccccacgaggcctcgggcgggaagaggtcctcggggcagatccgagttaatgagagaggggtattgagcgtgtagcgttaactctgccagtcactgcgtcagtcgctttggaaatactaaatttctcgagctgagtcttcatacctggctccattactacgtctgtaaggaggagctggtggtagtgtctgctttttagacttttctttagactatttgtatttttttcagatggagtcttgctctgtcgcctaagctggagttcagtggtgcggtctcggctcactgcaatctccacctcccgggctcgagcgattcttctgcctcagcctcccgagtagctgggattataggcgcctgccaccacgcccagttgatttttgtagttttagtagagacggagtttcaccatgttagccaggctcatcttgaactcttgacctcaaatgatccgtctgcctcggccttccaaagtgctgggattacaggcatgagcccctgcgcccggtcgattctttgtctttttaagtcaacttttatatgtgaacaatgcttggcaggtggttggtagatactaagtgatgttcgtggtttggggtcaaggcaagaagtggggtctggagagttttggtgtaattgagaaggaagctaagagtgttgggtgctccagcttggagttagagaggagagaggctgcgacaggaaggcatgtgtgttgtaggggatggcttcccatccaggctggcagcaggagcagcctgtgcagatcaggacctggctgccgtggaagagggtgggaccgccttcagggaagatggatctagcaagatgatgccaaagggtacttattccatcaggagatactgacgagtccttccgccgctaaacctaaggagaataaccacagtctgtgttcctgaagagcacccgtgcggtcaggagggtggaggacatgtggtctttagttccaggacatgtttagactacaggccagggtgtgtgagaagcctagcagggccaggcttggaggagtgaaaggaagacaggtactggggcaggaccagttggacttggtgcaggcaaagggatagcaactgtggtgtaggcacctg

SEQ ID NO: 67310 - DNA, 2187 bp, Homo sapiens
agctccaaggcctcctctgtactttgaggtcgttctggcccctgctatgctccaggctcagggctattacacaagacacccaattcaactcggtgggctgttgacaccgtccctgtcactgaatcttgtcttcacccctgtgattctctgaagagccagtgaatctctgttaatgttggtggagttccagccactgcactttttttgaggcagactcactgtggctccggctggagtgcagtggcatggtcatagctcatggcagcccccaactcccgggctcatgtaatcctcccacctcagcctcccgagtagctgggactggaggcgggagccaccatgtcgggctaattggtttttctgtagagatcgggcctccctaggttgcccaggcttacttaacactcttgaacgtcaaaacccacgctcagtacccgcttcaagtggaagtcggtgttgagatacaagcataggaacgaactcaaggctaacagctgttctgtattcagagccgcacaatcaaggaaaaacacgatcggaggcgggccctggacgggaacaagaagggtgggcttgactgggcggcccgcggtcttggttcccctttcttccttctggctggccggccgcagggtagggggtccgtggacctcccggcctgtagggggcgtcgggcgcagcggaagggcctgctccggagcctggccagggctgcgcagtcatgatcaccgagaccgcggcggagcctacggtccctgcagtgcctgctgctgaggaggccaccgaagctcggggacgcgaggagccggcgtggccctgggtgagcccaggcccaagcgggaacgggcgcggggcgggcggcgcagacccaggggcgcgggcttcatgccccagccgtgccccctgtcccgcagaaagacgccccgatccggacgctggtgcagcgcatccaccagctgcaggctgagcgcgcgcagggcttccgccgactggaggagtgagtgggggcgcggaggggctcagggttcggtcccccgcccgctccgggcgtgggcgtgttctcggcgggcgtgcctggaggaggagctgggtccttgtgtggctgcagagtcagatggggcggggatttcggggcaccgggtcctcaccttcacgaaaaaggccccacagcacgtccccactacccgacgactcactcttcgtggcttctctctcctccccaagagcaggggtgggcctgtctcgcgttcccctgcgggagtcaggaagcgtccttcctacctaccagtcctcccctctggtgtctggggacacttcctgggggcctttcaggtggttggcgccggtgcagggcctgagagcctgggggcgcggcctcagggtccccacatgccgcagaggccaccgccagtacctgcgcagcggccctgactacgacttcgcgcgctaccggagcacagtgcacggggtgacccaggccttcgccgccgcctcgcgggaggtgctggcggtggaagcagagctgggcgggcctcgcaggcagccgctgctcgccggccacgtgcgcagcctgcaggagctggagcagacgcggctgggcacggtgaggccaccaccccttccccgccgtgtctctaggaccctggccggctcctctcatgacgcacccctggttggggggtggtcccagtatcccatacacagacctcaccccttcctgtcccaccccaatcctctattaaggcttcacttggggattctcggaccttgccctctgctgttcatccccaatttttttcccaagttttgtccttattcccagagcactcccgctttctcccagctccgcctaaatgctattccaagatgcccagatcccgccccaacaatgctccacccactctggttgttccgcgtctagggtcccaccctcaacctcccgtagatacaggcgaggggggtcccaggccacgcctcctccgtattattcctccatcacagctttagttctttgcctatttctctcttgcgatccgcctgctcggccctgcaaccgtgtgtgactggaattcctaggccacgccccccatgagcgacccgtctcagcgtctctttggcctttttctttctggtgttttttttttttttttttttttttaagacaggctcttgctctcttgctctctc

SEQ ID NO: 67311 - DNA, 1321 bp, Homo sapiens
cccacctatccacagacaatacgccctctcagcccagaaccgcttccctttcagacttggttccgcccctcacgccagggtcccgccccaatccggcacccctagcccaggccccgccctggacccacctctctgcatagcaggcccctccctttatcccagacccgccccggccctccgtagaccacgcccctccgattccgggcccgccccaatccttggtttctggtcccggccccgcccctccgcagacctggccccgccccgccccccgcgtctcggtttcccgggcctgcgcgcgcggctcccgtcactcgaacgcgcgacggcggggggaagatggcggagtccggcggtagcagcggtggtgctggtggcggcggcgctttcggcgcgggcccgggccccgagcgcccgaacaggtgagacccggcccgcaggatagacctgcacctgtcttggagcccaggaaacctgtgggcagtcttgggcgtcctgaggggttgaggggaggcctggcacggctcgagggtctttcgctgagaatttggactttacggggccgtggggtactggaggagccgagggctactgagggggtggctggaggggggctgggtgccccaggacctcgaggcgtctgcaggcggccctagggacctgagaatcctgggggtctgaagggaaaccgaggggctcttgactgtggtgggccgtggggcaactggggatgccaaagggcctgggcagcagagagggcctgagcaggggccatgccatggccagtctgagggtggtgaggtgtcttgggggctctgaggaaggggctaaggcccaaggcatcctgggaggtgctgaagggccccaaggtggctaaaggtggtcctgagagcgtgctgaggggcgctggaaggagtagagactgtgggaggctctgggtgggggacttaggtgaatctgggagtctgagatggggaggctgagggggcctggggtgggtctagggaacctgaggggggtgagagaactccagggggtttataaagaacatacagagggttcttctttggggctcctcccttccatccccatggggtccaaatccacatccccaacaggctaaaggacttacagaaaggtcttgccctcagacaaggggacagaattcacccctttggtcagagggaggccccctttccccatggcccagtcctgacatggattgcttgaacgtccaggtttgcatgacaattagttatcatcaataactaatgatatgtgtgtgcatgcattgtattggattgtcagagggaaagaacac

SEQ ID NO: 67312 - DNA, 1242 bp, Homo sapiens
tctgggcgacaagggcaaaactcggtctcaagggaaaaaaaaaaaaaaaaaagaaagtcgttaagggcaacagctaggtttatggactgagagagccgattgcagggttcaggtcttagctaagataactttccgcctccctgtctgtggtggctgcaggagcctccctccctaatgttctgtggctggccactggtcttatttaccgcatcacatttacctccatctgaaaagttcttggttatttgtgtgctatgtctgccccctctctgactgtacactccataagggcagggatcacctctgcttgttcacgcctgtactccagtttgcctggcacatagtaggtgctcagtaaatattccttgaatgaatgaatgcatgagtgaccaacgccctagtctgttttcagagctcttagtccaaacccaggttcaacttggggtgccaccaatccttgcgggggggggtgcctggccccacccttgtgaattgggaggatctgggtcaggccgtctccctcttgggggctccagtgccccagccgatccgcggtccttgtccaacagcccagaggccgctgtccagcgggccaggaggcggatcactgcgtcggcgttgaaatttccactcgcgctccaccgcccttcccgcgggccccgagcgcgcgcctgggcgcgcgcatgcgccttcgcccccgcgccgcgcgccgctcctgtgcgcctgcgccgcgctcacgaccgccggcgcgcctgcgcactgctcgccgcccgtgggcccagccggcgcttgcgcggtggcacgggcgagtgggggggcgaggaggtggaggaggaggaggaggaggaggaggtggcggcgagaagatggcgacttcgaacaatccgcggaaattcagcgagaagatcgcgctgcacaatcagaagcaggcggaggagacggcggccttcgaggaggtcatgaaggacctgagcctgacgcgggccgcgcgggtaagggggctgcccgcgccgacccttcagggccggcggagggagggagggggcgcgtgtccggcgcgtgcacggggcggggtgggggggggcgcggcgggggcggggcgcgcgcggcgggggcggggcttggcacggcccgagggggacaggtgtccccacgccccgggcgtcgtgggcgggacaggtgaccccacaaaatccatacctgatggggtacaggtgccctgcatcactgctccccggagga

SEQ ID NO: 67313 - DNA, 2033 bp, Homo sapiens
gcacagggagcatctactatgtgcgaggcaccctccattttacagatggggaaactgagttccaagcagcttttgccaggagtgggagcgcaccgtccctgcccagtctctccagttgggcgttccgagaccacctatgtagggtattcggctagcgctcaattaaaccgaaacaccgtcgcagcgaccacaggtgcagaccaccaagtccacaccgccagccgcccgggcgtccccaattagcagttggggcgggaccaagtcctcgagctgccgccgcagcggcggttgaaagccccaccccctgcgcgtgcgcggtgcgcgtcccgtcttcctgctgggcaccaggcgcccgcgaagagcgcgcgcgcttccgccggcgtcgggctcgcgcacgcgcacggcgacggcggcggtggcggcagttcctgctctaggctgcgagcggctggcggcttcgaggggagctgaggcgcggaggggctcggcggcagcggcggcggctcggcactgttacctctcggtccggctggcgccggggcgcgcggtttggtcctttccgggcgcgcgggggcgacagcggcagcgacccgaggcctgcggcctaggcctcagcgcggcggcgggctcgagtgcagcgcggaaccggcccgagggccctacccggaggcaccatgagcgtggaggcgtacgggcccagctcgcagactctcactttcctggacacggaggaggccgagctgcttggcgccgacacacagggctccgagttcgagttcaccgactttactcttcctagccagacgcagacgccccccggcggccccggcggcccgggcggtggcggcgcgggaggcccgggcggcgcgggcgcgggcgctgcggcgggacagctcgacgcgcaggtgagcggcacatggcggtgccggaagcccgggcccggcctcggcgcctgagacctgccccgaactcgcctcgggcccggcctgtgtttggccggagtcccccatcgcggccgggcctggggcgatctgccccgggtcccctactctggctcggcctgagcttacctgccccaggtcctgcaatctgcccgggcctggcctgatctgccccgggtcccccgctccggccgcgacctggctgagttccttcggcccccaactcctgggccgggcagacttgcctcgagtcctccacttcgttcgggaccgagctaacctgaccctgttcctttacgccagctgggtttgctccccctcctgggcccgggctgacctgccttgtgtcccacaatcagtctggcctggagtaacctgccccctgacttatctgagttcttccattccatccgggctagggtgacctgccctggtccctctttcgcaggtctcggtattctgcctcgagttctcctacgacctgggccgggtcttgctcaggccggagcttgagtgacttccctcagtccctttccgggagtatccagggtgacctgccctaatcctgtctctggcctggtccgggggtcctgcccggtctccccattggtgggtctggccgcctgtcccacctcccatctgtggtcgcagccatctgggcaccccacctttcacagtcacggagcgtaggttcgactttccccatgcataggggcgctggccagcggaaggttgaggcagagaagaatttttgcctcccatggaggagcacatattggctggctattaagatcattcaggaagcaggttgtattttgttttttcttgcatcgcctgttgctgaaaccgacctgttacataacttcacaactcttgccttggaaaagttgggtttgagttttgttcttccaataagacagcaataatggctttacataaacgagtctgccacgttggaaacttatttttaatgatgtggatgtttagagaaggttacttaggtattttaaatgggggcttgggttgggagaagtatcgggcatgcatttcctggtcctgggcgctgcttgcctggggtgggagaggggctgg

SEQ ID NO: 67314 - DNA, 537 bp, Homo sapiens
acccaaggctgggcggaggtcagtcttgaggccagtgtccccccacccaccccaaggtctcctccctccagaaagctcggcctggacccctcctaatgtccctgtccagggagtcctcttttgccacttccctcccctaccaggctgggggtgggggtcgcttgctgtcctgccctggcaaccagagacggggtctggtttcaaatgaataggcctgggtgtggcttggggaaacccagtcttatcttttccctgggagataagcccaggccaggctcagaggtcaaagggcatgcatccccatccagcgccccttgacctcacagccctgtgccaccgagggacctctgcaccggtcatgcccactgccagggtgcctgtccccctagaacctagcctggcagctcctttttgttgttcgggtgggcacagctcaatggtgacatctgggaggctccggccagccctgctgccacccacccacctccctccctaaatggtgcggccgcctctcatcgcggctgggtgcttggcccc

SEQ ID NO: 67315 - DNA, 2478 bp, Homo sapiens
tcctctttaattcttacaactttgtcacccaggctggagtgcagtggcgcgatctcggttcactgcaacctcggcctccgggttgaagcgattctcctgtctcagcctcccggtagctgagattacaagtgcccgccaccacgcccggctaatttttggtagactcatggtttctccacgttgcccaagctggtctcgaactcctgggcgcatgcgatctgcccgcctcggcctcccaaagcgccagaattacaggcgtttgagccactgcgctgggaaactgtgtttatcattctgagtccagcggaatacagtgcccgtccaaaaaagtgctcaatgaagaatgaatgaatgaatgggtaagctctgggagaaataaccaggctggttgggcagggaaacgtccttctctgaactttagggttctcatccgtaaaatgaggataagcaacagtctccatctcacgggaactgaaggtatggctgaacaaaataggcttattgtcactacagtggcataaacacctcccttactcaaaacactttcaagggcgcagagagaacgctgtacgagtgagcagtaccgtaaactgttactgctctgggttctgtcacgggacagtgactactcctcactgaactgtggaagaggtggcccaaaaaacgcgagaagaaaagagaaagtttttagacgcagaacgcggctcgcggccaccagaaagcgtcctccgcctccgcccccagcgtccccgcgcccctgcgcggccgcaccttcacccgctgcgcctcgtttatgcactgctggtagctgccgatgtagaaggcgttctttacgtcgaacagctcgtctacctccccggagccgccggaggccgggccgggggccggaggcgccatttcgctgtcttctcaccagctcctcttcctgaaagacacgtcagccggaagcaagacacgggcacgctaggaaatgtagtttactttttccgagcggcggcgaagtaagccaatgggaagctccacaataatatgcaagggggcggaaggcgtaagtgcgtcacggagagcatctcgggaattgtagtgtgtttctgcaagccaatgggatccggggaaacatgataaggatgcggtcgaggctgggaataggctgagggagctggagagggtgggaccacgcaggaggcagatccaataaacaggaagatttttctcgtgacgtcgtcggcgcgcgccggaagcgcggatcacacgggcccctacaaggggcccctacaagcggccacaaggatggcaggcttcgcggagctcgggctgtcatcgtggctcgtggaacaatgtcggcagctgggtttgaagcagcccacgcccgtgcagctcggctgcatccccgccatcctggagggtgagtatggcccagggccttccccaagaggcctctccgctcctctcgactcctttcccttctcgcaacctttgcttattccggtcccacgaggcgaggggcaacctcgggcgttacaggagatccggggttccggaggacgactggacagtgttggcatttaggttgcatgactgactcgctttgtgttcgtacgcaagtgatgtaatctctgaaattttcatagtctcagcacagggagggtttgatggatgactagtccgatagtatcgcaaaatcctgcagacctggtactgctatctttattttacaaatagaagttgaggctgtcaaaattgctggtagatccaggactccttggtcctgtgattgctcctctaggagaaggtcttctctctgctcctctagcccaacccagtttcgccattaaagagaggcccacaggaagcctaagatgtgataagtcagggattaaataaacaaatgaaggggtcaacagggagcacaagatgcatatgagggaagggaattctggattccccaaattcacgtgctcctggacggagttagaacgaggtggtaggaagctgtgggcatctcgggtcaaatggatatgggttccagtccagcctgccactcactggcagtgtgtcctgggcaaggtctctgaaacccagctgtccacacatggagggtgttgatgctgctttgtccccaacccaggtcgagactgcttgggctgtgctaagacaggcagtgggaagacagcagcgtttgtccttcccatcttgcagaagctgtctgaggatccctatggcatcttctgcctcgtcctgacacccaccaggtaagcccccagcaggcctcctgggtatgggttaaccagctgtgctctcttgggcaagcacctttccctctctgagcgcccttttcccacgtgtgagatgagcatgaaaatcttgctacccgcttcttaggggtcctgcagaattaaacaagatggccccggtgcagtggctcacacctgtaatcccagcactttgggagctccaggtgagcggatcacttgaggc

SEQ ID NO: 67316 - DNA, 983 bp, Homo sapiens
gacgcgggctctgaccctggaacttccgagattcccgcgacgccccctgtctctgggtccagaacttcgggggacacctcttctgcctcctccaaccccaggtcggtaactccggggactcccttcgtgactcctcctctaactgggtccgggaccccggtcctccgcgttgtcctagactcctaaacttcgaggaccccctgccacccctccagtccctgggtccgggacgtccggacccctcccaccccagtaccccaccccaggtccgcagctttggggacctcttcgcagcctcctccaacgccgggtccagaactttgggaacctcccacgcagtcccctctcagaccctgaatccagaacttcgggacccccgcgctccctccagccctggaacttggggacccctcgcgccgctcccagtcccgggtccgaaacttctggggaacccccacgccctccccttggccctgggacttcgaggcccccgcgctcccagcgcaggctcggcaggccgggctcaccctgccaggtcggcgccccgcgagtgtccaggcgcgagtcgggtgcggcccccgcggcgctgactccgcgctgccgggcgccccgctcgctccctggctcccgggcccgcgccctccgcgccgccctccacgccgcccgtgcctttgtctgcgccgccgccgcccgcgccgcctccggtcccatcgcggccggtcccgacgcggccgccgcccgccccgcctccccgggccgccaaggccgccccgctgcgccccctgccggctttttgcactgggagagggtatgggggaggggataagggggaggggcgggggccgggactggggaagggacggaggattgagggagggggttaggggcggtggagggggagtgggggggggggttgcgtggggtcgggttgggagcagagggtggggacagagagacagacggagagggacatctgggatgag

SEQ ID NO: 67317 - DNA, 1920 bp, Homo sapiens
gacagcccagatttgaacctggcaaaaagggtattcgtgcatccaaagccccgaagaatgagtaaaaagattaagcaacattttggggtccaggggctgcatccttaaccatcaagatatcccgcttcgcaaaacctccaacttcaagagacaacccgtagggtccatttcccatcacgatcaccgcctcccccacccgcctcccccagtcccatccttcagcccttttcccggggcgcccccttgttctctgctggcaaagggcagggttcccgggtcaggtgacccaggttcaaatcacacgattctaagctttctgtgcttccgtttccccacctatggaatgggcagccagtaaaggggctggtgtgggggctgaaccggttctaaagagggcaagggcccgatgcagcgctgggcgccgttatctcctcccgagcgggggccgctccgagttcgggaggaatgaatgaacgactgaaccaatgagcctttgtggacgcggcccgccgtctcccggcctctgcgggcgaggaaatgggggcgccgggcccgggaggccgcagccggccacccaggccaacccggcggggacgcggccgccgccgcagccagagggccgagcctgcgacgccatcacggagcccggggcgggcccccaaggccgagcccgagcttcccaccccgggagccacccaccgacgacgccagggcccgggcctcaccccgagaccaccgcgcgcggagccacccccgccgccgcctcaggctcctcacccgccgccgccgccgcgcgaggcggggacatgcaaatgaaccaacggtctccgcagcgccgcgccgcgcaggcgcaagccgccgccgagtcctggtgcgcaggcgcgggccgccgcggcccggctctcttgcgcaagcgcgctgtccgcttcttctgggcggacgctctggaggcaaaacatttccctgctgggggcggcgaccaccgtgagcgtcccggaaggggcggcaaagacgcctccgtcgcgcacgaggtggcctcgttggctttaccttggttcgcggtcgtccttggttatcgtgagcgtccgcgagtctctgggaggccaagcctaggggcgccacagcgcctgcgcgcgtacggcggccggaaggggctagaggcggctccctgggtgacaaccgcgcgccccacctttccccacgtggccgcgaagaccgggtgagacgctgcggctgccgaggcctgtcccgcgcggagtggggagtgggggtgccgcagggtcgggctggcgcgaccctcgggtacgtggtttggggggaaaaaaaaaatgaaagaattttacagaagccgcctggggacaaaatcctcggcttccctggcattcgctttattttcattcattttatttattcattcagcacctgtgcactgagtgcctgctgcgtgtcgggccccgtcctaggcagtggggacaaggaggctacagggtacaaataaatgagtgaacgatgttgctctagatacaggtaatggtgtgcaaataataacagagtgatgggacgggaaagcagggctgctctttatctagaagtggttttgaaggctgtctcttgagtgctgggaaggatgagaaaggcggggaagaggaacttggaaggcttagatagagaaggtgcggataaggaggctgggttttgttctgagagggttgggaagccactaccgggctttgagcacgtgagtgaggtggagtctaggctctgggagtggcaggtgacgccgcccttaggggaggctggtgtttgaaccagagtgggtgtggctggtagagggacatgtggatggagtcttttagagtccccagcatgtcatggcacacgtttaattttcttttgagacggagtctttctctgtcgccc

SEQ ID NO: 67318 - DNA, 706 bp, Homo sapiens
ctttttataacctgggactcatttgtacaagggaggcaggttaagtgctaggttttttttaaaaaaattgttactaattattgtagagacagtgtctcgctacgttggccaggctggtcttgaactcctggattcaagtgatcctcccatctcagcctcctgagtagtagctgggagtacaagagcatgccaccactccctgccaagagctggattcttggccagttttcagaagcctgagctgtatttgttttagtattatgaaagcacagagtttgacttttttttttttttgcaacatcgtctgactgtcagccaggctggagtgcaatggcatgatctcggctcactgcaacctccgcctctgtgctcaagtggttctcctacctcggtctccctgattgctgggattacagacgtgagccaccacacctggcccagattttgattttgatatgtactggatttttttttaatgctcacttgtctcatctgtagctaccaggcatcccttagggtttggaagcttccttgcttcctggtctcacaagaccccagcgttacctgccccatgacctgctgggacttggaatcagccattcctccagaagccctggctccttgtttttaaagattttatgtagagacagggcctccccatgttgtccaggctagtgttgaactcctggcctcaagccatcttcct

SEQ ID NO: 67319 - DNA, 1919 bp, Homo sapiens
gatggcaggtagggctggaatgtttaatatgtctgcatttatgtgtgcagcccttcggcagggacactgagttgtctggatctctctctctctctctgtgtgtgtgtgtgtgtgtgtgtgtgtgtgtgtgtgtgtgtcagtcttccacgctatggcctctgaagctcaaagctcctagaatcacaggtctggaagttgccagagctgtaacttgccccacatcacttccactgcaggcccagatcccaggggagggaaccttgcaggggtccagacactgttgctgtggccatgggttcctcttgcctgagctgatgctgaggtttctcccatgtctcccagatgctcagtgacctccaggagtctgtggccagctctcgcccccaggaggtgtcagcatacctcacccgcttctgcgaccagtgcaaacaggacaaggcctgccgcttcctcgcggcccagaagggggcctaccccatcatcttcactgcctggaagctggccactgcaggtgaccagggccttctgctccagtccctcaatgccctgtcggtgctgactgatggacagccagacctcctggatgcccagggcctgcagctcctagtggccacgctgacccagaatgctgatgaggctgacctgacctgctctgggatccgctgtgtgcgtcacgcttgcctgaaacatgaacagaatcggcaagacctggtgaaagctggcgtgctgcctctgctgactggtgccatcacccatcatggccaccacactgacgtggtcagggaagcctgctgggccctgcgtgtcatgaccttcgatgacgacatccgtgtgccctttggccatgcccacaaccatgccaagatgattgtgcaggagaacaaaggcttgaaggtgctcatcgaagccaccaaaggtaagagctgggggccgacacgagccagcgaacaaagtgggcgggtcagatgtgaccagagtgagggtcagggctcaggactgctttaggcacggcaggctcaaggctccactcgcccctcggcttagacctgcctgcatggcagccctcgtgaagagtctccccatgttttctagtggctccaggagaattccaggccagcactcaggggccaggagcaggccacaatcccatctctggagctgtctggggaaggggcttgctgtgtccaactccaggggctgagagtggggaagggggacctccccagagggaaataagaggactcgggggggctggctggcatgcaccatggcagtctcagctggatgtgtacacgcttgatcatattcagccacaaatccttaggcatattcatgtgtctggctccagggtgaccatggtgagccagccctgggaggtcacagtgctgaccgtcagaccctaaagcttctgtcttaacccctacccccatcccatccactgaacccaccagaaaagtcctgattgacacacagaaggtgttaggaggatgagttcccctttcttgcctgccccgtcactctggttctgtggccaggcctgtgtgggggttctggctctgtctgctgaggagatgggcccacctcagtctcccttccacacctccagcaaggctgaaaatgagtcccgaccttctgcaaagtcaggctgcttttccaggaggtagctcacatctttcctgttttatttataggagctccaatcagttaggtttctgccagagacaggatatgtatatatgaagagactttttggtaaggaatgggatcatgcaattatggcaagtctgtactccatagggcaggctggaaacccccaggcagtccccttttcggggaaacacctcagtttccttctaaggacttcagctgatggaatgagtcccattcacattgttcaaggtcatctcctctacttaaag

SEQ ID NO: 67320 - DNA, 2412 bp, Homo sapiens
ggtaggcatatcgtgagaatatcaggagtttgatgatggccttgggctagtgatttcccgtcacatcctccccatttgaaacttgtggatcacacacttagcaggggcttgtgcagccctgaaatgtgagccctttctaaggttggtttcagccttgctccctcccaggattccctggttctgaacttgatctccaccaaccctggccagcacctagaggaaataagagctggtatctggaaacatttgtagccctctccatcctgaagatgaagggtgagtcatagaacagagtggcttcgggggaggtgccgatgacacagccatgcctgggatggcaggtgtctccctaaactgccggcatttttctgcacttcacagaggagctgaggctcacaggccgcacatgacctgctcagggtcaaatgctttcaccagataattaaaatgagagctgagttgtaaattttcccagggaagcaaccccagagaggaaagatcaaggcataggaatcattttcccccctcttttccaaatgaaacagctgaggctcacaagggcttttgcccaaggttgtgtggtgggccagtgattggacaaggattcaaacccaggtctctgaggcccccagtggctcttctctgacacactctttccaaaaagcaggctgctctagattcattctctggtttagcaaccagagaatgctgtgtaaccttgggcaaggagcttgacctctctgtgctctggtttctgtaaaaggagccagtggtctctctgacctcatgggattgtggttaagattcagttaattcaaaaaaagacttggcagggagaaggcccaacagggatgtcactggataccgtggcggggaaagctgggacgcagagaggtcagacactcagaaaaccacgcagcgcgtttcagtaggattccgccccttatttccatgtcttcacaccacctcgagatggagagggcagttcagagtgacctccagcgaatctgccctctccgtgtcgtctgcaggggattagtggggagtaaggggatagagaattatccaggagtccttcagccttgatggtccaagttcacatccgcttctgtgctaggtggccagagggcgggctctacacgagagcctcaggggaccctgcgccaggcgtccgaggccacgtcgggttgccgcgctccgggtcggactgcaccttgaacgctccagccctcccctgggggcgtaccgcccacggccgctgcgactggccgcggggcctgccagtcttcggctttgcggccaatcccggtctccccccaagctacgccctccgttcctctcgcctctgccccaccggtagcgccagtttcttcgtagccccgcccctggcccccagcgattggccgacagttctgcctgttttctgccaagattccaatcctcgcctgcctccaggccctcgcctcccagcgcctagcaccctgagggaccactcaggcaccccaggcctctcccaatagccccacctctgccaatcagcgattggctttaggggctgcccatctgcttcatactcgccaatcactgtcgcttccagcgctgactggccagggagcagccaatcggggcgtggcgtggacccctcccgtggcgcgctctgggggtgcgcgaggcggggccgtggcggctggaggtagcggcggcggcgacgcgtccgggccggtgagggggcgcggggggcgccgggggggcccaagcgtcagcggcccgcgcctgtcgggctgaactgaggtgaggcacgggtcctgtcatggatcccggggcgaggggcggatgaggcggggcatgacagtagcgtcgcgagggcaggaagaggttaaagaccccccccaaccccacactccacgtctactgccccctgggggctactgcatccaggtttgagcccgtcacccgcagtccacgcacgcctgacaccacgtcccttttcgttgacatcccccatacactttagactgtccttgctgacatctcccacacccctggggccttgtccccggcgccccgcacagctgggtctgacatccccctcacacacctgacaccgcgcccccactcacgaacacccgcccccactcacgaacaccccccacatcacctgagtctgtccttgtcgatgacacccccacacccacacctgagcctgtgactcctaactcatggcctcgcaactcacacctggacctagtcccgtcccccactgcctttcctcatatccaggtatctgctcgctactctcgtgcccactcccccagcaacctgtgtctctcttctcagggaccttccccctggcacctgccctctgccctggcagccccacacctctgtctcccccttttctctctcccacct

SEQ ID NO: 67321 - DNA, 4271 bp, Homo sapiens
aaaaataaataaataaaaaataaagtattttggtggacagagaccctcgggtccgagctgacacaagcccactggacgtttggcctgacagtggtattggcaccgagcacctcggtgcccactggatgtttggcctgacagtggtgttggcactgagcacctcggccacgctggccccacaacccgctggtagctgtgtgaccttggctggctgcttaacttctctgagcctgtttgctccctgggcaccagatttggaaaaagaacagactgtttgtgaggattacattccagtaccaacaagaaaggcttttgtaaatgattaagcagtacacacaggaccgtggctgcggaatgcagttgagggcatccctccccacgcagggagccagaaactgggataggaaaaggctggtggaacacccaccatctctcaggatctcgccgtatcttaccacctccccttacccccccaggaccgagtctcctgccattccgagcaggcctggtatgggtaatggtgtgaaggaaggcccggtgcgattgcatgaggatgctgaggctgtcctgtcctcgtccgtctcatcaaaggcaagtaccccggcctcctgggatgggtgttctcctggggccccagcctccccaccccccctcccaggctccctgcctcctcctcccagcctctgcaccccctccaaacaggctcagggattcctctgctgtgctccatgcagcccatcacaaatcaccctgtacctaggatgtgcatgttggtaccccttcctacctgggctgagggtggagtggtggagcctctctgctcccacggccccaaatactccatcatgggatggaggacgccagccaccctctattccaccaaaagccccacttgtgatgtgaatccaaccagcccagccacctggtaagaggccaaaacctaacccagttccagcgtggggtgggaagcctgaggtatcagacatgtcttggagcccccttttctccctcagattttggaacactaaggaattagccaaggccaggcatggtggctcatgcctataatcccagcactttgggatgctgaggtgggaggatcatatgagaccaggagtttgagaccagcctgggcaacatggtgaaaccccgtctctactaaaaatataaaaattagccaggcgtggtggtgcacacctgtaatcccagctacttgggaggctgaggcagttgaatcgcttgaacctggaaggcagaggttgcagtgagccaagattgtgccactgcaccccagcctgagcgacagggtgaaaccctgtctcaaaaacaaaaaaaaagagccaaatgcagagagccaaagggggtgggcatgcttggtctttactctgcatttccaagttcacctcttaagtccacaattccactgaagaaaagatattctctcaaagcaattgggtcagccctgttgttcaccatagaaaccagaacccccactggcccctaagtcctctcagctgaacctgaaacacagaccgacccagccccacgcagaaatcatcgcactcccagggcctgactcaggccgaccgcacaggcagttttcaaagtccatggggtcaaaggctgaggtggcgtcatcttccaggcctcccgacctttccccggattccaggtgacatctcagagcagcaggcgggcgggaggactcattcaccggggtcaccaccaggtgactgaggcacagggcaggcacgtgccttgaagtttagtgaaggtcccaacagagctggaagaacacctggatatggctgttgctctgcatgccggagaggagggggtctgcaacgtggatcccaccacgtggacaagcttgaggcagcggtggctgctgaaccacacgcagaaatgcgccagtgctggtcacttgccgggcatcacacacacatgcccattctcctctgtactggcaggccccaacaacattgctcttggtccgcctggccagccccaaggtgggagggactcactctgcaatgtctcttttctttggttaagaagctgagccttggctgggatggtggctcacacctgtaatccctgcactctgggaggcccaggtgggaggattgcttgaggtcaggagttcgagaccagcctggccaacatggtgaaaccccatctctactaaaaatacaaaaatcggccaggcgtggtggcacgcacctgtaatcccagctccgcatgaggttgaagtgggagaatcgcttgaactcaggaggtggaggtggcagtgagctgagatcacgccactgcactccagcctaggcgacagagtgagaccctgtctcagaaaaaaaaaaaaaatactgagcttcttcccactgtgtttatggccaacatgcatcccatctgggattgcccactttctcttgtcagctgcctggccgacaaatccttctttcgtaggatctccccacgtgatggatcttgaaacttcaacccctcagtgatgcctgctcccagctctttggataataaggtgtttgtgttcattagagaggagctggaagtatcagccagaggcagcagcctccactgagcatgtgaactggccccaacacacgtcctccaggtgccactggtggctacctggagaggtgcagtttatggacgtgtgttcctgatactaagatttggcattggccaggcatggtgactcacaccagagatcccagcactttagcaggccaagacgggaggattgcttgaacccaggagtttgagaacagcctgggtaacatagcaagaccttgtctttgcaaaaaaataaaattagctgggtgtggtggcacacatctgtggtctcagctactgaggaggctgaggtgggaggatcacctgagcccaagaggtcatggctgcagtgagctatgatcatgcacttgcactccagcctggtggcagagtgggatcctatctcagaaaaacaacacagagttggctttgtaacgttaagagccttggctgggcccgctggctctcgcctgtaatcccaacactttgggatgccgagacaggcggatcacctgagcctcaggggttcgagaccagcctgggcaacgtggagaaaccccatctctgctaaaaatacaaaaattagccaggcagggtggcgcgcagctgtaatcccaggtactgggaaggctgaggcaggacaaacaaccacttgaacccaggaggcagaggttgcagtgagccaaaattgcgccaccgcactccagcctggtggacagagcaagactgtctcaaaaaacaaacaaaacgacaaactgataggaggtaaccaccgaatggaggaggtggaagaactctgtctccagcagggtgcagggaggcactctccatggaatattccatttgcacacagaggcccattccagaggggagcagctggtccgactgattcagagaagaaactggcctgaagctggtaaggccttggactgctgctgggaccaccaacaagcgcccgcaattctcaaagctcatggaaccagacgtctgcaacctggctgcatgtcccagaaaaggcagaggtccccaaagacagcttccgagaagctaggagaagatcaaactccatggcgaagtttggcctcagaaacaaaatcgctgtgcaatctgtccctttgaggaagggagggctgggctggtggaggggaccctgggagcactgaggaaaaggaggctgtgttctgtggaaccagactgggggtgcaaggctgctgggtagcccaggacatgtgggagagggtctgagagctggcaccttgctgttgtaaagataggactgggagaccaaagagggcaccctctgcctgagctcagtcgggcagagctgggattcaggccaagtgtgtggacagactcaggcccagccctttaccccgagccacacactgagctgagcaaactccagaggtgggggcaaccatgctcagtctgactccggttgcctgttacacctgagtagtgcgccacatcccttccccatctccagcctccaccatatctatcctgggtttctgcaggagccgcttctaccctggtcacatttttatttttattttttattttttcagacactctgtcaccctgtctggagaatagtggtgcaatcacggctcactgcaaccttggtatcctgggttcaagcgattcttctgcctcagttttctgagtaactaggattacaggcacccaccaccatg

SEQ ID NO: 67322 - DNA, 1320 bp, Homo sapiens
tgccggaggtgttgcccaaaaggccctagtggggcgtggtcagctccacctcctgatcctgtgtgtcctccgacatgctgctgattctagtgacccctgtccccaccaggctcagagccagaccgcgcctggaccttcttgttctgactccacgtgcctgcccggcctccagggtgcgggggcgcctttcttgcaggcggaccctgcccaggatggggccagcctcgtgctcagctttggccacaaatgcagcccctggcccaccccaccctgccggccctgccttctccagtatttcccacatggccacgactcctcagtcactagagcctcctgctgggaacagtgtcccccagagcctcatgtctatcctagaccctgcaagcagctgggtccccaagagtgcatctccccctagagttgcctgcccatgcccacctgctttgtaaccttcccaggagattcatgcttgctctgcacagcagggctcgaggcccaggccatgacacggaactgcctcaggtttgggtcagacctgcatcctggggcatctgctgaaatgtgagcacacaaaccacctcctttggcccagaagccccccaggcctagcatctcagtgccccaaccctctgcccagctgtggtatccagcaggtccttgggtccccacttgagcaggcacttggctgggatatggagcaatttaaagcccacaggggttgttcagtttctatgaaatggagcatggggtgcctgctagcctcaatcccccgaagtgggagcctcatgatagagtatagcttgggggtgggaggtgaggaaaatctgaggtacccaggggaacccccagctaactggtctctcagaggagtcccccagggcccgccagctatcacagggactcagaaacacccatttcctaatgacatggtgagtttcttgatttcttttttttgtttgttttgttttggttttcaacttggctgaccccgggtctatgatctattcacatcgaacccctgactggtctgcctggtgccagggtgagcgtgaccgtgagtgttgctttcgacagctggctcagcacacgctgtgtgaagggatctgagcttgttcatctccagtcgtgacttcatttcccttccttctgtcctcctcctgttcttgccttggacctgcaggtgtgcagaccgctctctctgccttccttgcatgtggccaccagccatccctgatcttgtccccagaggcccaggcagcctgtgatggctgtgaggggctgtcccactgtgtgggtatcccttacccagcacttaaactt

SEQ ID NO: 67323 - DNA, 1589 bp, Homo sapiens
catctgcaagaattttctggagtcttccatcagctccttcttttcccttcactggatttacgattctcgaactcaagaaccctgataaaatcaatgcagcctccctcctcattcccgggagcctgtgccttcatctcctacggcgtcctgcacctccgcctgggacgacgccccactttcaataattccggccatcagtgcccttccttcagggccatctccagcgcccctcctcggggatggtcccaggcagagaccctccagttccacgtccctctctctgcccaggccggtcccgtcagggttgtgggagtcccccatctccctgcaccagcctgacccccaggggctgggctaagttttaagaacacactcaataggttggacccagagccgcgtgagacctgaaggttccaactttcctgtctcccactctgagaaccttgcccgccctgaggccaaccagacctcctgagtccacctcccacggcctcccctgcccgttccacacaccccgatatagcagggacccccgatggatcctgtcggcgcggcccccacgctcctgcaggacccccgtccccagagtggacccccaacaggaccccacaccgccttaaccaggttccaaatgtgctggggtccccagtcccctctgtgggaccacgacccctcaaaaggatcccagacccctaaaaggtctcgagggcagaatccccagaacgcttaggggcttctagtccccctgggtacaactcccgccgactccctcggaggtcctgtagcgagagcagggctcccagagagggacacacggccttcagcgtgcccccgaatccctcagagcctccaatccccaagaagaaaccccaatccattccctcagtgtctccctggaccccttcggctggacctcggccctgcagaaccccccacttcgcgggacgctcgctcaccatgacgcgtgcgagaacgcggtgcactcacccaccggcctagggctccgggcactctgcggaaactcgaccaattagagcccgactctggtctgacgagcatcccgtccgaccaatcagtgtgtcttgagccggcaaatcaccagggacgaggaggccgctcgcgttgcatgccggaaattgtagttcagatacgctggttcggatcgatcaaagtgaagattgtgtctgggaggcctgcgtggccgacctctcttaaggcttagttttctctttcctacacttatctcaaaggtttgcagcgaaagcatttattcccacctaagggacatttctgagagtagaattccctccccccatcaagaacattcaatggctcccacttagtagacgaagtacttagtactcctaagtactaagtaggctaagtactcagactgaattcagacccttctgcctgacttaaatctgctgctagcactattgtgcaccctatagtacaacttgcacccaccatgctgtctcatacctccaggcctttgtaaatatcctacatcttgcaatgccttcaagaatgcctcaatcttaaaataaaaacaaaacaaaagcaaaaaagaatgcctcaatcttttt

SEQ ID NO: 67324 - DNA, 1839 bp, Homo sapiens
gggctcaagcaatcctcccaccttagccgcccaagtagctgggaccacaggcgtgcgccaccacgcccggctaatttttgtatttttttagagacgagatctcactatgtcacctaggctggtctcgggctcaagcgatcctcccgcctaggcctcccaaagtgctgggattacaaagccaccactcccagcctcagctactgaattcttgaaacaatcctggggggaccggtaattaaagcagacacggagcctttctacaggtttcaaaactagtcagcggcagagctgggattggacggcagttcaatcactgctcctcgcacggtccctccgcgcccggcctttgtcaggccgcccctccacaagttaccggccccctctgtcccgcccgcaggcccgcaccacctttcttccccttgagctgcatctccggctcctccatagcgaccgcggccgagcgaaccgggaaacggcaccggaagcccggaggttgggacgcccgcctaagccttccctgctgaaaccggacgccgcacggctcctgttccggtgtcagagggcccgccctccccgctcctcagtctttgcggacaagaaaggggctgtgtgagacgcagggaaggaggcacacccgggggtggcgcagtgaggagggggcgcgacggccaggaggctggtggagcgacacccaggcaggagagggggaagaactctctccctttctgaacccccttttccttgagagacgagttgggggagtcctccacgcattacccactcgggccgcaaaaactcccttctttagccctctgcccccgcccttgcttataagcctttgagaccgcagaagggaccttgttgtggaacgggacggccaaggtacgctgcccctttaagttccagacgccccgcgtacttcccctacttcttcttcttgagatagccccgcccatctacccgaagccggagccaattggctccctctggaaaaatctgtgggcagggtaaaggtgagcgggcgcaggcgtagtgaaattctcagagccctttaggccccgcccattccctccgagtcggtgaggaggggaaaagaaggcgcaggcgcaactgccctcccaggaccccagcggaacccacgccctcccctaagtcttaaagggccagaggcagcacttactgcccgggcccttcctcacttttggggggcgggggtgcgcaagcgcagtgggggagctctggggtgggggtagcggtcgagtatcaagttgctttctgtcccggcagaggaagccagatcgctgagggtccggtctccagtttgcctcctgctatatccattggaagagaaaagtttgtgacttgggcccccaagttttgagagaactgggctttcggcgcggggggacagaggaggctcgtggggaggtgagtggacctcctggatcgatttaggaggctcgggtgggactgggaccaatcgcacctttgttgagccgtcactcattatggggagcccctcccaacaaccatagcgaatatttattgagctccacgcttagcagatcccccgataagctatgtacagacataattcgttgtaggtctcatttccacattttgtcgtggaggaaactgaggctcaaaggttaagtcacgtgcccaagttctcacggcctataaattgagggattcgaacccagacagctgaccccagagccccggcttttttttcctttcttttttttttttttttttttttttgagacagagtcttgctctgtcgccccagctacagtgcagtggtgcgatctctgctcaccgcaacctccacctccc

SEQ ID NO: 67325 - DNA, 1236 bp, Homo sapiens
cttccaggcagccccggcgactggagaagccaccctgaaactggatctgcagctgggagacacggatgagctggggaaactccagcgtcacccactgggaggggccctggaagcagacagggaaactgaggcgcaagctcactgcaggcacagagccctgctatgcctgtctcattcacatagttcttggaatggaggggaagaaggaaattcggcacatgttcctttcctggccacccatgagggccccctgacgttctcaaggcatgagatctgaatctgaatcaccctagagatggagggtcgagggaggcgcctcacctggtctgagttccaacatgtctcctcatcctggtcgaaaagatgtttttttccaaactgccgagtgttgcgattcagcactgaactcaccctggaggcaccaggatcaaggcgaagagaggggctgagaccagctctcagctccgcggagggcctgacccccagatctgtccactgagggctcgaccccaggcttagggcctcgccactgcctgtccccacagactcttacctgctcactgtctctggacaaaccaaagagtgggtcatgtcggttccacaagacctcgcagggcttaggattgggcacagccttggttcgaatcccggcgcctcctcaagctacagggcggcgcgatcttggctacgccttggcctgaacgtcctcacctgtaacttgggacgagaaccgccactccctcgcccaccccagtcctaaatgtcgcctcgatcaatcccctgccggaaaatttgggagagaggatcagggaaaccgccaatgcccggaggccaggcctttcacaggaaacagatttcccgcgggtttcgggggcggtggctttttgtgcgaggctgtttctctgcgaatagctcttggagccaaatcttgggacccggaaccgcgtgggcttggcgcatgcgtgttgtaattcaggcgccgaccgcggacgctccagaggtggggtttggttcgaccccgccccttcatgctcgcttcttaaagggcccgggttcgatgattgaatttaccttggttcccttgaagctgtagggaaaaggctggctgcgcgcacggggcgctgtccctcggcgcccgaaggtgtagagcactgattttgactgattttggaatccgaaagacttcctttttttttttttttttttgaggcggagtctcactgtcgcccaggctgg

SEQ ID NO: 67326 - DNA, 553 bp, Homo sapiens
gggaaaccggctgttcctcctgggacaccgactgcagccagtgtgggcgagtctgcctcagtttcctcaggggagcctacggtaccgtgggacccctccagcaccctgctgcctgtcaccctgggcatagaggacttcgaactggaggtcctggcagggagcccgggtgtagagagcttctgggaggaggtggcaagtggagaggagccagccctgccagggacccctatgaatgcaggtgcggaggagggtgagtacaaagtcccggggctctgtccagctctccatggtcagggcttggggagcaggggctgggggatcccagagcagggaggaatggttgtccctggggatctggaagctttctagtggggcatgacgctggaggtaggagcttatcaggtggagttgaatttcagaaaggacattcctggcagaggaacgagcactggcaaaggccaggagatgaagtagcgcttgatcaatttcgggcacagagcatacatcccaatgaacaaagtgtgagagtagtgagtggccgggcatggtgcct

SEQ ID NO: 67327 - DNA, 936 bp, Homo sapiens
ccctgaacaagaggaaagtcacaggcctgagacaggcaatggagtagggtgtgtgtgtgtgtgtgtgtgtgtgtgtgtgtgtgtgagcaggagtcaggtacccggggccttatctgggacaatacttttacccttggtgactttggaacctaggcagggcgcatccctgggaaaaccccagaaaccctccaaagctctggcttgtggggactcatcattccttcttcccaggccacaaacatcccaggagcggccgcatcccagcctccagcccggcgggaaggggacttccggttagaggggggtgttcttctggcccaccccaatcctgccgggtcggagctgagctggggcgcagggctcgcagaagccaggtccgcggaccgcgcatcctccctccagcccacctccagtcctccccgcccccgcccgcccccactgtccccaaggccgccctggcccctctccgcacgcactgcgagagcgccgagacgtggttgagcgcgtaggacaccgggagggcgctcagcgacagcgccgcgatcttgccggccagcggcgggatgtccatagcggcggctgctggaccccggctcagccccgacgcgttctccagggcgctcggctcctcgttggcggcgagtccgggccgaggctgccagggacccgccccgcacaaaggtcgaccccgctgcgccctgggcaggccgccgtgaccgccctgcgtgttcccagggagcctccaaggcccctccccggccctccccctggcagctgccccgccccttcgcccctcaccatcgacaccctcgtctccaatggccgtcccgctactcagcctcagtttccctcactgtcaaaggctgggacacaacacctcgggatgcttctgctcttaggccaaggggtgcgccctggaggtcctggcgtgccccc

SEQ ID NO: 67328 - DNA, 964 bp, Homo sapiens
atgcccacctgacgcctgccctgcgggaccccagtctgcagctggcacaaattctaaccactgcccctacctcaggccccattctgcacgcagccccttagcttgatgccaactgggtcacaggtcttcctgaactgggccacaagagggtcttctggccgcaggtctgactcagcctccttccccaggtgtccactgcccatgggtgaagttcaggttcccctggactttccccaactctagcagggtcaacaccccccaggcctgctttctgtctgtaaaatgagccttcttgtaagcgggccccagcatcccctcctccaggcagccctgcctgccacccccaccccaccttctccacacaaggccagggtgcctgtgcccagctcagcctaggggcttggccttgtcccgtgtacaggatgcacctgcacacgcacacagcacttggaggcctcgtcccctggcaaggggtaaagtccatgccctgagcctggtgagcctccaggttgctgagaactgagaagtgacttggatggctgaatgcctgggacccagtgccaggattccctgaaccactggctgcagagaactaccccgctgtgctcagggtcctggcccactgccttctgggcagccctcattcatgggcacccaggccaagcccaccaatgttactctttgctctgcctcagccacagcgtcaggaaagaacaaagggtggtatatcaccccagccttggctctgccactgcatctggcacctccctggtctcagaccccactgagacactctgcagaccgccccaccacggctccctggttcctctcagtagcagcctcagacctcatccccagcagcctggctgactggagtagatcttgtccacctggtccccacacttggcacctagtgtttgctgaatggctgtgtgaacacaagctggcccaggagcccgactcc

SEQ ID NO: 67329 - DNA, 2210 bp, Homo sapiens
ctgatcatatcatacgtaacctcacatcatacgtaagtttttgtaaatattttctcattaatgcactgacaccccagtagaaagcaacctccaggaaggcagggccctgtttcggtcaccgctgcatgcgtagcgcccagcacactgcttggcacacagtgagcacgccctaagtatctgctgatgggtaaatgcattctattctggggaagcagaaaggccaaggcttgcagcaaagtgagggtcaaaagacgcgggaaagtgtgtcaagggagcctcaaagcacttcggaaaagcagcttttccagaaagcgggacacaggccagaggccagctgcgacgaaaagaggggtgcagggacagcccaaggttgtcgccgtattggggaacggaggttggagcagccctgaaggcggttgtttcggaaacgggacgcagggccgagccgggtggcggcctctacggagatccgtgcgtcctcagcaaaccaagcgggggcggccagcaacctgggtctggggtctcgagaaaccaagaggtgcagaagccgacgctgtgggctgccccggggctgaagcgagggatccacgggtcgcagcaggacggacccgaggagtcaggggagacacctagccccagggacccaggcggccgcctgagaggaggcgggggctgttacctgcaacatcccggttgtccatcttgagactcatccaatcccacaatgctccggcgccccttaaggggccctgttatagtgtgcatcgcctgatgggagatgtagtccgcctcggtcagactcgccctattactgcgtgaacgactgggtttttttttttttaacctccagaaacggaagcctcagcctatcagcgatgcctaagtcccagtcacgataaccaaacggcgtcgcccttttacaccttcccggagcggcagtcatcccaaatacaaactacatgttccaggatgctttgggcggcagatctcgcggaagccgcgaggagagcccggccccgtctcgcgcgcctgcttccgcctccctgtggcggcggcttgttgttgtggaggccaaaatggcggctcaggcggcggcagcggcccaggcggcggcggcccaggctgcgcaggccgaggcggccgactcgtggtacctggcgcttctgggcttcgctgagcacttccgcacttccagcccgcccaaaatccgcctgtgcgtgcactgcctgcaggccgtgttccccttcaagccgccgcagcgcatcgaggcccgtacacacctgcagctgggctccgttctctatcaccacaccaagaacagcgagcaggcgcgcagccacctggagaaggcggtgagcgcgggccgggccgcgagggaggagtcgcgggctccttgcaagatctgggctgacgggtcgcgaccgcggcgggtggggggccgctcctcggcgacctgggggcgcgacctccgtcaaagccgcaggacccccacccgcctctgccggaccccaaagccaccagcctctcaagggacacgaaagcctcgccccccacgccttatttcccgtttctggtgacagggctccaggagccccgtcaccgtactctgaaagttgcctgttattgggagcaacaggatccgcaaatcgtctggttttcaggaggatcccacctgttggtggcgatggggacatcacagggtcctgaagctattagctcctcctggttcagcttccggagcatcagccccaaacgcttccacctaaagtgacttggggtaggggttggcgaaggcgagacccctggcattctcccgggaatctgaagtctggtctctcaggaacctggaagggcatgattctccttggacacagaagtttggtaatcgtggtttttggagggtcttgtgcccccatcaataatgcctggtgtcgtacgagggaagctgagacccggagtctggagttggtcatttgaggcctatgaggaggagaaacaggggttctggattccaggccccgctgttcagtttcagtattaggggaactaaaagcagctcctgctttttctccatccactggtgacttctaccatccatcagtccatcctcttccgtcagagtgagtccctcccctgacccaacttgatttgtgtcatcttggtgcctcaaagaatgcgggagagtggctgtcattctgccctttagtaaa

SEQ ID NO: 67330 - DNA, 2419 bp, Homo sapiens
gtgctgggattccaggcgtgagccaccgcgcccggtcgcatttccttagtaaaggggtgaggggcgcccatctcctgccatccttctctggagagaggcgaggtgcttgaagtcccaaattcctcgtgtagtgagaaaacaggggaggcagaaaatccccaagatatcttcagaaacgaaggtggaggggggcgcgcagccctcactttcctcagataaaggagggacagggagagcggcccccaagagtgcttagaaaaggagtgtatgtgccccaaatattcctcggaaaaggcggtggaccctggattctccaaatgctccttagggatcccgaactcccatgttttcttaggaaacagagctggggtcccgaatctacaacataatcgtgatcccggcaattgtcctcagaaaaccgggcagggcaagaaacccccaaactctctcagaagaggggtcggggcaagatttccgaagatcctcctcagaacgggggccagggaaaagaatcccgaagcagagtcttctcagaaccggggcgcgcgccagaatctccaagattctcctggatagagagggtcgaagccacaagacgaggcagaaagagcgcgcggccaccggagccccttagaaacactgccaggccacgaagcgcccgggctcctcagaggcgccgctcgcagcccgtcgtagctgccccacgcccgcctggccaaggccgcctccggtgcattatgggtggggagcccctgcagagcactgcggggaaccccctgcccagccagttgccggccgccgggtggcccaggcgatccgccctccggggtcccagggagccggccacgaattgactcgtccccctaggccccgcccctcgcggggttcccgccccgaagtttaagtcccgcccccgcatggccttgagtggctctgcggcccgctcccatctaccattggcaggatgcctgtcagtcattccgtcccgcctcctcggacccgccccggccggcggcgcgatcccgagaaccagccggcccgcgcactcactggtcgtcatgcgctgtctgtcatgaagctggccacaccttccatggggtgcgggtcctgggagtcctggctggacctcattggcttgtggcgccttcactcggagagacgcgcctcaacccggaagtgtgcgaggcgaaatctgcctagcaaccggggaagccgggctgtgaagcgggcaatttcagtgtgagactgagccgcgagactgagctgcggctccgagcgctgcgcggcggctcctcccgcccagggtcagcgccccggcgcgcgcacgcgcacccccgccgcccgagcgcgccccgcgccgcccgcgcagtcggtcggtcggtcgtctgtcctgtcgccgctgccgccgccgccacagcggccgccgcgggcgccacctgagggagtcgcctccgcgggacgccacaagacctgaccggactgcgccgcccgaggccgtcggccgccgtcagcgagggcgccgagcaacttcggtgagtaaggggcaggcgccgctggcgggtccccggtttccggtgccccaggctctctggggcttccgcttctcccgcactaccttggccgagtttactcccttctccacagcacttccccctcaggggagcccctgctctgggcccccccgcctctccaggggacccccgcctctctaggagaccccgtctctcttagggaccctcgcctctcttggggacacacccgcctctctaggggcctccctcctctccaggagacccttgcctctctaggggaccccgtctctcttggggaccccgtctctccaggcaggggatcccatctttctagcgacccccacctttctaggggactttcttcccatctaggggacccttgcctctctaggggactcccatctctccaggcaggggaccccgcttctctaggggaacgctgcctctctagaggatccgtgcctttctagaggatccccacctctctaggggaccccgtctctctaggggacctcgtctctagggaacccccgtctctccgaggggagccctgtctctctaggcgaccctgcttctctgaggggacaacccctcttatcaggggctcccccgcctctctgaggacccctgccggagggaacccccacctctctgaggaatcctgcctttgacaggaactaactcccttctttggggatccccaactctttgagaattcccgcttatctgaggggactcccttcttcactgagggtccctctacttttctcaggaacccatccttttgagggacccctgcctccctagagaccccttcctatctgaggacccccgcctctgaggggagtccctttctctgagggacccctgcctctttgaggggaatc

SEQ ID NO: 67331 - DNA, 1377 bp, Homo sapiens
cctcccaaagttctgggattacagacgtgagccactgtgccctgccagcactaagtattgactgtctttgttttcagatcagagagaaaacttttagaaaacatggttctagccctagttgtttcttaattagagtttcttcagctttagtatggcatctgaaggtgattgcatcatatttcataatcacccagctgaactatttgctgtttagtccagcactgggcactgaggctaaaagatctttaatccaaacagcctcagcattcacccaacctgagcctatgggaccccaagcagatctggattcactgtcacttaccatctacccatctgaccctgtcttcctatgacagacagaaataaaccctgtagctatttcaccccacctacataccctgcacccctcctactccccgtccgactttcctggctgagaagttggcactgccctctggagcaggccctgtcaccagtgcacccctcactccacaggggtgtgtcattaatgtgttgcagttgatgcctccctcttaaaaaaaaaaaggggtggttgtcaccctggtgactcacacagggcttgctggctcaaactctggaatctgtatatctgtctcaagtgtcaggtctcccacctgaccacactttgctctgtttgtagttaattaaattgacattaatcaagacccaggtgaggagcagtgaggtaatagtttgcttgtattgctttaatatacatcatctgattaatgatcgtagcatgaagcagttcttaaaatatacagccaccatgttagggtgaaaaacctggatggttgccctaaaccaaccttgcgcttgggatcagggagctctttgaattcctataccgagtcacctgtttgagaataagactgttttgtttgtttggtttctgaatttgaacatttgaatttctttgtagcaaagcaaagcaaattggtgacataactgggtcagggaaagtgattgggagtcaacagtttgtattttgtatcatttttaggttgaattctcttttggcctaggggaggttgtgccagatgttgcattaagtagtgggaagattttggggggcagggcggtgtgtttggggaggtgtgaggtggcggggtggaataaactacaaaaagttgacaattgtatgtagaactcaacacagaattaggagcttttttgaactctgtttaaggggacatacagcagaaaaacaattttttttttttttagaaaaacaattttgtaaaatttgttctacatgaagtgtttttcaggtttgcggttgagacccaattattcttgggcgttacattgattttcttttcaaatgaagtagaatagaaataacagtacaggctg

SEQ ID NO: 67332 - DNA, 2779 bp, Homo sapiens
tggaggttgcagtgagccgagatagcgccactgcaccactccagcctggcgacagagcaagactctgtctccaaaaaaaagaaaaaagaaaacagtacgttgcatgtggtaaatttatgtttggtgaaacttttgtttcagttgtacatatagatttattagggtatgcgataaagcatgtcaccaccactcttcaggagtctaggtgtctcatcaggaatcgtttgttttaaaacaacatgaaaagaggcggttttggggattcctcagaacctgattttggtattgagagccttcttgtggtagattttccatgaacttgatattttccctattgaaattgtatttcgctttatgtagtttaacatctccaaagtccattctctttcaggctttcattctgtctcctgtgtttcctccttgttactggagagggaggggtgcagatttgctttcttgaggggttttcaccttctccctgaggcacgagggcagattgggaggtaactggagagggagagcagtcgtccccaagtgtcttgaggtgggtgggtctggagctttctttgtagaattctgttcactgcactggagaagtgatcgttcagccgatccacaccccgccctccccacagacaccggggccgaagttcccagagaagagcttccgcgtgacgaccccgcgggggtgacattctaacccgcgtttcagaggcaaccctgagttgcttgaggtcgcccagctcagctggcgcgaggtcagcagtgagcgcgtcgtgagtcagccttgggtgcggcccgcccggctttgccgccggtgagttggccacgacccttcggcctgcggagggcgctgggactcggcggggagggagccagccggagcccgcgtgggaaaccagcgcgcccaacgaggtgtcgcgtgggagcgcgccggagaggggcggtgcttccggggcggtaccgtccggccccgccccctcaactcaggggcccgccttctacgcctggaaccccgcccacgagctcctcccttctcgtcaggccccgcccctcggtcgccacgccccgcccagccgggcgcgggcgggcggcgtcgcctttaagagctccccggtgttttgggggccgcgggccgggcgcgctgacctggtgcgcatgtcccgggcggtgacgccggcgccgggctccatgtgtgcggccgaggggcgcattatctggccggcggcgcgggcgggcgggcggaccggcgcagcgagcgccgcgggcccgggcggccccacaggcggaacgagcgcgcgcggcccggcgtccccggcccctccgccgcccggccccgcgggcgaccccggaccagcagcccccgtaacctgcgcgctgccctagggcccggccgacccgcggcccggtaagttctggaccaaacttggcggggggcgggggctggggacgcacggctgagactggagcggcgcgggccgcgcagggtcggggcctcggggggctctgaaggacccctgcatgagcgtggaaaagtgagagcgagcgagttctactccttgtattctgggagcgtcttcttgcgctgccctggaaagttccttgccccgaggcggcccgggcacgtgggggccgggcgggggtcccggaaagtcgcggcgtcgccccgcttccgtcctgcgcttcctgcggggtcgggggaagggctgggccgcgaggcgcctcttccgagtggtcgggacgggtggaggcggcgggaagacggcacgtgggcgcgcggggcgggggtcccgctcaggggcgggggtccggggcgggttgggcagcaacgctgaaccccgcggcggcggcggcggcggcggcggcggatcccgtgtcagaataagagtccccgcgcgcccacgcctggagggccggccctcccccagctcgcgcccttcctgcctaacccccgggagccgcgggaccctttcccctctctgatctccggcctttctcaaggcccgacactttaaatttgcctccccatctaggcggtggctccattgatttcttttttcccacctagagtgggtcggcatcagtgactagacagcagcagctggccttttaaagggattattgccaagaatcggaattgatcacttcaacaaggaaaggcttatgggcagggcccaggctgagagcctgacggacacttggattgtgcgcacactgggacccagaaatgaatggtgacccctcccttaggaagtgaatgacaacccttaggtgcgtgtttctgccctgagaattttgcacagggcaaaattttgtaggtctgacttaacgtctttaggtgtatagttcatccttatcttaagagctgtggattctttagatcaaagtccgagtgagtcacttgagcctttaattttctttcttcctaccagtttacttctttcagttttcttggagtacatagtgctggttacatctctggttctgtgtgcccattcacacagtgacacctcctggctgtggcagcacagaaactgagagccctctgtgcgggtgtctcagtcttggactgtagtcctgttgactgacttaactcttctggtagtcgttacaagttttcttttaaactagattacatgaaataatgtttgttggcaccagtttgttaacatatgctaagcagtagtttgtcagacctgaccacaagctgtggagggctgatagctcatactagccctcgggtttgagtgcctactgtgtgctaagctcccctgcacag

SEQ ID NO: 67333 - DNA, 591 bp, Homo sapiens
ccattgttatagtttcttcatttatactttgcagcatttcagtcatcacatgatttttgtgatggctgtggtgcgtcatcagtttgccgcagtgatgaagcttctgggactaagaaccagcttgttggcctggttcttgggcaaggccctgagaatcctgggctgaatgcccccctgagctgaccacgtggccttagccagggccattggtgccatggcgtggttagtggatggttccagccaagtctgagaatttaccgaattgactgtttgatttggcagctgatggtcagagaaattgaattctgcctcttagcaaaggaagcttggtggatttctagaattctttgttgtagagggggttggggatggcgtgggcagaatgaatgcgaagtgtgggggcttgaggtctgccaggccctcccacttgccctaaactggacttggaggtgtctggaaggttgtgggtggacagcactgaccttgctgcttggccagttgttccccagccactctggattcggatctaggtggaccctatggtatcctagaaactacctttatgttcttttcttttaagaaacagtgtct

SEQ ID NO: 67334 - DNA, 817 bp, Homo sapiens
aaagagcggcagaaagggttcttcctgaggagctagccctgtgcctcatttaggaggtgcctaaaggtctttccatagagttcactggtgttgtcccctatccttatttttgcaagttctcctgtgggagtgtttctcgccatccatcagctgtgaattgccgtgaacctagtttaaaaataaaggtttcatatcagagcaagctcctggtagtcctgtgggtgcaaagaatgacaacagaggtgatgttgacactatttggcaagctacaactgacagaactgcttgggaatctgggatttggctggttcctaaggttcagcctctggcccatagccctggacgtctgatgatacaaaccggaagtggaagtccgaggcattttctctatgaccttggaagagaagttcctgaatattgtagagcattagttttcctgtctgtaagacaggcagcctctttctctctggacagcatcccatggggatgaccatgacctttggttttggaggtgaagccctctcggtctggagggtgaagtccgctcattcccaggcacatcatgccctcatcttgagggtaaacctagcactgccttcaccaggaatggtggctggtttccctggggtccatgacagacaacatgatggtgaggaggttacattgggagaatgagccctgcgtgctgcctgtgtgctctgtgaccctgggcaagttcctgaagatcagacacatcagatcccttatctgtaaaatgggcatgatccaggaacctgcctctacggttgccttggggattcagagatgctgtgtgagc

SEQ ID NO: 67335 - DNA, 3252 bp, Homo sapiens
aaggaacacagacccaccagccagcccttcttgggaagctctggggggtttctgctcagacctgcactcccccgagtggaaccccgagttctgccatgaccttcaccccgaggcaaggggacagggccgggcaggcttcctgaggcatgttgaagagggatgttctgcaggcagaacatggccatgctgggccatgtctgtgggccaggccccaggagggcgggggatgttaacagcttggttcatgtcaggtagggcctggtgagcccaagatgagtgtttgcacaagggacaagtgagctggcagggctggtgttggctctagcagagccctcatcccacccttgcacacagccagcagcccaccctgctaggcctgaaagaggtgaggaggaaaggttctagtgggaaatggttctgtggctggagaaggcattgctgggccctgcctgtctccccaagccagcctggaggaggatttcttgtaccgaggcctcacgagctacaggtcatggtcatccctaacttccctagtgtgtgcaagacttgggggatcttgctgaaatacagactttgatcaagcaggtctggggcaaggaggacacgcttcatttatacaagttccggagaagctgccctgctgctatggcggtgacagcggtggtcagacattcacggggccagccccaagcccacctacagccttgcccccacctgccgctcccctgttgtgtctgtccatcctggtagactgaaccctaaggacagaaattccttttatccaggggttcctccccactgcctgctatagcacctgctttttaaatgagctctcagcagatgtaaggaatgaatgaatgaatgaatgagggagaggggtatgtctttcctgcataccaggcaggcctgttcagagaaccacaaaggtcccagcctccaaggacagctccttcccggcactggctgaggggacactaaatattaaccacgtactggccgctggttgctgagcagctgaaagccataaccttttgctgtggaagtgggatcgtgtctcaatttaagtttataatcccggcctctcctccaggaaattctatggaagttcctggcaggtaacagaatttctgtgcttgtgaggtcagggccagtgccagcgggtcagggagtgggggtggtgcgtgtcagcgagcgggtgagaccatttacgctgataacagcctggcctgcttccagggatttttgtaggtcacataaaatctcttgatcactacgttttacattaaggcttctcaagatgggcaggacgggcttatgggatttgtcctgaactatcacatcacttccaaataaacttggtgcccgggacggctgctgtggagtgaatggcagacgctgtccctgggccacgatgccatccctctcagcatgttgggctagatttccactggttttgtttactttagacagtttttataattaaatatttccctgaaataatgcctgcaatcattttgagccacatgctctttttcctgaattaaagatctcttttagaaagtactgagactcttaaagcctctctcctttaaaaagtgagcttaacaaagtttttcattttagaaacttagaggggccagtgaccctgctgtgtgcggtgtatgtagaggtgactggagcctgtggtgcagcaacagtcccctgtgggctggcgccacacaggaagtgcctgcagctccacagccctggggtgagcctggcgcctccattttctgacagtacctgaacctttacctcccttctcaaaatgaaggctgcgtgtcacaaaccggttggaactggccgttgccatggttttcacgttggaaggcacagttaaagggtcatgtgaccaaggagggaaatgcctttgtcacatgactttttggtggcctgattagcatacaggaagttcactccctgctggctgctgggatgctgagtgatcattgatgggtggtgacatcatctcttggatgagttattgattagtcgcaggccaagatggggccagggagcgctgtgggcagagcagccctctcaggcagcttcagctgctaggtggtctggacccctcgcctaccctcttccttcaggcaggtttgaattttattagacatctcacctctggaagaagcacacgccctcaataagatgataagaagggttaagtcccttagagcttggctgtcatttcatttcagctcatgctagcccaggaattgtgtctgtaactctatacaagatgctgccttggccccctgctcccctgttcactttggaggccacctgggtggaggccagctgctgcacctctgtgctgaagccttgggactgcctgcctctgaggtgctcagtgtgtgtacacgtccagggaacctggaattagagccctgaggtcaccttgaaagtcgatcttgggcggcatggggccggcagcaaggagagacatgctggcggtttgctaagacctgagtgaggtgtcctgggttactttagaaacaaactacccggttctgggcttcagaatgtgggctgataaccccttgcctgggggattgtatacttcgaaatcgtacctttctgtccacgcccaggtctctggtgagaagctgcttcatcagggctaggaccagcgttcaggtacagccaccacgtagctgtggtgggtggaattaggagggaccagaggagagcaagtaaagcggttcctgagtccagcatctggcgagtccagggtagcattggtgaagccttaacctctggtgctctgtgtctacccttccctgaggacgcagctcatgggtgtggaggggacctcagaggtcccgagggctgctagagcagagtcaggttcttcatcctagcgactctcctcaaccctgccggggtctaattatcaactagaccctggcacagcaagagccaggacaactttgagctgcggcaaccagttaactttgtccgagtttgttctctgggtcacagtgccacctagaggacgtgtctgtccttggctggttttcctgctgacaaaaaaaatggacttgattcacttcgatgaatgtacaatgaggccgaggcgggcggatcatctgaggtcaggagttcaagaccaccctggccagcatggtgaaaccctgtctgtacaaaaatacaaaaaaaaaattagcccggcatgatggtgcatgcctgtaatccagctactcagga

SEQ ID NO: 67336 - DNA, 1572 bp, Homo sapiens
cggggggcggccggactccaatctcgggtctaagccatggcgcttggcacctacacccccgcacccccatgtgcccactgccagacattggccgctgttgtgccttttattgccccgtaacaatttttgccttgtgaagtgactgcgggcgtcactccgccttagggtgggggtccgggaccccgccccggggccaccctagcctccctgctttgtgactcataatcatcctgaatggtcagtttccgatgagaggccactagcaagggatacccatcaccaccagggagcagaatccgttccagggattggggtgagtccgacttcgagcagcagctgccccccaacatcatgtacccagcccgtgactacgtggagccctgggcttcgcgtagagtccctagacggggcgaaaacgggaaaaggggccttaactggggcacctggctcctttgagagctcggagtttctgactggcctgcgcaacaccccagaggcaaggtgaacgcgagggcctataatgcaagaaccaaggcgagtcacgccctgtctgggcaaaagaggagtaaagacccctcagctgcagcccggcagcgcattcctacccagggtccgccgccagagctttcccgcgcggtcggatagttacactactgtccgggacttcctagccgtgccgcggaccatctcaagtgcttccgccacactcatcatggcggtggcagtaagtcacttccgcccgggaccggaagtgtgggatactgcgagtatggcggcgtcaaaggtgaagcaggacatgcctccgccggggggctatgggcccatcgactacaaacggaacttgccgcgtcgaggactgtcgggtcagtatcactctgcgccggggtctcagagtctgggcactcggggctcgggggcggggttccggggacacaggcgggcctcagttttcccggcggtgtgaccggaggcggagcccggggatccatcatagcttctgtaataacgctaagtgctgcagtttgttgaggtctttcccagctcctcttccttctcgtaacagcccaggaaatcggtccctctagttatttacgttttacagtgggttaaactgagtcatagcctgtgctctggccctcagccacccttggatttctaagatggggaaactgaggcccaaagaaggccgcggctccccaaggcaaagctgaggccgcaacccggaacctggagggaatttacaagatgttctatgcagtggttccctgctggcagcccccgcctgcatggtgtcacaggaatccatattctttaaattttcaattttttttttttgagacggagttttgctcttgttgcccaggctggagtgcaatggcgccatctcggctcaccgcaacctccgcctcctgggttcaagcgattctcttgcctcagcctcctgagtagctgggattacaggcatgtgccacaacgcctggctaactttgtgtttttagtagagacggggtttctccatgttggtcagggtggtctcgaactcccaacctcggatgatccgcccacctcggc

SEQ ID NO: 67337 - DNA, 1676 bp, Homo sapiens
ctatcccagtgatctcgccttacactttgaaaaccaaggtaggagacagatgagatggaaggtagggccgtttccagaacaagagtagtcgctaatatgggaactagtataaacaactcctacctgacctgggcgacgtatgctgggccctgcgctaagccttttacaagtattacatcactgaatctaaatgaccataacagggaggacttcagaaaaaggaaataacccgcaccaggcatgcacagcaagtcagcagtggggtcatgattaagcctgcgccaaagtgtagagggtgcccctgggaatccaggccaggcagatgagtggcccaggtcgcgatggtgaccgacaggaaggccgcagctgggacccacggcgaggctcgaccgtgctgggggtcgggctcgcgtgtacacacttaccggggtgcaggtgagcgcgcaatgcgcgtgcacagaccaatgccccgagaggacagtgagcgcgtgcgcgaggcagatggtggcaagcacgagcagcgcagcttcggggatctgcacccaactgctgccccagccccagcagccagcggctgcggcacccaaccaggccgggtaaagcagcccggcgaatggcagcaccgtgaggcgccgcaacagcgccaaccgccggtacggccacacggcagccaccagctcgtcaccgttcgctatgagcgccggcccggcggcaaggagcgcgcgcggctgcggcccgggcttgggctgcccgtcaggccggaccccgcaaggccgggccccgcagggcaccgcgttgcccaccgccgccgctgccgccatctttcctagcgccgcgctcacttccgggcagaggaacgcctcacttccgaagttttacttccggtaagccctgagcgccgccatggcagcctggactaggaagagccagggcaacagaacaggctggccccggcagggactacttcgggtgccgccatgacaggctgtggccggaagaagaggctgggcgtcgccatgacagagagggactggaagacctaacggtgcctgcctccgctgccacgccggactgagaccggaaaagacaaggccggcaaggcgggcttgggcgccaccatgacaacctgaaccaaaaaaagcgagccctcctccttgactacaccagcaccacctgtcaccaggggcgaagcctggaccctgcggaggcggggtcgggagcttcggagttcaggaggcggggcccggtgcggggggcggggcttgtgaggggcggggtcggggaccgccccggaacacaaccacaccggacaagagccttaatgtgatagataagaattacaaatactagccgggcgcggtggctcacgcctgtaatcccaacactttgggaggcgaggcgggtggatcacctgagatcaggagttcaagacccaacatggtgaaaccacgtctctactaaaaatacaaaaattagccgggcgtggtggcacatgcctgtaatcccagctactcgggaggatgaggcaggagaattgcttgagcccgggagacggaggttgcagtgagccaagattgctccactgcacttcagcctggccaacagagcaagactgtctcaaaaaaaaaaaaaagaaaaatgaattacaaaaaccactttaggccgggcgcggtggc

SEQ ID NO: 67338 - DNA, 1293 bp, Homo sapiens
cagctgaagtcttttgaacaaacagttactggaagggtcagtggggaggaggtctacttctagcccggggggagttgtgtggcggtcacaaaggactgtattgtaagactgatgggggaaggaggggaacagtctggttgggttgaccctaacgggagcaagttctgcttccatgcaagtccaggtccaaggtcccagcgaggggctgtgggtagcacctgtcagtcacaccccacacagcgagcggattatttgaggattccgatcacctctcctgtcgctcaagccccaggggcgggacctggggcaccagccagtcagaggcgctgtgcggcaaactgtccaatcaggtgcgccgggaggaggggcaacttccaaagcccgaagcggtctcatttcccgccggccccccattcgggtccgggttttagttcctcggggagcccctggtgccccggatacggctgattttgtcgtgtgggacctgttctggctgctccagccccaggaaggacccaggacacccggaagccggaaatggtgagcgtgcggagccgggcgtccggagacctgaggaggagctggtcggaaccggcagtggctggacctgggcctccccgcggcgactgtgggggtctgggacccgagtcccccaggcgcagctcgacccttggtcccctcggtcgccgggtggagctggaccagccgccgggaccccgggtgtcctgtcccggccccggagccctctcagggcagctccgcgcccgcagccccgcgtctccccagatcgtgcgggggcctcaggagggtcttagggggaatcccgcctcgggtgtggggttcgtgcgggaggagccgtggcctgtggggtccccagttcctcctcccttaggcggtccccgtttccttcggagtcttccaaaggtgtgggaagctgggtttcaaacccacgaccccgtcccccagcttcgctcctcccagggctgcagtaaatccctaaatttccccgcattccccaaccctaagttctccctccagtacatccacttcacattattattattatcattatttctattatttttgagacggagtctcactctgtcgcccaggctggagtgcagtggcactgtctgggctcactgcagcctccgtcttccgggttcaagtgattctcctgcctcagcctcctgagtagctggaattacaggtgcccgccaccacgtccggctaacttgtattttcagtagagacaggttcaccatgttggccgtgctgaagtcctgatctcag

SEQ ID NO: 67339 - DNA, 1803 bp, Homo sapiens
acgctatctgttcctgagggatcaggtcccacctgtgtctctaagacactgccttgagatgaggccgatgatttcaaacgtaaattgcctaaattatcatcagcttcatgttgtgttttggagcttgtccacttaagtgggttgataaaaaatggctcacaagacacatgcctgggaaatggggttttcttctttgctcttggcagatcctgggcaaccctataattaaccttcttgatttctcaattttcacattcgcgaaaaaggtgccagtgcgcgtgacatttccctgaagccacagcccttgtcaccccctgcaaagctctgaagttgtgcacaggtaggccaggtggcagatttctctcaaaagcggctgagctcgcgctctggctagggaaggcagaggcctgcggcacaaagtacattgtcttagacatcaggacagtgtctatagcagtttaggaaagaaggcggctccctgggctggagacgacgcaatgctctgggaagacccctgggtgcgggtgagagaggaatccgagctgcacaaggccaatgaggggaggacgacccgcccgatttagataaaggtaaggcatacttcctagcttaataccctcctcaatgcccagcccagacctgcctttcacgtccctagctgtattcactctccctggcgaccgggcggcgtagaatcggcggccagcagtgctttagacacaggttaagtgtctgcccctccctccagggttacgcaccaccccgatgcatactgggattgtagttctgaagctacctacccatgggctgagagcagtaaagagactacaactcccagcataccaggcgcggcgcgcaccgccctgccccttcctctggggttgcgaaccgcccccgagcctggtacaggctgggattgtagtcctgcagccttgtggccgaagggctgggactggccatgagattacatgtcctagcatgctcagccaggcgcgcgcagctctgccccttcctccagtgatgcgcacagtccctgatccctgtgcacgctgggattgtagtcctgcagccctgcgatcacttgcaggtaacaagaaatttcagcttccggcatgatgggcgaaggcccccaccttcagcctcgctcctccatgccttcagagctgttccgccatgcagacggggagcctgcctgttctttaacctctcctacctgatgggagaggacaagctaccaggacagcttgtctcaccaagaaattgtgataccgcatcccccaacgtgctggcttcctgacttccaaagttgcggtaagtttgatttctcacagaactgcaagagtccgggatcgtttcccagcctgcccaaagttgccatggttctcaccctctgggaggttggcacacccagtgacaccttgtgtcccttgaaactaatctgtgtcaccttttaggcttttgagaccacttgaactctgactttgtggcatttattaccaaatctactaaaatgggtcaactgtcagattttaactccttttccacacatgttggttaggtaatctgttgattagacatggttttctccaaaaggggattatctcttcctgattgcctccaagagaaggatgaaacgattgggcgctctaaggatctatttcccaaatttgagattccacactgatcattcctgggcaaaatgtgtctttctgttccataaccacaatcttaggccagcctgagtgccatcccagcccaatgggggttatggaactccaacttagttctgtttaagttttatgt

SEQ ID NO: 67340 - DNA, 1656 bp, Homo sapiens
gaaagaaagaaagaaagaaagaaagaaagaaagaaagaaagaaagaaagaaagaaagaaagaaagaaagaaagaaagaaaaggctgcagcctaggctgtcactctttcttcactcagcccagtatctgatcacatctgtcactcagcggctggggaggcggggccttaggcattatccaatgagggacgctgggccggaaaccgtccaatcaggcacgcagctggagcgaaccacatggtttctgggggcctttgtttctcgctgcagcgggagctccaggtttatcctcagtgttctgtgtcctgtgcttatagaggcccgtcctctgtggccgtgtgacctgcaagtattgggagagccacagctaaaccccgggacccctggaagcctagaaatggtgagtgccgggtccaacgtcccgagagaggggagaggctgtttggaacggtgggaagtggctctggcgggactctgcttcctcacagtcagctccacaatctgccgccggagttctccctgcccagctcggcctcagtccccttcagccataagatggcggctgcggtgacatccggggcccggcacagtgattgtgccctggcctggagccctctttcagcagctctgcacccgcagcaccgcgtctctcccagatcatgcaaggaccacgggagggtcgtcaggggagaatcctgactcggttccctgcgggttcatgaatgggaagagctttggtccgtgaggttgttagaaacaagcgcttggtgccgcaaaacaacacaaaacaaaaaactacccagcacttagaaaatttcacaggaaggcatatttacttctgaagaagagtgctgctcgcgtccgacctgatcgcaagagcacacagaagaaaggaaggaaggttttttttttttttgaggcggagttttgctcttgtggcccaggctaaagtacaatggcgcgatctcggctcactgcaacctccgtctcccgggttcaagtgattctcctgcctcagcctcccgagtagctggggttacaggcatgcgtcaccacacccggctgattttgtatttttagtagacatgccgtttcaccatgttggtcaggctggttttgaactcccgaactcagttgatccgcccgcctcggcctcccagtttgaaaggggtttttaaccctaaacgccgttattgcctctgtgtccttcccccattggccggggtctgacctcacaatctaggctgacccgattggctactttccaaataaggaaggggttcgggtcgcagattggaacaggcggtttgggttgtttacggagcgggtgtctaggtacaaagaggtacaaaaaagttggtcctaagaacaaggaacaagaaagttaggcccttgaagaggaatctattatatctgtcagggttcacagtttcccttttctcctattaaaaatttatggggccgggcgcggtggctcacgcctgtaataacaacacttcaggaggtcgaggtggatggatcacttgaggtcaggagttgaagaccagcctggccaaaatggggaaaccccatctctactaaaagtacaaaaattagctgggtgtgatggcgaatgtctggttttctgtttctgcattagttttctgaaataatggtct

SEQ ID NO: 67341 - DNA, 1325 bp, Homo sapiens
ttcaactgcaagtcagagttaggctggggcaacagagtggtagctttgagattctgtttgtcacacatttggaaaatccaagagaaaaccacttctgtggagtgttaaataaatagcaggcagttagactgaggtggctctagtaccctgagttcctacattaaaaaaaaaaaaaatcaaaggcaaatacatttcttgtaaattgctaccttagggggaaacaaaattcagatttttcagatttaagcaaccacaaaccttcaattaacttctgattacataaccaggcaatgacaacctgaatagtctaaataagatgactacataactggaacgagtcagttactgaattcggtttgcttcatcctgcactttataaaaaactttccttcaagctcttcggctggacccccaaccacaaaccgtggctgggtgctctctgagcataaatcactgttaacttcaataagttttcaacattttaaaggtgactcccatagtttttaaacaggagaaggaaaagactgaggacccccgggatcacagcacttcccacgcacaaaccacacacggggtctggactctgccctgaggacgcttccattgtccccgcagtcggggcagacgcaagaacgcgcgcggctcttcccagggtgggctccgggcgggaagcgggagaacggaacgggatgcccgcccagggtcccggctgctggcccacctcgcatcctgtgcccggaggtgatcgacggccgagctgtgcctgccggggactccagtccgcagactccggagctgacagctgggaggccccagtcccgtcactgccggttccggccggtttcaaccagccctgcccccacctcgggatgcgcggcctggcacactcaccatttttcggcttccgggatgtcgtggagtcttagctctggatctcacagcatctgcaagtcagagggcaacagaggctgcgacagtcaccgggaactactagagcagaggatactaagcaatgaagatggaccctgagctctggctggagcgagacaaaggccccgccagctccaggacaccgccccctctaccttggctgcgcacctgattggacagttcccactctagcgcccatgattggatacagttccatgccccgccccctcaggtcatgagtgacaggaggcgtgatctgagaatgtgttgaataaggcaagagttacaggtttttcctgaacccttttctggcgcgcttccttcctgaattggaaactggcccttcctggggaacatttgcatttaactttgtatataaagttatctttatttgt

SEQ ID NO: 67342 - DNA, 1338 bp, Homo sapiens
tctcaaaagcctaaaaggcgacacagattagtttcaaggaacacatggtgtcactgagtgttccaacttcccagagggtgagtaccatggcaactttgagcaggctgggaaacgatcccagacccttgagggtctgtgagaaatcaaactttcggcactttggaagtcaggaaaccagcacgttgggggaggcgggatcacagttacttgctgagacaagctgccctggctacgttcactcccgtcaggtaggagaggttaaagaacaggaaggctccccctccgcagggcggaactgctctgaaggcatggaggagcgacgctgaaggtggaggcttcgcccaccatgccgggagctaaaatttcttaaccaatgccggccagcgatggcagggctgcgggactacaatcccagcgcgcacagggatcagggactgtgcgcatcactggaagaagcggcagaacggcgcgcgcctcgctgagctttctgggagatgtagtctcatggcaactcccagccttttggccacaaggctacgggacctacaatcccagcctgtaccaggatcgggagcagttcgcagcactagaggaaggggcagggcggtgcgcgccgcgcctgatatgctgggagctgtagtctcttcacggtttttagccaatgagtaggtagcttcagaactacaatcccagtatgcatgggggcggtgcgtagtcctggaggtaggggctgagaggtgtggacttaccggtgtccaaagcattgctagcagccaattccatgccgccccgttgccagggagagtgaatacagctagggacgtgaagggtaggtctgggctgggcattgaggagggtattaggctaggaagtatacctcacctttgtccaaatcgggtggttcggcctcctctcattggccctatgcagctgggttgcctctctcacccgcacccaagggtctttccagagtgttgcgtcatttccagcccagggagctgccttctttcctaaactgcaatggaaactgtcctgatgtctgagacaatgtccgttgtgccgcagccctctgccttctctagccagagcgcgagctcagctgcttttgagagaaatcagccacctggcccacctgtgcacaacttcagagctttgtagggggtgacaaggactgtgtcttcagggaaatgtcacgggcattagcgcctttttcgcaaatgtgaaagttgagaaatcaagaaggttaattattgggttgcccaagatctgctaagagcaaaggagaaaactccgtttcccaggcatgtgtcttgtgagccatttttaaatcaaccctct

SEQ ID NO: 67343 - DNA, 1330 bp, Homo sapiens
aaaaacagttgagaatgtgaattaggaaaggcaagctggcatttggaaatgtcagaaggaactagaaatttagtattttagtttatttgcagtttaaatctaactgcaggccagagttaggctggaggaatggggctgggaggtacacttgagaccccgcttggaacgcatgtgaaaaatgcaggggaaaatcagtcccctgtggagtgtgagaataattaagtggcaggcaattacactgaggaggctctagtccccggctttctacttaacagcaacagctacgtaaatgtacctaaccgattattaaatatagttttcttcatcatgcaccttataaaaagtctttccttcaagctcctcccatgaaccacaaactacaaaacatacttttgtgctctacaattattgaatcactctttgattaaattctttaatattttttgcgatgactgccacagatttttaataggagaaaataggaaccgggaaccccacagaccaaagctcttcccattcatgaacccgaccccaagtcaggattctcccctgaccaccctcccatggtccctgcacaatctgggagaggcgcggcgctgccggtgcagagccgcccagagagggctgcaggccagggcacagtcactgcgcagggaagagacaggacgcccgggggcccggctgtcggcgcagccgccatcttatggctgaaggggactgaggccgagctaggcaaggagaactcggagcgcagattgtggagatgactgcggggagtcctgagtcccgccacagccacttcccacaggtttcaaccagcccttcccctctctcgggatgtcggacggcactctcaccatttctaggcttccagagggtcctggagtcttagctgtggatctcccaatacctgcaggtcacagagccacagagtctgggcctctaggagcagaggacaaacagcagtgaagacgagaccggagctccggctgcagcaagagacaaaggccgcgccaaacccggaagccgccctgtccggtccagctgcgtgtctgagtgaactgtccccagctcagagtccctgattggataatgttaaaacccgccccttcaggccctgagggacggaagatgtgatcagatgctgggctgaatgaagtgtgacagcctatgctgcagccttttcaggcaaggcttcctccctgagctgagccaggcccacccgagagggtgtttgcctttaatcttgtgtataaggtcatatgcccttataaataatatgctatatggctattcacaaatgaaaagaatataataacccaattgttct

SEQ ID NO: 67344 - DNA, 788 bp, Homo sapiens
ggctccttttaaaaatctcaggctgctagttcaaaggactaggagccaggaaggtcataaaagctgaaattttaaaataattatttttttaaatttgtgaatagccatatattatttataagtgcttatgaccttatacacaaggttaagggaaaataccctctaaggtgtgcctggctcagctcagggaggaagccctgcctgaaaaggctgcagcctaggctatcactctttcttcactccgcccagcatttggtcatatcttctgtcactcagggcctgaaggggcgggcccttaaaccgtatccaatcagacacgcagaactgggaaccgtccaattaggcacacatttggagcggcgaggacggcttccgggatgtggctgggccattgtttctctctgctgccggagctccaggtctacccttcactgctctgtgtcctcagcgtgtgtggcttcgtgacctgaagatactgggaaatccatagctaagatgccaggaccccctgaaagcctagacatggtgagagtgctgggtccgacatcacgagagaggggaaggagttgctcggaaccggtgggaagtggctgtggcgggactcaggcctccccgcagtcagctccacaatctgctccctgagttctccttgcccagctcggcctcagtctccttcagccgtaagttggcggctgcgccaacagccggggccccgggcgtcctgtctcttccctgcactgtgactgtgccctgcctggagtcctctctggcagttctgcacccgcagc

SEQ ID NO: 67345 - DNA, 954 bp, Homo sapiens
ctcccaaagtgctgggattacaggcgtgagccaccgtgcccggcccaattgtgacatttttctatgccaggcacctgagtgatctgactgtcttgtctgggaccagcccacaggtgggatagttctgctgaacccagaactgaggggatgtgactcttcttctgtcttggtgctgctcgtagaggacattgtgacatctcactgaaccttgcacttagttgatgtgagtctcctctcctgccttggcactgcctactggggcattgtgacatatctctgggcctacatccaggttatatgactctcatgcctgtgccctcaccacattgtgacatattgctgggtccaacaccctggtaatgtaactctactgccaacaaggaacattgtggtatttttttcacccattacccaggtgatgtgactctcttcttttgcgttgttctgctcacagggggaattgtgacatatcacttggcccagtaccaagcaagtgtgactgttctattcatcataagtcctgctttcaagggagattgggacatattgtggggctcaacaccaatgtgacattactgttttgccttggcccagaccttaaaggcactgtgacgtattgctcggctcagcaacaaggtgacgagagatcctgtgtggacattgacaacagagagcattgtgacatatctttgggagcatcagctatttgatgtgactctccttttataccaaggctttgctcataggggagaccgtgatgtatcttctggcccagaaatcaggcgatgtgtttctcctgcctgagctttgctcacagggagcattgtgacatatcactgagcccagcacccaggtgatgggactctactgcctgtcccctgctttcaggaggaaattgtaacatatctctgaccaagcacccaggtgataagtcttctgcctggtgcctgttct

SEQ ID NO: 67346 - DNA, 1739 bp, Homo sapiens
tcttttcatttgtgactagccatatagtatatttataaatgcatatgaccttacacacaaggttcaatgcaaacaccctctagggtgggcctggctcagctcggaggaaagcctgcctgaaaaggctgcagctaggctgtcacgcttcattctgcccagcaactgatcaccctctgtcactcagggcctgagagggcgggtcttaaacattatccaatcaggcacgcagctggagcgacaggacggtttccggaatatggcggggcgtttggctcttgctgcagccagagctccaggtctcgtcttcatttctgtgtcctttgttcttagaggcccagcctgtgtggccctgtgacccgcagatattgggagatacacagctaagactccaggaccccctggaagcctagaaatggtgagagtgccgagtctgacatccccagagagggggaggggctggtcggaaccgtgagaagtggccgtggcggacttaggtctcccggcagtcagctccacaatctgcgcccggaattctccttgcccagctcggcttcagtccccttcagccataagatggcgactgtgctgacagccgggccccgggcgtcctgtcttccctccgcagtgactgtgcctgacgtgtagccctgtctggggagctctgcacgcgcaattccgcagtctctcccagattgtgcaagaaccatgggaggggcgtcaggtgagaatagtgactcgggatgcgggttcatgagcgggaagagctttggtccgtggggttcccagttcccattctctcctattaaaaatctatgggagtggccgggcgcggtggcttatgcctgtaatcccagcagtttgctgggaggcgggcagatcactgaggtccggcattcgagaacagcctggccaacatggtgaaaccccctctctgctaaaaatacaaaaattagccggatgtggtggcaggcatctgtaatcccagctatgtgggaggctgaggcacgagaatcgcttaaacccaggagaccaagattgtgccattgcactccaggctggttgacacaatgagactatctcaaacaaaaaaaaaaaaaaaaaaggggagtcactgcaaaatattaaagaatttaattaaagagtggttctaaaattgtaaagcacccagctgtgggatgtagtttgtggtcctttggaggagcttgaaggaaagactttgcgcatggtacaaaaacgcaaattcagttattggttaggtagggttacgtagtttcttaatttccatcttcagcttacaaaatttcctggttatgtaatcagagcttaattccagttaatagttaaccctgtatttgttttccccagtgtagtaatttacaaaaaaaaaagcatttgagttagttttttgtttttttttttttttttttgagatggagtttccctcttcttgcccaatctggactgcagtggcgcgatctcggctcactgcaccttccgcctccgtgttcaagtaattctcctgcctcagcctcctgagtagctgggattataggcaggcaccaccacgcccggctaattttgtatttttagtagagacggggtttctccgtgttggtcaggcttgtcttgaactcccgacctcgggtgatccgcccatctcggcctcccaaagtgctgggattacaggcgtgagccacggctcccggcttgagttagatcttttaaaagtaggaattcag

SEQ ID NO: 67347 - DNA, 1075 bp, Homo sapiens
ctctttgggcctcagtttccctttctgtaaaatgcaggtgaagaggcatgagctcaggattcctaaagccctacggggctgagcaaggacggtgctttgcgtttgcctcccttcccccagcccgcccgagagggtttgctggggcagggtggcccctgggacgggttccagacagttctaggcgctcaggtccgcagctgtgctacccccgccgcccgggacgcccggtccccgccagggccctctcactgtagctttaaggagggctggggccgggtgcagcggcacctggagtctcggtggaacccggcagcggtgggcgcggaccccggagaggctgccccgagcccgagcaccccctgaccgggcgctcaccacgggtgttgggacaagcagcggagcctgcgggctggagccaggctcggaccctccgcgccggggcgggcggccgagcggacgcagctggcagtggcggcgggagagcgccccggatccgcccggagcccaaccccgtggcacttcggctggctgggcagcggcgctggggacaacgcggggccttctgcaacgagcgcctgcgtgggactccaggggccggcgccccgctccgctccccccaggcctcaaccccgctggctacccgcgctgaaacctcacctgccgccggctgcaaacggactgcgctccaggtgggtggaaacgtccttctcctactttctgggctcactcggctccctgtgacgcgatcccgcttgcacccttgcccttcacgttgaccgcagtggctggtgggcagtgggggacaccctgggctccgcctgggttttctcttgctggtgacttgggccctggcgctcagtgtccctggtcgttagacaagggtgccttgagccacttgttgttcaggcggtttcttctttacagaaagtggccccccacacgcccttcctggtggcaggagcagggcagtgggcagcgtttctgccctgctccatggggctggggttggaggcggctctcccattcctgctgtccggacaggagcggggcctttctatccgcagacttttgctga

SEQ ID NO: 67348 - DNA, 884 bp, Homo sapiens
ctctgctcaacacttgggtgattttattctccttccttagctcagcccacggatgggattgtgacatatctcttggccaccatccagctgatgtgactcttctctttttgctaggttctgctcaagaagagattctgacatattgttggaccaaacaccaaggttatgtcacttttgtgccttggccctgacctcagaaggcattgcgacatactgttgggttaatcaccaaggtgatgtgggacttctgcctggaccctgcccacactgggcattgtgacatttagggcccatcaactatctggcatggccctcctctcttatctgaccgttgcctataggagagattgtaacacatctctggatttagaatgtagatgatgtgactcttctctcctgactgggccatggccagagaagggagagtgacttaccactggatccagcacacaggttatatgattcttctttgtgatctctgcacaaaggggtcattgtgagatatctcagggtttatcacctagatgatgtgatgctccttttcttcctggaacctgtctacagtgggcattgtgacatatcacttggcccagcacctacatgttgtgactctgatctcatgcctgggccctgcccactggggtgattgtgacatataagctgggcacagccatgaggttatatgacactcctctttttttgagttctactcacagggggcattgtgacatacctctgggctccttacctaggtgatgtgactctttccagggtcctcctgtcagtgggtattgtgcccaagatgtaattgtgatgcatcactggtcctagcacctaactgatgtgactctcctctccttccaaagccctgcatttattgttta

SEQ ID NO: 67349 - DNA, 1086 bp, Homo sapiens
ataaatgactttccttcaagcctctcccatagacaacaaactacaaaccatagctggatactctatgattcttgaatcactgtttgattaaattctttaggccaggcgcggtggctcacgcctgtaatcccagcactttaggaggccaaggcgggcggatcacgaggtcaggagttcaagaccagcctggccaacgaggtgaaaccccgtcccaactaaaaatacaaaaaaataaggccggcccagtgacaggcgcctgtaatcccagttactcgggaggctgagccaggagaatctccagaacccgggaggcggaggttgcagtgaggggagatcgcgccactaaaccctagcctgggcgacagagcgactccgtctcaaacaaacaaaaaaatcgttaatatttgtgcagtgactcccatacatttttaataggagaaaagaggaactgggaaagccacggaccaaagatcttcccattcatgaacccgcaccccgagtcaggattttcccctgacgaccctcccgtggtccctgcacaatctgagagagacgcggcgctgcgggtgcagagctgccaagagagggctccaggccaaggcacagtcactacgcagggaagagaaaggacgcctggggtcctggctgtcagcgcagccgccatcttatggccgaaggggacggaggccgagctgggcaaggcgcagattgtgaagctgactgcggagaggcctgagtcccgccacagctacttcccaccagttccaaccagccctttcgccgtctctcgggatgtcggaccgggcactctcaccatttctaggcttctagggggtcctggcgtcttagctgtggatctcccaatatctgcaggtcagagggccacacaggctaggcccctaggagcagaagacacagagaagtgagagcaaaacctggagctccggctacagcgagagacaaagaccccgccaaacccggaagccgtccagtccgctccagctgcatgcctgattggacggtttccagcccagcgtccctggttggataatgcttaaatccccgccctgtcaggctttgagtgac

SEQ ID NO: 67350 - DNA, 388 bp, Homo sapiens
tttgtttgattcaagctacccaccacatcacttttttgataagtgtgaaaatgtcctacttacctggaacctgggttcttttaattttgcctctcaccaaaccagcccattgggattctgttcatccagctaggaaatttaaaaatacctgacaccagtgagcctagccttcctcacacacaaaaaaactttggcctagtcaacaagagtcacctttggcaccttattgcatgttcgctcttgcttcacaggaatttggccagacaccatgtactcttatatttgctttcagtatcacagtctatcttctaaaaggagagctagactttctttccattaccataaagaccctacttcagccacaatgacaaaaagataagattgcact

SEQ ID NO: 67351 - DNA, 1004 bp, Homo sapiens
gtatcacaattcccactgtggaccccagaagaggagtcacatcatctaggtgatgggcccaaacatatatcacagtgacttgtgtgtgcaaggaccaagcagaataattacatcactggtgtgcttggtccagtgataagtcactctctattctgtgggcacggcccaggcagtagaggagtgtcaaatcacgtaggtaaaagagggcatttatctgtgcttttcccacaggagagattgcagtgggtcaacagataggtcacaatgcttcctgtgatcagggttcaggcagggaactcacatcatcttggtgctgggcacagcagtatgtctcaatgccttccaagggcacagccaaagcaaataactaacatcaccttagtgttaggcccagcaatatgtcacaatctcctttgttgtcagaacctagaataaagaaaagtcacatcagctaggtgctgggcccaatatgtcccaataccccctgtgagtacagaacagggaggaataaaaagtcacatttcctgggtgattggtgaagacatatattacaatgccctctgtagacaggtccagggtgaagcgttacatcacctgggtgttgcactcagcaatgttacaatggcctatgtgtttagggcacaagcaagagtcacataacatacgcccagcaatatgtcacaatacacctgtgggcagcaccaaggcagaagaggagactcaaatcacctaggtgcaatgcccagcgatgtcacaatgacccctgtgggctgtatcaaggcagaatagaatcacattaccaagggtctggatccagtgatatggcactgtgagctggacccaggaaacaacaaataactcagatgctaggccaaggtatatgtcacaattacacttgtcaaaaggccttgcgatgacattaacaattacacacatgtcctgagtcaagggatgagagtcaacacctcctgcatgttgggtgtaagtacagggtggactggatt

SEQ ID NO: 67352 - DNA, 1841 bp, Homo sapiens
ggtgtgtttaagtaaatgacaatctttgctattgactgggtgtgaatgtaagtttgacaatctcacctgtgtgcttggccctgtaagggcactctcttgaggactgtatgagttgcaacctactctgagaactttgcgctgctttggacccatgatcttatgtggtcctaagtctaggtatgggtcaacatctcttcaattggctgggtccagagaggagagtcctcactcacctatgagctgggtttagaaatgagtcaccatctcaactgtggccacgtttacatatgatagttacaattttaactgtggactgcatctgtgcatgagaattatgacctcatcagtggactttcaccatgtgtgacgatgacaattctaaaaattgtcagggagcgcttacatgaaacatgatctaacctgtttgctgggtcctatgatgacatgctctgtatcatctgagtgctttatacaatatatgagagtggtgattcgctataaccttcatgcagagaggagacctgagattttactcctttttctaagcctagctgtgagagacactatctcttctattgactggtatgaagtattagagtcatcatcaaacctgtgagctgggatgagatatatgttaccaatcaacttgttggcagaaagcacccaggagagtcgcatcacctggatgctgggccactgatatgtaaattttttccctgagggctgtgaaaagccaggagagtcacatcatctgggttttcaaccagtgacatgttacaactttctcctgaaagttatgtacattcaggtgagacacaacagctggcggccaggccctgcagtgtcacaatctttcctgtgggcagggtacaggcagaaaaggtatcacatgttttatgtaatggatgcagatatatgtccagatatatgtggacagggctgaggcaggagcctcccattttttaggtgtttggcccagtgaaatgtcacaatacccaaaataagtggttgctagacagaagagtctcatcacctaagttctggtttaagtgatatgtcacaatctttctttttgacagggttcagggaggaaaggagtcatatcactgagatgaacaaaaataaatgtcctaataaccccatgctcaaggtccatgtgagagagttgaatcacccatgtgttgaacccagtgacatgtcaaaatatacaatttatgcagggcccaggcaggagaagacagtaccttcacctaggtgtcaggcccagtgatacatcacaataccttctgtgacagagtccaagcagtggagaagagtcacattacctaggtgctgagtcaaaaaatatgtcacaaaaatcactgaagggagggcccaggcaggagtcaaactacgtaaattaggggctcagagatatgttgcaatgacctctgtgggttggactcaggagaaacaggagagacacataacctaggagctgagtacagctatatgacataatcacccaatttgataagcccaggcaaaagaagagagtcatatcacataagtgctgggccaagtgatgtgtcacaatcctcattatggacagttcccagaaagaaaaggagagttacatcatctaggtgatgggtctagatatgtcacaataagccatgtgggctgggatcatgcagaagaatcgaatcacttgtgtgttaagcctagtgataagtcactcttttctgtgggcatggaccaggcagggtaggacagtcataatatctaggtgctgggcccagagataggtcacaatctctactattagcaaagcccacgtaagaaaagagtcgccgggcaca

SEQ ID NO: 67353 - DNA, 1460 bp, Homo sapiens
cataagtaaaaaatgaaaaacctaactcaaattcacttcttataaattactattttaggcagaaacaaaattcaggcttaaccaatcataaacctgcaattaacctctgattacataaccaggaaatttccacctgaatcatacaaataaggtgactacataactgtaaccaattctccaatttggtttgccttctcacacgccctttataaaaccctttcctttatgtctctcaggtgggccacatattatggctgggtgttttccatttcaccaatcactgctcaaataaactcgttaacgttttaacattgactccctttaatatttaatagaagcggctgggcgcggtggctcatgcttgtaatcttagcactttgggaggccatggcgggcgtatcacttgaggccaggagttccagaccaccttccaccatggtgaaaccacttctctactagaaatacaaaaatttgccaggcgtagtggcgcaggtctgtaatcccagcttctcgggggccgggggggggggcgctgaggcacgggaatcgcttgagcctgagaggcagaggttgcagtgatcacgccactgcactccagcctgggcaacaaagcaagactccgtctcaaacaaacaaacatgtttaacaagagactgggagtctcacctgccacagctccttctacgcacacacgagtcggaattctgccctaatgacccgcctggcatccctgaacaatccgggaaatactcggcgctgcgtgcagagctgcccagggagctccagacacggcgccgcagggtccgggcgggacgccggggtcccggctgcgggcccagccgccatcttacggcgagaggggtctggggcggagctccgccagcggagactcaggttggcgacccgggagcggactgtggggaggccggtcccgccggtttcacagctcgctctcccctctcgggatgcccagccccgcacactcaccttttcccagcttccaggatgtcctggcatcttagctgtgcgtctcccagaacctgcagatcacagggcaagaggctgtgacagtcaccgggggctcccgaggtggaggacgtaaaacagcagagaccgatcccaagctgtggcgggagtgagatacaaaggccccaccaaatgccggaagccacgccctcctctccaactgggcggttcctgcgctagcgccactgattggataaagcaccagcactctctctccataccaaccccctcctctcagcattagtgcattttactgacaggaaaacaggctaaagtaggtagggtaaggtgcacagggaattacagctaataaagaagtgagctgagacttgaaatgcacttgctctttcccttacctgggtttgcttgtataatgcatcttatttactacttaagggtaagaaaaaaacatttggacttttttttttttttgt

SEQ ID NO: 67354 - DNA, 1544 bp, Homo sapiens
agaagcaaaatttaggcttaagcaactataaactgccaattaagctctgattacataagaaggatatttccacctagattgtaaaaattaagaaactaggccaggtgcggtggttcacgcctgtaattccagcactttcggaggccaaggtgggtggatcacctaaggtcaggagttccagaccagcctggccaacaaggtgaaaccccgtctctccgaaaaataaaaaaattggcctggtgtggtggcaggcgcctgtaatcccagctactagggctgaggcaggagaatcgcttgaacccggaaggcagaggttgcggtgagccgagatcacgccactgcactccagcccgcgcgagagagcaaaactccttttcaaaaaacaaaacaaaacaaaacctacataactgtacctagcaaattactgaatttggttttctttaccatgaaccttataaaaatatctccttcaaggcctttcatagaccacaaattacaaaccatagctgggtgctctacaatgtttgaatcactctttgattaaattatttaatcttttcgcggtgacgcccataaatttttaatagaaaaaaagaggccctgggaaccccacggactaaagtgcttcctattcatgagccagcacctccagtcaggattctcccctgacgaccctcccgtgatccctgcacaatctgggagagacgcggcgctgcgggagcagagctgcccagagagggctccaggccaggacacagtcactgggcagggaagagacaggacgcccggagcccgcctgtcaacgcagccgccatcttatcgctgaaggggactgaggccgagctgggcaaggagaacccgggcacggattgtggagctgactgaaggaaggcctgaggctcgccacagccgcatcccaccggtttcaacgagccccgttccctctctcgggacgtcgcacctggcagtctcaccatttctaggcttccaggggttcctggcatcttagctgtggctctccaatacctgcaggtcacagggccacacaggctgggcctcctggagcagaggacacagagcagtgaagtcgagacctggaaactccggcggcagcgagagacaaaggcccagccacatcccggaagccgccctgtccgctccagctttgtgcctgattggacagttcccagcccagcgtccctgattagataacgtttaaggccccgccttctcaggccctgagtgacagaagatgtgatcagacactgggctgaatgaagaaagagtgacagcgtaggctgcagccttttcaggcagggcttcctcagctcagccaggcccacctcagagcatgggaaaatcctctctcttctttgctctctttcaatgtattcaaaatgtgaacaaaaatatttgatgtatattaataatacataaaatttttgttccagagaaaatcaacttttactttattgtgtattatcaataataaagctaatttgataaaacattgtaagtctctcagccgggcgccgtggctcaca

SEQ ID NO: 67355 - DNA, 1151 bp, Homo sapiens
acttatttatttatatattttttaagacggagtttcggtcttgttaaccaggctggagtgcaatggcgtcatctcggctcactgcaaccgccacctcccgggttcaagcggttctcctgcctcagccttctgagtatctgggattacaggcatgtgccaccacgcccggctaattttgtatttttagtagaaacggggtttcaccatgttggtcaggctggtcttgaactcctgacctcaggtgatccacccacctcggtctcccaaagtgctggtattactgacctgagccaccgcgcccggccctcccataaaattttaataggagaaaacaggaactgggaaccccacggaccaaaactcttcccattaatgaacccgcaccctgagtcaggattctccggtgacggccctcctgtggtccctgcacaatctgagagaaatgcggcgctgcgggtacagagctgcccagagagggctacaggccagggcacagtcactaggcagagaagagacgggatgccccggggctggctgtcagcgcgccgccatcttatggctgcaggggactgagccgagctggggaaggagaactcggggtgcagattgtggagctgactgcggggaggcctgagtcccgccatagccatttcccacgggttccaaccagccccttccccctctcgggatgtcgcacccgtaactctcaccatttctaggcttccagggggtcctggagtcttagctgtggatctctcaatttctgcaggtcacaggcccacagaggctggacctctaggagcagaggacacagagcaatgaaagcgagacctggagctccggctgcagcgagagacaaaggcgccgccaaatcccggaagccatcttgtctgctccagctgcgtgcctgattggacggttcccagcccagcgtgcctgattggacaacgtttaaggtcctgacccttcaggccctgagtgacagaagatgtgatcagacactgggctgagtgaagactgatagcctgcgctgcagccttttcagccggggcttcctcttttagctgagccaggcccatcccatagggtatttgtatttaaccttgtgtataaggtcatatacatttataaatgatatatggctactcaca

SEQ ID NO: 67356 - DNA, 954 bp, Homo sapiens
aggaaaaggagtaatagaacaggaggaagaggaggagaagagaaggaggagaagagaaagaggagaagagaaggaggaggagaagagaaggaggaggagcagaggagaatatggaggaggaaagaaggagaagtagaaggaggaaaagaggagaaaaaaggaaggaaaaggaggaagaggagaggagaggagaaggaggaggagagtaggaggaggagaagaggaggaagaggaggagaggaggaggaaaagagagggagtgcctggtctgtcccacggaccctggctgagcaacggatgaaaggagtactcagacacaggtacacagtgttagagcaactaggggtctgcctggctctagtggccaaagtgcagccccaagaagcttgagctgcttgcttttgttcagtgcaggcacaatgccaaaagccttgagcaaacacagtctgtagataattaacaattattgtttccatttcagggaacgtcacacgcgaggatgttcagaggtcagttcagggacaacttcagacaaacaagcctgatcaagacaacttattcctcactcttttgaacatacttctcaccctattcttcagggttagagaacagcagtcttcagctattctctcccaaagctactcaaagtcttttgacctttcagaaggcctgctcccttcttctacagtttttcccaccactctgactgacctctcacatctccccattttctgtttttttttttcatcaggttttgttgattgaagagtacagatgtgtgcagcaacaggtttgacaggcgcagctgttacagcttgtgttttggctttgcatgctagaattagtaaataacataagataaacatgagtataatcagtaatattctttcccaatcaaagagtgacccgcaggaatggggatctatccaggagagatgtttttgcacattgtta

SEQ ID NO: 67357 - DNA, 579 bp, Homo sapiens
cacatctctgtactcttcaatcagaaaacctgaggcaaaaaagggggaaatgtgggagatcgatcacagtgatgcaagaaactatagggaaaagaacaggccttctgaaaagttggaaggctctgcatagctttggggtacaatatctaaaggcagttgttctctaaccctgaggcagagggtgaggagtatatgcaagggagtgaaggggaagttatcttgatcaggcttgtttgaagttgtccaggaactgacctttgatcatccacactggtgatgtttcctgaaaggggaacaataaacgttaattaccggattgtgtttgctccaggcttttggcattgtgcctgcactgactaaaagcaagcagcttgaacttctcatgactgaactctggccacttgagccagatagtcccctagctgctcttacaatgcatatctgtgtctgagtactcattttatccatcggcaagggtctgtggggcagacccgcactcgccctgtcacccaggctcaagtgcaataacatgatctcggcacactgcaacctccacctcctgggttcaagtgattctcc

SEQ ID NO: 67358 - DNA, 583 bp, Homo sapiens
ccacatattaaaatccaatatccaggaccaattttaaattcaatggtattggatagcagagctacagacccagaaatgtaaaatatgttctaaatattctaaaggttctatcagaaaacagtattttgaaattaaatatgtagaagctttcataatattttctctactgaacatggtactaggttgctaactggagaatcccagcaagtcatattacttttttctaacaaaacaggccttgctgtctctaaccctgatctgatctcctgccttgagcaaataaaagagccctggaatgtgaagagacatgagacagtagtcaaatactcaggtaggtaagcatgaatgaagccgataacacagatgacaggttcaaaggtcaaaaagaatgccagactttaaaatgtgatatgggatgctctgcttcagtggaaagatttcctaaaaagcctttttttttcctctagctctgaagtaggagcatttttgtcccatacccttaaattatttctaaggactctacttcctatttagtgattttcctttgagggtaccatgagaactaaactcctctttatggctt

SEQ ID NO: 67359 - DNA, 610 bp, Homo sapiens
aaaagaacgtcccataacctagaagctgggctcagctctatgacacaatcaccctagtaggcaggtccattaaagagaagactgccacatcacataagtactgggcagtgatatgtcataatccccatgctgatagacccagagacatctcacaataacctctttaggcagagatcaggcagaagaattacatcatttgtgtgttgcacctagtgataagccattactctcatttctgtggacatggcccaggcagaagcgcagagtcacattacctaggtgctgggccaagagatatgtcacaatcttttacataagcaaaaccaaggtaaaagggaagagtaacatcagatagtaggtgttaccagagacatgtcacaatgccccctgtatgagagaatcaagcagtaaaaacacatcactacattgcttaatctagtgacatgttaaaatctttcctgtgggcatgatgcaggcagaagatgagagtcatatctcctatgtgattgatgcagagatatgtcacaaggtctcctgtggacagggtcgagactgaagccttccatccactagggtttgggtccagtgatatgttacaatacccaaatta

SEQ ID NO: 67360 - DNA, 801 bp, Homo sapiens
tattaatttttttcaggccatttgaatgcaatcagccaattagttcagtgatgatttattcaattcaagctacacaccagctgatattttaaaaataaatgtgaaaatgtgttttgttatctggaacacggaggtttttctttctgggtctcgttaagttagcccaaagtggctctgtacattcaggtagaaacatctagaaatgctcaacaccagtcacctagctttcctcaaaaagaagcttttgccgagccagtaagaattacctttgtcatttcagtgaatgttcactctatcctggttaaaatgtggccaggtactatgtaccattatatttgctttcagtttcacaatctatcttctaaaaagtaacctaaactttctctctcttaccacaaaaaccctatttcagcctcagagatgataagataagagtgtacttttacatcgtgcacgcattgggaaaataataaacagcccctgtcttgactgaggccataatgagaaataataagtatactcaaattaaggtgaggacctttggactggggctggttcatctctgtccctatgtacaagataaaggaaaaggtcaaactgaaaatgggaatgaatgacattttcatctctcagaagtgagcaacaaagaccaatgttttctttgtaaatgataaatatagcagaatgtttgcaaggctgtatctttatttgtgtactcttgtagatatactttatagggcaaagagtttatacttgtatgtaagtttcttcttctgctactgttagtatcaatacctatca

SEQ ID NO: 67361 - DNA, 1985 bp, Homo sapiens
aaaaaaaaaaaaatccaaatgatcttttcttacccttaagtagcaaataagatgcattatacaagcagacccaggtaagggaaagagcaagtgcatttcaagtctcagctcacttcttaattagctgtaattccctgtgcattttaccctacctactttagcctgtttttctgttcataaaacgcactaatgctgaacggggcgggggcagggggtgggggtgggagtggtatggggagagtgccggtccttatccaatccttggcgctggagcggcaaccgcccaatcaagcgcgcagttgaagaggagtgcatggtttccggcatttggctgggcctttgtctctcgctcccaccagagcttggaatccgtctctgctcttctgcattctccacctcgggagcccctggggactctgtgacggcctctgttgccctgtgatctgcaggtccggagagacgcacagctaagatgtcaggacatcctggaagctgggaaagggtgagtgtgcggggttgggcatcccgaaaggagagagcgggctgtgaaaccggcgggactgccttcgtcaccgctcccgggtttccgacctgaggtccctgctggcgcagttcagccccaggcccctctggccgcaagatggcggctgggcccgcagccgggatccccgcgttcagccccgtccctgcggcgcccagtctggagctccctgggcagctctgcatgcagccccgagtatttcccagattgttcagggatgccaggcggatcatcagggcggaatcctgacttggtgtgtgcgtggcaggagctgcggcaggtggggctcccgagtctcttttcttaaacattttgtttgtttgagacggagtcttgccctgtcgcccaggctggagtgcagtggcacgatcactgcaaccttcgcctcctagactcaagcgattctcgtgcctcagccctccgaaaagctgggattacatacctgcgccaccacgcctggctagttttgtatttctagtagagaagtggttttgccatggtggaagctggtctggaactcaagtgatccgcccgcctcggcctgaccgggaaatagaagcctgaactcagtgactcaagctaaggatagtttagttctgccggcggagcctctcctgcagatgtcccagcctgctcacaatagccatggacagaacctttatgcttagagaagctgcagagccctgaaaatctatacatccacaggcagatgcagttggggttggcacaaaaatggggttgggaggctttttctgggaatagagttattgttctgaggttgtttctagattttgtgatatatgacaaatttagatttaggtaagtgggttttttttttttttttttttttcttttgtgccagagtctcattctgtcacccaggctgtagtacagtggcacgatctcggcacactgcaacctctgtctcccagattcaagcgatcctccaggctccctagtacctgggactacaagcaggcgacccgacgcccagctaatttttgcggggtttcaccattttggccaggctgttctccaactctggacaagaggtaatccacccacctcggccttccaaagtgctggaattacaggtgtgagccactgtgcctggcaagaagttacttttttttttttttttgagacggagttgccctcagtcgcccaggctggagtgcagtggtgcgatcttggctcactgcagcctccgcctcccgggttcaagcgattctcttgcctcagcctcccgagtagctgggattacaggcacctgccgtcatgcgcagcatgaagttacttaattttaaaggagtattgcagcaaggggaaagcaccagctataagatattggagaattttaaaggttagagagaaaaggactttctttcataagaagaaaagaaggtcagaaaaaaagtgggaaggggagggagggatagaacat

SEQ ID NO: 67362 - DNA, 1313 bp, Homo sapiens
aggtcgtgtgactctcctgtgctgcctggttcctcttgtacattgtgtattgtgacatgtggcttgttctaacacctcgatgatgtgaatctcctgcatgggccctgtccacagaggtattataacatatctttttattcatcacctagatgatgtaactcttttctatctgggccctgccaaaagggaggattgcggcatatcactggacccagcatctaggtgatgtgattctcctgttttccctgggcctcaaatattttggatattgtaaaatattgctaggcccactacctatgggattgcatgctcctgcctgggctctgcccacagggaccttgtgacatatatctgcgtccatgacctaaaaggtgacacttcttgcctgcactgtgccctgaacaggaaatattgtgacatatccctggaaccagacaccaggtgatatggctcttctgcccctgtcttgcccccagggagcattgtgacatagtgcttagctcagcacccaggtgatgtgactctgttgcctgtgctgtgctttcaggagagaattgtaacatatccctggctgagcacccaggtgatatgacactcctgcttgtttccttccctcggggaagattgtgagataccttggctgaaatcccaggtgatgtaactctcttgctaactccctacctacaggttaaatggtgacatatactatagtcagcttataagtggaatgatgactctcatacctctagtcagctattggaagaaatactgtctctcatagctcgacttagataaatgagtcacttccttggtcttctctttttatgaaggtcataaagaattgccacactctaacatattgtataatgccctcgagtgttacaaacgtgttatcccagggcacacagcacaaaggtgagattgtttcttatatgcacacctcaccaattattaggattatcaccctcacacagggaaagagcctatggctgaagtcttgaatctcaaatgcaaacagaatctcaaatgcaaacactgtccacagttggaattgtgactcatgtatgagcctccaaccacagttgagatggtgacacatttctaaactcagaacatagcagatgaggactctactctcttaaacccaacaaattaagagagatgttgactaatacctgggcttagggccacaagtatggtcatgggtgcttacaaacatgattttagagtaaattgtgcctctcatttatactggataaagcctttgagtagtatagtgtactaaccaggcgcagtggctcacgcctgtaatc

SEQ ID NO: 67363 - DNA, 486 bp, Homo sapiens
aagtggagatttcaagcgctttaagctcaatggcagtaaaaggaatatcttcgttgaaaaaatagacagaatcattcccacatagtgcgttgttatgtgagcgttcaactcacagagtttaactattcttttcatagagcagttaggaaacactctgtttgtaaagtctgcaagtggatattttgacctctttgaggccttcgttggaaacgggtttttttcatgtaaggctagacagaagaattcttagtaacttccttgtgttgtgtgtgttcaactcacagagttgaacgtttctttagacagagcagatttgaaacactgtttttgtggaatttgcaagtggagatttcaagcgatttaaggtcaatggcagaaaaggaaatatcttcgtttcaaaactagacagaatcattcccggaaactgcgtagtgatgtgtgtgtttaactcacagagtttaacctttcttttcattctgcagtttg

SEQ ID NO: 67364 - DNA, 2228 bp, Homo sapiens
aaacaaaaacaaaaacaaataaaaccatatcgaggccctactgtgatttagaaaactggcagagcaagattttccagggagttgctatgatttctcattttcactatttataataatggaaaatatgcactccttagttttcttcttggagaaagtctgacttgtcaaacacagatgacttttcagtttagttttcaaggtttaatttcttaccttggaaatcaattaaatttgtttctttaaaatgtcgcagtaaaattgctcctccagacagatgtccacggagattctgtcctgctgcgtccgcctttcacagaactgaggttgttcctacaccagtttcagaagcgtgtaggcacgctttattacagtggcagcagcgtccctgtgcgaggtctaacccaggtgtgggccctgcagccagcccgggggtccaatgggtcctcctatggagcacaggaagaatcgtggcaggccagagatagacaaaaggtggcttttaaaagggaagtgtcaggttaccagggactgggtacttttacacgcggaccttcggccctgcccatagaaaggggcagcactgcgcatctctgaaggagtgtggcaaagggtggggcaataagaagggtggggcagaaaggagtggcccctcaggaggaaggggcggggagatcccagctactagaggacgcccgttccaatggcaactctgccaaggcgcctatgagagcctcttggcttttacctggtctgcgagaaatcaaactttgggcacaagtcatgaagccgacaagcccgggagacacagtgtcagaattacaaggtgagatcagccgcccggccaagctatcttctcgctagcaggtgaggcccgtgaacagccaagctccccttggcacggcggaaccgcagtggacgcgtggaggggctccgtagaggagggacctttgcttgggatgcggggagctgtagtctcttatctgcacccagcttgttagttgtacgcctgcaggactacaatctcagcacaaagcaggattgtagggcggtgcggatccctggagggagacagcgcggtgcgctcctgccggccatgctggctggggtggtgtcttaggcggttccagccgttagtcacagggcggccggactacaatcccagcatacaacgggagtggaggtggtgaccttgagagagggcctgtgctgtgcgcgcctcgcggggcatgctgggagcagtagcatcttagctgcttccggccgctggtcgcagggctgcgggactacaatcttcgcatgaaatggaagagagggtggtgcggatagcttgaggaaggtacggataccttgagggaggtatggatacgttgagggaggtacggatacgttgagggaggttacggatacgttaagggaggtacagcagcggtgcgcgccttgcagggcatgctgagaggaacagttttttaactgcttctggctgttggtggcagagctgcgggactacaatcccagtatgctacgggagtggggatgatgctggtcccttgaggggggggggcagcgcggtgccctcctgccgggcatgctggtaatagtgtcttagctgcttccggccgttggtcgcagggctatgggactacagtctcagcatgcgcagggttcaagggtgttgcgcagccccgcagggaggggcagggcggtgttgacctctgtttccaaacccatgctggctactgaatctgtgccacccctggctaaggggagtgagtccatagagggacttgaagggcaggtctgggctgggcagtgaggagagtatgatactgcaaagtgcgcctcgcctttgccaaaatcggtcgggtctcaggctcaccccacctcccgctgctcagttccgtttccctccagagcatcaagcctcctcccgcccagggggcctcctgctttcctaagctgctgtggaatcggcctgaggtcccagacgctgtccattgtgctgctgctctctgctttctccagccagagtgccagttcatccgcttttgggagaactccgccgcctggcctgcccgcggaaaaggtcacagctttgcagggggtgacatgggctatggcttcctggaaatgtcaccctcactagcgccttttagatagatgtgaattttgagacatgagggagagtaattattggtttacccaggagatgctaagagcagaggagaaaa

SEQ ID NO: 67365 - DNA, 1445 bp, Homo sapiens
agccatcctcttgcctcagcctcccaagtagctgggactacaggcgcaggccaccctacccagctaatttttaaaaaaaatctttcagagatgggatctcactgtgttgcccaggttggtcttgaactcctggggtcaagtgatccttttgccttggcttctcaaagttttgggattataggcatgagccaccatgcctggccaagaagaactttttaaatacttttttctaaaagaaaaaaaatgattacaaagcaaacagaaatactctaacattaccaattgcaggggagagagtcaaagtacaaaaatgattcacaaagcagaagaaaatgaaagtgataagcacatgaggaaaataatcaaccacactaacataaaacattgtaagtaggataatatcagattagtcaagattttaaaattctgtgttcagtgctggtgaccatgtaagaagacactgatccacagctagttgaaggtccattctgggttcctgtttcctggaaagcaatgcttagtgggacgggtaacttcctcatgtgacacagctggtagcagtgctggctggctgtgttccatgtctaaagtcgcagaggctacaccaggctggcaccgtggtctacaaacctgccactctctatcacctttttatttatagagatgagatgggtcactctcagacaaaaataagaggcacagttgtgggccacgacagagcagcaagcagggaaggtaggtccccagatagcggcctgagaggaaggacatacatgtgtagtggccctagcttcactcagacgctgtgtataagttgggggcagagaaaggtgtgtggcagaggaaggcccagctgcagtgtgttcccccaggcagctctgcgggttgaggacacagccaggtcagtcctttctgctcccacatctctccctaatcaaacctgttactggggaacctcagtgacaggctgggttctaggtgcatctggggactgccaaacataacatggcctaccacttgggaggaatgcaatatctgatagtccagtgtttccaaaggttggtaactgaaacagagaagttaaataatttgcccaaggccacacagctgagtcaaggaagtggggcttgttaggcatttcggccacctgcaatccaccttccaaattgcatccctatctttgtgtctcttctactattatttaccttaaacagttttaacttgactttaagtaaaactactttctaaagatttggctcaataaaaaggttataagttttatgaaaaaaaattaagttatagtgatagaggtaggaggcagccaaatgcctagacagatagagaagggtccccagtgaaacccaccttcaagtctaaaacaggctaaggactgaaagacgggaccgctggttttggatgaaacccgtgacccagaaggagaactt

SEQ ID NO: 67366 - DNA, 666 bp, Homo sapiens
atccacaccatgtgtaaacacaggggctgggaacttgcatggtaaaccaggtcagccaaacacggattaacaatgccaggcccatttcacctgcaaagtatcagcgactcttcaatcggcaggtccccagctgccttgcagcacagccagggcctagcatagcgctgcctccttccctttcacttgtcctcaggaatccccggagatccagggtgaggctcctttagtctaatgagaaggaggcattctgactttttaggttattttctcttcccagcccctggcagatggaaaaagaaaacaaaacaaaacaaaacaaaaaaacaaacaaaaaaaaccccgccacaataattgctgcttgcatgaatgacctcaatacgggaagagtgctgagcgcctaagtccttgcactgctgccaggcctggcgtcatcatgattaacacagcaatcaccggccagggagccgggccgctctgcctaccagacaccctgactgggtgacttacggctttatatttttaaattggcctctctagcaccgtctgataaatcaacacacaagtcattaaatggttcattatcccagtaatatgattcattctttgtgccaagaaatgcaggagatgtcaggaaacttaaaaatatctcatttgaagccatgagtg

SEQ ID NO: 67367 - DNA, 1031 bp, Homo sapiens
atccacacctgagctgctcacagtgattccctgggggagccacagaattctaaacaagttgagggatcagaaggaaggaagtttaagcttcaagattccctgagtctacctcactgggtacaattaaattttaggtaaaatgtgaggatggaaaacgaattctggttataaagaaaattcctttttttttttttgcatgcccaacttccaggcccatgaaatcttcacctgttaggtacgaaggtctcttaaattgtgctttcacaattcagcctccagcccggggccaaaatcaattgcactttggaaactcctggggtggcttttataagataaaccaatgccaggacccattccagatcaattaagtcaagatttctgggaaaggggctcaggaaatgtgtactttttaattaaaaactccccagtttattataatgaactatcaaaattgataaccagtctccaaccccaaatccaaaaccaatgctccgctgaagtccgtaaactgggcaggctgccctggaggcccactgcccagtgctgctgtttgcaggatttacggctccatcctccaggagtctctggagcacagggtagctctggtgtcactgctctcccatttacagctgtccgtcattgcttctccgccttcccaggtgcagccgtgatcacagcagggccctcacaacctgccccttcctctatgcaatgtctctcatggaagctttcaaattcttgtagcattctgacccctgaatttattgtctattgattgcatgggattcattactttctattgactgctcatgctgctggtattgtggataaatgctaattcctcaataatttataccatatgtggatcatccaaggcaaaaaacactctttttctcccttttatagattttgttcatttccttctggggaacatcatgatccacatgaaatccggaaaatgaatatgtcaaattattttgatttgcagccaggctgacaatgcagcctcggcttcccattgacaccattat

SEQ ID NO: 67368 - DNA, 515 bp, Homo sapiens
atggttttttccgctgggtcccttgaggtccatggtaacctcttcctcattctctacaggcagatcacactttgtaataagatcagaggcagagaactttgaccagatcacactttataataagatcagaggcaaagaactctgaccagatcacactttataataagatcagaggcagagaactttgacaactatctccttgccctctggccctggggtcagggctactcaaacaacacctgctgtcccaaacccggagaagtgtagattttggcactggtagaggaataacagctattgttgacacttaatcttgtgggcctggaatttcaactatgttttcacaactcggagcctattgctgccacctctgtcagggaagataaatgggcatgaataatagacagatgagtttcccaaaagcccagacaggctgcagggaacacgtaatgagcagacagtgtggttcacgccggggagcccaggtttatccaggcctcatcctcactcccttt

SEQ ID NO: 67369 - DNA, 2052 bp, Homo sapiens
gaccatgaagaaagtgcagagcccagggtgaatgaagacagagtaaaaagaaaagtggcgggcaatttggttagcgtgtaggggaagagtcacaaacagctatcagtggagccaggctggtaacagaatgaaacacgcagacctggtaaagactgtgacaaactggagaagaccacttgctccaactgcgggggcggccactacacagcacactatggaattttcccaagtagaaactagatcccagtattaccggcttccagcattttaagagatgccattagtcttcccagtttttttgaaaactacacagcctgcagacacactgcccacaggctgccatttctctatctccgatacagggccaagtaaagatggaaggcgaggcaaagaagataaacggggatctaaggacagagggtgtggaatagcccctgcgaagagctcagtggctacgacaattcgtcttgtcaaatccctgctaccacatgtccacaccacggatcctggtgcgagtcattctacctcgtctgttttctcatctgtaaaatgtaaatgtcgtcaatctctgcccgtccttgacgactgattatgttgtgacactacactgtaactgaccttgtgtatgttttttttgttttttttttggtgggggggtgatgaaggggaaggacatgaagggatcggtagtggtgagaagaccaacttcccaaatattagtaagtttccatttcttaagcatgtaagtgcccaaactgtgctaacggctttacgtagaattcctccacctaagcctcacgacacccctacaaaattgataaagatatgaatccatttcacaggaagtacgtttagaaactcgcccaaggtcaaacgacctgcaagcaacaaaacccctcagaggtggctggaacagcgggactacagagctcgtgaactcggccgaggaggaaccaggcgaagccggcggacgcgagtccaggccggccaccagaaagacgccccgagcccgggggccaggcccagagttgcggaggccgcccagcccgacctgattcaggctccgctcgcgcgcccgcggccgctccctgctgggggccggaggagcgggcaccgagagacccccagccctgctcgcggccctcgccccggctcaccattgaggcccacggaggcgaccaaaggccggcgcacggcctggccgctcagcgactcccggctgaggaagggccgcttcaggtccaacacaggctgctccggggtggcgggcaccgtggcctgcaccaagggccgcagcgcgcccgccaccccgcgggacgtggccgacaggacgggcgcgaacgggcctgagcgggatgctaccgacaacatggcgacagccgctccaaccgccaagccggtcacagggacgaccttccaaccacggcgcaggcgcgaggaggcgcgggacgcgtgacgacagcgcgccgccggaaaggaaattctgcagtcctgcagggcggggcaaacttggagaggcgctgcgtcgggggacggggctacaagccgtcgctgggggcggggcttgcggcccacctgtaggtcccggtgccacctcgtcagtgtcccgagagatccccagaagaacgagagggctgaacaggggaccccactgacgtccggtgggccgactttacgatcctttagggtaaaaatttcatctaggaagacctagagataacaataaacgattatagtttaacttaggatggtaatatatctcaactacgacgaagtccagcacatagtaatcgctatgtgtttactatgatgatttttattatcttcatctaacaacaacaacaacaaaaaggccagaggcatctgtgcaaagctcgataatgctaatggattatgtttattaagtattcactgtgtatttggttttgcgttttattatacctacgttctttcatttgttatcaaggtctctatgaagtcagagctattactatcagcattttacccatgaagaaaccgaggtttagagagattcttttccaggaactggat

SEQ ID NO: 67370 - DNA, 1721 bp, Homo sapiens
ctctgtcacccaggctggagtgcagtagcgcaatccaggttcactgcagccctaaactccttgggctcaactgatcctcccacctcagatacccgagtagttgggactacaagcacgcaccaccacgcctggataattttttttaaatgttttgtagagatggggtctcccgatgttgcccaggctggtctcgaactcctgggctcaagagatcctcccgcctgcgcctcccacggtgtgagccacctttgatcttattgctatgatttttttattgataaaaactaataaatattctgagtctcaagaaagctttctgaaactatcaaagggacccaggcggcgcatcactacctgtgaggccgaccccactcacagcacagactgcaagtgaggcttacagatgggaagtgccctaagcgaggttaaacagctagttagcagcagacacggaactagaacctaagcctgctgtcccagcttcggtgcccgtgctcacagcggaagctgcctcggctcatccgtaagggcgctgattagggacgacaaagacctcaccccaccgtccccgtcccatttccgccctcccagatccccaacctccttcgagtcctctccaagtcgcctcgcctcgctccactccaggccttagcaagcattccacatgcctttaccccaaccctactgcctgtcccccaaaagatgcaggcggaaaagaccccaggaagcgagcccactcctccccactgctcagcaacaccgcctacgacgttctcagtagccgaatccctttccaggcgcatgcgcccccgaggtgggcgagcgccggtgatgtcacgcatagcgccatctccgagctccgagagtctgcgacagcagctgccagtgcgtcatcagagagcgccggaagcggtccgagaatgaagagtaagcggggccgcgaagttggagagggttggggacgttaagggtcggggtcttggtactggtgggtgaaatgggtccgggctacctgttgctgcggagtcctaacagaaccgctacaggaatgggcccaccctacctaagaaaaactgagggctggagcacgggttagcctggctcgacctctgagctagggagggatgtcagggctggaggcaggttctcccggaggctgctcagtggtgtgcgatgctagaggagggttccaggccttggctcaacttggccactatctcccggggtgaccgcggtcaagatcctgctcctttctgcgagctggtttcacactcttaacctgatgcaaagcgccgagagctgctggggaatgatatcactaacccaaagctttggtccttaggggtagaagacatgtgccaaggaggggcgtgtagacaccgttaagactgggccttcaatcagaatttttatttttcatctctgccactttctacctatatgatcaagtagattgtctcggcatgtctgagcttcagtttgctcatgcacataagtgtaatgagaaaaaatatgtgtaccttgtaatgaggtttctggcaagtaatggatgttcagtaattgttagatgtgtattgttgcagaaagacttccaagtctgttactaagcacctgtaacagatgaagcaaagttatcaggccccgcaagttgctctctacagtttataatccccatcttccatttgagggagaactagatgctatatataaaacttgcaacc

SEQ ID NO: 67371 - DNA, 441 bp, Homo sapiens
tttaatttttgagcttggtttttcttgttgcttcccttattttcctacatatccttctacctcacattgtaaacctcggaaagtggtgtaatagtttctccacagagcataaggccaggagcccatctgaaagttaatgtgggaaaaccagtttctggcaggtgttctgggactttctggttctgggaatttggtgtatagcctttgaccctgaagattaggtgccaagctacatttagcatgtgactagattgacctgtggcagaataaccacaggcaaccctaatgcccctccccttgtgggtttcccgtttcctattagcttatttttttcattcaatgtgttctgaataatattctacctaaaagtaaaatattaataaatatttttcctcatctttttttctcctgcctttttttttttttttttcagttatcccc

SEQ ID NO: 67372 - DNA, 412 bp, Homo sapiens
gagcccaatttcctgtccccgggcctgatagccagggagccaaaaccacagagagaaattgtatcgtgccaagagatagagcaggaacacgaaagagcatgggcacttcggaagtgtgtgaaaagagtgagaagtgtatccagctcgtgcagcctaggagatgcagcttgccaagtggagtgaatgctgcctttcagtgctctcacctctgctgggcatgtttgtgcagtggccaacttgctcaaccgtatgcaatgaccttgaaaagaagtctcctctctgagcttagaactgagtaatgtctcaaactgaaagagaataaatacatgctggatttgagtttgatgagacgctgcccattgagaaaatctgttctatgccttatgggattaattcaggaataagtaaattg

SEQ ID NO: 67373 - DNA, 2699 bp, Homo sapiens
cataacttgctgctagtgttggacctgggtgacgggcaccagggtcccctggactattctctttccttcagtttgaaattttccactataaaaagcttaaaataggccaggtgcggtggctcactactgaaatcccagcactttaggaggtcaaggcgagaggatggcttgagctaaggggttcgagaccagcctgggcaacatagtgagacctccgtctgtacaaaaatacaaaaactagccggtcctggtgggctaattctcctggggtcaggatgatttctgtgcaggctgcagtgagccgtgaccgcgccattgcactccagcctgggcgacagagggagacaccgtctcaaaaaaaaaaaaaggttataaagtgctgctgcattttcatattacgattattgaccgctgagggtgactgtgctgtgaggcccgccggaggcaccagaaggcacaagcctcccactgcccctttccccgccaagtcccgcaggtctcgcagtcgcgggcgcccccaccccacccctgcccaaggccagggtcgcagtcccaccgggtgacggcagtcgcgctccgcgtggggcagcggcgagcggaaagggaagccgggcggggccagggggtcaaacacgggcgacagtcccgcccagccccggacctgcagcgcgcacaagctcgggcgccctccgagcgccgcgcccaagccccgcccctcccgcttcccgggctccgattggccgagccaccgcgggggcgtgtccggcggagctggccgggacccgggcggagcgggcggggacccgggctactgcggtgtggactcgagggctgggcgcggggccggcgcagaaggtgagtccccccaccgtcccccggccgggctgcgggtcgcggggcaggcgcatgaggcgagtctcccatcaccacccccggacaagcgagctctctcccgccgcgcggtcttggcggctcctgggccggcggggcgcagtgccgctgactccagcccaagaagaggcctgggaagggcgctcctgggcggcttgcggggtgaacctgcagggagcctggggagagcggtcaggggtcagagcgtccgaggcggaatccccggggaaacgcgcagatgtaagctggtggaggtaagggggtcgcgggccacccgggactgcaggggtctcagcgcacccggtcgctggtggtgtttccgggatcctggcctcgtgtggccgccgggacctctcttctcagccccagtctgcagtctggaggcctggatgggaccactgtccccctgggcaggggcgcggcggggggcgctggggtcccagttcctctggagcagttgagtttgtgattcttggtgggagctgccaagggaaacagggtcgggcactgctcccatctcagagaggaaactattgagcaggcccgcagagagaggcggcctggaatctccctcctttctcgtttccccaacacctggcgggccgtgtagggcagaggtgtggtcagcctctttgcaggtgggaaagcagagaggttccgagccacgctgaaacttgatctctgcagcccaaggggagcactcctttggaatttgaacacctctggtatctcctggccagagagggtcagaggccaaggaggtggggaggtagtcccctaatgcgctgggatcgtccctctgcacagcgtcgttcccactggagtctgttgtgagctgagatgactctctgacttcggcctgcgtccctgcacacgtcagccctccgggctgccaaaacacaggccaggcagccctgggtgaactaggggacctgcccaacccagcccaccccgaggaaggaagggggattggccagtgtggcctggagggtgggacagcccagccaagctgacggacctgctcgggatggggtgggcatcaggcatttggagcgcaggcaacacccgctggactctgacttctggagttctgatttggtctctggttgagtgcagctttccacagctcatggttattttggagccgagcttcctgatcactcagcagggaccttgggcagtgactttgatgtggtggaagtaccttccccaagggggcttttgtgaggattaagtgaaataatgaacgtaatatgcttaactttgtgcctggtgagctctaagtgctcagtcggcggcacttccagttttgttttgctttgtttttcattaccggtctcttcccggaggagggccttccaggaatcacagggctggacagagcccaggggcggcccctctggagggagaggaggcttggcgcctgatgctgcagtctcaatgcacatggagaaaacctcacatcctcacgctggcctgggagcctgcaggatgtctcctgccggcactgcaacctcatctgtcctccttgccccatcgctccttcctccgcagcctgacttcacccattccaccttgagctgctccccaggaccggagctctgcccctagatctttgcacagctgacttcaggctggagtgagttcacttcctcccaaggccttccttcctcgacctccaccgtcctcccaggccctgccctgctgggcgcaccagtctttttcttcacagtgtttagcactggctctcagaaaagaccctgtgaatgtacttctagtctcactggcaagaagtgtgcattcctgaa

SEQ ID NO: 67374 - DNA, 1487 bp, Homo sapiens
caggcagcaggattgctgagcctgagagcccccacccctctgaaccctcaaagaaagatgcaggtctgttcgttgcctggtctcccaggcttactgagcctgcgctggggtcacccctctaccagcagccctggggccacactggggccaatacaggcactcagggcccagaggctgccaggaagctctgtcaccaacatcttcccgaggcaggccggccccaaatgagtaaggacagggctcagcttttttctcccctgtgctaagcaagggaggttcacttccctagtgagaacaattaaaaaaaaaaaaaggattcccagctgggctcagtggctcatacctgctatcccagcactttgggaggctgaggagggaggattgcttgaggccaggagttcaagacctatctaagcaacagagtgaaccctcgcctctaaaacaaatttaaaaattagccaggcatgttggtgcatgcctgtggtcccagctactcaggaggctgaggcgggaggctttcttgagccctggagttcgaggctgcagttagccctgattgtgccactgtacttcagcctgggcaacaaagcaagacaatgtctcagaaaaaaaaaaaaaagaaagaaagaaaaaagcattccccatctaactcagggctgctgtatttgccaagaaaaacctacaggcaaggtcaaaccaggatgtgaagttgtggtcatgtagagaaggtgagcatgccggggcagctcccaggaggatgttgtctgccccgcccctcgcccaacctgggaccctctgcaggttcacaaaggagggcacatgtgagcccctggcttccccagtcagtgtgtggggtcagctctcagcccagcccctttcatcgccaccagatgcccctcctcgcccttcctggtccacattttaccatcagcagctggacactagccctaagagcctagagggggtctgtgagtcatgggtgggggcagagcagcaaaggggtcccatgtggagtgttctgcaccccctccaagggctgcagagacagcgtcatggactctgccctctgctggacgggtccagggtggattgggcacccctgcctgcagctctcttctgcctggtgctgctccttcccttcctccatgccatccacttggctggcccagtctccagagctcaacaagcccccagggttgcgggagggctacctgctctctgggcacaaagcccacctgcctcagctactgaatgtggaggctttggtctgcagtctcaggtttgggttttcatcccgtttcaccagtggcctgacttctcagcacacagctgggctgggggcacacgtggccttgcttcttcggggctcctgacatcccctgcaggtgcccaggcctggatgccatgtggtcaccctatcaggcccagccaggcgtcccatcatgagacatgctcagcggcccccagcccatggagcccaggaccca

SEQ ID NO: 67375 - DNA, 1008 bp, Homo sapiens
attctcatcagcagtgcacagtttccagtttctccacaccctcaccaacacttgttatttattttttgttttgtttttttcccctcctttttttttttttgagatggaatctcactctgtcacacaggctggagtgcaatggcgccatcttggctcactgcaacctctgcttcctgggttcaagcgattctcctgcctccgcctcccgagtagctggaattacaggtgtgaggcactgtgtccggccttcctcctacctatttttattcatagatatagttcttgaacactttcagaatgttatgtaattcctgcataagtggtgtcactttacatacaacattctacaggctgtgtttttccactccacgtttgttgtttgccgtcagaccacattgatctgtatctctcattgcgtgagtagccccgggtttttatccttttccctgctggtaggcattttggttgtctctgctgggcagtcattgctctttgtggaatgcagttctggttttgtcagattgtccctcagccaggtactcggtgatcagtcatggtgggacaggtcagttctgtcactggtaatcccctaggtttgcagtatacagccaagatcagcaagctaaaaatagcagttcttacgtaaggtagtgtgggcagcccttctcaggacacttgtgatctgcaggggcaagtggaacgggactcgagggcccagcatcttctgttctgcaatgcatccaccctcacactggggccccactctggctttctactggtggccaggctcagaactgcagctcagtgacccagaaacactatgggtgtgatcagctcagccccaggcgtgccgtgtgtaccggaatgcatgtgtgcacgtggtggtggtggggccagctctcacctcttcctctgtagaggtaagagctgagtcatgcatggtgggccttgggacctgcttggaaccgtgccaagctacttatgaagcatctagtatgtgcttggcat

SEQ ID NO: 67376 - DNA, 876 bp, Homo sapiens
agttcaagcaattctcctgcctcacccctgccaagtagctgggattacaggtgcccgccaccacacctggctaatttttgtatttttagtagagacgagttttcaccatgttggccaggctggtctggaactcctgacctcacgtgatccgcctgccttggcctcccaaagtgctgggattacaagcgtgagccaccacacccggccaaggggtcagtatcaaagcgccttcgacctgccatgcttggcagaatgaccagtgtgggaggcccactggccttccaggaaggacctatttgtttacagtccctttctctcccttggcctccctgaaccacacaaactggttcaggctggttctgcctgggcagagggcacagggtgagacaggtcacggagctgggggtgacttcctggacagatctagtgccctctccaaaacccagcccgggcagccctgtccctgcaccctgggactgaagccagggcagggtgtgttggctgccaccgctggcctcttctcacagcacactcccctgcctgaaaaccctcagagcctgaaaggcagcgttcactaagataggagaggggaccacgtgcagctgagcccggccaccaccagcctcctctacagcttcctgccaagggggtccatgcacaggaccccaggctgactgagtgcagtgtcgtcctctccaggtcatggcaggcagcgccctggggtctggctgagtaggtgattctcatcccttagcccaggactcaggtctgtgtccctctcccctgcagggctggaacagaactgctgctgccccaagtcccaaggtgttagggcctgtaagggcccacggcttggggtggcccaggaccttcgca

SEQ ID NO: 67377 - DNA, 772 bp, Homo sapiens
ggtttattttccaccagagatggcctcctgggccaggctcgggtcgacaggtgaagctaggccagctgcccaggcagtccccggagagggccctgcctcaaggagcaagcacggaaggggaaggccagcctgtagagcttgcagccgtctctcctgcttcgccacagcaccgctgccagtccccttcttgggtggggaagctccttggaggctctggaagttgtcttcagtcccagccatgcagctgagctttgctcattgcctgcactccgcccccacgcctgggaaggtcaggaggcctcgggccgaggcctctgctgtttgcagatgctccctttccccagagctgagcctgaggtctggcaggagcacggggctgctgggccagggtccagcctcacgctcctgcctggggctttgcttgcaaggcctggcaaggacacgggaaccaactgtcctgccagccgagtgctgctgtccacctctcaaatcttcctcccagctgtgcctggactccatgtccctgccagaagccggtccttcgcacaggcagcatgggattcctgggaggcgcctgcctcgtcccctgcctcttcctaggaggtgcagaggggtgaggagagggtccgagaacaggcccatgcatttgaggggcatcagaaccccaccactccacccacaggggcaggccagaaccgctcctgcaggaatcagcccagagcagtgcagctcaagatggcaagtacagtcacagctgtgaccccagggctct

SEQ ID NO: 67378 - DNA, 540 bp, Homo sapiens
aggctctgacttcatcccagtctatagtctgggccaaccaagccttgaatcgcatggaccttccgaggcccaggacacagaagagctggacagcttggttcctatggagtggcagtggctacttcacgccagttcattgctaccacacaaaataccagatttgtagctttaaaacatctcacgatttttaaatatcaccaatcagatatttaaagatgaagcccactagacttagtgactcactttcaacagacagagtatggaaagggaaacagaaactttgcagtggaaaaacccagcaaacatgcccttaaccaagtgttcaaggtgaatatcactgacgtcatgtgaatatcacacacccccagaattaatgcaagacaagggagaggggcatgtcacctcccaggcatgcctcccaaagactcctaactccagtcccatcctaaacacaactggcaaattcaaactgagagatgttctacgaaatacctgcccagtactcctcaaaactatcaaggctgtgaacaaggcaagtct

SEQ ID NO: 67379 - DNA, 1490 bp, Homo sapiens
actgcagcctcaaactcttaggctcaagcaatcctcccaccttggcctcctaagtagctgggattacaggcatgaaccaccatgcctggctaattttttttttattatttttcgtagagacggggtctcattatgttgcccagtccggtctcgaactgctgggctcaagcaatctttcagcctcaagcctcccaaagtgctgagactacagaggcatgcgccactgcacccagcccattttagttttgacaagcatacagtaatacatgtgatcgctaggagaaccgaaactggatggaagatatacaggaatcctttgtactatcttcacgacttctctgtaaacctaatattattgggaaatgaaaagtttctttcaaaaatgcaacccaggccagagagaacccactggcaggctggactcagacaacaggcagcaaaaccagcgcttgcttcttctggaagccaagcaccgaggcccctggagcagacaccaccccgggtactgagctggggccagccccatatcccagaggctgaatgccacacgcagacagggttcacctcctctgcaaaagaaaggcacattctgggaagggaaaaccagctaatttacaagttttactgaacttttccccatgacaccagtgaaatgctccaagtcgacaagagttgcactcatgtgcactaaacctttatgagaacatcaatatttgatttagagcagcacttaatgcaaaaagtcgccaggaatatcgaccagcaaattactggctctttggagaggagaaaattcctttgttttcagggtaaaatgatgctcccgcccatgaccagggactggaagtagtgaatcccccgggctctcttagtggacatcctgttctctaccagcttttactcaatctgaataaaatatgtgctcccaaaatagcatctgggcacagctatatgacaaaatgatccccaaagccttcccctgagcactgagatggaggtgggggcacagatgcacagtgtcatcgaggaagaaggaaacagccttgtctcccccatctccggttccttcccggatggcaagatgctgaagtcaggcctcactaattcatggagtttggaaaggaaaatatggaaagggaaggtctggggccacccacacatttatttttctcctcagtgtgagcctcagcttaacgaaatgtccttgaatgtcaatcccactacagaagggaagaacagggcaggaacccggccagcgagctggggaacggaagccaacctcagcagaaaagttcagctctctgactccatctatggtttgggccacagccccaggccaggtagaccttctgaggctcaggacacaggaattcttccttccccaagccaaagaaagtaacttcatcccagctccaaggaacagtggaaaaattagccaaactttcattcattgcctgaaattgattctcaaatagaagcaggtggtaaat

SEQ ID NO: 67380 - DNA, 2645 bp, Homo sapiens
gatcgcttgtggccaggagtttgagaccagcctggccaaaaggacaaaaccctgtctctactaaaaatacaaaaattagccgggtgtggtggcacacacccgtagtcccagctactcaggaggctgaggcaggagaatcacttgaacccacaaggcagtggttgcggtgagccgagatcatgccactgcactccagtgtgggcgacagaatgagactcggtctcaaaaaggaaagaaaaaagcaggtggtaaaggaggtgggcaggccctctaagggtgaaaggcagttcttttggtggtctctttcagaacaagggagctctctcagagtgagctggctcacatgaaatggccacaccatatgtgctgagaaggtgcatggctcctcccagcctcctccctggtttcctttctgcagggacctcacagtcatgaaggccaccatgggacccaggacaccctggtatcttcagaggcctgctgctctgatacttattctgggatcccagcactgggggaaagatgcctctaggcccaaatgacacagatgccatttacaagagtaccccacacttctgagacattcacacagaagcctgcatttccaatggggcaaattatatctacaaagatcatttcccagaggcatctttaactccaccaactcctcccacaagacgcatggcaccacttgtacaagttcatttctccctgtgtttcttttcttttttctttttccttttttttttttttctttgagatagagtctcgttctgtcacccaggctggagtacaatggcatgatcttggctcactgcaatctttgcctcccgggtttaagcgattctcctgcctcagcctcccgagtagctgggattacatacaccagacacccgccaccacgcccagctattttttgtatttttagtagagacggggtttcaccatgttggccaggctagtctcaaactcctgacctcaggtgatccgcccgcctcggcctcccaaagtgctgggattacaggcatgagccacactgtgcctggccttctccctgtgtttcaacggcccttttatgacatccccgaggctggctatctctgtgagacacctgcacttaccaacggcgagtcccggtgggccgcccaccaaacccccgacgaaggccatggcccctgtgaccagggcacccttcccagagtgcttgacagccgccttcatcttcctctccccagaaagggagcacagcagcttcatgatgtcctccaccatgatagtcatcgtggcgggccttcgagggagaagttcagagggacagtttcaatgagcataagagtatttccatcacaatgccactctagttcctagagttttaaggaagggtcccccttttcaggaaagctcagcagctccaagcgcctgtatgacagacagcatccagacggtggaaagttcccacagacaggacaggcagcagttagtgaataagcaaatagcagcagctgagtggatgaaaggtcttctttgccctctgattaacttctgacttacgacagattaaggagcaacccggccacatgttctgctggttcatcacgagggaggtggtctgacccttctggcattagtggcctttgcactggcccggggaatgccctgcacacaaagcccagcagagaacgggaagtcccggcgtgaggcatctgagctgaggccaagccagagccagggaagggatgggaccctgtgaccacacgggcactgacctgcagtgggccctgagcagagggtcagatacctcccttctaagacggagacagtccctacaggctggactctcagacagtgccagcaggatgggcaggaagtgcctggcgtaagtctggaagcctgcaggctcccgacccaggatggctctgaacgaacactgttactaacacacacactgggctgccttaagcaactgttcttaaaagtcaacacagttgtacccatgggacactaaaagcagggaaaagataaagcagggagacaaagcaactggagaaaaaatacatgaaatcattcccaggctttgcaatatatatgaatagacagacggacgggcgagtagacctttagcacaatgacctttagcacaatcctccagggtagggaaaatgtgtggcatgctggagccagggcagggagagacgggctctggagagcccaaaggctgagaaaatcaaaggggccatgaggtggggggtctcctcagagctctggctgagcccaaggctccagcagtacttccctttctcaccagcacttcccatttcattctaggtggaaatattgaaacaggtgctacagcaattcaactgaggaagttatggatagattctattgcttattatcttttttttttttttttttgagatggggtcttgctttgttgcccaggctggagtgcagtggcatgatcacaactcactgcagccttgacctcctgggctcaagcgatcctcccacctcagcctcttgagtagatgggactacaggtatgcaatcaccacgcccagctaattttatttttatttttagtagagatgactactatgttgcccaggctggtcttgaactcctgggctcaagagatcctcctg

SEQ ID NO: 67381 - DNA, 2514 bp, Homo sapiens
tccccaaaactaatctcacctcctaaagcattaacgacccttcctgaccaaatctaaactagcgcccagattttcttcccatatggctcagcccagctccgctgccccacaggtgtcctgtcaggatccgcttcacatttataatacctagcaccccacccccagccccgcccctgccccaccagccacccccactctaccccacccctacccatcacattccgcaccccacccccgccaaacccacatccccaccccacccaacctcacccactcccaccacatccaccacccgcaccccacccccacccaccacacccatgcctacgccactcctgggtgacagcgagccagggcccgggactctagtcccagctctgctgcttacttgtgtgacttcagcctctccatgcctcagtttctccatagggacaatgactacactaacagtgtccaccccggcaccgggagggccgggctcccggcagggcggggaccctctccccaaggcactcccgggtctccaggcctgctcttggggtgccccctcctctcgcggggcgcggcctgggaggcgccccgccccggctccgggcgctcctttacctgggggagcggaggtctacgcggcgcgctcggcgatcagacgcggctgcagcccgggcctggcaggccccgggctccccgcccagctccccagccccgcggagggtcgcgcaggccttggtggcggccccggcgctggccccgccctccgtcccaccttccggctgcgccgggccttccgggaagccacgcgccgggccagctcctggctccgagctgcgcccggccttagggggagccgggggtcgctgctgggcaccccctccccggtcctggcccaccccgccgctgtcaccggggccctggcttgggttgcgggtggcgtaaggagacgaggcgcccggagaagagtcctgggaaccgcaaggccgcgctcccgcaggcccagccctgcctttctcccacgcgcacgcatgatcacatccgggccccgcgcacctgcctccaggaccgcggggacctcccggagacctccctccctttggcctggaggacccctctctccccgcagcctgggcacagaagagagcacaggggcatctggaggtcaagggtgctgcgtcagtatttggtgaatgtgtgggccggagccagatttcctctgttccagagcctgctctggagcctctgggtctgggggttgcaaaaggagaagcaggttgggtgggactcgtaatcccagctgccagtgaggctgaggagggaggattgcttgagcccagcagttcgagcgtgggcaacacagtgacatcccatctctacaaataataataaaaattaggccgggtgggtgagtcatacctgtgacctacagcattttgggaggctgaagcgggaggattgcttgagcccaggagttcgaggctgcagtgaactatgatcccaccactgcacttcaacctgggtgacagagtgagaccgtctcttaaagaaagaaaaaaaaggaaaagaactggctttgctcttaggagtcttggatggggaccaaagctgaggcaaggcagcctcttaggaaggtgcaaagggcatgaggctggggttgcagaactgcctgggaatactactttattgaggcctgtggaaagctgtccctactcttgtcatgcaaggtctggccttgaaccatctcaaatccaaaagtggcttctggggggctctatagagaattaatcctaacaggaaccctgcaaagcaggcatggttgtcactgctatattacagatgggaagctctaaacacaggctgctctgcccaaggccatcctggttagaaagtttcagggcccaaactccagcctcggtctcggtatctcaaagtctccgcctgtgaccagcactctgcctgctttccagggtgccatgggcacccagaggacggacccttttccatttttaaaagaatggaacaaacgctcttaataccaagcttccccaggccttggctgggataaaacaaccccatttattcctgaatcggagcttttgcttgagtttgggtgactttcaagagggaaagtgaactgaggccaggggaactcagcttgctgccttcctggggcctgagtgtggcgctcccgtttctctgcgggcagctccctctggcggcacattgcagaactggcctgcagactcctcccccagagatagtggggaagagggcctgtgtagggaaagatgctgggagtgaaagaagcttcaaagtccaggccctccagagaaggcaagcatgtaagaggttcatgcagcccagcgcggtggctcacacctgtaatcccagcactttgggaggccgaggcgggcagatcacctgaggccaggactttgagaccagcctgggcaacatggtgaaaccccatctccactaaacatggaaaaatgagccagacatggttggtgcaagcctgtagtc

SEQ ID NO: 67382 - DNA, 1399 bp, Homo sapiens
aagaagttgggaggtggagaaaccctggccttgggagtgaagcctcctttgtgtccagaataccagcgaaggaatgcgcccctgactcggtgcacccggcctccttggcttcctatcgcctttcgtagctttcacctttgccctcatccattcatccatgcacttatttattcagcaaacttggctgtccagagcctatggttggccctggggaatactccggccccccggcctgggacgctcccaatctaactcctctgcaaagccttcttccgtctcttgttctgtttgtttaatcctaatcctaacctcatctaggaccctatcatgcagactctgagtcagctctgaattcccacgtgaggtcccaaggtcagacaacgaccttggccaggttgatatttaagggagtaaagacatagggtgaggtggctccacccaaagagggcagcctcctgctgttgctctgcacacgtgtgggctcaactgtgccaaatcatcctattgtcccctgagccagaggccctcccgtatccaggaattcacagctttgctagcatgctgggctggccagtggtgttccagatgagtcctgcttggttagaccccagctttcccacagagtgtgtgaggtgttcctgggagctcctggagggcagggccatgtcggtccactccagcccactagagcttgccctgggctggcacacagaggcttccaaggccaccaggctgagtcatcagtggattcccatatgactgatgtaagcgtgtggccgagggatgatgccaggagaagtcaggattcctggggaattgagacaatgagtctaatgtccactcccatgtgcaggcctggcatctacacaaccagggccagtggatttccagaccttccacatgaggggccaacgtgggtctgcaggactactaggaggctcactggtaggcacaaatgggcctgcccaggactagacaaactttcacggttcattgtcctttgacatccatgactgtcttggttgcaagttataagaagtccaaacccaactggctacataaaaacatgaaaatagcgaattggctcctgtatccaggaagcttctagtaatccagtcttgggcttgattggatccagaacctcaagggatcagaagtctgcctcccagaacctctggctctgctttccaggaaggacttccctctacgaaaggtcaacttatgtggcaagatggcctcatggctgcaggcccacttctagtcggcttagcaactcctgaggctcgtcattggcccagcctgggtcattgtgcttatgcctgagccaatcgcatggccaggaatgcgggattctgattggccaaggcccctcccccattaaagtgcagagagggtgtag

SEQ ID NO: 67383 - DNA, 1701 bp, Homo sapiens
gaaggctttttgtttctttttctgtagaaatgggggtctcactgttacccaggctggtctcgaacaccccaagggatcagccgtctcggcctcccacaatgctgggattaaaggcgtgagccaccgcgcccggcctcaactggaaggctttaagtgagagatggggtgcaagggaatcccagagtcagaaaggtcttcagagagccaggaagggcttgcgggggaggggcgcatatggaaggggcgcatggaaggaactcacagattccttgaatgaatgaatgaacgacccaatgcactgacggatgaatggacaggcggccaggaatagcagccggcccccagggagccccagaccccgcggcctgaagccttggttctaggccaaggcacaggcgcggtgaccttggggatgtccccgcccaggactcagggcccggaactcggcgtctcgggggcggggagggcgtgcctggcgggacagcgcgcgcggaggaacggcgggcggtgctcctcgggtaggccccccacacatccccttggctcagccctgccggggcccgaacccgcgccgcccgccgtgtttacattccacccgcgccagccacgcggctttttgccgctccagcgccgctcggccccgcccccggcgcccgcggcccgcccctcgccgccgcgcgccagacttctcccgcgtcccgcccgccgccccgccccgcgtcccgcgccccgcgccccgcgcccggccctcggcgcgcaggccctgtcacttggccccgccctgtccgccggccccgcccctgattccccgtccctgcgcctcgcgggccggcgccgtggaggggcgggtccgggggcggggcgagggacggggcgggacgggctctgggtcccgcgcggccgctgaggggctgggagccgcggcggggcggtgcgagggcgggccggggccggttccgcgcgcagggattttaaatgtcccgctctgagccgggcgcaggagcagccggcgcggccgccagcgcggtgtagggggcaggcgcggatcccgccaccgccgcgcgctcggcccgccgactcccggcgccgccgccgccactgccgtcgccgccgccgcctgccgggactggagcgcgccgtccgccgcggacaagaccctggtgagtctactgccgcgggctgcggacagggactcctggggcccagaccgcgccggggagctgggtgggggcggggtgcggccgggtcgcgggtccccgggcggcgtcgcggggcgcccgggagggtgctgagagcgcggcggggtggggtggaggggacactgaggcagcccgggccccgggaggcgacgggccggtgagggcggcgggggcggcgggaccccgggtcgggggtcggcgggtgcccgggtcgcgggtgacaggccaccccgccatcggccatcttcctggctcgcccggccgcccgcgcgcaaagggggaaggggtactgggcccgcggcctgaccccgccgccgcctcaccccgcgccgccccgcaggcctcaggccggagcagccccatcatgccgagggagcgcagggagcggtgagtgcccgcgccgcggggccggacgggacgggacgggacgggacgggtggcgtgggggaggggcggccgcgggtgctcacccggcccggtgccacccgggtccacagggatg

SEQ ID NO: 67384 - DNA, 1423 bp, Homo sapiens
ggggagggagatggggcactcaaggcgacacgcggctcttgttgccgagcgtttcctgggcgtggagcttctatagaatgtaagctttttttttttaaggttccaaagcctatatttagtgctttcatatacgtaatctcaaaaaaaaaaaaagaaagaaatatcggcataaaatgtaagcttccagagggatacaaacgcagcccagcgcggacaccgccagccccagccacgcggttcgcatcaagcgcactcccctgggggcggggcctgcgcgagctgggcgtgtcgggggcggggcctgcgcgcttgcttccggcgtgccgcgagaggcggggcgtgtggggaggcgcggccgccacgcgacgcctggctgggcccgcaccggagaggcgtctcggtacctggcaggcggcctgctactcggagcccgctgcggggcggcggcggcggggacatgcacgtgtgagatgcggcagcgggcggcgcggacgcgaacagcagcggcggcggcgggcgcggcctcctgggcgcggggcgcgcggtgcctgagggcgggcgcgcgggcgctgggcaactgccggccgcgccgcctgcgcaggcgctggttcaggactcacacgccgcgctgaggcccgcgggcccgtcatggaggcgcccaccgtggagacgccccccgacccctcgcccccttcggccccggcccctgccctggttccgttgcgcgccccggatgtggcgcggctgcgcgaggagcaggaaaaggtaactagcagccccgcgccgcttccgcctccgcccgccgggctgcccctgcctgtgctctgggccgccgccccgcgtggcctaggcccagctgcccgggcccccggagggaacggggataaacttttgtcacgtgcttctgttgtctttgtctgcagccctttgacttcgcagcggagtgaggggtgtgcagcccgttcgcctgcccaggaaagggggcttctgagctgaaggcgtgcggcagcgcgtgggaatttgggggcgggggcagcacgctgtcaacggaagcgttcgccttaatatttgtagcttgtaatgacctaaacattgcttaaaatgtgtactgtttgttgctctttgattgcacggaaaagttttaccgcgtttgtcatgataatgcttcctgtgcaatatttggttatttaatatttgtcacaatataatgccatttaaacattaaaaaaaaaagagagtctcactatgttgcccaggctaatctcgaacttctggcctcaagcgatcctccccctcctacccttccccacctcgcctcccaaagtgttgggattataggcctgagtcaccgcacccggctcatttttacaaattttaatttcatcgtataataaatgagttttaaactactggtgaaaagggt

SEQ ID NO: 67385 - DNA, 850 bp, Homo sapiens
tagactgtgtacatcacatgtgcttctcatttcccccatcagccttactgaagacacgatgactagagggagctggtgtttggtatttctcttctcccacatggaaggcaggagctgcctgaggttatttcccttcccctaggtcagtttggccctgataaaaccccagcagtttatcttccggttaaatagtttctcctgcgggcaaaccttgttaagaagaacagagtgttttggcatgtttttaaatggttccttttccttttcccctgctgcaaacacagggggatagttctcagatacttgctttgagaacctggtagagctcctggaggtaaaactcacaaaagtatgtgtgccggggaatgactgagtccccctggaattttcaactcaagacttgtccacactgtgcagttaagttaattacagttcaggtttccctagcctgtcagttttccctggaggcctctgtctgagggtctcggctccagttacttgtgcttctctgcctttgcctgccggtcactccaatttcaggggccatgatagtttgccctgtggcttcactgttcttaactaagaattgatttttcagtttgtttagctgtttacttattaggatgtagtgacaacgtccaagcttgtatgccaggccagaaactaatagtccaactttatctttgctttttagggaaagtatttacaaaggtcctcactttgtcattcctctcaattacctttgaaactttttctttaaatgttaaattgtctacctgtgaatttaccatgttgagtgctcttcattattttctgtacattgaagttgccacctggttttcttttcctc

SEQ ID NO: 67386 - DNA, 1315 bp, Homo sapiens
gaaaggctgtatttgaagcatacattgtataaaaacattagatagttatggctggaaaaaatatttggagtgaatttacattcagaatggccagtggtttttttctagatatggagatggtgggagatcattctttgttctttgtgcttttcgttattttccaaatattctatgtgtttgaataaccatcccctgacgaccttgaaattaacataacttaatagctcaaagcttaaattatttgatgcacccaactttcccaaaaatagcacgtgattgtggagtccctccgatgccatctcctgccctgtcctctcttaattctgcctcccggctcccggatggagacaatgctgagctgtgggtgctgggatgggccccccagaagacggtcataatcaagatattagcaaagactttctgtcctgaaaaatgccgtaaacagactcggtttgacctccttaatgcaggagcactttagtaatctgtgcctaatgattttttacattaagtcccagcttgtgttgggcccttgtgaggcacagtaatttaagaacagtcattttgcacattccgatctcattatgttacattgttactgaataaagactggtattatgttgctcccataaagggcagaagtggcctgaattttatctgctgaacgaatcaatctggattatgtcagttgaaaagaattgtggactgcagtctctcccgcagatggggggggatagttttttgttttttgattttttttttaatgtatctggttgttctgaatacatgaactacgataatacctggtggtgactgagtagtagtttttctctcttatttttcaatgaagagtgtaccaattatcatttcaacataacgtattaggagatcaattggaaactgaaagccatttccccatgttaatgctgtgttgtgtttaagctgccctgacggccggtcggggctgtgggaaaaggctgagcaaataatgaggaaagagcttagaaaatagacaagggtggggcttggcaggggatgtgaactattcatcaacaactcaacgaggatgatggaaataataagtcctccttaaagaaaaaagggaaaattttttctctttctctctttctttctttttctttttcgtttcttttttttttttttttttttttttaagaaatagtttcccctttggggaggaagaaaagcacatttaaccctaactttgtcctgcttctccatgagctgatttcaaacttcctgaaatcagccaatacttccctttgaaatggatagtgcaggtttaaacagtggg

SEQ ID NO: 67387 - DNA, 1257 bp, Homo sapiens
ccatatgaaaagcaacttactaaaagtaatgccataatcccctctctggaatgaacaacaggtttaccgtcctaggtcaagtaggcatatggctgtctctggctgccaattttttttctaggcttctttaatctgtgataaaactgctttgaaagcactaatagcattttttcacagctgtgaaggagatcatatgatacatgtacctagaagggggatcatttgtttagattcacagattgaaaaaataaatcatttaagactcacttttaatttcatcatgggaagatttcaaatagtgctatctagaggaattcttgctgagttttctctctctctctctctctctctctctctctctctctctctctctctctctctctctccctctccctctctccctctctcagcagctgctagaaccagcctgtcctgtcctagttactccttggtgactgtagttgtgtaaactgtaataaccctgaccttgggctgatggacgctgatttaggaacctgcagtcctggcatttgaatcaggccaggctgctggagggcggggtggatggagcctgggactggctctgcaggctcagagcaacaggcactggtcagatcccagactgaggctccactcctgctgtctgggtgatcacaggccagttgcttaacttctctgaatctcaccggaaaatagaggaatcaaaaatacccacctacataggtgggatctgtgaaaggcatgtatgtctacaaagtccctggcacgtagtaccatttatgcgattgtttttgtttttaattggatagtggtgagaatcggggagggtggggatgggggaataaaatcctggcctttgaacacactctgctccctgtggagtcagtgtggctggcatcaaagagcgctttctgctatgaagatctctgatcccgcatgtactctggacccttcccggctgggagggctgagggctgatgtctgggctgccagcccagttctttagcccggcaacttttcacttcaccaccccagcctctgtttatcttcctataaataggtcacaatagtgcctcctagaggctccatgagagtaaagcgagttcttcaacaggaaacacttcaggcctggaaaataatatccagtaaaaaaattaaaagaaagtttaaaaatgcataagcagtggccaggcgccgtggctcatgcctgtaatcccagcactttgggagggcgaggcagatggatgacctgaggtc

SEQ ID NO: 67388 - DNA, 2075 bp, Homo sapiens
atttgctaactatagtgccggtctgacctgagcagggagggcaggggaaaactttggggcttgttatgtatacacacgcccgcattcaacccacagcaaataaaatagtcgttttagaaaatattcctaggacataaaggcacaaatatatcttcattgttttacagcctcttgtccacagctatttataaaacatgtgattatttatgcgttgggttatgagaagttcgctgggagaggctgtgaaggaggctctatcaatccagttacctggtgccctggagaggtggagggagggcttcccagtggaaactgggctgggacaggaagttggctactgtgatttgtctaacatgtgtcaacctcccggctgctcccagaaaagccagacagagggatgacaaagttgagggttagaggtcacattaaaaaaaaaaaatcatgaatgcacactgagaaagtgaaaccagaagcccctaaaaattgttcatcataccttgaggcagcccctgcctttttctttgtttacaaagtgattttggggtggcagtttcagttaaatggtttggaagaaaccgagggttttggccaaaaggttctactttaaagaaatagattttgtaagggcaagaagaattccagacagagctgggagtgtctaagttgggtgcccgcttttgttggggaagtttgtttcccttgggttttctgccttgcttgtcttctttttcctacgcaccacacctccatttttggcaatcagataccagaaaatcaatacaagtaactgcgggtccctgtgggctgcacccggctggatggactgttctcctggggttcaggaaagcctaggggagacaggcactggtattcaactgtgctcgcttctctccagctggagccgaggggagccatcgagacccctaaacagcaaactctcctaccgtggaagctctctgctgggtagggtttcattttcattttgtgtttccttcctcttggagcccgtgcgggctggtggggcggctcactgtcagctccgtgatcccgcgcttggccgcgcgcctggagaggtgcgcccgggccaggagcagagcagggcgcggcgccaggcgggggcgcccggggcctgcgtgtcgtcgcgggtgggggcgggtgtcctcgggcgcgcacccgctgcggcctccggctctggaccagcccggtggctccaagggatcaaagcgaaaaacagctttggccgcaaagggagaacgccctgagccagctcgtccctaaggactcgtcttttggcgaggaaggggacgcctaggcccgtatggggcgcgctgtggcctgggccaccgccgagggcgcgtgggtcctgcgcggcgcctgctgttcactgcattactcggacaaggatcagagcctctttatcttttaaattattaacacttaactgttttcctccccaaatcgctgcccatttcctccccaggatcactgcctttatcagaaattgggcccggcagcactggggcgtgaggtggaggcaccgctgggaggagctgggcaatcttttgtgcttgagtcatgccagatactgtgctgggtgctggggacgcggcgaggacaggagaggagggtccctgtgtcctcttgtgccccctgcccagtcacagcagaattcaacaaatgaggcgattccagagcagacagagctttagaaagtgggggtcaattaatgctcaaagaaggcccttagtgctgagctctgagaagcacttgctggctgccagcagatgccccgaagccttgttccaaaagagagacctgaaccaagaggggagtgggaggtctgggctttagaggtggtcaagcaagggaccccacagggctttggaaaagaggctattgggctggaaatgacacagaagagtccacatggccatgtgatattggaatatcagggtttttttttttaattaattaagctgaaattcacataacataaaattaactattttaaagtatacaattcagtggcatttagtacattttaagttcctattttcattaccccaaaagaaaac

SEQ ID NO: 67389 - DNA, 1261 bp, Homo sapiens
ggacaaactttcctgggcccgtcccgggggtcggtgtgggagggggttccttcaagtttcctctcctgactttgggatgatcagggtccctccaccccgcccctcgcccccgggagccgggccgcgccccccatccacggcgcgggccgatcctagggcgggacgggggcgggagaaggaaaccgggctcccctgcccatcccccgccaggggctccccccgagagcctagggggccgccgcgccgtgtcccgcgcccggcctgccggggctgctggactagagggattgattattgattggtgatcggggtcgctgaggctccgggccggcccggccgactggccgcggcaagaaggagctggctgggcggcgtgggcggcggggcgacgcgggctcacttacgggcggcggtgagggcgcgggtgggccggagctcatgcgggcgacccccgggcggcggcggctgagcgggagccggagcccgagcggcgcgggcggcggcgcatcgatgcgctgcgggctcgattgcgtctccctgggccagctctcaggccgggaatggggcggccgcgccggggccggctccgggcgctgccgggcggcggctgctggagcgcgggggcggcctccgggcccactatccccgaggcggccctgcgcccgggcgcgccggctggggctctggcgctctcgcaggccccgaggccgacagtcccggcgagggcgggcgccccgcgctccagcaccggctgcctgagcgctcctggagcagcaaaccccagacttcttcctccttctctccttccttccttccccctccccttatctttttctttttttagtctctttctccctctttttctgccctgtgtcctttttattttttctctacgactgtttttgcaagtttgtttcaaaagttcacagcatgctttcttttcttttagaccgggagacagtgatctcacccacacggtaagatcaaaagtctccgctcgcccagcctgcgggcttgggctgggtccagacgtctcccaggatgcagatgcgccgccgctggcctccccggctataaagccgcctccagcgcctttccgcgcgcaggagcgctcggagttgtggggtacggaccccaggcggggcagggagtccgaggcgggctgcggcggggctctcgggctggcggactcgggggctgaggcgccgtgcgcgttgggtgcccgcggccgcagaggccagaaccgctactcctccaggcc

SEQ ID NO: 67390 - DNA, 833 bp, Homo sapiens
gagcaccctgacaccccgaaaacagggaacctggggcccttctcaaactcaaggggaaggaaagggagcctgccaagttctgcttctgcgaggcagctgccaccaaaacccgctccgagggccccgccgggccgccctggcagctggaaaagcgcattcctgctcgcccgaggatgcagaaggcaaccgagtccccgggcggcggcggggcaactgcggaaatcacgcagccagatgaagctcataaatttcccctatgaacaattgttttcatttccctcccatgccactagatattataagtggaaagcaaaacacaagtaaatatgttcattccgctcttgcgatcggtgataaaccggaggcggccgaggccgacagaggtcagcaggccgctcgccacgggtctgcgagcggacactgccaccctccggccgcgcgcgggactgcaccggccccaccgcccggctctcccgcccgctcgctgcccgccaatgttcgctttgcgcccttcgctcaatgtgcgtgcaaattacagggacattcgaaaggacagagagctcccatatttaaaataatcatttttgttcatcataacctctcttccagagataaccgctcttattaacgttttcgtacaattatctccagtctttatgtgcattctacgatgtcttctgtgtacctatgaaatacaaagcttttcctacaatattaaaccttgatttcctaggtatcacttaaacgaaagttattgtcacacaagatagcctcacagatatctttttaggggctgtgtaatatttcaacttgggactgcaccaaaagttact

SEQ ID NO: 67391 - DNA, 1741 bp, Homo sapiens
aacaccttgaaatgtacagtcctaccaaaggaactaatacaaatccagaagcacaaggctaaagaaaaaaaaaaaaaaaaccccaatgcccattgttgaaagccaattgcggggtgagtggggtgataaggctagcccacagcggatttaggcgacgtggggagatgccaaagtgaatacacggtgacttctaaatctagacgtctggaaggggccatgagagccagacaactgggcccgaaccccgcccgggagccagggtttgcaaggggctaaaccggctggggagcctccctctcgcgggtccagcctcggcggcccgggacgccggtaggcggggcctgagcctcgccccgcccccgctgcccgccattcgggtcacctgacccacccgcggctcacgtgatccgtccccagcgccgccattttggagctccggatgaggagggggaaaccgggggaaaagagggaaaagagccgggagagaggtgggcaaggacgagggcgagggcacggccgggtcctggctggccaaacgaggctcgcggaagcagcagccgccgcctgaccgcaggtaccgcgccccggggccgcccctccgcccgctgttagcgccgccgccggccatgtgcatcctcccctcaggcctctgccggcgctcgcttcctcctcagccggccgacccccgcccggtgctagccacaagccccaagttccgtgtcccggttctgtcttctgtgcagcaaggcctgcggagactctgggcttgccctgcagctgggggtggggggaacttgctgctccctgcatactgtcaccagcccggcccgcccgcaggcgttgcttccttctccaggcgttgcttctttctgcaaatgtgagatcgcttaggccagccgggatggacccagccacgatgttctcacagcatcttttgattaattttctaagctccctcattcccgacccatcacctcagtcctttagccagtgcgtggtgtagaaaaagctactacagaaacgcagccctggtcttctgcatttattaccatcctctggagatagaatgatgtctccagagatcacggagaccatcagggaaagttcccacctcttaagacctgggggcatcggaatgaatggtttgtgtagaaggccgggatgattaataaggtggcggccactttcccaaccccaaggcggtatttttaagtttctgcagtgggctgtaatttgctatcagtctgcatcgctcttctcaggcaattactggatttatcacctctttgagtttgcactttctccagtactcccctctcactcagagtatgggttgcattattgattaaaagaaagcctggcccttcattcctttacctcactaactcgttgaaaattaacttcaggggagccctaaagatgttttttctgccctggcagtgagctattttacttaaccgtaatcgataaggtagttgcattctaggtgaaacgaataagcatttttttatcttttagatttattccagccagtataagaaacagtggcaaagaaatgtaggaccagagtaggaaactgcgttagaagatatataggtcacaccactgtgtcatatctttttatgctgtttttctgcctattgtgcttggttgcagaatcactcgttagattgtatttttagtttagattaaaatagcaatgtgcaatttattgttccattctcattagaaaatgttgtca

SEQ ID NO: 67392 - DNA, 525 bp, Homo sapiens
ggtgcacttatggtcagagtttgggcttggtttctcagagttcatgccatatcctatgcatttctgattccctacattttgttaagaaacatgctcacaggcagcagtaatgagttcttaaagagctacaaggccttgttgcacaacttctaaactttgcacaagggcacaaaagatttattgtttattttagtgtgcctattacataacaagttttctgtagtggtgaaacctgttcctttctcgtgcttttgctttttatgctgtcattccagtccttcaatgaccccatccttgtggtctgggcagtacggcttcatggatccctggttctgggggcagatagtcctgggattgaatctgagctctcccacttgtgagatttgtgatcttgcgcaaactgtttcacctctctgtgctgcttttgtcgttaatagaatgaggatattaaggttgtgagggtgaaataaaatacctaaggtaccagcacataataaacagccagtaagtggtagctggtagtta

SEQ ID NO: 67393 - DNA, 2064 bp, Homo sapiens
gcaaggaatatagattatataatcagaaaagggtttaaataaagagagagcgtttgctgaccagttgagtggacaggaattggctcagtaatttaaactaacaatccataagcaaggggctctgatagcatggcaaaccagatcacccacaacgctccacatgaagaaaaggcgtttttttcagctgtcagttctgcaggccgaaaagtttgagggcctggccctggcttctggtgaaggtttttgtgctatgtcacaacatggcagagaaggtcaaaaaaggggggacacatgcgaagaacggaagaactgaggggcgtcctggcttcataacaccccactctcaagagaactaactcattccaagaaccagtccagtcttggaagagcaggaactcacccaccaccgagagaaaaacaccaacatcccattcatgagggatccacccccaaacacagaaacctcccactaggccctgcctcccagtacagccacattgggaatcaaatttcaacgttagttttggtgttgacaaacagaccatatctaaactgtggtgctgtgtgtcttagtcccttcaggctgctataacaaagtgccttagactgggtaatttatgaacaacagaaatgtgttgcttacggttctggaggctgggaagtccaagctcaaggtgtcagcagctttggtgtctgatgagggcctgctccctgcttcataaataacacctttttgcagcatcctgacatgctggaaggggcaataaagctcccctaaacctcttttataagggcattaatcgtattcacaaggcctctgccctcatgacctagtcactttccaaagtccccacctcttaatattatccctttggggattaagtttccacataggaatttcggggggggcacatacattcagatcataccactcacattcacaaggtctctgccctcatgacctagtcaccttccaaaggccccacctcttaatactatccctttggaggttaagtttccacataggaatttcggtggggggtgggtcacgtaaattcagatcataccacactgtaatttaaaacttaggaactttgagaaataaaatgttttgtctctttgtaagagacttatcgagtggtttgaacagtgcttgccttctcattgtatcctttgcagtctagaatgagcatctttcctatgcctttggcaagtggtcagttgtcctttctaagtaattgtcatcatcatgaaatgtctccaagagttcctttaacacaaactttttggccgccataacttccttcaggaactacatacctcgtcattaaattcactttcactgagatcctctggctgcatatcccaagttttcttcagtggcagcagtgtcaacattcctgtggccaattatttatttgttctagaattcatttacatgtatgtctaattttgcttccagcattatcactttgtgggtttttgctgcacttcgattttgttggccagttcctctcttgtgactatccattttcgtaacacgtcctgcaggtttagcattgggagataaggatgcagcataactacatgttttgctgtcgggaagtgaactgcatagcacaatgaccagtcaccagctttgaaaggcttgcttagtcactgggcatgatgcatctctgtttacatagtagactgaagagctgccagtgaagtttgttctctgcagttactcacagttcgtattcccatagtagttaataactgaaatttgaaccatcctgtcgggggactgataatgtttaactaagccatagtaactgaaattcatgcagctcggaaccgtgcaaagcaaggaacacacacacacacacacactctctctctctttctctcactcattgttaggcttcttcttgtgtattttattttattccattgctgttataaatagttttttccttcttgctagcattttgctagcattttaatattgtttccatataagaaagttgttgatctggacggaatgttagttttgtggctttattgagttattatttgtaa

SEQ ID NO: 67394 - DNA, 2247 bp, Homo sapiens
accagactggtcaacacaacgagaccccatcactataaaaattaaaatgaatctcagctactcaggaggctgaggaagcagggtcacttgggcacaggggactaaggttgcagtgagctacgatcacaccactgcactccagcctggacgacaaagcaagacccccatctctacgaaaaatttaaaaattagctgggcatagtagtgcgagcctgtggtcccagctactccggaggctgaggcgggaggatcgcttgcgcccaggaggccgaggttgcagtgagccgtgatagcaccactgcactccagcctgggcgacagactgagagcctcacctgtaaaaaataattttaaaaaaggttccacctagtgttttccgtggtgtgactaagaaaagtatctagaaataaagcacagtcagtacctgctctcaaaaaacggctgccaatctagtttggagacagaaaaatatacccgactgagaacacagaggagcctgttttcggaagaggggcgtctttggagacgcaaaatcctctccgcgggacgctgacgggcagtcggtaaaggacttccaagcactggtcagtgacaatcgggcgctggggctttgccaaggcccggaggcggcgcgccaaaccgggcaatgcgggaagcggggcaggcccgagtggccctactgctgccgtccctactgatccctgcgcatccgccacagagcagggaacggcagaaaggaggaaggagggggagttccgtaaatcaggccctcaggggctcccaggcccgcacccctctcaagccccggggaccaccgcggagccgctgctccgggccgtgcggctcgaggcgaacctgcctcagagccgccgggccctcctatcccgagccgtatctctagctccggcctgaggtggccggcgactgcgtgcgcaaacacaagatccgcaccccactccccgccactgcagctccgcggccgcgctcagagtctccggaacagaccggactcaatgcggaccaggcaagcggaagtgtgccgcttccttccggccagcgcagcacgagacgaggcggggaaccgcgggaggaggcggggcctagtgttgacgaacagctcccggggcctatgggcgcgggggcagccgcccggcctctccggcgcgccccctccccggggctgttgacgccccccagcccctcatttccacaaagctccgcggcggttctgccctccttgtacccgcggcgcgctgcggcccgtggcgcggccccgttcccgcctagccccgtcggcctccttcccctcccggagccgcgcgtgaggacggctgaggccgcaggtctgtggcggcgcgccgggacgcgcgggcgagggtctaccgagagggcgggcgggcgccggcggaaccctcggctacagccccgagcccctggggccgcccctccccgccgcgtggcgcagtcggggggcgcggccgcggcgtcggggcgtcgggaggggcggagcgcgggagtgtctgccgggacgcgggccgggctgggctccggaaggaccaagtttgcggagcggcttctgctcgtcggccgtgcggcgaggcagggcctgggctgcgaccccggcggccgctcgcggtcttgggagagctggggcgcgtgcctgaacttcccggctgcccctgtccttggagacctacctgatggggacgccaggtgtgcaggggcgtggcgcgtaggtaagcggacccggtgcctgcctcgtccaggggatgctcactagagcgctaggcttttttatttttattttttagagacaggggtctcgctgtctcgcccaggctggagtgcagtggcgttatcacggctcactgcaacctcgaactcttgggctcaagcgattctcccacctcagcctctggagtagctgggaccacaggcatgcaccaccgagcctggctattttattgtatagatagggtctcgctctgttccccaggctggtctcaaactcatggtctgaagtcatcctcctgcctcaacctcccaaagcgctgggattacatgagccgcctcgcccggctagcgctagtcgtccttattaataaagaatcgcttctggtcccttttcagttgtttacaatggcattccttttgatctgatggaggaactttttttcttagttcatgggactgttgcagtgcctgacacataattggtacttaaatatgtgttggttttctgcctta

SEQ ID NO: 67395 - DNA, 2021 bp, Homo sapiens
ttacaccagccacagctgcccactgcagtatcctcccaggaaaagcccttttgtgcgtggaggaggcagatggcgaggaggcagatgtgcactttttttttttttttttttttttttagagacagggtctggctgtgtctcccaggctggagtgcagtggcgagatcaaggctcactgcagcctcgaacttccgggctccagcgatcctcctgacacagcctcctgagtagctgggactacaggtgcacatcaccgcgcccaactagttttttaaaattttagtagagataggctcttgccatattgcccaggctggtctctaactcctgacctcaaatgaccctaccgcctcccgaagcgtcgggaccacaggcggcgagccaccggccggcctctgtgtgcaccgaggagccgggcagccaccgccacgatccagctttaggacatttccatcaccccactcagccttcctgcgcccctggttcctcatctataaatagagataatatacgcctaaccctctaggtcaccagcacattgcacccataattattatacttgttgatgccacactttcaggttttaacctttccaaagcgcagccccgccccagcgcagcccaagtccctgcacgcagaggcgccgatcacgggtgggaggtggatcccggaggccccgccccaggccccgcccctccgtgcgcccaagctcgaccgcctgaaatcggggaatcgggcctctgccggcgccctggcagcggcgcggggcgtggctccgggctggattggtggcgcctgggccccgcgagcgcctgcgcagtggtcaaggccgcgctcgcgccgaggggctgcgagagtgaccgcggctgctccagcgctgacgccgagccatggcggacgaggagcttgaggcgctgaggagacagaggctggccgagctgcaggccaaacacggggtgagcgcatcagcccccgccaggcttggccctcgcggggcgccgccctcgcccggagtgtagggcgcgcctccggggcggaggctctgggcgcctccccggggccccggtcccctgcgctgccctggcggcctcgtggccggctcagaggtggcctcgtcgctttcctcgtcgcgaggggcccaggaggctggcggcgggggccgccacgtgcgggacctgccctggcgttggggtgtggggtcccctagcctggagcgggctcgtcctggcgggcctggatccaagcacaatctcagcttttggagccagcagccggaccgaattcagtttttccggagttcagttgttatgacccaagtttagccgacaggtattgagggtccgctgtgttcccggtgctgagagcgcggcagggtcggaggaacgcttgccccgccgggatgacagggaggggccgcctgggaagcttggatggatcacacgcccggagaggcgtttctgataagggaccgggaccttagggacggagggcgcagtctttgagttatcgttgtccctaataccgaggcccgttttattttccagaaattattcctacatgtgaaacacggtttcgtaatacagggattcccctccccagggtgctctgtattccaaagccttctgaggttgtggttttagacgttcatcaaaacgttgtaagtgggaactagttcattgatttctgtgaggcccagtttcttatttggggagttgtttctaccaccgcaagagactgttatgtataggaaacaacagaaccgttcctttttcccgccgcctcccgtgaaatttctctattaaatttaagttttttttttccaggatcctggtgatgcggcccaacaggaagcaaagcacaggtatgggctggaaacgtgaactttttgaagggtggtttcaccaaatggatttcttttgctgtagttattttaagcaggtgtgtgactcagatttttttgttttgctggaatggtgatttggccaaaatcatccgcagggtatcttcattattgttaaata

SEQ ID NO: 67396 - DNA, 1088 bp, Homo sapiens
tgtaaaatctgagctctctgcagcctcacagtccctccagcactgccagcagccctcgttccctgcatgctctaaatcctcagcgaagacccgtcccttgctccctcgcccagcacaggccgcgagtgcccacgtcccctgcacctcgtggggcagccaagggggcaccgcgtggctcgtgtgctcctgggcagtccattttcaaccacaagacggaacagactcagaatccggaacatctctcggtgcttaagagttttcctttaacaatctttacctgtgggaatgcagagacccccccgccctgcgagaggccggcagccagggattccccgctccgcgccctcatcaccccccggaaaccacaaccgctgcgcgcgcggctcggacccccacccgccgctcccctccagcagaccctaggcctccgggaaaccgcgcggcgaccgccccgcgccccgccagatccgaaccgccggacccggcaccccggccacacccgccggtgtcgacgcagcgaggctcggagggtgcattctccgcgccgaccgctcccctcctccagacccgaggggcggagtgggcagggcgcgccggctgcgcaccgggcacccacctggggacgcgggggctggggcggcgcggggccacctggcggacccgggagcggactccggagagcagggagcccctcccccctcactctccgggccccgcccggccgccgcgccccgaggcgcagccatcccgcgggaggggaggcgcaggaggaggccagcgcgaggacacttacttaaaaggctacatcgcttcattcccagcccatcctgggcgacggcggcacctccctcgtccgctgctgggacctcgatgcccaccaccctcgcgcggcgatctggccctatagcccaccccttactccgccgtggggcggagccgcgccacagctgacccaatgagaaaccgtcgtttcccagagtgacgtgtacgcagagcaatcatggagtccagcccagccgggggcggggctcaggcggctccctacgcttcctactccagctggccccgccccacgcccgcaactgcgc

SEQ ID NO: 67397 - DNA, 1751 bp, Homo sapiens
agagaaattactctgggagtacctttcacattcaaggtgtgcagtaggaaatttataaattggcatctggctcgtccattcatttctcattggtgtggttcacgtgtgcttgcaaaggtcagacttctgcccttcgaatgtcctctctccctctcccacagaaaacacccacatgtgggtccttgtttaaagcagaaagtcctagtccttagcttttagtgaggtggatgtcatcaggcctgggttggcatcctgttttttaccatggcaagtcatatgcgcccttaagcattcctgcttttggtccaagcttcctgcgtgggaatactgcggtcctcctttcaggcagctgtgaatgacaaacggtcgctggctgccgtgacacccattgtcccgcgagagtgccctagctgggccccagtgcactcgaggcggtccctgctcgggtgcccctcccacaggcaggcgccgttgccgaccaaacgcccaggttcacccaacgccagaggctcgtcctcaattcccgcgaggcccccggaggtgctggggtccctgcagggccgggccacctgccgtggagctcaggccgcgccagaatcggatccgggaagctgcgcgccatgagcagctccctgcggccgggccccagccgctggcggcgggcggccagcatcgtcctggcggctggctggtcgcgcccggagaccgccaccccgccgtcgcgcccgccgccggccgagggcttccggctgctgctgctgcagcgctccccgcaccaaggcttcatgccgggcgcgcacgtcttctccggcggagtgctggatgcggccgaccgctcggcggactggctgggcctcttcgcgccgcaccacgggccgccgcgcttcggcctgggcccggcgccattcagccgcaccgctttcccgtcgctgcccgacaccgatgaccacaagaccgacaacactgggacgctgcctgaggacgtagccttccgcatctgcgccgtgcgggaggcctttgaggaggcgggcgtgctgctgctgcggcccaggacttccccaccaggcccagcacccgggcctggcctcgccctggagccaccgccgggcctggcctcctggcgcgaccgcgtgcgccaggacccgcgccacttcctgcggctgtgcgcccacctcgactgcacacccgacatctgggcgctgcacaactggagcgcctggctcacccctttcttgcggggcaccactcgccgctttgacacggccttcttcctgtgctgcctgcgcgagccgccgcccgtctaccccgacttggcggaggtggtgggctaccaggtaaggcctgctcagggccttgctgcggaccgccaggacgtgagagggaggacccctcccagcggcccaggcccccaagggacccccgcataggccaagcccagagagattaagcagcaaggaacgcttagacgggctggaaactctcacccctgtagaccaaagccatgctcttggtgaagtgctctctgctttcctaggctttggggtctcaaggcctggagcctgtctctccacgtggttcctccagcgtggccactgtgtaagcacttgtacatgtgtagacatagtacatctccacagccgtttaatttggttttcttggagaacagacttaatatgatccagtcttcctatttttatttatttttggtacagatgggggtcttgtctctctgtgttgcacacccaggctcg

SEQ ID NO: 67398 - DNA, 517 bp, Homo sapiens
aaatacctggttacagcctgtcccaggattcctcggatggtaacagaccttgaggacagctccaagacaggaaattaacactgagaaagccacgccagtgtccaggaggaagtcaatttcctggccctcaatggttatacatacccaggactcagtgagagtgatgacatgagctggtgctttccctgggcaccctcagtcttgttgcatcatctggttggtggcttctgtcccagagaacctttgtcctctggggcagtgtgtcttccagtgattgcctcggcatagtggacatgggcgagggggcagcttgtttctcataggacaatcttttttttaaaaagtgtccttgtaaaccacactgataacaagccctaccaggtgattggcctgctccattctctgtcccctctgaaccaccaaggtttgtttgtctgagggccatgactaagtctgcggcctttctattatctcacttttacttttgggcctgtccatcttggtccctattatagaa

SEQ ID NO: 67399 - DNA, 554 bp, Homo sapiens
ctatattaaaaatacaaaaattatccaggtgtgcgggggtctgtcctgcagaccctgacccaatgatggatgaataacgtgcactgatacagatactctgctttgccagtctgactgagcatcagggctacttacagactcccaggagagtgctgtaaaaagttgcgacctgggccttgaccagccagccagactcatgtttattcagtaaagattaattgacaaaggcttgagtcaacaccattagagggtaattgaccttgcagacatcccagatagaaagcaattaagcacctgcggtagatccaaggttagtcttaggaccacatgagtaaacaagctagttagataaactccccacattcctttgtatctactttaatttatttaattaaaggtaagcggactaggctgccttcagccagatctgttaccgaagttatgcaactctcaggccttccaagagggtttctggctattataactaaattttttcccaccagcctgactgaaccctcacacaggtggagacaggagaattgcttgaacccagg

SEQ ID NO: 67400 - DNA, 1455 bp, Homo sapiens
gaagcacttgaaccctggaggcagaggctgcagtgagccaagatcatgccactgcactccagcctgggccacagagcgagattctgtttcaaaaaatatatatataaaaaattaaaaaatgaaaatattgtggaatgtatttatcagaatcaagtccaggtaaggagtgtctgtcttataattccttcccaagattaaaggcactcccatacatcacagatccacaatacaggtactttttctttgtactttttaaatttttacaatattttttataaagacgggagtgttgctatttgccccggctggcctcaagcagtccttccacctcggcctcccaaagggctgggatttcaggggtgagccaccacgcctggccaggtactttttcattgagtgatgaaaggaaagaaaacattgccgaggaaacccagttccagactgaactaggagaaaaccatgcactcctgtaccctctctctaaataaattatctgtccaggccccggccaggagagccatgagcctttctatcacctactgaccttacttaccttcctccgtgaccctgcagagccggaggagctgcggcccagctgaccgcccgtgcctgcacggtccaaccctagaaatggccatgtcttgtgcccaggagcaaaggaagtccagaaggtacagaggtcaataagggtaattattaaacacctttttttttttttttgcaatgaagcttagatacgccacacaaaaaaggggagggtcaggaacaccaatttctctccaaaaccgtttttgttttgttcatttgtgtctaggtcagattatttttttaaaaccagatggtcccaaatcgtctacactttttacctaaagataaaataaattatgccttcttttatctttgggaatcagaggagataaactttggaaccaattcgctaattgccttaataggctatatttaaaacccaagtcaggcagctcaaacaggaaccgctgtgtgtgcgtaactcagctgttggtcagtttcctccccgcccaggaatttcccccaagccaagggcctgcctctggctgagcaggtgagagcggctgagcccgtcccactcctctttaccagtgatggggcttcaccacttggaatcacaagcaggcctgaggcaatgcagggcctcgtgtcctccctgcagctgcggccaaatgcccatcaggtttggctgtggtgctgttcacgtagccatgtcctggctcatcacaagggacacaaaaccttccccttcggggaaacggagggggacaggcaacacaaggccaggaagctccggtccgcatccagggctgccagggtctggatctctctgggagggagcagaggttctcccgcactgcgattggacctaggctcaggcggcagcctcaggggtcagcacgaagccctttcagatagggaaggaag

SEQ ID NO: 67401 - DNA, 820 bp, Homo sapiens
tacccctaattcccggccccacagagccccacgcgcggcgggcgagcatctacttacgaaatgactcctgcggcctctccgaaatcccaggagcatccttgcagcgcgaggagaatggaccggggcctggactcatcagcagatctatccacagccagggaccactccctaaagcccgccgcaggcccagccctcacgctttctcttcgcaatggactttgcagcaaccacgtcggccattggctcagctcggccctcgaccaatcagagctaaggttacttccacaccggtcgttcttggcaaccagtgggtaccgttcaaatccccgccagggcggaaacgtccgcccttatccgttctcttattggtcaggttagacgtccatttctgacgccacagcctatccggcgctgcgggaggcggagggcgggctggatgaaggactgggcgagcaccgagggcgtgaacccggaaggtggcgcggccaccagtaacatgatctctagactgggacggtggggttcctgccggctgtattcgggccttggactggactgagaagctacggtgcggatccagctggggtatcaggggctaggcacgtgatgaaaatgaaggacgcggacaccaggacaggaatctcctggttcttagagaatttatttcgccacaaataattggcaaacgggatctcgctgtattgctcaggctggtctcgaactcctgggcacaagcgatcctcacgcctcagccttgcccaatgttgggattacagacgtgagctaccatgcccagcccaggattcttttaaaacttaaa

SEQ ID NO: 67402 - DNA, 4195 bp, Homo sapiens
gatctcggctcactgcaacctcgaactcctgggctcaggggattctccagcctcagcctcccgagtagctgggattacagatgtgtgccaccacgcgtggctaatttttgtatttttagtagagacaaggtttaaccatgttggccaggctggcctcaaactcctgacctcaaatgatttgcccgcttcagcctcccaaagtgctgtgattacagacttgagccaccacgcctggtctaaaaagttttttttttaaagtaatacatgtgtatgttgcattctgtccccatttgttttagtgtaattatttttctcccaagtcttttaataaaactatccttccaggaataagcaccacattgacatagtgacttgccgcagcttcagcgaccttattagagcagcttagccttagtccatctgatcccaaatcccgctctgccagggtttcaggaggctggagcgaggactgtcccatcccctgctgaggtggctgatcagccagaccggcaggacatctgctcccagcctgtctctcaatggaggaaggtgggccttgatgttgatgtcagccccaaaggctatggagggcctgcaaaccccaccacagacacacaccagccctcccacaactgacggtgtgagctgtcatcaacctcaagtcactctcatgacagccaaggccacctcacgtcactcctgacccagaatttcatcacccccgtccagaggtcacaaactaaactgaaggcccgagggacttgttcacctggctctcaggatgttactatcccccctctgaaacgagtccccaaaacttaaaaattcaacaatcggccaggcacagtgggtcatgcctgtaatcccagcactttgggaggctgaggcagacagatcacttgaggtcaggagtttgagatcagcttggccaacatggcaaaacctcgtctctactaaaaatacaaaaattagccgggtatgatggcgcatgcttgtagtcccagctactcaggaggctgaggcaggagaatcacatgaacctgggaggcagaggttgcagtgagctaagatcacgccactgcactccagcctgggtgacagagcaagactctgtctcaaaaagaaaaaaaaaaaaaattcaacaatcagattaaaaacaaaaaaaaattcctaacttctcctggaaaaaaaaaaaattagaagatacagcaactctggccctaccctccatgaggcaaactgcagttgcctcatccagacagggcatatgctgtgcacttcaccacagtccccaccactccctgttgtctcacagcacagaatccagccccattcactcatttaaagcccacctgatccctgtaaacctcggagcaggtcacttctgatctagcccaacaactctcagcacaacaggggaacctgaagcccagagaggttaaatgacctgctcttgttcaaagaatcaaagaactagttagctaaaactagttaaaactaggcaacctgcctttttttttttttttttttttttgagacggagtcttgctctgtggccctggctggagtgcagtagcgcgatctcagctcactgcaagcactgcctcccaggttcacgccattctcctgcctcagcctcccgagtagctgggattacgggcacgtgccaccacacccggctaatttttttatttttagttttagagatggggtttcaccatgttggccaggatggtctcgatctcttgaccttgtgattcgcccacctcggcctcccaaaatgctggaattacagaagtgagccacagtgctcaccggccctgctttaaatttcacaaggactgcctcaatttcagataaacttcatcatatttctaccctagcttttctcaagggagggaagctgggagaagacagaatattgtctctggttggcctaaatgaaaaagtacggtcaggcatggtggcttacacctgtaattccagcactttgggaggctgaggcaggcagatcacctgaggtcaggagttccagaccagcctggccaacaccgtgaaaccctgtcttactaaaagtataaaatttagccaggcatggtggcacatgcctataatcccagctactcgggaggctgaggcacaagaatcacttgaatccaggaggtggaggttgcgcaggtgagctggtatctcgacactgcactccatcctgggagacagaatgagactctgtctcaaaaaaaacaaacaaacctgaaaaaagtgcatttgaaatatttgatggcttcctaaaaaaactccaggaagctcatggactcccagctggaatggatcagagaaggggaagactttgaaggatcataaaatctggtttttcaagtgcctgcctagccacgataccctctgacagtcctcagataagggcttagcacccccatttccattcctgcatttctggggacacctccaaacatcccccacccctattccaacagatctactttcctttgggggctgcggtaggaaacctgggaaccagaagacaaacagaaggaaagcagggcctaatttacaactgaaaccacccatggcctgcagagacagccacgtaatgggtcgcccagggacactgaggggccagagcggagcttggcaaaatgccctatttgttttcgggaaaccgttggtgcttgttgagtcagattaataaataccttcagggtttcctctgacaacattctccagcaaggggtactttgaacctttaggccactgtgagaatcattaacaaccccccactcctgcccctgccaacccaaccactgccagtttaacaatgagcttgagtcaggctcgggcctcagaaagggtgactgctgttgtcgttaagagaacaaggcacacaaaactgccctagttcctgcctgagaaagtccaagttccctgctcacaggggcctctctgaccaccctctgtctctaaggctggccatcctgggccaacctctatgatattcagagttcattattccctagaaaacatcacttccctaggtgatctgatttgtttacttgtctataaaagtctcctcccatcctccaacaagagaaatcacaaaagcagagcctcgcctgatcttcaggcacctcaactgtgcctgccacttaacaggtgctcaatagccaggcacaggggctcactcctgaaatcccagcactctgggaggctgaggcaggaggatcacttgaggccaagactttgagacaagcctgtgcaacacggtgaaaccctgtctctactaaaactttaaaaaattcaattagccaggtgtgctggcacgtgcctgtagtcccagctatttgggaggctgaggcaggagaaccacttgaacatgggaggcagaggttgcagtgagccaagattgagccattgcattccagcctgggcaacaagagtgaaactccatctcaaaaaaaaaaaaaaggtgctcaatgaatccatgaataggtaaatcaattgttgtccactcctaggaaagccatacaccatcaaggctgcccacctgcccccttggccacagagcaggcctgtccaagggtcaaccagaaccctaggccacaaaacataccacggccttcccagcacatgacagggagtcccaaaatcgggggcctctctcacgtcacacagatgacatgagttgctctctgctatgggagtggacaattcccatgtccaaacttgtcttgggatagggacactgcttgactttttaaaagccaaaacgctacagtatttttcccagcctcctccagtaacaacctgctttgcacccagttgcaaaaggagctggagaagagattcccagacaaacttcccacccaggacctcaagtcatcaggtattccgtgagtaacaaaagcaacacaggccaggcacagtggctcatgtttgtaatcccagcactctgggagaccaaggcaggaggatcacttgaggacaacagttcgagaacaacctgggcaacacagcaagaccctgtctctacaaataatttttaaaaaatcagtcgggcattggccaggcacagtggctcacgcctgtaatcccagcactttgggaggctgaggcgggtggatcacgaggtcaggagttcgagaccagcctggccaagttggtgaaacctcgtctctac

SEQ ID NO: 67403 - DNA, 824 bp, Homo sapiens
aaactggaggcaggcacttaattaggaagaaaggaaagggtggtcaagctactcctggaacagggcagtttttcttcccctatgggggccctgctccattctgggcagtgcctggcacctgcttcccctccactataggcaatagtatgggcccttcttctgcacagccaaagataaagctcacacatgcagaggtgtttccagcaaatttagggcaatgtgcaagcttgggatctaaaggttcaggcgtaaaactaagtgagagatgacacggtagggctgggccagctcccagccagagagaccttcccacgggatacaggaaggcaggtgtttttagctgcttctccagcaaagattattttctctgcctttctcactccttcctggttacgcaatccctcactcaaccaccaaactctggaaaacagaattgcttgtttataagtcagccagagcaatcaatgagaaagcacagaaaatagcatgcagtacactgcaatacacacatacatctaatttaacttttcaccacactggagattcagggcaggctgggtggaaagaatctagcttgtccatgtccataaaaataaaaacatgaattcagtacttgtcaacagccctcctgcccttccaggatctctgccaggtgtcagggctggaggtgagggcccagccgcctcccccgggaatcccaatccattcacacaggggtggaggggggctcgatatgagtcaacacagccataatctttagttacgagctcccttcagtctcttccagaaatctctataaacccctactgtgtgccaatcacagt

SEQ ID NO: 67404 - DNA, 2025 bp, Homo sapiens
ctgccgcctgcgggtatcccagggcccctgctccacaggctggggtcgcttttgagggactgagctccctgactgttatcttctgggcccaagagctcctggacatgccaagaacctgcgaggccggcacccgccacccgccgcccgccgcccgccgcccgccgccagcccccgccaagtctcccggacaacaagacaaatccgctttggcacacagtgagacgcacaagaccgtgggcctcacctgcggtgctcacgccctcctggacgacccggagcggaggagggtgcaacgccggaggctccctcccaccagcagctctcccctgctccctgaaaagtcccacaggcggactttggaagcattttggaggcaaaaagagaccgccggccgggcgcagtggctcacgcctgtaatcccagcactttgagagaccggggcgggaggatcccttgagcccaagagttcgcgaccagtctgggcaacacagcgataccccagttctacaaaaaattagcgtggcgaggtggcgcgcctgcagtcccagttactcgggaggctggggcgggaggatcgctggaggccaggaagtcgaggctgcagtgagctataatcgcgccactctactccagcctgggcgacagagcgcctaaaataaatatgagaccgccaacacgcctgggatggtctgtctccacccgcgctcccaccaagcgctcttgcaacgcgcccagaggccaagggcgccagcgcagccaggaacgggtcctttccccaggcaccagggatcgcaagcgaggggtggcggggggtgggaggggggagacccaagcacccctccaggtcctccgcccgcacctgcgcggagcggccacatgcgcctcccctactccccgcccagtcccggatgccacctgcccgggacgccggggacatcgccgcccccactcctccccgccagcctccgtccggccagcgccggcccagtgcgccccctccccctcccggcctagtggaccccgactgcgcgctcccacggcccctgcagggcccgggggaaaggaggtctggagcccgcaggtccccgcccgcccgcccgaagccgcccaccttccgaaagtagccgtcgttctccttctccagcggctggggggccgcgggcaacagcgcgtcggtcatgctagcggcgcgggcgcggagggcggacggcggactgaggcgcggcggctgaggctggcccgagaggacgtgcggccccgcccctgtccccgcccttccccgcccctccactcccaccccgtcccgcggcccttctagccccgcctgaggccgagcactggagccctggagacgcgccccgccccgtcgcgggccccgaacccgcgccccttgaggcgctcgtcacccggagagctgcgccctgggcgcggcgcctcggggttgtctgtgggcgtcgtggctgactcaactttgcgagtgccgcgagagcgcaggaaaggcactggggtctcaggggccgcagcgaagccctggctgtggacctgcaccctgccctggagcccggggagtcagtgaggaaggcgtggatccaggcgcgtccctcctgggtgaagcccgtgcgccgcgggggaaggggccagactcgacgccacgtcgagggcgcggcgggagctctgggccctgggcccggcggtttggaaaagcttttcccaagaggggagcccatggcggagggagcgttgactgccccgccgagcgccttgcccggactactcgggcttgttggcatgggatcaactcagccgattccctgtccgcgctgcaaagacgagtgggatccgctgggctcgcggactgccctgagagaggggaccaggaggggttttgcgccccagacacggcagatgtccttgagcacagttcttttttttaagagatgggacctcgctctgtcgcccaggctggagagcagtgttgcgatctcgactctttgcagcctcgacctcccaggatcaagcgatgct

SEQ ID NO: 67405 - DNA, 402 bp, Homo sapiens
aaaaaagcattccaaagtggagaagttacggtttcacttatataggcagagacatacaatccttacagtgacttgactagctataggatgctaccttccaaggaagattgctttattactctgtgaggggtgtacccgtctgaggaagtcttatctctgccctgtttggtcttagttatttctagggtaaaaggggcagaaggtacagctgctcgccatgtgattcatgctgcataaccacattcctctcaagtttcaggatcatttacaattccaacagcagctgggcgtggtggctggtgcctgtagtcccagtaccagggatgttgaggctggaggattgcctcagcccagtagtttgaggctgcagtgagctatgattgcatcactgcacaccaaccc

SEQ ID NO: 67406 - DNA, 1605 bp, Homo sapiens
aggagaatcacttgaatctgggaggcggaggttgcagtgagctgagatcgcggccactgcactccagcctgggcgacagagcgagactctgtctcaaaaaaaaaaaaaaaaaaaaagggaataacaccagggcctacttgagggtggacctacttgagggtggaaggtacgaggagggtgaggatcggaaaaactacctattgggtactatgcttattacctggggaggaaataatctgtaacccaaatcccttgcgacatgcaatttacctatataacaaacttgcacatgtacccctgaacccaaaataaaagtaaaaaataataataataaaaataaagcgaagccccacggggcgagcatgaaatctgggagctcagccatttccctggaggtggctgggtgggcggtgggagtggacggggctgggcagtgactgctgccaaggcagggggctggcgcgagggacgggggtagggggctgggcaggcatcggtgtcgcctcgcagggaacagttgggtggcttccagcttatgccaggagtctcctcctcacccgcacatcgcggggctaggatgggatgtcgtggctgccaaatcctccgaggcaactcctgcctgggacggcctaccacaggatgggcctgagaatccggagcgcaggctcgggccgctaggacaccttcccccgcccgcggacccagccttccagcatcaccggggttcgcggaggagaaagaggaaaggcgtttggcctgccaaggccgccgtagcgagggggcggggcccggaagagcaggatggcggcgcgggacagtgacagcgaagaagatctggtcagctatgggaccgggctggagcctctggaagaaggtgcgggccgcgtgggccggcggagcctgtggaaaacaggccaagggcccaggattcgggccacaaaagcacaagtcggtgctggaccattgttagatcgttcccagcgctgggaacacggcgacgagggaggcgttagccgcgctctcggggtgctcaccttctgcagcgacagagagaggtttacagggacgggagacacaagcgtggccgaacaagggggcggcgagatagaaacaagaaaatgacggaatagctagtgtgagagcggggggtgctcaggcagtgtcttccccgagagaggacgtttgagctcagacttgaaaccgaggaagaaaacaaccatgagcaaatctggagggaaagcatttcaggcagaaggaacataaagtggcaaaggccctgaagtgggagccagtttaggaaattgaggggcaggcaggacgggtatggttgcagcagatgacagcgggggagacaggtagaaaagaatgtcagaggggctgacaggggctggatcttacttggtagggtaaagagtttggatcttgtactaagtgcaggattagggttagggttagggtcatgggaaattacacagggagggatatatatatgatttttagagacagggttttgctctgtttcccaggctggtcttgaactcctgacttcaagtgatcctctcgcttctgcctcccaaagtgcagggattacaggcttgagccact

SEQ ID NO: 67407 - DNA, 669 bp, Homo sapiens
acagtgccaggcccctagtaggcacgctgacattctgagtgaatgaaagagcagtggtgaagaactggccttttccttgctaatgctggagtttatatctatgtcctgcctttcagaatcaagaaaaccatccagatgggatacctctaaacacgaaaagaaagaagattccattagtgaatttttaagtttggctagatcaaaagccgagccacctaaacaacagtccagccccttagtaaacaaagaggaagagcatgcaccagaattatccgcaaatcaggtatttggggcttccagattctctttgccacgctgagtgtggcccttgcttttctctttggtgacactttctcctcgtgactcaccagcagaggcagccaactattgatccatttccccttaaaggccatttggcttgtttctaacttttggctataacaagtaaagctgctgggagcattcatgtgcaagtttttgtgtgaatataagttttcatttctgtagagtacaaacctagtagtgggaatcctggaaaatatgtacatgtatatttaactttataagaagctgtcaaactgtattccaaagttatttttgccttatgtattttgaagtgcacttcttaggtgtatatacatttaggattgctatttctctctttttttt

SEQ ID NO: 67408 - DNA, 2142 bp, Homo sapiens
aagacacaatgagtgcctccctggctaatgctcccagatggccacttgcccggagcagaggacggtttggttaggcaagggggtggcggtggcattgccatcacgggatgtctcacgctttctcctctagacgtcttaatttccagaaccccttgcttatgtgcagccctcttcctgctgccacggcattttgcacagcgtgcatcaatccagaaataggctgagataggagcttagtttcctattgcacaccatgctgggtgaacctttctgtgcatgctgcagggatgctgggtggatgggttggcagtgttcggcttcgtagttgcccacaggccctctggaaagtgcggagaccagtggctggtgtagttgcgtgaggacacccagaaggggtcagtgagaaactagggaggggagggccttgcctgctctggcagcagaaacccctccatgtaaggtgttggtgctccacgccagcagcctgggaaccctgaagtccacgatccctcctgagccttccggacccctcgactttcccccagctcaggatccgcggaagtagcgactcaactgaagttatagtcccgggagctggcagggccccgggtcttctcaggctgaggtcgcggggcagaatggtccgaagctcaccggggtcacagtcggaccgaggcgggtgtgcgcctcgaccggacgccaggggagccagcagcccggccgcgctggcggggccgggggttctccggagtgggtaggggctcgaccgcactgccctgagtcccaagccctgcaccagcgttccccaaaggcggagcgtcctggctccacgttggaagagacattaccgtgaccaggaagtctggccttcccaggctccgcccgctccgtgcagcccaagcttccggtctcagtctcagctgcctgtgtgaatcggaagctacactacgcgtgcgccacaacaggccgaatgtgtgcgcatgcgcgcggcccatatggtaaatagtaatgaagaatagtttaggaaagtacctgtacgggtggcgccgtggcttagttggttaaagcgcctgtctagtaaacaggagatcctgggttcgaatcccagcggtgcctcaaccgagcgtccaagctctttccatttttgctcctgcacttttgtgctctgtacccggctgcccgatactatgagggtgtgagcgggatcccgagaggcctaggtagacgggccccccaacggggcgtggcctcggccacgggggcgggtgcaggcgggcttcggactccaccttctcgggtctcaggctctgtggggcgtaggcggcgcggggacccaggcgaccgcggttgccatggtgctggctggccgtgggaggcgagcggcgggctgggaagcagctgtgcgagtccagcgaggagccggtgttcgccccgaggctgcttcctcagggcgggcggtggacgcgctctcccacgccgccttctgtggcgtgggttcctcgcgctagtcttcctggctccaagctgccacttgggggagcccacgcgggtgccgatcctcgacgttcgccgggcttagctgagcctcgcaaaggcctgaagattgcccgtctccctgcagccgcgcagtgggtgcagccttttcacaaatgcaagacctggaccggcggcgaggccaaggggaccccgtgtggagggatgcgggactgagtccggttagcgtgatcctcagtccgatgactgcgtggaaactccaggccaggcaggggactctgccccagctgcagacggccgggtgtgggctgaagccagctgcctgggctggggttggttgctcagcgctggggttctacccacatttgtatgtgggaacctattcctgagcaagtgcattcgaggctttgggggtggtggggtagggtggggtgaggcattggagtttttacaaacattctccagggattcacatgtcaaacccgacaggacagtcccagtgcagaaattgcagtcatggcataggctgtgtagtcaaattcacctgccccagaagcagttcctcttcctgcctcttctatggatctgggtttattgtttttgtttgtttgtttatttctgtcgttttctagtcaattctcgcgcttt

SEQ ID NO: 67409 - DNA, 1464 bp, Homo sapiens
gcggcccggggacgccggggccgggcgggctgcgcgccgcggggcatgggcgcgccgggggtccccgggcccaggccggccgcggcggggctcccggggcgcgggggcagcggcgggcgggggtcttccctggcggccgccgctgagcccccgcagggcccgtgacgccgcggccgatgtggccgcgcgcgccctacgggcctgcaccgccaccgcacaaagacgcctcgggagccgccgcctgcacccgggccgcagcagccacgccagccggagcccgagccctagcccgagcccgagcccgagccgcagccagagccagagccggagccgcagccggaaccggagccggagccgcggggcaggaggcggcgcccgcgggcggccgggcccggcatggagaagcgcgcggccgcggggctggagggcgcgccgggcgcccgggcgcagctggccgtcgtctgtctgggtgagtgggccgcgcgggccgggcaggtccgggtcccccgcatggcagtccgcgccgcgccctgaccgacctcctctccggccgcggcatcccgagccccccaccgcggtggctcccgcgcggagacccagagaggggccagcaccgcttgcccgcctggccccgggcctgggagggcgactctggtggcgcagccccggctcccgccccgctcggagtagcgcccggagcccgggctgagcgctggcaggaggcccttcgtgcaggcggcagccttcaacccggcccgcccgcgctgagcctggagacgagggggccccgggagctggggacaaaggccaggccggctgtcccctgaagaagaaactgtttccggcccggagttggggtgggggctggtgtaagccgcagatggggactcggggtgcggggcagggctggaggagggtgccagtgtggaggcggcttccaggggactcctgttttccctttgtgtctctcagcccccaggcaggcctgttcagtttaggagggtgcttgggttgggccagggaccggtcaaggccaggcatggggtgggaggggctcccgccctgtccgggagtttttctgtccagctttccagcgctctgtgtaggcgagaggaggagttaaatccccaacccacatggctcctttatttactgtgatgaaggagggaggccattataagaactgggggtcattaggggacaccctgtgatgtcaccagtgagggctctgtaacctgacaggtttgctgaagccactgaaatgacaaagtaatcacccccaggcctcagggagctccgaggctctggcaggcccttgccccagctgtgtgagcctggctcagtgggaatgtgccattggggagcattgagggtgtaaccccagcgcgcccaccccaacctcagtgcggggtcatgtgtgctgggctctgagctgctgggtgctggcatccctggtgagcagag

SEQ ID NO: 67410 - DNA, 1690 bp, Homo sapiens
ctcccagctggcagggctgagtgcatggcagtgagggacgcctgggtcctgggaaggcacaggaggtagagaccccgaggccctgccagcttccccgcgcaagcctgggaagcaaagtgcccacatcttctgtttctgtcagttcctgccaagtcccagtgcctacaactgggaaatggggcaagtcaccttctccttcctctcttggtggctctggaaggaaaaagccagtggtgtcacctgaaggcagcccctttaggcaggctgggtctggggtctcagatgcctggtgctgcccggtgctgctggccacgtgtgcccccgtgccttggttggcagggttctgggcagccccgcctacaggcctttccccccgttcttcgggctcccctgtgtgatgcaggcggcctggccctggcccggaagggaggccgctcttggctgatgctcacatgcccactcctgggcctggcctggctcctgggccctctcccatgcccatgtcctcgagggccaccaggagacgggccctggttggggcagacgtcgccttggggctggtccctcctgggcttctggctgggttggtgacctccttccccactgggttctggctgggtgttcacctggggctcctggctctgtcccaggttggctttcacagcagcaaccgtgaggcctggctgggaggaggtgggtggaaagtccaaggctcctcctctaggcctccctccccggggggactagctgatcacggggggtgctcctgggcaggcactcctgggggtgaggggtggttggggggtgcatgtggtccggtagggcactggagaagaccctctgcccagagggccccaggacaccccttcccataggcccacacggctctgtggccgtgtgcgtgggagggagggagggatgagtgtcacagcgggtgtgagtgcgcctgtgggtgaggcccggagagccggcacgggggcgggggaccgtgagaaccagtctgtgggtggagacctagggcaggggtgcccttcctttctgggatgtcccaggccaaggagtttgggggcttgggggcccacagtgcaagaggaaatcctggccactaggtgtcacccggagcccatgggacagaagcaggtcccccccaccgcccccggggaggggtcggagccccttacctcccaggtatgcccactcccgcagctggggggaatccctggtctgtcacggtgtctgagggtccactcgcagtggggagctggtggcacggcgttgccctgtgcaggaggccatatgctctatggaagcaccccgtccccacctcctgcccatacagacccagactgaggacggagccagtgacaggtggggatgcagcatccctcccagcccacccagcccctctgatgcccgggtgcctgcggcaggggccccctcgtgccagcccctccaagggagcagcttggacctatgcctgccgtgcttgccggcctcaggatggaggagggaagggtcctcgttcacaaccaccccccatcccccttaggtccagctcagcaaattagggtcccaaagccctgcccagaccactgggggccttttgcagcctttcagagctggtccccaccctcctgctgtgcatccactcatccaaagcacagcaaggacctactgtgtgctgggaggg

SEQ ID NO: 67411 - DNA, 2878 bp, Homo sapiens
cttccaggcttgctgcagtcggcacccccccccacaggaagccagcccagccatagcctcctgcccttttgaagatgctccctcctggcttctgtccctgctggcaggctggggtttctgaacccctcattcctcagtcatctcgaccctgtgagagcctcagaggcctcctgatccctgttgtcccctggccatcctggagtgtcagcccggggctggccctgagctcattttcagcatgacaactggtcctcagctgacacccccatcccctcagcccaggaggccagctgtggtgggttctgctgaatccagcttgctaaccaccagcccatgcccacagtccctggcaggggacacagttctgccccctcccccaccagatcaatacctccaagactgctgtcagcaaatctttgacctctgacctggccacacacagtgacccctgaacctgttggtctttccaccaacccttgctctagtctctggggtgggtgaggggctgacaccctggctctggcctgggctgttaggggcagggagagggtgaggccatcagtccccaccagcccggcctcttcccttcactccacactcagggccacagtggttggtgttgttgggggggggatggatgcagtgggggatgtgccacctatgccaagcaggctgtgatgaaggattcggggattccttctggagcccaggggccctgggagctccagccatgagtgaagagccagcagcgaagaggatggcttcccatcctctctccaaggcccacaaaggtgcccacccctttctgctctgggccctccggatcgatctgggacccagcagccttgcagccctgacctgagaatgcaaaggggcctgtacagattgcttcctgagccctgttccttgcagctcagctgggagggtccctgtcctgcccacccatcctgccccagataagggtctagcccactgtctcgcagaaaccgtggtggaccccagtggtgctgttgggagccccacatcccgaaccaccctgggatacagcctcgggagtcctgcgctccctggcagacaccactgaccagggaccctgccttcaggaaatccggccaggacaacaggacctgcccctctggtgtccaggtcagctcaccatgtggccctttcctggcccgccttcccttgctcctgctcctaggaagagatgcctccacctccactcccccatggggcattctgaaggccatgggttccagcagtcctgtgctggcaccaactgggtctgcggtaggacaaggggcagtggctcagagactccagcagtgagacacttccctgtcccaggaggaggggaagaagaggagcaggaggaggaaggagagggagaggagggaggatggtcagggccccccactaaaatgggacaggcaggtgaggggtgcttggagtggagactatgctggaaactgaggctgagagaaggtagtcagaggcagagccacgcatgtgtgctccagtgcgcctgactccagggtcctcgcttctcctgactgcatcagactcgaccttgacctctgggtatgctgggtcagggcagagtgctgacgcactgcagagcccctcgggccccgcctctctgcttacgggggccttctcaggagccaggagggaccaacccaggtaggggactgtttggacgagtccaggccaggtggaggtgtgggcagccggccctgaggtcactgggtgtgtgtcaggggtggggattgtccaggaggcccctacagagcaacacgtcattctaaggctacatttcacactggcctcgggtatgaccttggccgtcccttctcccctaagcagtcctctgggctttctgggagccttggtttcttctccacttgagacctgggccagtcaggtgggaaaagccagcagccacggggggcctggtgcagaggaggaggtgggagaagcagcaggcggggggcgcccaaggagcctctctgcctaccttgggctcagccttgcacttgatgaccccacccgggcctgtgtgacaaccatgccactgacggggaactgagcctcggagaggggaggtgactcacagaggtgacccaggagatggaaccgcattgggagctggggctggacattccagccgctgccaggaaaatcctgccggaagagtgcactgtgcgggtgcccaggaggctgcgggtctgcacccagctcctccgacccggtgcccaggacccctgcctggctggccagagaggggaagtgcgccccgggcggccagcccgcagctgttgggcaacatctggagggaaggaggaggtgaggagcagagggcgtggagctgggtcctgacgtgtgcccgcgctgcccggcacccacgagggctggggcccggtgccacccgggggtctcagcctccttctagtcccacgagccctagaggacttcctagtccccctcgctgtgccctggggggtctgggctctgtcctagggggtctgggctgtgcacaacacaccacacccccgccccagatgggggctcctgaagacccatgctccaacacacaggcacacacagacacgcacagatacacacagatacacaccacacacagacacacagatacacacctcacacacacatcacacacacacacagatacacaccacatgcacacaccacacacagacacacagatacacacctcacacacacaccacacacacacatagatacacaccacacgcacacaccacacacagacacacagatacacacctcacacacacatctcacacacacacagatacacaccacatgcacacaccacacacagacacacagatac

SEQ ID NO: 67412 - DNA, 1199 bp, Homo sapiens
acgagtgtctgtctctggtccggggccaacctcaaggtgggtgtcctctcctgcagcagggccacgggcaccttccggctccagccccagcccagccaggctctgagggagcctgaggctgcctctcctcctccaggttcctgtttcccgggtggccccaaagacagaagatggtgtgaggttcaagggctcagtcccaggctcggatttcctgggcgtgtcagatttcctgggcgctgtgtggctggtgtctgccagggaggccactgaataacgtgaagaccactgggaaagcatagcagagtgtgcagtggctgagtctgtgtgtgtgtgtgtgtgtgtgtgcgtgcgtgtgtctgtgtgggtgtggggtgtgactcacacaggcctgggcttcatgatgtctcttgggagcaggaaggtctgtgtgagtctgtgtctgtctgtgtgtgcatgtgtgtgtgtacccgtgtgactacaagcatgtgtatgagtgcacacagttggtgcaggtgtacctatgtgtctgtgcacatgtgtgtgcatgtctgtgagcgtgtgtgcatgtggttatgagtgtgtctgtgggtacgcatgtgactgtagtgtgtgtgactgtgtgtgtgcacgtgtgtgtgtgtggacacagccctctctggcctgcactcctggagcctgttttcctgctccacctccctcctcggcaagtgttgactcagggagggataggcagccttggttcaggatttcctggtcaggcagaagtggtgccttgaaaagggaacaatctcgtgctaaagtggacgctgagggtccacacagtgcagtgctctagggtgcccaaggccgagagaccttgtgccttccttgcctgggtttacagtgggggtcccagaaagctttgcccctagggtggcccataggatgtgccctcaggctttttctaaatgcttcctgatctgggctgcccggggtgggggctctggagctggacactcctctgactgctgtggaggcagggacagcacccccacaagaggtaccccaagagaaatgggggcccccaatgtccccaggcactagctgtcccaggttcccttccacagtgggcagctttacccctgcaccgccccatcccccaaagccttaacaaataaaaatgaagctctttgaggctaagagtctattcaagctccaag

SEQ ID NO: 67413 - DNA, 1378 bp, Homo sapiens
gccccacaggggctgccttctccagctggaggttcaggcctaatccccaggacaaaacagggatttgcatcctaaaagctgctaatgcgggtgctgctcctctgtcagtgcccgcttatcgtagaggaaagacactgtccctggggcgttgggagccgctggtctcagctggttctagggatgatggagacacagctgggtggcatggagctcagctatccttgagctgggtcagcccaagcaggaaccccaagggggcccccgagaacctctagcccagacccctggactcaggcctaggtgcctgtcccactgtagacaccaccccagccctgcgtgctgccaccaaacctgtcccctgccagtgatgtgggcacccctgaccccttgcacccactgggactcttctcctgcacaaggtccctgtccccactgctgcttctgccctgtcccctccctgctgggtgtgacacccagaaaccgggctgtgggaggcaaacatggagctggcttggagagctttagaccccctttcttgccttggggaccccgggatcctggcataggcctgccctgagtggggaaagacgatgtcagagtccctgggactgcagagaacgcggtgtcctccgaagcatgcctgggtccccctgatcagggtggcagcagggggcagtgcctgggctttgggtgctggcccccaccacgctgagcggccacgagcagggctggccgggccgccattaatgattaacttggggcctgggccttgacctcgtgggcctctgagtaaacaggcctgctggagcctgccgggcccctcatggcctctccaccccctgacctctcctgccctcctggtcctggcctccctcacccacctttgctgctgaggtggagcagtggcaggcggtctagaggcgctggcctttctcacccccaccctggatcagcctaccgctgattcctgcccctggccccagcccattctctttggagcctttgaggtgggcttttcttcttggactggggcttgcccactggggtgtctcaagccctgacctcagccccttgcgtccacactgctggggcttgttgagactggccgcgtggagcatgctgtgtagacagtcaggaccggctgtcagaagacctgtgttctagctccagctctggtctcactggctgtgtgacccctagaccatgccctgtctctctgggcctcagtttccccatctgcacaataaaaaatagagcaggaatcccagggctttctaatcccagaattctagatgccagtctggtttggagtgagactgaggataggaaaaacatatgtccccaccccgccccagaggaccccttcccgaagagtcac

SEQ ID NO: 67414 - DNA, 1260 bp, Homo sapiens
atattgcacataccacatgcacacgcagacacgcacacagatgcatatgggcacacgcaggcacagctatcttgtgtgagctctgcggatggaaaaggagaagctttctgtggacagggaacaatggcgacagaggaaccccttggccctcctgggaaggccccaccccacagcttggctcttgccaggccccttgggctctagcctggggaagggctctcagccagcagcaggaatagctggatcaggtgtctggagataaccctggctccctgctgctggctaaaagcccttcccccaaagctctgtcttcccctcctgctcctcttcctctccgtgccttgcttttggactttcaggccacatcacattcctttttcttttcttttctttttttctttctttttttcttttttttgtagagatggggtcttgctatgttgcccaggctgacctccaacccctggcctcaagggatcctcctgcctcagccttctaaagtgctgggatgactctgactctttctctgcttcctcctgtctctgttggtcccagtttctgtctctctaggggggcatcccaggagaggggcaaggttcaggcctcagggcttaagccccttggctgctgggccaggccttcctctttctgctgtctgtcccctgccctgcttccttactctggccagagccgacttgccctttgccctggagctgcggcacctcggggttgggggaactgatggcctcacctcccccaccccctgcagcccctgctcctccccacaggagtctggccagagagttgggccctggggaggccacacagccaggacacatgtcctggccccaggcagaacccttgccctggccacagagccacaccagccaggtcaactctgtcctctgaaatccctggagaccagggcaagccccccccacccactccctggggcagcttcggactcccactcacctccaggttgggaaaactgacccccagcccagggcaggaggcaggatgtggaagggcctctagcagagctgaggtccagccggccatgtcgggggaaggacgaccctgtaccctgtcattcccctcacagtgtgaggccccagggaataacctgccctggcaggggactgagaagcaggagcagtttcccagctctggagcatgctgggtgggagcaggcacggggcgtctctgggggtggggagcagcccctccttgcctaggcagtcactttctgggggccag

SEQ ID NO: 67415 - DNA, 1068 bp, Homo sapiens
cctttgagtggctcagtcttttctggcacctcggtttccactgcacaccacctactcaaagaacctacccaaagaactcttttctgacacccatcctcacccaggcagcctctaccaataggctgtgtttcctgttcctcattgccctggactctatgcaggcaggcagggagtgagcactgaatttcagggcacagctcccaagcttctgtcatcctccgagtaggtgcttgtgtgcccagcacgtgtcttcaaagggaaagtgaagtgaagccagtgtcagcgcagaagtggggtggaaggggaggaaagacaaaggaaaggcaagaagaaatgaagcctgtggcagagaggccaagtcacggctctatgcacagcttcaaaaccagtgagtccactccagaaatcagatgcactttgacctcaatcactgcggcacctcttttttttgttttgttttgcactcttgtcgcccaggctggagtgcaatagagccatctcggctcactgcaacccctgcctccggagttcaagtgattctcccgccttagccccccaagaagctgggattccaagtgcctgccaccacacccggctaatttttgtatttttagtacagagggggtttcgccatgctgttcaggctggtcttgaactccaggactcaggtgatccaccctcctcggcctcccaaagtgctgggattacaggcatgagccaccacacccggcctggggcacctcttttaagatgtgtttggaagcggcatttgaatgcagattccccctgccccgccccatggctggaattcctgtagacacatgcaggaattgtgcagccacagaggccaccacatacgttcctcattttcccgatttcctctgtccttgctgctattggggctctgtaacattgtcccagctgtgtttgtcatttggctctggctttccatgcacacctgtgggtgtttgtttatagaatgcagacaccacccctttggctgccacgagggactggccctggggactggcctccaggatccccagacagatttgcttctctgccttc

SEQ ID NO: 67416 - DNA, 3479 bp, Homo sapiens
ggaggcagaggaacccagagcaggctgctgtccctccagcgtggctcacgcaccgcccccaggcagcgctgccccatatagcaacatcactgcctcactcaagatgctcacctcacctctgacacatttcaggcttggagccatcgtccccacctcccctcggctcaggggcctggcctgtgactcatgcctccacctctcccagacaagattgctccttgaacaaaggagcacaggccttggtgaacttgggaattgcacttgaggggaccctgagcccctgggtctgacccctccagccctgcatcggccttgagatcacatgcaggtggcacgtggctgcacccgcaccagcacccccacatcgcccctctccccggttgctctgggagtcacccacaccccagcctctcctctgtcctttctgctgccctgcaccgagcccagctgatctgcagggtgaagaagccaatgatttaaggcctcccagcccctcttcataattgtggccctcctttgccttggcaagtggaatccaacagcttcctgtgcttgaacagggagacgaaggggcccaagagctgcctgccttccttgcctgaggagtttgcttattaacttgaattaccctcgtggtagcattcctggcagggcagggaagagcagggttggtttctagaaccttttcctgttggcggccccggcgctagggaagcttggctgaggcctcctcctacctgccttcttgcccctcctccaggacaccccaggaccccagaagcttccctggttgttggaagccctgcctgggtggctctcctgcagggctcacgctgacctcctgggcccgagctgggttgggcaaatggaaaccagctgtgatgccaagtgctgagatgacacagttgagaagtgagggggcaagggagcaggatgtgtcccccacccctgacacacacagcacatgtctctggctcccttctcaccagcaaggggaaggcaggacccccaccctcacccctttacttgctgaggtcacagccttccaaacagaagttaactgggaggcccttggggccgaggactctctcagtacctggggaggctgccaccccagtgagaatacttgttctctcttgaactccccatgggtcgtcacctgggattctgcacttgtatgaaggacattaaaacaaatcttgtagagatgggggtctggctatgctgcccagtcttatctcaaactcctggcttcaagccatcctcccacttcggcctcccaaagcgctgggattacaggcatgagccactgcgcctggcccacgaagagcattttacttcgacaagcacacggggcacctgtgcctgctcatctgagtgtcgtacaggctttgaccactgtgcttagccttcaaagtcactggcaagggggctctgcccccagaatgagctcattaagtgttttctaagcaaatgaaaggcatcctttgtgggggggagggggtgtggaaatctaagcaacattaaaatgacttcagttgtttggttatttggaacaagcattttgccctaaattcttaagaaggctgtctccttccactgcgtttttcagggaccaaggtgtgccctagcctcccactctgccttctgccccagcacgtgggaatcattagctggagccaagtgtctcataagctttccctgtttatctttcacaactccatgacatgctacttgttttgcatacattttgcataaaaggaaactgaagctcggagaaactgacagactcagtgcggggccacccagtcagcaggaggcaaggccaggatttggtttgatgccaggatggcacggccctcttcccatgggccatcctcatcacgggatgggagaaacgggaaacgcctccttgtcacccgtgaacaaactgctttgctccagaaaccgactcagcacacacctcgagtgtgcactctgtcagggtgcccgggcttcacttacgtgtccggtacgagactgaaggcccactgtgagccagggttctgtagccttcagctccatgcccagtggtcctggctccaggcaagtagcacttgtgatgctgaatgaggcatatatttcagcatgacagaccacagtgccttcagattgttccgggataaatcctttgtcctgtggcctcctgggctaaggccaattaaacagctgccaggtagggcttattccctataaatcagtgggaatgtggccacatgaattttaaatatcagattaaaatcaaattagtgggaaaatttggaacaaattgccttcaagtacagtgaatgagtctatttttaaaacactgccgcaccaggcaaaagagtgaagcaaacacacatttcctaacagcgagtagacaccgtgctgggagtgatctgtcatgcttagtcacggtaattgctctagcaaaactcaggaatcaaataaaacgtgtttgcaaattgtaaatcgctccaggaggctacttcagacgggtcctaacctgatgctgaaggtcacggcggctccctttggagcagacacccagccctgacgcccccttgacccatccccaccccctttctctgagcaggggttgagccggctgagaccattgcccaacatgtgcacgggaaaggccgctgtaaatcagccacatttccgcatctgcgggagggcatggcattcttggggggtgctggggagggtgctctggttggctggagggaggtgagggagtctccgaggccaccatggccgaggcagagaagaaatggcggcggtggctcagggaagagaggctgtgtttctggtgaaaggttgggctgccatttggctgaagaaaagatcttcagatccaagagggcttgggacaggcggtgagggctccctcaagccccgtccgggtccctgtgtgacatgccctggctctaggccaccacatttggtccctagcctccccaccctcaggctgtagtccctcaataacaaccttgccagtcgtcctagagtggagataagaggagagacatgaagccttgaaatagcttttaaagcagaaatgtggccgttctcgttcccccgtgctcacctgcggctcctgcagcttgggggcagacagggctgcttctcccctaccctgtcctctcttttggaaatcttacctcctccccgcacagtctcctgcagagcatgactgtctctctggggcctggccagacctctgattctggtgataaactaatcacatgaaggcagggaagattatctaggaccggatgggttacctttcttaggattcttgaatgttaaaagtaacttcaggggccgggtgctgtggctcatgcctgtaatcccagtgctttgggaagccgaagagagagggtcgcttgagcccaggagttccagaccagcctgggcaacaaagtgaaatcccttctctacaaaaatatttg

SEQ ID NO: 67417 - DNA, 8562 bp, Homo sapiens
agaacagaaaagccttcccgtcctcactagtataggaaagaaacagctggaatatcaacaccatctaggcaaggactctgccccatgcctggagaaggcctgtgggtgccttggaggcccctcttggctaaacaaagtcaggggtttctgctatcccttgtccttccccatgagtggccccttcccctcctgtgagaccagcagctcctggaggaggcctggcaggttcctgcctgggaaggagcaggtgggagagctgggaggggcagacactcctcaccaggcccagtggctcatcgcaggtgtcagggccaaaccccacgttcacagattcccaggagatccaggagataacagtaatatccgtgacagcactaagccatcaggacgcatctggcagcagaggagatgcctccctcccttctacccttgccctttccttgaaggccagctaaccctgaacagcgctgtcacgggacacagggctcaggagtggcgcagcaaggggggcgaggtccctgcagtcaggtgctacatgtcaaggggagatcgatcagggcaaaggagaagcatccaggcatcttgggactggggccagcaggaggccaccctccccaggtatttcatcaaagctgctgcctccataaagccctccctggtggaccctgttcacactctgagatccccttcattgcacttggcaaccttaaaccacagcttagggcctcaagggtgtgagctccccaagagccagagcagagtcggcttgttcccagcccagtgccccatctttggcgcaggccctggcatacagtaggcatctgataaatacttgaggtgtgttcagtgctgggctcttggaatggttcttcctgaaggctgtagtcaggaggggaactgtgaggaaccctgcaggaagcggtgggtggccaagggtgactctgttcccgggaagcccctacagctggacacggggtacatgctgggcaggttcaccccatgccgcccaaaagaccttcctcccctctactttggccccccccgggggcctcgccctcctcatccctttcctggggctggatgtgattggatccttcttgtccctaacaaagcccaccctggaactcaggaccaggaggaggactcggggtaggagggatcccttccgggagccatcagctttaaaagaggaagcccctagcgggctggcacagcagagaggaggggaaggagtgagggcaggagggtcgccccaccccctcccgtcctaggacctgttctggggggaaagggggaagccagggatcagccccctcaaacaagaaaaactggaattagcactgaactcagagggtttgctggggcttagcaagctgcgacctgccccaggcctcggggcacgcggcggggctctgcctcctctgttcccagggtggcggggcaggcgccgcctcctcactgggctcgtggcctctcctctgccaagggcggccgtgggtgaggaggcggccagacacaggacagagtggggggccggaaggggtgccagctaaccacgcaggcaggtaaagctaagcttccagagtgtaaaaggaatgtgtaatttctcgaaaatgccccagcccgcattggtacacacagtaagccactcagtgaacattctctcggtacagagttaaaaaaaaaagaaaagtgcaatttatcttttaccctccgtgagggtaaaatctgaaaagcaccatcagcctcctgggcctctttctcccgggccttgttagttcagggataagggctgccctcccttgcttggctgtcactgctgctaagggggtgccggagtgcctgaccttacagggtgctcattggagttgggggcacaccagcactcagtcccctgctgggtctgggatgaatgcagtggggagtgtggatgctgggtgggttcttgaacagccagtgtgtggggcaggaccagacccctgttgcaggcctgcctcagccccctttcttgtgagggctggggctgggcaggtgtggagggctggatggaggggtctctctcttcaggctgccttcgggcctcgcaggggtagggtgtagccacatggtctagggaaagaggagagggttggagggtcctaccactggaggcctcttcctgctggccgagggtcctgctggaatctggagctgcggtgtgtgtgagtggccagggctgcagctgtaggtgatttgcaaggaagtctgcacaaagggctccttgagcctagggctgcttagccaggcctacccctcaggcagaggactccctctcctcctccccggggcagataagaagcctcgccaaggcctcagcccagtaaccccttcagccccctcccctgaccccaagagactgccttcaggctctggacatactccatttggagccttgtcctctgctatttatttgtcttgcctgggggaagtaagtcacccccttagggtaagaggggctcaggatggatggagagctcatgaaagtcaggattgccgccagggaaaatgctgtattatttacaaatgtgacctggcccacagacaaccttggaagtagcttctttctggttttaaaaagacaccgacattgactttgatatgtttatattatagatataatacataaaacatctagagtgagactctacgttctccccaaaagaagagaaccaagccgtccttccctgctcccagccccagtgatgcgttggcgggaggccacctcccttcccgaccaggagccagggcctctgggggacaagccttgtgggcagcccaggccggaggggctggggaaagctgagggcaaaggagaacccccctcacctcattggtcccccaggatcaaaagtaatcccaaaaccaaaaggaaagggagtctcagacccttcccccagctgccgacggagagtctcattttggcaagtatccgagcaaaaccaaaacaaaacaaaaaccaaataaaatggtggtttagcagagacgcgcacattcacattgcacaaggcactgctggggcacagaggccagatacaagtgttgatatcggctgataaagcaaaatatttggaaagcttgtcataactccggtccctctgggatggactgatcgtgcttcgtgttcctaggcaatgctgaaggcatacagtacaaacaaggctgagggtcccagtggcccttcaccccccatgcccgccccacagccagatctctaggtctccctctcccaccaggggtatacatcctcagagctgacccacgacctagctttctggtgtgactcggggtgggggctcccactggtcacctggtgacccccatcgcagtgagttccgccccaaggggaagcccagcctatagcaggctggggtggggtgtgtgcggagggaggtgggagaggcgtggaactagagaccctccaccttcatgtagaactaggggaacaaccttaggttccaagccccaagtccctatgtttccacccctttctaaggacaggcgtggaggagcggctggggctggcgggcttgtcgggatctcagctccctgagccctcctcctgccacgggcctgctcccctccttctctcatgggggtctgctgtagcctcgggaaggaggcaggaaacctccaaataaaatgacaaggcacgatttgctccccctactcagtaggcattggagcggtgagtttgcatttccaaggcacaaggttatcctaaatactagagttgccgggctcccagctcagccccaagaattctcccctcctcgcagggagaagccaccgcctggccccctcatcttagacgcaccaagtccggcgcagaggaagggaggggacacgcggagcaggccaggctttcaggaggcaccggaatctcctagtcctggctcgcacggctcgggcaagcctcgagatccggcgaccccaaaccactccctgggtccccgccggaggctggcccagggcggtcccacagccgcgcgcctcacgcgcagttgcccatggccttgaccaaggagctctctggcagctggcggaagatgccccgcagcgtgtccagttcgcggctcagctgttccacccgcttgcgcaggcggtcattgtcactggtcagctccagcaccttctgctgcgtctccacgttgcgctgcttggccttgtcgcggctcttgcgcaccgcgatgttgttgcgctcgcgccgcacccggtactcgttgctgttcttgtccaccgacttcttggccttgcccgcgccgctgccgccactcgcgcggaggtcggggtgcgcggcgcccagccccttgagcgcgctgccagggcccggcaggccggcggcaccgagcgcgggcgcggggtgcgggctgggcacgggcgtgggcggcggcgtggggtgaccgggctgcaggtgcatggtggtctggccgcagtgcgcgatctggaactgcaggtgcggggcggccaggtgcgcgggcggcgggtgcgggtgcgggtgcgagggcggcggcggcggcggcggctggtaagggaagaggccggccagcgccagctgcttggcttcatcctcctcgcggggctcctgcttgatcaccagcggccgcagcgccggcgccccgacgcgctcgtacaggggctccagcctgccgtccaggtagccggcggccgcgcagccgtagccgggcgggggcccgtgcgctcccccgggcatgacggcgccgccggggcccgcgggcgcgcccgggtagtcaaagtcgccgccgccgccgccgcccgtggggcccacggccgccttggccttctcctgctgccggctgtgctggaacaggtcggccaggaactcgtcgttgaaggcggccgggtcgatgtaggcgctgatgtcgatggacgtctcgtgctcgcagatgccgcccagcggctccggggcggcaggtggggcgggaggctgcgcggggcccgcgccccggggaaagccgaaggcggcgctgctgggcgcgtgcggggggctctgcaggtggctgctcatcgggggccgcggctccgcctcgtagaagtcggccgactccatgggggagttagagttctcccggcatggcgagcctcggcggcctccagcctgcgcggggcgtcgccgccgcccacccggagaccctgctcgcccgcgcccgcgcacctccgggtcgcgaatggcccggcccgcgccggcccagcttttatacccggcaggccgcgtcgccccctagagtccgaggcggcctctgtccccgggctgcggcggcgcggcgcctgctgggtcctagcgcgcggccggcatggggcggcgaaccagcgcggcacagcgccgcgctccccaggcaggccgcggcgcaacgcccaccgcctccagcgcgcccagcagagccgcggcgctcgctccaagctccgcccccggcccggccgtcgcccccgcgcccacgtggtcggtagcgggggccccctcctcctgcctgccctaggcgcccgtatccagccacggccgggagcccaggagtatcccgaggctgcacggggtaggggtggggggcggagggcgagtcttggtcttgagctgctggggcgcggattctctttcaaagccagaaccaggcctgtcccggacccgcgtcccggggaggctgcagcgcagagcagcggggctggggccggtggggggccgtttgggacgcgcggagaggtcctgagcgcggtggctctgcgtctcctagctctgatctccaggctacccctgtgattccgcgcagaggtacctctcggaggacgccggggtcccatgggcggcgccgcgcagggcgctaggaccccgcggggagcggaggcggcctcggcccgggagcctggaggacctggccggtcgatccgcccgggctggaaaactttctttataattacttctccaggtcggagcgcgcggcttgctaggcgcgcggggccggcgctgttacccggcgtggagtcgccgattttttttcctgcgggaccgcggggccccccagactagcggagctggacgccggggcgagcacggggaggggcgcaccgagggaggagacaaacttaactctggggccgggattccgaggcgggggccgcagccctcgaggcccgaagccaccgcttcctcccccgcctccccattcaggtgggcgccaacggcgggagcgagggtgtccaggccgccgggctgccaggtccgagcacgcacagggagaactctgcccagtggttcgccgggcgctgtagtccccgggatcctagggaccgaggcggccaggccctggggccccttgagtgcggcagctaatgctctcaccgcggcgggggaaggagcttgccaccgagacccccagccacgtgcgtccctcgcattctttaccggggccggggtggcggctacggaccgtcagctgggcccagatggagtcttgggagccctcaagtgtctcctgtccttgcccgcgccgcccctcgccactggcgctgaggcctgacgccgcctgcgtcccggctagaggcgcgcttgcctacaggtgagggaagacccccttcaccgacagtggccttaggcctggcaaggcgccacgacccgcccaggagccccggagggggcacagctaaaaacaccgctggagagccccgagcttccacgacgatcgcagtaaagaagcagtttcatctgggcaacgcacactgcgctttaatcaagttcctattcaacatagtcccagtgattaatagcccaactgcttcgttttcggtccagagctcataaacaagatatttttagcttgacgcttttggacgggagggagtaaaaaccagatacgttaaataaatatcccgatgtgagccggagagctgcttgctgagccaaatgcaggacccattcatatagcattcacctgtggagggagacctggacggaaatcaaaaagcaccaagagcgatttgcgtttttttctgcggtgctaaaactaatggcttttcctacctaggaacaaagaaacgccactgtacatgcacggttcccggcctgtggagttgtgggaggaaggcgatgtctggccttttttgcacagctgctgttgcctgcccagagatcgggaactctgccccgtaggactggaagaaacctcagtaatgggaataagactttgtccaatagggggctgatgaatgtgtgggggcgacaatggcaaggagtgggactcccggcccggggttcgccaaccccaggggccacaggtcctcctacaattgaaccagaattcacccacccgggcctgccctgtgcagggtgccgagagcccagggatgcatgagagggtggctcctgcctctgggaactgggacagtgggagagacggataagttgtcacacagaggctgctgggaggaaggaggagacagaaggagtaggggatgggacttcattcattcatcaaatgcacacgaggcacaaatgggaatcaagggtggatgtgctgtgatgaagagaagtcctgccctgaacaaggtggcgctgtggaggaggcagagatcagatttgtctgcggaggtgttatggactgaactgtgtccctgccccaaattcctatgttgaaggcctaacccccatgtgactgtatttggagataaggcttttaggaagtcattaaagtgagatgatgtcatatgggtagggtcctaatttgataggattggtggccttatcagaagaacaatgtcatgggcatgcacagaaaggaggtggccgtctgcaagcagggaagaggcccctcaccagaacctgagggtgctggcagcttggctttggccttgggcatccagcctccagaaccatgagaaataaatgtttatggtaggtctatgatggcagcctgcttggactgaaccggcggtgagacagggcttcatgcaggagcagacctttgagctgggccttgaaagttgagcaggaatttgctggaaggataagggaggaaggctcttctaggaggagggaatggtaagtgcaaaggtggagagcctgccagtgcatgtgttctggtaacaaagaacgagatggttggccggctggagagtggggtgagggagggtggggcctagataaggctggatccgcagacagggctgggctgatggccaaggccactgcaggtgaagggggaacccttatctcccaggcttttgacctccagattttagcaggggagcttcgttgtcggatttgggttcctgagaatctactctggccaagacggagagggggtgttgaccagatgggaaaggatggagacttgtattgccccagtaatgagcgggcagggtagattagaacaagatgtcaggacttgggggctgaatgccaggcttctggctgggattaccaccccctgacacatataatgcccaggaaattggaggcccctctccaagcccccaggaggccactggggactcattccaggatactcacctgcctgc

SEQ ID NO: 67418 - DNA, 1232 bp, Homo sapiens
cactctgtcgcccaggctggagtgcagtgaagtagccgatctcggctcactgcaacctctgcctcccaggttcaagcgattctcctgcctcagcctcccgagtagctaggattacaggcacacaccaccatgtctggctaatttttgtgtttttagtagagatgggtttcgccatgttgaccaggctggtctcgaactcctgacctcacgtgatccacccacctcggcctcccaaagtgctgggattacaggcatgagcactgcacctggccaacagtaccttatttttattgctggccctgaagaaacctatacagtactcagatacagtaaagtttttcatacaacacgagctcatttctctcaaacatggactggggtttcctgtcgtgttgatttagcagttcggggactgtaggtgcggcaggattgtcccatcccacctctctaattagtctcgtctctaccattttcagtcaaaattccaaaggtcacttggaaggcacatagcccacgaaactgtccagacactcccttttggccaaataaccctccacagcccagattccagtgcagagccctgggaaccaggggcatgctgtttccaatcctcatctgcttagccaacagggagaggtaacaatgaacaaattgagtttcaaccagcatatctttagaacccaatttttgttataattgattagaaaatctagcttacattccaaatgcactctttttttttcttttcttaatcttagtcaaggtgcaataacagttaaacgaaaaccagcatgagtcaggttcctataaaactgtctgctctcagagttcagcatttttctagagcaggaacatttgccggcagtcagcatagaacggggttattctggcctcttacttttctaggggaactcatcataagacaagcagctcacgtggaatctgacactgacatggaatgcacacactgggtggacattgatggagttcttgggtctcactctgttgcccaggctggagtgcagtggtgtgattttggctcactgcaacctttgccttctgggttcaagagactcttatgcctcagccaccccatagctgggattacaggcacccgccaccatgtctggataatttttatatttttaatagagacggggtttcaccatgttggccaggctggtctgaactcccagcctcaagtgatctgcccgcctcagcctcccaaagtg

SEQ ID NO: 67419 - DNA, 569 bp, Homo sapiens
gtgtgagccactgcgcccagcccattttaagtttgaccaaaaagaattccacttggtcattatgatgattttaaaacatgtccacaaattgtttgccacttctctcactaaacgtggagtctaattcccctgccctcgaatgtgagctggccttagtgacgcacttctaacaagcagaatgtagctctggtgctgtgttcccttccagcttccagctggctcttttcctattgaaatccatgtccttggaacctagccaccatgttgtgaggaagcccaagccacgtggagaggaaaggaggctcccagccaacagccagtatcaactgccagacacataaatgaaccagccctgggatgactgcaactcccagcttataagtcttccaaccaaggccccaaacaccctaaagcaaaaacaggccatcttcgttgtaccctgcccaaattacctatccatagaatccgtgagcaaaataaatggttgatgccattaaattttggggtaatttattatgcggccacagtaactagcatatttattgataaagagagttagccaggcatgg

SEQ ID NO: 67420 - DNA, 1796 bp, Homo sapiens
cagaaggtgaaatctgcttttaaggagtttttctttacctactctgatgctttctccacaggctgatgaaggctgcctgattcttacttaacaaagctgggaaatttcatcagcctgggcaatatagtgaggccctgtctctacgaaaagaaaataaatacaactttaaaaattagtcaggcatgaggtgagaggatcggtgaaacccaggagttcaaggttacagtgagctaccattgcaccactgcactccagcctggccgacagagcaagaccctgtctccaaaaatagttatcataataaaacgctaggaggtttcagtgttttcttcattcttccgaagctagggaatcacacaccaggacaagagagagagcccatcaatttgccatgggagagctcaggctttccgggttgggctggggttctggctgaggcatcaggagctgggcatcaaggccctgggctccctgctgggtttgatctgtggactgatgcagggagaggctttcctgtattttggcccagagcacatgatcttatctgcaaaaccgcagcactgtgcctggtgctgaaaccatgagagaattaagcctcgatgacccagttactggacaatgctgtccagctccaggactgctcgttgcttccacagtatgatgtgttaattcgctgactgtattttcagagtccatccactgccctaaactctctgcacccacagttccaatggggagcagtaacttcagttcatcaaagccaattattccagttcttctttttcagcttggatttttccatttcaagtcgtcatgggaaagtaagtcttaataaatccctttatgcacggagaactagggcaattactgacattttaagaattattgaaacttttttaaagttttttgattaaagttctaaaggacataaataatccttttttggtttttggaagggcttcaattattttcaaggacagaagttgggcacacgggctgttcaaatctaattaattatctggctgcgcccacaaaagtcacaccttcaaaacactgaggttacagctaatcatctgagattctcccacactgggataactgtacccaccctctggggccatgacagatacaagtacaggatgcgttataggaactcaaggtgcacctctgcagggaaatcaagttttgtttgtttgtgactcaacgatttagtcgtgcattaaatattcaatatctgatgcaagagatttaaaatcctgaggtggtaccttgaagcaaaaaacacacaggctgggttaaccaatcacattaatatttttataccataaattagattagaaatcccacagctgggaaaagccagggtggaaagatcccagggaatgatgtggctccgaaaaatcagtggtgagcaaacttcatgaggctggataggggtctgttttggtttaggatcaataggaaactgaaggcaggtaacctttgaccattggagagacatacccatgccaaccagagttcactggagttgatttactgcactacggtatgctctaaaaataagcacatagtttgactgaaacttgcatttgagttaaaaaaaaaaaacaaactattgtttttagtttaccatgcattggtaaatttcgaaagaggataagagctgggcaggaggatcacttgtgggtgggagttcgagaccagcctgggcaacatagcaagaccctatcttcaaaaaattaaaataacttcgttgggcgtaatggtgtatgcttgtagtcccaacactttggaag

SEQ ID NO: 67421 - DNA, 5386 bp, Homo sapiens
catcccggctaaaacggtgaaaccccgtctctactaaaaaaatacaaaaaattagccgggcgtagtggcgggcgcctgtagtcccagctacttgggaggctgaggcaggagaatggcgtgaacccgggaggcggagcttgcagtgagccgagattgcgccactgcactccagcctgggcgacagagcgagactccgtctcaaaaaaaaaaaaaaaaaaaacgctttcgggttctcctggcgagttttaagtcacactggatcgctgcttattttcagagatcacctcgcacccatgcacctggaaggcacccaaagagaatcattttaagaaattcacttcatctcaccctaacaacaaagcacagcctgcagcacatggatttcacccatgtgacatcaatgctaatcctatgtgtgaaacatctgggttcattcgattttttaaaaattagtaactgagatggggtctcgctatgttgtccaggctggttctccaacgcctgggctcaagccattctcccgcctcggcctccctcggcgctgagattataggcgggagccaccgcgtcagcctccactctttttgcggcgacaaagcccgcccgcctgcggggcgttccgttcgcagaaactctgtgagggacgccgcgggggcttccaagggacgcggcgaaaccaaaacagtcgccggtggttcacaaaaccacctcagaaaatgcttccaaaggcacgtctggcctccacaaggtgacggcttttcagcctccgactcgaacttgagtcgtccacagcactaggccgccgccagcccgggcgagctgcctagggaccgcggacgccgcagcaagcagctccctgctcccgccacacccgccgagccagccgcgcggaacccactcccccaccgtgggcccgcctcccgccgccagcctgcccacgattggtcgactgggctgcccgtcgcgagagaaggcggtgcctccggcaggccggcgctcccattggccgggatggcggcggcggcgcgcgcggccccggcgagcaggggaagccggtggccgcggctgcggaacgggcggaggctgccggtttcgtaaccgtcgctcctcctcgctgactcgcgggctgtgaggcctgggtcggctcgggccgcaccgcgcggggccgctcggagtggaggccgcctgggggcaggcgggctagaggagcaggtaaggaggctgcggcgggcgccctgagaacggggaggaggaggccgcggcgacgccggccgctcgactgggtgcgggcccggctcggggaaacccagccccggccccagacggcccgctggcccgggaaggccacgcgaggctggaggcgcgggcggcggcgccgcgcggcgtctgatgcaacctgccggcaacacccggcggggacgctgagctcattcctggccgcggcccagcgctgcggcgccgcccgtcgacccccgcgctgcccggggcgcccctcgcggcgggccgggagcgcgcgaacggccggggaatgccccctgcggagcccggccccctctcggtgaaacgggcgctgtgacccgccaggctcgcattggcccctggggatgaagggtgttcccagaatagcagaaggtggaccgagtcgagctttagaatcctgatcttctagaagggctcagcttgcggtgatcgaaaatctgttcagaagttcaaagactgatcaataaaatagggaaagcaactggtttttaaatgcatgactttgcagagataatattttgcttctttgtggagctgttggaatgtcctgcactttactgttgaacgtagtttagaagaacacgcaacacctacgggtcgaatagagaagaaatgaagcacttcgcaggcatagttggagggagcggagcagggccgacagccagcggaggtgaccagatgcgaaggatggaaatgcatgtgtcgcggggggaggagagtgttttccagggcagctggtgtgttgcttctcttccgcaggtttacgtgttgggttttcctcttgtttgaagtttatactgtaatctggcatcctgaaatgtataagatttagaaaggtctcaatgttgatgggtgacaccaaaattggtagttgtgtcagaattgactgcttatatgaataggttgtcacttaaggcagacttctcccaaagaaatgtgactcccagagaaaattttaaaagaaaatcctataagggcttgctttacgaagacattctacacctagaagctcttgatatttaagatgtggtcatctgttagcccttgagtagtatttgggataagctgttcataaggtcgattctgcttctggaaaaagttgctgtaaacaaggctaaataattacagggtacaagggagctgaagcatatttcagcttcttgattcctgcttttggtgggcacacttggctggttcagttatttttaatacctgcttttaaaaaaagtagatggaaacaaaacttcattgagaatatcctttaaattctcaagatcacatcatgtctgtctgcaaggctgtctgatcttggagagatggtttcatccctgggaaattaaacactatgtgctgagcccctggtaaagacaaataggacctcgtggggctgaatttggtctcgtggtctaagattgcctcacttggtcacagtaatggtaaatacaggtagccacgattccagctgtattgtgcgttcttgggagggttggttccatgggttgttatattgataggtacactggcctcctgcgtttgtggctttctagctctatcagtaaaaaaaagacaaaaatgagcatgacctcctaatggatgttcatttacaaatagtctatttgttttgtgtgttgtaaatcacttcaaaaggattgggttagaaagatgatgttgatgttcttctaatgctccagtgacccacttctgtactcccagaaaggggacgtccccttcctcatggaccctgcgctagatgcttgtgaagatctgcagggagacacgatgcggctggagttgacagacctagggaacaaattttcccagatgcccaaagaaaagagaaagcacagaccatttaggatacagatagtggtttagtactgtcaagatgtggtgtgagggaggagagagggtcaggaccttggatttgatcctgtagactggagccagagatgaattttcaccaggagaatgactcactcaggtttgagtgttcaattgctctggagacagaggttggaggaagcaggctagaccagagaccagtgtccctgagagatgatagtggcctaaggtgatttcgatgggattgggatggagaggaagagtagatgggaagttttttttttgtttgttttaggtggaattgtcaaatcccagagactaaacagagttaggaccaaggagaaacatctgtgactattttgaaatgttgaccttcattgaggaaatcgagtgaaaaatttattttggtgggcaaggggaggaatattgggttctaggtctgtggagaaaagggacaaaagggttaggaaaattcttgataggtttattttcccaggtgaaacttgagaaaaatttgattttgttttactcattctaacattctgcgctttcagtgtgactgacgtgaatgaacattacttgaattaagtttgaattaaaacaaagcctattacccacttagtccaccattctcaatattcattgggaatcagcagcagaggccctcagacttcagtgtattcagagttacttggaggtctccttatgaaaagattactcagctctgttcttagaactcctgattctaagtctggggcagcctgagaagttacatttctaaagagttcctggatgatgatgatgctggtccagggaccacactttgagaaccactgctcttcagctttcctgctgtttcctccttgagtgattcacatggaaggaagccaggcgccgccctgcatcctgtagcctgaactttggaatagtgtttgtccacagaggagccagacttgaatttaggactgagtgtccagctttcaaataaacactttttgcctgttgtaggtgttcagtaaatgtgtgtggaggaacaaagcgtaaatgagagtggccttttcagtgtaaaatcacttagctctttgatccccttttacttggttaatcttcactttaagagctatttatatggttaaagaacttactaaacaaaacattcttggagttattttgattatctccaagtttctctttcttacattttcaccagtttgtaggttcagtgaatactcttttcaggccaaagggcttacctttaaaacctcacctaccacacacgttcagcctagtaccttgcaagatgagtcaggcagaggtgaaaaagcccttccctgttcctgtatctttggatacggaaacaggcgtgaacgttgctgaacgtggaccctgtagtgagtaagagctgtttgttagtgactgaaggtcgtggtgtgttgtctgtaggaaagtgtcttactattccacatccctcatttgcatgtggggaacagacagccatggaagaaaagagatttgcccaaactaaaatagggggagccacagccaagacaagaactggcctggtcactggtctctaccgctttggatcattgctatctctgagcatggacaagttgactgtagagagctttaaaggctaaaaatataattggtatattaaaaaaaaagtagagaaataaggtgaacatgattatgattgttaagacagtctcaggggaggtgttaaacaagttcttaaaaattgagtaaagcacctctcacttgacaccaaatggataataataatgttaggtggcactaaatgtggctcagattaatactaaacagccacttttctactggaagaaaaatgaggcaacctaatgatgaccaagggaaattgtgaactgtccattactgaagataggcttggagtggatcgccctcatggtttggagggatgctttttgtcttgccttagtgttggcgtgagaacagatgacctactagctcagagtcggctgtgtggctttgaaaacaatggaaagtaatgacacatggacttttcaaagcaaagatgttttttaaaaagagaccaataaacagtgtacagaattgcctggctgaaggtttgggtgtagctactggtgtttgctaactgagctttccctcattgtgggatcactgcataaatctgactccagattttttccactgatgtgattttagcagttttgtgaaaagagaacaggatagttttatgttcctaacactgctttctaaatttctaagagtgccctgattc

SEQ ID NO: 67422 - DNA, 3613 bp, Homo sapiens
ggctgaaaagaggggtccctgcacatcccagaatggggatgaaacacccctggagctgctgcagggagcaaaggtttctggggagaaggtgcggctggcacggccccacgagctggctggcaggggttcggggccccgcctgccaacagcaggggcaccatctccaggggagccagatgtccaactcccggcttcaaatccaactcatctctgccgcatgtttgtggggcaaaggccaccaaagagagaacttcctaagcacagagctttgggggccacacaggctctgtggggctctggagcatggccgctaggaaggaggcccttagagagctctccacgtagagcctcagcagcccacgggtgcgcccgtcccatccccggactctgtggaatcccagcatcagcctctcctcatggtagcttccactgctggacttggcttgagcaccagataaggactcgaggccggtgaggcctcctgccctggccccatgggggctgggtttgggcaggccacgtgctggcagaggccggggccccaggacactctggccaggcacgtggcggggggcccctatcaatgtgcagctcactggctggagagggcgcccagcaagtccctgcggcacctcctggagaggtccagccccaccaggcggagtgaccttggctcccgagggcctccctgccaggcttgccttggcgcagagccagagcctgctctgcatggtcccgatcactgctgtgggaggggccggggagaccctgagctggcgagggctgggctgtgagaagcagggttctgaacctctgtggctggcggagggcagatgatgggctcggctggcgaacagggatgagagtccacactgggacacaggccatcacccccgacacactgggcacaagtccttcatgttgggacccctttaagtgccagagttggccactgtggtgctggggtctcaggcgggctgggggtgcacggctttgggcaggcagtatggctgttgcccgccattcacagcacagcgccccagccacggcagcagcctaagggtggcaggggtggagatgcccagacctgcccccaccccccacacagagcagggatcctcctcagagcccagctccccatcagcccagcctcctaggggctgaggtgggggcggccgtcccggggtctggggtctggcgtgggggaggccgtcccggggtctggggtctggcgtcggggaggccgtcccggggtctggggtctggggtctggcgtgggggagggcccggggtctggggtctggcgtgggggagagcccggggtctggcgtgggggagagcccgggcagacctggggcaactctggctgcagctgccctgtatctggggcagccctgggcacacacacccctggctggcccagcccgcacccctggcttttctgaggggcacaacatcccggaaaaggacacctggataactgcagcccacttggccgctcccccgcctccgtgagcctcagctgccgctggtcaaacagccccacctccgtgagcctcagctgccgctggtcaaacaaacaaacagccacaaggcaggccccggggggttgctctcagagcctctgtgtcacctgggggctggaggcagcaccccggacagtggcattggccaccattcctccatcgcgcatgaccagccagccctggttccacacttgacattcacttgttcctgggggtgtgcgccaagcctgcccagcctctgctgctgctcttctctgagaacccagcccggacaatcctggcccacctcgcccttcctctctgctgctgcatcctccagaggccagaccaccccaaggcacacaggccgttttacctcaggccctttgctatggcctgtgccaggccttgacctgtgatgcctcatccaaggggtctctgcataaaagctgtcccctctcagaggagaccttcctgccttgctgtcccaggcctggtgatttctccttgcacggtccatccagcctgcagccgtcccctggacggatctgctcgtttgcttctcatgtctcactccgagggtgggggtctcccgagggcaccgctgggcctggcataaagtgagtgcccctcaggtctcccaacagcctgcaaagttggcacatggggctgggaggcctcctgtgagtggctcgtgccccaagcccagctcaactgcttcctctcggacgcgcccttctctggtcaccaaaggggagccccgggaagtgcagccagctttccaaccaggctaacttcagcagtgggctacgttcttggcccagcctccgcagagggcgggaatcaggtataaatcatgctctgcggtggcccttcccgggggcaggcccggcgccgcccagatgtgccggcccgggggtccccttggcgccgctggtcttccttgcctgtgcaccctcggggaaggccttgcacacagctctcttggccgggagcagggagtttctgcctgtgtgtggttagggttgtgacagtgattcaacctccagcaacttggccccagcctctggcccggatggtggttacgacacccaccgcctgggcgggggcccctggagtgtgtgagggtcactgtccttgcactaggctggcagggtgggcaccaacttgagggttcccttgctggcctgggcccactctcaggctcctcccaccctggcagcctggagacaccgtcaagctctctagtccaggctggaaggcacccccggcccctagccagcctatacccagatgccacactgagaatcacacagcagaaattgggcaccagctgccctgcgtgccccaacccccagcaagcaccaaacctcattctggctttcccgaagcacccctgcacctgccccacccctcctggagtctgcctggctccctcctccgctgcacaccccttggatgcctgggccatctctttagaacgaacggggcaaacagggccattcccggccccggacgaagcccaggttctcagcttggcctggtctccagcctctccctcacccactcctgggtggggtggctggaccaaggccacgggtcccaagaactggccctccctacctgctgtttccttagctggggccacctcctccaagcccgttttcccagatgtgctcccattcctcctgtgggcctctgtggtgaggctcctcctccaggaagccctctctgattaccccttcctgtactttgagaattcacggaacacacagcacagctgggcctggttatgacctctgggccttgcaagggtggtgcccgtactctgctctgtgcctggcatgctgcggatgcttggtaaacgcctggaaggagaggagccccagcttctctcatggctctcctgcagccagtgttgtgccccatcccccactcctctgtgtactcagaccctagaacgggcagggtggcctctaggttagtgtcccatcatgcgcctcatgaaatggcagggctcagaggaacaagccccgctgctcctgccacccaggccccaggtgtggccagcgtagcccctgagtggtcttctgggtccacttggtctc

SEQ ID NO: 67423 - DNA, 851 bp, Homo sapiens
ggatcccacccaacctcccgtgcatggcactccccgaggtcctgcagctgctgggcctgccctgccacccgcctgtggactcccagccgccagggtagggtctccgtctgagcgagcgcagcctccttcctcgccgactgtgaatgacagtgaggaatgctcccccaccagccctaggatcaggggccaaggcctgcattcctcaaccccccagggtcctgaccattctttcctgcctctcctttgggcttagctatggggtttcctgctttatttactctccctggaaggtcacaggatgcagtcgggcagtctcggtggggtgtttgtcttggcccaggaattgaacccacgaacccagggcatttccgctgggacaaggcagggggctgacctggccacggcctcctcgatgctacgggaggcgacctgccccatccggagggcagctctgtgggcccagggcctgccccacgggccttcactgtgtgtgatccagatggagtccgactctgcccttgggggacaccaatgccacacagctcagtgtgggtggtaggtgtgggggggctgctggggggctgctccattcccttacacagggatcctccagaccccaggctgggtctgggcagcaaagcccagtggtgggtgggagcggggctgggggaggacctgcctcccatggtctgagatgagcctagctggatttggccttgtggccccagacacccctgccaggcctgaggcctgtgcctgccccaagagtcagcatgaaccaggcagcaccacgggatgggagacccagctcaggcctttctcagtgccacatggggcctggggacttgccc

SEQ ID NO: 67424 - DNA, 1864 bp, Homo sapiens
cgaccgccgagccatcaagttctgaggccgcattctggaggctccagatctttctttcttcttttttccttgaacactgagggcgcacttggcagctgccagctctctgtgggtccttaacagagggcactccatgtctaactagatgccacggtccagagctggccaggcccgctctgaagtggactctgccttgggagagcaggggtctatccttcgcctgtttggggcttaagtaaggtacctggccagcaggcggcagagctggggctgggctcggggcactctgggtctggggcctgcatcctggactctgaagccttgcgctactgggctatcccctctgcccgcggtaagcccacctggctcctggaggacgcctgagctcccctacacagggggctgccttgggcctgcctgtctctctggaggtctgtatagctgtgggtgagaggcagtgggcgagggtgggggcaagctgggggggctggactatgacctgggcatggccaacacgaggtgatctctgacctcgacccagatggagggactccaggctgcagaaggtggctggggcctgtgtgctgagggcgggccctggccagacgatccagctgtgagtacagggccattgtcctgtgccactgcagccctggccccagcccagacctgattttccacctctgtgaatttgtggcagccccaaatgaccgaattggctggagactgttctgttgcttataaccaaagatgcagaacctgcgtgccttggggggccagctgtgcctgggccggtgtgggcagggaaagcccctctgcgctgcaggctggaccctggcagctgccgaacagatctcagtcagagtcgtgggagccatgtgcctgtagagggccaggcctaggggttggccagcacatggtgatcccataggaacctgcccaggctctggtgaatccaaggattacggcaggggtgctgtgttgaagccctggaaggcttgaagcaagaacatgagaagaccacatccctcaattctctcctctgggcaaaggtgacaagccaggacctcccatcactgctgggaaatggtttctattgttgcagggcagagagctggggttcgatcctgtgggtgctagactccacccctgccagggctatggaggacccaggggtcactcggcaggaggctggctgagcgggatggggacagcgggaggtgcccagggggaactcctgaaagctggccttgttgggaggatgctggctcccctccaggggacctcctctgcctgccctgacagacatcaacggcgcgcggtgggaggtcaagaggtaccagtggggcctgtgcaggctgcctggggttgggagggctgagggcaggacaggttggcctacgctggccgctgggagagagaaacaccaggcccatcctggcctcaacatggccatcatggtggtgactgtgacccctgcagggcactaccacaggccaggcggccttgcaggtgctttacacagcttaactcagtctccatgagtcggctgcttccccatttacagatgtggaaacggccacccagaggagggctttccatccaaggtcacagagcgctgagcggcacgtgaacctgctctgaccccatgccagtgtccagagtgggttgagccctccctggagtagacaccgcttaaggacaaagcaggagacaggctggcgtgctagtggccagtggagatgcgcaggtggaggccagcagaccggggagccttggcctgagccccgcaattcctggttctgtctgtccctgcctggtggtcagccttgtttcctaggagtgaccctggagacctgacgcc

SEQ ID NO: 67425 - DNA, 5322 bp, Homo sapiens
tcagggctcagcccaggcagggaaggctgaggggagtggggctgtcctatgcagatgacacccacccctgtggcctggcctccaagagctcagagccatggagaattgtttggagaactaaggagaggcagagatgccccaggaccccgcccgctgcctggcctccacccggcaccccaacaggctctcccaggtctccctgcacccagcacagagcacaggctgaggccgtgcttgtgggaagcagaggaggagggggctgggcagggaccccggatgggatgcacggcctagaactccgggcctgaatcacaccacctgcttcttccaggacccagagcatctgggcagacactcagtcggcggctagggcctctggctctgctgcagctctggggccccctagctggaggggtgtgcccgacactacccctctgcccatggggatgggacggacatattctgccagggcccaaggggagggcagggaggaagtgccagacagcctcatgtccagcaaggctttcccagggcctgctggccacatgtccccgaagccaggtgggccccctcaccctgtccacctgcaccctggcaccctccggtggcaggcagagaccagcaggacacaggcaggggcgtggagaatggggcagaggtgccagctgtccaggacgggaggggcctgggggccagcagagaggcaggatggcatgggacagatggcgtgggacagacagtgtgggacagatgacaggaggcctgctgaggcaggaggatggtggctggggctgccctctggatgccctgtaagagggacccttggcacagcagggcccggaaggagtagggcctgtccttgctgtgcaaaggacctcagggccctctctgggcaacggcagagaagcagcctcccgctcatcctgtggtgtggaagggacaggatacgggaagggctgctggatccaaacctggctctcaggactccccggaagcagcccaggtggacaaggctgggcctggctgagggggcggaggggcgcaggtggtgcccctttccatccatcccacctaggcacctcgggaggctgcaggcagcagacacagagcggaaccctcgggtccaccagccccttcacaggtcatggccaagtcacgacactgatggtgatgaccctggctggcggaggctggtctagccctaggaccagagcccaccacgtctgcagggtccagaaccagagccaggagggctgaggaagtgcagctgcccctctttggctccaccctgggcttcccatggggtccatctgtagctgggtgagtcctgacaagtctgaggccaggggcacagccgcggcttccgtcacgagggcctctcacccaaatcccagctctcacggtaaacacaaccactccacaaacattccagaagctgcctgtgcgcctgcctgtggggggtcctgtcccatgggagggagccagggggtggaggaccctggcctcatgtggagcaaggagcagggccacgtggctggacaggcagcgtcagccgccccatggaggcagatttctaaaggaaaaacttgaatgcacggccaggacgctttgctgaaatccaaagtccccagccgggcactttttaatctcctgtcttttctgattgcaaaacaccataagcagtgtcaacagggcagaaaggtccagataacacctcaggtgactctcaggctggggggaggagccccgcctgcatgacagggagctttggggtgggtcagagtcacaggatctctggatgcagtgggctgcttaggccaacaactgcctggaagtctactcctgcacagggcctaggcttccccacggctggccgggaaggcggggcacatggaagctctaaactgaagggaaactgaggctcagatcacgggtccaggaaagccctgagtcaggagggtaaacaactcgaagcccagcaatgggttcttaggtcctggcggcagtgctcaaccttcacggcctcagtttttccatctgtaaaatgggaccctcccactgctgtagctctggggagtggagccatatggaacacagcccagttttgcctggggacagctaagcattttcatttaggttccccagagtcaaccaagaaaaatggtttgtggtttgttggttttagaacatgcaagaatagcctgggcagagaggacagggccaggagtatgggggacacggattcctaggaggcgccaaatcagaaggtgacctgcaacagcagccggggcagaaagtcctaccggactgtgctgacacaaaagaaaaagcagaaactgaactatcgtttaaaaaacaacaacaacaacaacaaccaggaagcccacaagaataccccgaacaatgaaatcatctaggaatgtaaaaacaagactgttctccagtgcagaccagactcagatcccagttccccaaactcccgccagcaaagcagaaagaccatgggatggtgggtgcctggatatcatccgccagcctgactttatcttccagcttgtagaagactgtaactgcatttcttgtttgaaaatgatctgctttctggagggggaagtatacacccagccagccagctccatcctgcccagcgaggctcgggtatggagctgaagtctattttcgtgctcctctcagttccctatctttttctgccttaaaaaaatccccctagagtttctacacacataagttattcagatgcaagcttttctggaatccagggacgaaagccatggctttgataaatcatctccctcccgctcctctgcgtccacttcatccatcctctgaatgcaaaccgacaatggagaattcggtcatacgttggctcaatcgagaacaggcacgcaggatccctccttcctggctgtctggggaccctaccatctttggccgagtgagtcgatgataatacaagacatctgggagacaggatgcatctccaaacaacgtgctggcgtctcactccccacatgtgttctgagggctctgtttctggctccttctgggtagctttgggcctgggctacctgccaccactggcccacccagaccctccctgggccccatggcagggacccgccagcccagaggcagaaggcctccaagatgggtcggccagtgacggaaggcttgggaacagttttctgggggaaatgctgcaatgtttatatgagagccactttggacttggtttgcagtttcatttgaatctcctgagtagtggcacggctcttagctgttcaatccaacagtttacacgcgctcatattcggggctgcagaagcactgcagactccgatgtgcagctgccctggtcagtgtcccaggccaggctgggggattgctgagcagcaggaagcacttgcttctcctcagtgtgagaccgaaagggaggcgtatgggtcactcttcccttcatctgccccagtgggcggcccctgcagacacggtggcgagctgtggtctccagggtgcatgggccggctgcctgctcccagccaggccttccgtggagtgccaagctccaagcgtggccagcagggacaaaggccaccactcggagtccctgaggctccccgtgccatggcctaacccaccaaggggacctctctccagtgcgttcctgggcatctctgcccccttttcgtgtgacggccactcctccagggcctcggcagacaggaaagctgcccatgccgccagcccatgacagcagcagcttctggtccccagagccagcaatccctggtgcacgcggtgggtgacgggagcagctgcgtcctgtgggcctcctgggtgtctggagggaactggcattgccattttatgcatgacatggacagaggcacggcaccagtgaggggccccgggtcccagaagagcactgtggggtgcctcgtccagaggtgggtgagacacaaggacagctgccaggaaagcacagtggggtgaggcccgggcgtcagggcagtggccttggcaggcgggagggagagtcacacgcgcagcacatgctgtattttgctttttttggtgaccagtgtctcatgatgtctgggagcacccaggatgtctggacaagtgctgttcaaactgtgggtcatgacatcagctgaggagggtgcagccacgaagcacaaacaagagacaaaccgaaaacgcgtgggcaggtgtctgctcataaccaggcctgtccatgtgtatgaggacgggtgagaatggagagcacgctcctaactgggatgggatgggacggccatgcctgtgggtctggaccctcctgagggcgttctgtggccccaagagcatgtctttaagaccgcagagtgctcagggcagggctggctggtgacaacaagtctccctcggaggaaacagcaaggtggtgggggagagctgggctgggacaggcagcagagagcaggcctgggggcaacgctctaccctggagctcaccaaagcattgggccccaggtggagtggggcaagggggtccccaggagcttgtcacccatggggtccgcagcgcgatggtggcagacagactcaggctgagtagacagcaggagtaggctggccgcatcccaggctgcagggcccatgtgaggccaaggtggctgctgaggtcctgggtgagcgggcaccccatggcctgcagggtcgaggtctcgccattatctagccagggaaggaggggaagagggcactggtggctgctgagtgtgagggctgggacaggtctctcctcctagccaggctggccacccaccccccatgcccaggagcaacacaaaagaccaggcccagcaggggtgaggcctggcccatcgtcctgagacaacactgccctcttctggccagttctggaaggacaggcttgctgcccaccagctgcatcccgactgggacaaccaaggcctggggcatcctgggacacgtgctctagaaactctgcgaggggccacagtagattaaggcccccctccaacccccaccacctgatcgggaagtgagggaggcaggaggagtgtcccagctgctttcccaaccagagccctccacctctgccctgtggggtgagcctctccaggacctggggcggcctcaggcccggagtgctgcaagggatggtccctctctgggcgcactgcttcccagaatcgtggaccatgcgccccctgccctagctgcgaagcttgctggcctgcagtggctctggtgcccacagcccaggctgtttgtggaaggagggggcagcac

SEQ ID NO: 67426 - DNA, 1222 bp, Homo sapiens
tgctgtcacaatcgtttagatcatgatgcgtttgatgttttatagcaagatgacaaatatctttctcaactgctaagtgcagagagcccgttggaataaatccaaccaaactgcccaccacaggtaagtaggtggtgtcattaggaggagacttgggggggcggtggtgtcagaaatgcctcaggcagtgatttccaaaggcacgccccgaccgtgcagttcaggccatttttctcaaccctcgccagtttctggcacataatctcattgttggaagaggcagggtccaaactctgaataacacatggagtctgacaccctggctctcccctcagcaacaatgaagtcacagcagagccagagaaagggacagaaaaaacaatgcaggaaggacaatgtggtgaaatgtctaaccgtgaaacaggagccggtgcatgagagccacgggcaattctcctgggctcctggaagtagccctccaatcacaccagctggctccctgcccagacacaggctgcagggatgtccaggaacccagctgggatctcagagggcagacccagggtgctgggtttctagcatggaccctcagctgggcacagagagaagagagccacctgcttgctgggcccagaacgactccccacagttctcccagggtacaggctgtgcccactctgcagggaaaacaatgcccatcttacaatcctgccctgcagggggccccagaccaacacagctggctatctcttctctgagccagaccagggtgactcttgtggttgccagaaaatgccaactgcgggacatcaagagaagaggcaggtccaagggtctctctcccctgccctttgccttatgaggtctgatgccaagacctacgtcagggcactctatgcccccagtcttgccaacggtgagtgtttccactacccaggactggagtggccctgaggtgatggggggcgggcagggttctgctggaagccgacagcccaaccctggcaggggcagctgtccaggaggaaaatattctccccaagctttctcctcctcggagctgaactgtgacacctcagtaccaaccaatggcaaccctgggacaaaggagtgcttcctgcccttttgagacggagtctcattctgtcgcccaggctggagtgcagtggcacgatctcagctcactgcaacctctgcctcccgggttcattcaagagattct

SEQ ID NO: 67427 - DNA, 1741 bp, Homo sapiens
ggcagaggcaggtgccggtcccaccacggtccttgagacagggtcctggaggcaggtgcccatcctgccagggtccttgagacagagtcctggaggcaggtgcccattccaccaggatccttgagacagggtcctggagacaggtgcccatcccgccacagtccttgagacagggtcctggaggcaggtgcccatcccaccagggtcctcgagacagggtcctggaggcaggtgcccatgccgccagagtccttgagacaggatcctggagtcaggtgcccgttccaccaggatccctgagacagggtcctggaggcaggtgcccatcccgccagggtccttgagacagggcccaccccaggctgcccctccaggtttcacatcgaagagacctgaagggtcaaggtttcaaaggacaacagtgttaagaaacagtttctggggcagggaacacatctgccaaggagagggtcggaaggaaaacgagaatgaaggagtaggtgcctcctgctccacttctgagacatacaaggcaagtggcagatggtctcattgggagcatgcaaataaacgttccgtctattttagatcctgtactcaacgggatcaatatgataggtcacatgtgtattgacagaatcttcagatgttaagagtcacccccaaaagcttgggattgaaataacataacataaagatccatcaaaagcctcctctctccacagtccaaccaggcagaagatgctgtagagacaggcccccgtggccctgtagaggtgggcagtgcccttcacagaggctcttccagggatctctgcccaggcaccaccaccctgcggtgactgttcactcatgtggtcacctcctgcactggactgtgccctgggctgttgaggtcagccctgggtctcggccacctctgatgccctacatgtccctgggactgggcagggaaagagtgcaagaggaacgtctggggaaaaagaactggacgttcaagacaaatacaagacagtcaagggcagggtgcacatcagaacacagtcagcgtccatggtgtccacaacttggtcctgagggctcagggaaggggcaccagtgtgggccagagtctacagcagatacagtggctgctacaaggctggtgcaaggcctcaaaagatggataggagaaagacagagaaatggaaaacatattccaggacagcagtaccgggggcagggctgggcacatggtactggcccacctgcagtcaaagagggctggccacccccgagctggatgggccgggctgggcccccacatgctgggcagagacaactggtctctcacagcactgtgtctggccatgatccctgggaacctgcttctcacccagtgccgtcatcttcaaccaggctgtgtcctgcccaggggaagggggaagctgcttggccgccagaactggctcccctggccacttccacactgcagccccggctcttagcatggccgacacataatctctgtctggggaaatgtggctacaggatggccctgtccaaagctgatgctgccaggtccaggttggactcccagtggcaggcattgacttctgggtgcttcacattctacacggcactgacctgcacaggacgtggggttgtgacagcgcccagggccagagcacagaggcctcctgtgtgccaggcagtggtttagtgtcagggcctttggtcaagtagaccacaggggctccca

SEQ ID NO: 67428 - DNA, 627 bp, Homo sapiens
aaaattagcatttttagaaagtcagtatcagtattactcaatgtgatgagaaaaactcaagcttattcattacccctgaaaaatctgccagtgagaagacacagaatggatgaggttgggcagccctcgtccacctcctgatgggccctttggtcacagctgtgctaggcagacctccagcctgggtccagcaagccaccacccccaggctcttggtcaggagataagtcaatgtctctgttagtgacagagcttacgcaaggggaaaggaacacaaactgcacaggggagacactgagagccaagtccaatgacgcacacatactcggtcctatgtcatcccacacctgggccccacctcatcacacgggctctatccccagccgtgctccagccctccagctgtctgtgacctcacagtgttacagtcaccaggtgctgggtcccaaataggcctcagacaaaaaaacagcagatggtttctggatggtgtttcctgggctgtcaaggggtggtggtgaggcaggagaatagggtcgggaggcgttagggctttttcatgctgacttcctagaactaaattgaaaggaaaaccctaactttccacacctaagtaacaaaggacca

SEQ ID NO: 67429 - DNA, 424 bp, Homo sapiens
ggcacaccccagtcacctggaactctcatggaccccctctgtcccaggctctggtaggattctacagacaaccaaacccaactcccagtgagcccacggcaatggccgtgacttgctggcatcatgcctcgttatgcctgactctatgatctgttctgtgagtgtggctaggagctgagctttgcgggaaacacacttaatcattctgctctaaaggaagccactggggtcaacctcaggctcaaagtacatgggaaagccccataccagactgggatggctcttcccaaggagactgccaggctctggaagctcccacaccctctcaatagcagacctctctaagacctgccactctgttttgcctccctcacccaccctgtgtggtggcccagagaatcggttctgctagaaaagctctcat

SEQ ID NO: 67430 - DNA, 1901 bp, Homo sapiens
ctgaacccaaatgcaacccctggcactccctgtgagcaccgagccagcctaaccagagagacagcacacccacagctgggcaccagcctgctcagtctaccctttaaaagggtcacaggctggattcaaggatctgaccctgagttccttgacacccatctgagactttgtctgcactgttctctacctgaagggagtctcattgctgaaggactagcacaaaagtcacccaggaagtgaagccttcccacactttatctgagctcagagtccatgcccctcctttgcaaatggcaagaccacacggcaagcagatggatgacagagtcccatgtgtccatctgttccagtggcctgtgagtaccttaagggaagacccactgctattcctggaatatagcaggtgcccacaaaatatttgatttgtatgctctaagctccctcaaccttgggggccaacttagaacccactttctgttgccattttccctgtatcttaaaaagagagatgcattcagtccactagatcccccattctgacctcagtttccaacctggcatctggaatactgctccctcctacaccatgccccctctaccccactgtaccaccagacccacaccttctcccattgaactcacacatagctcaggggagcctaatctttaaaaaacagatcaagcagcttgtaacaaaacccttccagcccatcagggcaaagtctgaagccgccacctggaacaccacaccttccaaccagccccaggcatgcacccctgtccccagaacactctgaactctcaacctttgtcccttaccctgggctcagatgctccctatctgggagattccgcccaacgctctggtgaacccatctgtccacccttcctcccactacgaccactcagctttctttcatttagcccagtatggagcacctactgtgtgcaaggcaccgggctactgagaagcaggtaacatacctgcccttgcactctaaatgcagagaagataaagaacaagtacaaacaatgctctatatagtttatcaggtgatgatgagggcacaaaaagtgggatagatggttagagaaggattccctgagggggtgacatttggcccctgaaagaaatggggaagtgccctgctgggaaaagggaattccaagtccgtctcgaataccgcctcctccgggaagcgcccgggtccctggggtcctcgcaacgccgccctcctacccgggggtcttggcagcgaacatgcgtgtcgaccccagcccccaccgcagccgcacacggtggggccgccagacgcgggcaggtggggccggagccagccaggagggtggagaggagctgcggcccccgcgctgaccctgactcggagcgtgcagctcgccgaccggcgctgggactccgggccaacgggaagaggcgcctacccgcggcattcagcgaccccggctgacgctctcacccgcggtccggccgggacacccatgcccctctccacgccagcgggaaagagcgagggaggcgcagcactcacccggtggccgccgccatgttcgcccggcaccggcgtcacgtgaagtgcggcgtcagctgagcccctccgggtgccaatgcatggggcggggtaagggcggggcagggggcggggcatggagtccttgacccacctcctccagagccaaattccacgggacgggaaggggcggtacctggggaagggcggagccccgatggggcggggctcccggagattgggggcccaagagctcggccaggataaatgagcgggctgccggctgcagacagtaggtcgggttagcgggcagcatctgcagccttttcgtggtgggagggaggtcctgaagcagaggacatcttgattctg

SEQ ID NO: 67431 - DNA, 2740 bp, Homo sapiens
agtcggccacaaagctgggctgacctctcgggccgggccgggcctggccagcgtgccgaacgcgcagagagcgcgctgctgagccgaagctgggagctggaagcccggaggtaccggggcgtagggagcagagtgggcagcccttgggcctcgcgggagcccctcccaacccctgcacagatccctgacctacttccagggcttctttctgttccaggagcagctcaaaatccataaattaaggaaattaactgatggggcctgcggcatctttgtaagctatttaaatctataaatttacaacatcttctgcatatatcaaataattgaactaactgcagggatgtaactttaatgagaaaatttccccctttttcctgtagttcgaactcgaaaataaataaataaataaaaccttcccttaggaggaaagtttcggctgattcccgcgtaaagaagttacggaagcgctgtctggacgctctctccacgcgcgcgaggtcctctagtagagggagaaagccccccccacttcaccttcctcccactggcaccccgagtccccctcaccccagctccaggccgaccccgagcgccccccaccccgggagtgcggccgctagggggcgtccaggcccggccggagccggcggtcgggacccaggcgccgttccggcccgtgcgcacccgccccgcggtcccagccggtctccggcccgggcgtccctggagccaggcgggggcgcagtgccggccagtcgcgcgctccgtttcctaggagccgggaaatggtcgccgaggaggaggaggaggcacgggcggggcgcaaaggaaacaggaggaagaggaaggggaggaggagtgggagtgggagaaaaggaggaaggggcggccgaagcggagactggggaggggcgtccggggcgcggacctcggccgcggggagtcttggctgccgccgtctccatcgcgccgcgcgcgtaaaggaaatggcgcgtctagccgcgagcggtcggcccggtgccccagcgcgtccctcccccgcggcggccgaccgcgtgtccgcagacgtcacgggagaggggcagcggggcagagaccctgggagggcggccagggagcgggggaggggcggcctggcccccggctccgctccagccccgaccgactggcagcccagtttcttcccaagtcccgcccccagccccgggcgccgcggcggcggctgctctcctctttgtaaccgaggagtcaagaaatgtgagaaacgtgccctgtgttacttatttgggagccgaaaatttatgcccagctgaaagcgcccggggaaatattacatcagatgaaatgacaatgattaaaatcagcctctcccccgccccctccccgagcccggaggaggcccgggcgccgcgtggccggccggcggggggcggggggctgggccgcggagggcgctggggcctgggcgcaccgctcccgggagggtcctggccgcggccccggcgggaaggcgcgggcttcgggagaggcgggtggggatcgcccggcgaaaggaggggaaacggcgcgtttttgtcgccaggcgcgggcgcgcggagctaattgcgactctaatcctctgccccgcggcgcagccgagccccgagccaggagtcgccgcgcgcgcccgttcgcgctgggtaatttggggccggatcgctgccctttacgtccgggctgggccgcggcgaggcgctggctaggggctggagtggggggctggttttctctccagcaatcgagggaggccgccggagagagaggagggaggagaggaggtgggagcggcgggagggcagccggagagcggcgcgaggaggaggcggcggcggcggaggcggcggccgcgaagaggggaggaggcgaggggagggtggggaggggaggccccggcgcgccgcgccgcgaggggccgcgtgaagcgggggccggggcgggaggggtgggtggggggagggttgggggcgagagagaaagtaactccaggacgagaccggagcgacccgcgcagcgagcataggcggcgaagctgcgcccggcgcccgagaccggcagctgcgtggggcgggggctgcgcccgagcccgatctgccggctccgaggtaagctcagcgcgggcggccaccgctcagagccgcgcaaccctgccccgaagtggctgcgataccgagaaagtcgcccggccagggtctggacctgggcgggggcggccgctttgtccctctgctgggcggcgggggctggcggcgcgggggtgcccagcacaaaggcctggtgcaagagtggggttgcccacgtgggctggtcctggccgcgggtggaccctccccacgcgggcggtctcggagcttcctgccgcgcggtgtgtgtgtgtgtgtgtgtgtgtgtgtgtgtgtgtgcgcgcgcgcgcgcgcgcgcttgtggaggtccccgcactctggcccctgttctgggccgagcgccctgcagagctggcgagtttccggggtcagaaacgggctcacgcaactggggcttcgggatgcacaagtcccggcttggcgcccaaaatcagagaaagtctccagtgggacagatgtgcgtcctctgacgcccaccccacgagtccgaaacctggcaggaggggctgtcgcgctggtggtggtcccgggcgcgcagggtttggggctgggagaggggccgcgatgggagggatcgc

SEQ ID NO: 67432 - DNA, 1349 bp, Homo sapiens
aaattggagccagagcttaaaaaaaaaaaggaaataaacgagaagacgaaggccatcctgatgctcccccttgtgcacacagggcaggtggttggaggcatcttttctgcccctgagggtcccacctgctgcagcgtgaactggccacctcattccatggaggacttcggaagccggcccctcaaaccctgcatcctctctcagagggtggcctgggccattttccacagggaacgtggagcccctgacagagctgggaactcatacctgcagggctgagaatggctgagggctcctccatggtgattatcctcacctttcctcaacctgctcacgtccttggcagcctcagacgctgagggcatgaaaggcctctgtcctgggagaggcggtacagctgccgcttgatccaggagcctatactgaaccatggaaagatctagaatcagcctgtcctgaaataaggcagatggaaaaccttctaaacttggaccgatgagacaacctagaacccatccagccctggaatgtgggtgcatcaggagtcttctagaccaacaggaccagctagagcctcagccagacctgacgtcagaagggttgggaactcagccaggcctagaatgctgcctgcttacatggactttggagctccactgggaagggtggggagagttcccaggaggctgagggtttggatctgctgactcaccttggatgtagctcttacttcccaccggtgccacacatggacctcagccacctgccaaccactgcccatggtatctggcagcctgggacagacccatctgtctccaggaatgctgggtggccctcactctgacatctggatgcccacgctctactaggccaggtcctagggcctttgtaactggagccagccgtggaacccacagcctttccagcaggggctgtgacctgcagtgccattgtcaccaggcctagggggttgacagggctcatcggcctttggagctctgagatgagttgtatctgggtggctgcagctctgggtccacagactcgggctcacagcagactctgacctccccatgcccatccacgagacagccttgcccttttctttctttcttttaagcgacagcgtttgtctttcttggccaggctggagtacgtggtgtgatctcggctcattgcaacctcaaacgcatggactcaagtgatcctcccacctcagcctcccaagtggactacaagtgcatgccaccatacccagctaatttttaaattttttgtagagatggggtcttgctgcgttgcctaggctggtctcgaacccctggcctcaagcagtcctccaccttagc

SEQ ID NO: 67433 - DNA, 459 bp, Homo sapiens
gggactctgtctcaaaaaaaaaaaaaaaaaaaaatccctgagaagaagaaaagaataaacagaacacacacacaaataattttgcacagcagagtggagaggtgatacagccagccacttgtcaaataactacagctgttgcaagcttgatcttggcaggttgttcatgccacatggggaaaagggccttcaaagcacaaagttcgacccattctggcagagtatcaggatgaactagttaacctgaaggccaggctgcatgctggacaagaacagctgggaaggctgagggcatctactgcaggcactcacgttttgaagcacaagtaggttttattaccaaggctgtgcatagccaccagcgaaagtataggtaaggctgcttagtgaactgctttgggaactgaatgagcagaaacgaatctgtgagccctagagactatcctctaaaaaggccat

SEQ ID NO: 67434 - DNA, 1439 bp, Homo sapiens
taaaggaatcctcccgggtacctccccttggggtcttcacatgatgtgattttgaaaaaccagactcgggcgatcagagacctcactgcggaggaaatgaaggatgcctcgcttccaatacctggctcccatgaacactccctcgggtccctgctagcgccagcctgagacagagagcgcttcctgtcctgctgactgcagaagttaaacggaatctccactcccggattgaggaaagaaaggcgtcttcctgttgattttcgcgaggctgctgaccttcgcggcgccccgactgggcccaccccgcggagctgtcggggcagcaggcgcccaggacttcctgaatccccggcccctctggcctaacctagatctcccaggactcaggcctgggaaaatcacggcgtctgccaggccctcctcgcaggctttgcagtttgctaactcgcggtgcggccttgggacagtgcctcagtttccccaagtgtagtgaagtagggctggaccgtgattctcagaatcacccaagaagcttttccagcatcgcctgccagggtgtccctggggacccaccggatcggagagggggtcgggggcgaaaagcgccaggaggctggcagcccgggctggaacccgggactcgggctcgcccgcctcggcagctactccacggtctgcctggccccggagctcgccttcggcctgggcggggtcttgcgcgtctccgggccggttccgggaggccgggcggggcggggcgggccgggctgggttgtcccaccggaaagactcgtttcagctggagcaggcggcggccgggcggaaacagacttgtcgcccccgcctcgggcactccccgctcccccaccccaccaccctccccccccgccctgcgcggcccgccagggtccgggaatcgctggcctgcagctggggcagccccgggtcacccccgcccacgccttccccgcccacaggacgcgccccctaggccacacctgagctcgccctgcggtcccgggcagtgactccgccgagcctcggtgggggaggggacaggggagagaatagggaagaggggcgcgatctgtgtctgggacccgttgccaagaaacccgaccctcgggctctggccatcagcagccgcggtgcagctgcctccccctgcctccaggtcgcccagcagagctttctagagctgggtgctcagaagaccccaggcggaggcaagaaccttgggccgcggctctgtgggaaaagccctcggggaagccagacggcgcgctccagctccccatcgcgggcgtgggccccggggtggaggcagttgggtcgcggccctgccacccccatgctgcacggcctcggcccagtgccaccacctctgtgggccgccgtttcagcctccagatggggtggcggcgggccccagcccttgc

SEQ ID NO: 67435 - DNA, 1529 bp, Homo sapiens
taaatttgttttgtatcaagaaaaaaatacgaaaacataactttattgtagcaatctaatgcaggtgtcttttaaaactatcttttatttccagatgggacttgggaatttctttgttttattttttaaatacattatctttcacaaactcggggaggaacaactgttttttaaccaaaaactcctcacccaggaacaagcaaactgcctgagagctgcatctattttgcaatagtgcccctgaagcgcgcacgacgccgcagggtaggcgtcccgctcctgactggactcgtggcacggtcctaaatttgcagagggacccagggaggatcaacccactcgacactggcaatgtccccaccttccctagctgcaaactgaaaccagcagccgagcctcccgctctagaggcgcggcgaggggcgtggccgcggctggggtggggctaggggccgggtcgtgccccccgaaactgggccgtgccccccgcccacctcactgcgcctgcgcccgagggcgcggggcaggctgggaagtagcgttaaggtggtggttgggtgctttgcgggtcacttgttgcgctgcccgcacgtttgtcgcggctcctggatgcctctttggccgcctcgcctgttccggctctcttatctgcccagtcttcccggcccctgccccggaccctcctgcgcgcccctccggctgcctgtgtgcgaccccagcaaccggcccggggtctcgccggcgccgtcaggtcatcgtccacccggcttgttctcagcttaccgagaacgccccagcccctgcgctcctcctgtcttacttgtgttgagtcatttaatccgctttgcaattgagacattgaaacggagacgctcaggaacgtgcttcaggtcacagatccaagatgagttagggcctggaattgagtcgggctgcctgccaccattccaccttgcatgtcacacctggacgaataccctgtgcttcacctaaattcgcctaaattttcactatttctttttattttcttttctttttttttttttttcttgatacaaggtcttggtagcccaggctggagtatattggcgtgaccagagctagctcactggagctttgaactcctggggctcaagtgattctcccgcctcagactcccaaatagctgaggctacaggcgcaggccactacacccggctaattatgacatttttgtagagggggcggtctcactatgttgcacaggctggtctccaactcctgggctcaaaagatctcccacctcggcctccaaaagtgctgggattaccggcgtgagccaccgcatccggcctgttcactatttcttttttcttgactttcttctttttttttttttttcggaggcagagtctcactctgtcgcccaagctgtaatgcagtggcgcaatctcggcacactgcaacctctgcctcccggattcgagtgatcgcctcagctgggattacaggtgcctgccaccacgcctggctaatttttgtacttttaa

SEQ ID NO: 67436 - DNA, 2821 bp, Homo sapiens
ctcccaagtagctgagactataggcgcgcgccaccacgcctggctaatttttttatatttttagtagagacggggtttcaccatgttggccaggctggtctcgaactcctgaccggtgatgcgcccgcctcgggcccccaaagtactgggagtacaggcgtgagccactgcgcccagccctgagttagattttaagaagatctctctggctgctgtattgagaataaagtactgggggcaagagttgacacagaggcaacttttagaaggctactgcaataattcagcccgagtaatcgtggcttgtgggagaagtgtaggaatggagatgagaagtcagatttaggatatattgtgtatacataacggagaggtgtagtcagaacagatgtggaagcaagacagggcaaggctgactcacggcttttagtctgagcagctgagtaaaaatggtaccgtttacatcaaatagggaacggtggtgaaggagcaggttagaggggaaacagggagcatggctttggacccttaacgtttgagattcgacagaaaccctggttcacggaattgatccaagctacatactgataattgggattagtgagttacaatggcgttgcaagccatgaaactggttcagaccggctgaatgagcgggacaggaaggggctgaaacacttgagtccttgtgagagccccagctccaggggcagcctcgggggaagctccccgggcgatgactgcggtaatggagccgtaggagctccacgaggtgcaggttcagcgtcttagaaggatgagcagcggctcgccacagctcggaggcgggtgggcagcgctccaggccgagggccccgcgtcggcaaagacacaggacccacgacaaggcggccacggcctgagtcaaaaggaaggccgcgcgcctcctctccagcccgcagcaagcgggtgccacgaggcactcagccggtccccgaagttcctctcacgcggccccaagaccaccaccgtagtccaggccaacaagcgctgccgggactcccgaggccacgaatgagccgggagccaccagtagccggccaagtctcgcgagagcgcggcctcgccctcccagcatgccccgcgccgccgccgctgccgccgccgccgccgccgccgcgccgcggcttgagggcgggaggctgggggagggtagcggagccggcgccgccgccatgttgggtctgaagcggctgctgtaggcgccgacggagcgagcgggcgtgcggagcgggcgacagtggcgtgggatctgcctctctgcgagcagctgggagcggcggcggcggcgccatgagcgggggcaccccttacatcggcagcaagatcagcctcatctccaaggcggagatccgctacgagggcatcctctacaccatcgacaccgaaaactccaccgtagcccttgccaaaggtacgcgggaccgggcctcagggtgggggccgagccgggcgccgctcggggctgctccccgctccggcccgcggcctcctcgttccctcccctccctccgtcgagctccgggaggcctctcgcctcccttctccgggccccggcgtcgcgggccggaccgcggcctccccgcggctccctggtttccgccccccggaatgtccgcgcctgaagcccggggaactacgggactgagtgcgcggcgggcggccctgaagtccgagaacgggccggagaacacggagaaacgcgtcttccaactccgaaattcggggcttctgccgtcttagcacaaaacaaagccggagtattcaaagaatttttccgcccagcttgagttcatcgcggatgcgttgactacacagcacccattttctcactttgttcatttcaattcgtggcgatcttcctctggtgaactcttgagtaatgtgctaaaactttgggtttgctctgcgacgcagacattctcgaaatgccatcgatgccgtggagcagatcccatctccctcggctcatcctctgttggtatttacctgttaaaccggaatcctcaaagcctgttgtgcaaccacctcattagggcgcgtggtaaaaatgcttgctgctgccccgacgcccctgtttctggaaacgggttcaagcttgatccaggatccttcttgaccaggcaagcttgacctttgatccaggctcagtgggcgttgactgatccctctggaggctctctgggaaagggaattcggccgagaaggaaggtgcccctacccacagtgttaatatttggcatccctagagtctgtgtgggttttgtttccgttcacacgtgcagggcctttgctccgccaggaaaccagaaagaaaataaactttagctcctgaatcttaaaggaaatctcacaacagtgtaaaatactttgagggaagctagataacctaggtgattttcccagcacttctggtagaggtgggaactgcatagcatggttagggaccctgtggataggttaggtccaaggataaagaagaagattttcgaaatctgtaaaattttaaaaatcgttaacagataggggagtggtttcacgggatcaagtatttaataatatttcttggatgctctggtaaatcctttatttatttatttatttatttatttttctaagatggagtttagctctttttgctcaggctggagtgcaaaggcaatgatttcggctcactgcaacgtccgcctcccgggttcaagtgattctcctgcctcagcctcccaagtagctgggattataggcgcctgccaccacccctagctaatttggtatttttagt

SEQ ID NO: 67437 - DNA, 947 bp, Homo sapiens
ctcttttctaatgattaccccatttctatccttccctttatagcgaaaccccttgaagaagttgtctacaccactggtgttcattcatttttgagccctgtttactaaggtttttattcctacatatgaagttttcttatcaaaattaccaaagatttccatgttaccaaatccagtagttagttcttagtctcattctacttcaccagtcagcattacgtggtacagttagtctgttctctgtgaagcattttcttaacttgatcgtatgccatttttttcctcatatctcactggttacctctcaatctccttggctgattgaacctgtaagccgccaaatgttgggagagctccagggctcagttatctccccttttctctctgtctgttaacatttatttaatcatctgcattcttttgatgatctcatccatctagttcctggtttcaaatactacctgtatatcactgactcctatctctagcctgaatttctcctctgaactcctgacttgtatatccattgcctctttaacatctctacttgtagggaagtctgctagaatctcaattcagcatgctccaaacctgttcctccatcagccttccccatctaatcaaatgacagctctattctagttggtaagaccaaaacaccttggagccatccttaattcctctctctctgtctcacctcatgtgatccgaacctatcagctctgctttcaaactagatgcagaatttgacctctgaccacccctactaccctggtccattatctctcactagtctattcagagatactcagattcctgtttcttgtttccaatattgacctctcagttgattctttctcctcctcccaattttacttgagtgaatctttgtaattaaaaaataaaatatatgggaaatgtaggtgacaaattttcttagtgaacct

SEQ ID NO: 67438 - DNA, 468 bp, Homo sapiens
tactctttttttctttagtaggtcctttcagtacctgctgcttgccaaaacgtgaaatgcagattctctttttacttgactctgaattcacctggctaagctctgttaggccttaggaagcttaatagagcttctctaattttgtagaagaagggcctttgactttttccctctctgcttcaggatgatctcatctgctactttggaagcatgagactttatttgttttgatggtactgaggttaggggtgagattgatttatttgtaattagtcctttctcctccttatccttccttttggataaaggtaaaaatataaaatcctcctgcctgctaaagtactgtttggccatcagagaaagggagcttcaggtagggcattccgcagtccctgtccccatcttagcaagttgaagatgctagtcaaaatttctctggggggcaggagagggcagaggatacttacg

SEQ ID NO: 67439 - DNA, 1928 bp, Homo sapiens
aacatggtgaaaccccgtctctactaaaaatacaaaaaattagcctggtgtggtggcgggcacctgtaatcccagctacttgggaggctgaggcaggagaattgcttgaacctgggaggcggaggttgcagtgagctgagattgtgccactgcactccagcctgggcaaaaagagcgaagctccatctcaaaaaaaaaaaaaaaaaaaccacgtattattagtaaaattgaaatcaaacttagggaagtatcatagtaccattaatctgtcaatctgaagatgctaaaaggagatttgcttagcaggctgccttggcttctccaagatggggagacagacaacttcttggaagcagtgtcctccaaacagaaattggtcaaggaagggaagtgggagagagagctttgactagcagaggcttggaagccagccagccagcagccaacagtgcatgtgtgcattgggaagctagtggtccagggaccaggcactgctcctgtgggatccatcccagccctctaaggagcggtgcaaaggttcttatcctatttatcggagccagtgtccagaaaaggaagcttgtggtttgagacattctgtaaatccggttccaagagcacgaggtaggactctgaatccgatgtggtttctgttctcggtgatggtgcagagctgtgagccagtggtagggtgtcctttaaattccagctcagtacactagttaatgaacttggctgactgataaaaatgttttcaggtttagctcatgaacatatcaacatagacctaaatataattccagtttgtcatgaatgttgattttttgaggaaatgctttaaaatgtactgatgcccatgttgtggttgtaaggaaacaaagcagctctgtgaggccaaagcatatttcagttcaatagtgaggctttcttagaaagaatgactcatagtcactcagagttgagtcgcacagaaacaaccgagagcagacagcaaggaacggcagggcccagaaggtccagcctttccctccaggctgaagggttagggaagatcgccaaccttaaagggggtgtgagaggcctgggcccaggtgagattgtactgaattccagtaaacagtgtacagtcattccaggacagaggacaggaacatgtttactaggtgtctggagtgcacctctataatcctcatacacactaatccagataatcctgggatgctggcctcacgcaggattgttgatgagaatgcaaatcccaacattgcaattcaggattttgcttctactgaaagcattttgtcaatgttctcttttggggttagctgggtgacagttctcccttgctggattcccagtacttaatagcgtttctttgactcagtggatatgtggaacattgcagactgcaatttataacacagaactgggtatatattttcattataaaagtaatacatgtaaaaagaatgcaggcctcttctctgattgggtggtatttttaaaaagaaacaaagaatgcaggcagtgtagattatgtttgttttttaaaggaaagagaagaaaaaattctctaatcccaccacccacagctgaccatgttgacactatttgggtgtatattctgtctggcattatcctgtacaggcatatgctcttcagcaaaaatggatttggccgggcgcagtggctcagcctgtaatcccagcactttgggaagctgaggcaggcagatcacttgaggtcaggagttccagaccagcctggccaacttgatgaaaccccatctctgctaaatgcaaaaattattagctaggcatggtggcgggttcctgtaatcccagctacttgggaggctgaggcaggagaatttcttgaacccaggaggcagaggttgcagtgagccaagatcgcgccattgcacttca

SEQ ID NO: 67440 - DNA, 1800 bp, Homo sapiens
acgtcactgcactccagcctgggcgatagagcaagactccgtctcaaacaaacaaaacccacagaactggaagacccttgctgctgcttctgcgtaatgtgttctcctcccttctcgtttttttttttttttttctcccttctaccccttaggacctcagctcctgctctttccctgggggaattccggatcactctcctttactaggtcagggtactctctccctccctcttactctttcccctcctaccacttgtcaccattggtactatattatcacccggatatgtgacaatggtattgtgtatttaccactaaggaataaacttatgagggagagagcactacccgttcctgcagtgcccgtcggggcctggcatctaggaaacactccatacgccagtaatcgatttcagtcaatttcagtaataaatccaggaggacgcagcccgacccctcccgcccgggggccaagccatggtgggggatctgggtggacctccggctctggccgccagtcctcaacctccgccccggccgtcccgcttgggggcccagggtcccaggagaggaggctccggggcgccccctcccctctaatgcgagaggagagtccgctctaggcgcgggatccgcaacctccccgcgtccgcccgaggcgggggcggggccggaccggagacgtaacttccggtgtacacagccggtccaaggcggtgcgctgggggccggggcgcgtcgcaggtgaggagcgggcgcggcgggcgcaggcgggggctggcgggcggggtcgggcggtgggcggtgggcagcggggccgcgggccgcagccagggcagacggcgagacgggcccgcggggcgccgctccgctcggggccgcagggcgcggggccgtgggctcccgccccttgcccgcccgctgtggaggacgccgggctttgcgggcgctggccggccgacggaagcccggaggggcctcctggcgcgaacccgggacctgggggcgcgtcggagactcggcggccgcggcaccgcaggggcgggtcggcgcccgtcaggcggggaaaggggacgctccctcggttcgccggggcccgggaggtcgcgctggcgccaggacccgctcccggaagcccgcggagggagggcggcctgctggcggcaggggtccgctggggctagccggggaggcggccctcacgccatcccggggctgccgggcgggctgcgcgcaccttcccggcggcgccaggctgccgaggaacgcgcttttccggccctgcggagccagctggcgcattgggcccgaggggagggtccgcggggaccgggagggccggggctgagcgtggaggacccgagcccgagggacgagcgcagagtcaggggtgtgtctttctgcgccgcgcggtgcgaggaaagaagcgtgcctggttggcatgataagaattttgtttagactttttagaaattttccagagactcagctttgggggcctccagtttgaaaataccttgttctggtccctcatccccattataaaagcagttaattctcctttcctggcaaaacactcaagacgacacaaaaagtcttaaggtagaaaatgacagtcatctgccagtctaccattcagtgacaaccactgctaacattttggtgataatcaataaatacagataggtattgttatttttatggactttacagtatgtgatttaaccaccgatgagcattgagatagtttccaatttgtcacaagataaacaattctgccggaaggatttgtttgatatg

SEQ ID NO: 67441 - DNA, 582 bp, Homo sapiens
aaagtgtattctccaaaaaattagtcgggcatggtggcgggcgcctgtagtcccagctactcaggaggctgaggcaggagaatggcgtgaacccagggggcggagcttgcagtgagccgagattgcgccactgcactccagcctgggagacagagcaagactgtctcaaaaaaaaaaaaaaaaaaagtgtattctctgcttctctcccaaagattgattcgttagatttggattgcatcccagtaatcagtatttaaatagtcattccaggaagggtgctatcctgattctagtatcagagaaggaagtccttaaaagccattgttggttttcactggctgctactaggtttttttgttgttgtttgtttagagacaagatctcactattttgcccagactggactcgaagtcctggactcaagtgaccctcctgctttggcctcccaaagtgctgggactgcagatgggcaccactgtgtccagccctcatcctagttttactaaggttggtaggtggtgaaaaaaattgctaaaaatgttttcatcctttaacatgctcagtgagtgttatgacaacccc

SEQ ID NO: 67442 - DNA, 2020 bp, Homo sapiens
cccatgatgacatagcgctcttagctttattcaggacttcaggcaagagtggtttgaaatataaggccaaaggcttttattttaacctgagcattactgagctcttcttcaggacatgcttgcaggtattggaggaaacagagcttgacctgcagggccctttgctttccaaccctggagggcaagtgcgcctgttgcccagggcaggacaattagagaagataaccagctgtgagcagtaggggcttggtaagccgctggggcacagcagtacctgctttgtttcttctgctttcctgggactggcattgaccactgaagctgagaacgggaaatacttattgttgtagtttggaattttgacttggctttccacattgaaatgctgattagatagttggaatactaccatgtttttttgtacataatgggctgaacaggctttcccagacgagtctggaaactaagtatttggtgggttttccaatttatgcgtctattctgagtttcaaacagctgacttacaagtgaatttctaaatgtgattgccaagcataggcccgcagacttcacgtttcactttttccccagagcaatatttgttgtttctggaatttatgtactgccaggggatttagccataggccaataagggtctctctcagaattttcagcaactcagatgaaatggctaggcatttggattttttccttttggttttttaaggatttttataagcaaggccctgagagtcactttgacattcatccctggggaaagaggtctgtggcctaacattgccaggcaaggcctctactcaggagctcagtccaggactgtgggtgagaaaagctctggattcgagagtattcaaatatttgaccatttaagagttaggacaaaggatgatcctgtccccttgccatgtggccagtgcatgtgtgcagtgttcccaggtgcttctgacttacagccaagtttgggctgtggttattgattgacagatactgatgcctttgtccaggaatggtggttgctgactgtgtgctctgccaccctgccttggaaccagcagggcatatgtgagtcctgtccagtctatactcaccagtgactttgccccttagcccgagtggttcaccctcacagtctctctgttagagaagtgagttgtgactatggggtttcactagctgactagtgcctgtgacactggtacatcagcctaggaagtcagttactgggcacagagtcagaagacctgggtttggaaggtgacatctatcacttaaataaaattactttttcagtggaagtgtacataaataaaagaatcaaagtgacttgtgatttgtgcattcattccacagatatttattgtatgccttgtttctgcctgatactactccagcatgtcgattgcagtagtgaacatgacagaaatctctcccttcatgtagctagaagggagtttcgatcttagagaaggtagttagaaaaggtaccactgagaaggtgacattcgagtaaaggcctgaaagggatgagagagcaagcctgttggcccagaaaagaggattccaggcggagggagcgccgagcacagagtcccagaggcaggagccagcctggagtgttggaagagcaggaaagaacctgctgtggctaaaacagagtgaatggaagggagagaagcaggggtgaggtcagaagggtaaagaggggccactctggtgtctgttctgagtagccaggtaggaggcaaggtgaggtacacctctgaagggcaggggatgggagggcagcaggctgggccctgccattcttttgtagtgagcagcgatgccacttctccccttgccttcttcatactgggtagctccagggctctggttttacgttgggtcctcagtgttgagaggtgttggtcctctatgtaggcagtccaggaacccagggcagccatggggctcccaggagttgtatgtctctaaggagactgtattttataaattccag

SEQ ID NO: 67443 - DNA, 443 bp, Homo sapiens
taattttattcagatgtttaacagaaagggtttgaaagtacactataagatattgtttatgattaatgtctctcagtggacttgtatgaattaaataagaagagagatgttgttataatgctgcagtgataacgattatttgtggaacatcatgtgttccagtcattgtgccaggtgctccacatcattgtctcacttaatgctcacccatgaggtaggggtgctgccctttggcccacctgccacatgggaactgatacccaaggtcacacagctagaaagtagaagagctggaatttgagcttatgtaatctgtttccagagcctgaacacctgactacttggtcatccaaaataaaattgagattttaattagtatttacttgtatcagatgattttgtttccctatttggagggattcagaatttcagaattcctcaac

SEQ ID NO: 67444 - DNA, 719 bp, Homo sapiens
catggaaggagatgtgctaggtggtgatgaggatgggaagttgtagacgtcaagacttgcagggcccttgaaggaattgggtttttatctaagaacaggtagagggttttaggcaagtcttggtgatttgtcaacagaatgggtttagccacttaagggcattttattgatcagctcaaggctgatgaataaaataaaaatgccagtttgttgattgttgatttttcagaaagattaattatcatcaccaggagctgtagtactcttttctacatggccaacaaatgctctcctagtgggcaaacatgtgacaagccaagtcacaaccagacttggcttgggaacaagagcaaatgtgtcctgattatcagtgattccagatggagagaattgggtgcactgaaccttgggcaggctcagctgccaagattctctctgaggagtccaaggtctagctgggcactagcagagcttgcgttgttgttcaccctttccaggcttctgagcctggccggctctcatttcattctctgatatatttcttcccaagtcaaagtcatgttagggagtactgctacctccttgagtgactttgtaagtgttgagttcaccatttagcttccagagtgcccaggatctggcagacatcatcttcctagtagacctatgctgctcagactgttttccctctcagaaaagggctcttggccagaccaagt

SEQ ID NO: 67445 - DNA, 2025 bp, Homo sapiens
ctggctcctgcctctccccccacagcctcagggtttcccatgcaccctcccctacttccaagtagccttgccgtgtgtcctccaacttgcctgttgctcccaaggctgcttgggcctctccatcggttttctggggtcagagcccatcttccagcctgtcttcgtttctcatgatagcactcagcactcttctggaattttgtgtttgcatttgtgtctcactggaatgaaggccccatgagagcaaggagcgagtcttgttcatggccacatgtgcaaggtgcaggacagctcctgtgaccaccacagtgcaacttgagacagatgaaaggacgagttgctggggccagaacttacgaattctaatactgagcaaaaagacagaactagaggccgggtgcggtggctcacgcctgtaatcccagcactgtgggaggatcacttgagcccaggagttcaaggctgcagtgagtcgagatcttgacactgcactccagcctgggtaatatagcgagactgtctctaaaaacgaaaaacaaaaacaaccagacgaaaacattctcgcgttgggctaaaagaatactattaaatacatcatctgggctgttccaggactgggaggggattagcactacggtggagctgcggataggcccaagcaggcctcaaataaatgtaaagctttttattctcgtggaaacagctatgtacaatggggaaaatgtttttaagcatctagcaaaggattcacggggctctggtaatgaagccccgaaacgacaagactggatcgcgcagggtagggccaacaccagggacaaacccccggcctcttgggggcgcggtgagtaggtggcctctccaagcaccactcccgatgtgcgcatgagcgcagccgcccctacgcagcgcgtgcgcacgtgcactcaccacgtccatcccagacgtgcggacccgggtgtctgcaaggttcagtctccacaccccagcgcccgaccctgcgcggggacatgcgcacaagcgcgcgtcctgaccacccggacgtgctggcccacacgcacacgcgtgcgcattacccccgccccatccgcgcctgcgctcaaccccgcctacacctgctccgtggcctccccggaggcgatgagccaaccccggtagctccagaggcgtggtcccctcgccttcgccggtcaacatgactcagcatcctcggtgggctcgcctcctcccccggaacagctgtctaaaatccatgggcgtggaaacgccacgccacgccccgctcccgacttcttcagctcaggccccagaactgaccaccccaccagtcctctgccccagtccctctgccttcactcccatggccacctgtgctccagggcctgcctgacccctgtccagcggccctgaagtaaggtctgtgatgtctaaatgccgatacctcagtttccccatctttagaacggggctcttgtttggaactgtgcccgccacagcctgcagtaagtgctagcttcatcaatactcagtggcagtcaattgcttttccagggctgccttatgcttgaaattaaatctttgctatccagagttaggactgtccccggacttcctaacttgcctctgctgtcaggtgtaccctctggtccgctcctctctcagggccacatcatcttgctgggggcacgtgaaggtgtccggctctgcagcatgttctcttggaatttctgggctaggtttcctttcgattctccttggtcagtccctggcctgggggcatgacccctcccagcttcactaccccccaggatcctggggattctgagccctaagctctgcgatcggcaggacttggctcagcatatggtagtgattgtactgatggtgatagacaacagaatataaaatgaccttatggccaggcacagtgacgcatacctgtaatcccaacagtttgggaggctgaggcaggaagatctcttgaagccaggaatttgagaccagcctgggcaacacagtgcaact

SEQ ID NO: 67446 - DNA, 1229 bp, Homo sapiens
gtatccacagcgcctagaacactgcctgtaacgtggaaggtgttcgatctatagagttttgtcgaatgaatgaatgaagccgactagtgcacagggagtgcagcggcgcgatggtagctctctgcagcctccaacacctgggctccagtgatccccgggctctgcccaccctccccactgccacttccgggcagaggccagcaaagcggcggcgcaagaggtagggagagaggagctgaggccccagatcagcggccgcgggcaaggtcgctcagcgggcacccggcctgggtatcggggcgcgggtcgggggcggggccggggctcaggggtggggccgggccgggccgggccgggcgcctgcgccataaaggccgccgcgcgcccacgcgcctcgcttgctgcgcgctgccggcgctccttcctcctcggctcgcgtctcactcagtgtaccttctagtcccgccatggccgctctcacccgggacccccagttccagaagctgcagcaatggtaccgcgagcaccgctccgagctgaacctgcgccgcctcttcgatgccaacaaggaccgcttcaaccacttcaggtgcgggcgggccggaggcgggggctgccacgcgcggcgcccggaaccgggcacgcgggcctggggtctggaggcgggggcagcggtgcccggggaccccagtccccgacctccaggccacggactggggcccaggccgagtccgcacttcgtccttggagtctccttggagtgcgttcctgggggcttgcagcctcgccgggagtctcggccccgggtctgcttcgttacgaggaaaaacgggcccctccgtggggacatttcccctcctcctccccgtgcagctctggccatttgagcaggggctcctttcgcagttgtgaagagaggccttggctgacgcagcaagcgggaaagggctgtccctttccatccgctcctggccacatgagcttgggagcgtctgcagggcgggcagcccgggcgggggtgtttgagggagctgggtggaaggatggagacgtcgggcgtgattcctgcagaagacacctgtgcacgaccgggaagtgggaaggagtgtttgagcaaatcatgggcgggagtgcggccaagggagctctgatcactgatactggtggaggcgggggaggggagcgactgtggctccgggctagacgtcccgatggccatccctgtcatc

SEQ ID NO: 67447 - DNA, 1059 bp, Homo sapiens
tgataataccattatcccacctaaaatttttattttccgggaaggcttttttctggtggctcacacctgtaatcgcaacactttgggaggcggaggcgggaggatcgcttgaaccccaggagttcaagaccagtgtgggcaatatagcaagtcctcgtctcaggaaaaaaaggaaaaaagaaagttagctttttggcaaaactacttcctagtagatggtgtgtacttcctatcacagcgcattaaggggcacataatgcctgggactccgggatttcgagcccctgacgccagcggcgcctctgtggctctgggacctgagcgcacgcgccttaaagccacgcctccgcatcggatcctagtaagggagcggggttatcattttagcgtagcgttgcgcgtgcgcagagaggccgccgtagtttgcgttttcacctggtcgcccggcggccatggcggccgttctgaagccggtgctgctgggccttcgagatgcgccggtgcacggcagccccacagggccgggtgcctggactgctagcaagctgggcggcattccggtgagggcgggtgccggagctggggtcgatgggtgctgctgaagggtgcggagggagtgggcgaggtcctggggggagtcggggtctgagcgcctcctctgtcccctcaggatgctctgcccaccgtggctgcgcccaggcccgtgtgtcagcgctgcgggcagccgctcgctctggtcgtgcaggtgtattgcccgctggaaggctccccgtttcaccgtctgctgcacgtgttcgcgtgcgcctgccccggctgtagcaccggcggtgcgcgcaggtaggcggggaagtcccagagctgctccaggggtgtcctttccagcgggctggggcgggccggcgggctggagtcggggtgcagccctcacggccctttgtcttcaccccgaagctggaaggtgttccgctcccagtgcctgcaggtgccagagagagaggcgcaggacgctcaggtaaaggttgtgattggcatgttattgtttttctgtcatttgaggat

SEQ ID NO: 67448 - DNA, 1936 bp, Homo sapiens
tgggggtttcaccatgttagtcaggctggtttcagaactcctgacctcgtgatccacccgcctcggcctcccaaagtgctgggattacaggcgtaagccaccgcgcccggcaggtgaaaatcttaccattttgcatggtttacatttttttcttttttgagacggagtcttgctctgttacccagcctggagtgaagtggtgcgatcttggttcactgcaacctccacctccagggttcaagcgattcttttatggtttacattttaatacgcttattgatcatattgtccaattttttgtgagtttcctgttcacatcctttgcctatatttttttgggggtgacacttgttaatttgtaagagctctttacgtatagggacatcagttttctaacctgtaaggaagtcttggctgggagttgaaaccccaggctagaaggcgacccttagactttttaggtctgatggcgggcctatgctggtgtgggaataacaccgccggtctcagctggaggtcgccagccctttgcaagagcctgccggtccccgcgggctgcagcacaccccggcgcgatgtgccctgcctgtgtctgccggaggctgtagtgcgcaggagcggaaaccaggccgcccttcccccacccgcttccggccgcggctcggttctcccgcctccgcctccgccgcggctcgtggttgtcccgccatggcactgtcgcgggggctgccccgggagctggctgaggcggtggccgggggccgggtgctggtggtgggggcgggcggcatcggctgcgagctcctcaagaatctcgtgctcaccggtttctcccacatcgacctggtgagggccgggcgcgcgcgcgtgaatggcgggctgtggtgcgggggctgggattcgggggttccggggctccaggggctctgaggctcagggcccggagcccgggaccggagttgcggagcgggggcaggctgagaggctcgggttgtgccccccccgcgggaggagactgttctttgggcacggggcgggcctccgctcgctgggccggctccggacgccgaggaggccgcgggcccccgcctccccggcagcgccaatgtgtggcgcttcgtgggcgtgaagccgcctcttatcctcccttcaaaacaaattcccggctgttaggagatgcgggagaggattgagtccctcgcggatgttgtgactttaattttgaggtccctgtcgtaactccgaagtaacgacgcggggcggaggatggcaatgatagcgaccaacgcgtcccgagcgctggtcacgagcgggtttacacacggaacgcgcaccatcttcataccacccgaggagtgcaaacgctatttccaccctgctttatttttaacagatgaggaaagggagacgcaatggggttgagtaacttaccctgggtcacggagcgagtggcagggctcccgcaggctgcgtgactgtcattgctctcacagtagacggtacactcgcttgtttcattaaagacgttaggactgtgccttttgcattggtgtacgttgacaagccagtgctattttgaatcgttatttctactaatgcaaactttttagagattggagatgttactggcccttcggtgtgagtttaaagtgtcttaagggctagtggaaacatggaatgaacaaaaaagtacgggtggccgactgagtcattgtttctttcctttatgtattatatatttaagcaaaaattagataaaacttaaaacatgatacttttttaaccatgtgtaaaagtttcctttcacagttctcaggttaatagtaaatgaaattgtgtatggatgaaggcttgaattaagggaggcagcaaaaattcaataaacgtttgccatgtatcatttaagaaaaagaacagaacctgggcaacatagaga

SEQ ID NO: 67449 - DNA, 421 bp, Homo sapiens
tttctaagttgattgagacctctctcagataccttctggttcacaggcttatggctgtgctgtgagcaaagttaagggaaaccaataagaaaagtgagaaacccaaggcaagcaagagcaacatatctaacgagaggcaaggaaaaggagccatttctacaatccagtaagacatgtaactgcaggagaggccaaggtcacaggaggaatgcagccactgccaaactgtagccctgaaaaaaaccaaagggcaacattgcccaacaatgcaatccagaaaagatcaggtcctggggtacaaagcaggctatggaatgaagactaaccctgttggaataaatatacatcacctctacatcccccaattcataatgagctggtatcatgttgacaccaaaatccaaccactcaaggacataga

SEQ ID NO: 67450 - DNA, 1280 bp, Homo sapiens
cctactctccctgcagatcccaagaaactatgcccgcagctcgtgaccgtcatgaaccagtttctgaccgaggacaaggacacctacatggattctgtcaacagatatcatcccacggagctggaaagaaacacaccctccaaactcaaggacatggtgaccaacaccacgacccccgaggagggacaggccgtcatgcagcaggcccggccaccagcgcctcctcacagcccttgacctcctttgagatcagggactctgttccctgagagcctctctctccacccaaacacttccccacctctcaccaagcaatgtccctgcagacgggcagctgcccagggaaaagacctcagggcgctgggtctccgccctctgatactcaacctctgctgtcaaccccatcctatccctccttcccagaagacccctcccttcagcctcccacccctccccacaggaagaaatcaacaaccagggtgcctacacggtactgaagtgacaccatccacaggcacctcgaatctctgcccaggcagcctgtccggcccaggagaacctgggcccggggccccaccctccccagctcctgccctgctgctgcccctcctcccactcctgctgtgctaattggggctgattgcgggccactactttatttacatagggtgtacaccaagtaaccaatgggaagcctctagagggtatttagaccccaggaaattctaaatgggctcttgagcccttatgcttgggcctgctcccggtttggagtgtactttcactttcagttaagtctctgcttttgttgcttaattctttctttgctttgtttgtgcgttttccccaattctttgttcaaaacagcaagaacctggagaccctcctcctgtaacgggaaggtgggatggggggagcccaccctgacactgacccgggccacccacgtgcccctccccccacacccatactcactagggccctgggtggagcttcccctgctgctcacagctcggtgagtggccaggccagcaagctcccccagctgcgcccctctgctgattttgcccctggtcacccttaccaatcagggtccagtcaggtgacagaagtcacaggcaagtggcttcaacacccacatatgtagtgagaggtgacagcatgctggcggccctcgcagccctcgctctctctcggcgcctcctctgcctgggctcccactttggcggcacttaaggggcccttcagcccagcgctgcactgtgggagcccctttctgg

SEQ ID NO: 67451 - DNA, 2382 bp, Homo sapiens
ggcttcacctctcggttatatgctaattatatgcattagcacgctaagagaaacgctcatcagtgccatggcaatttacaaatgccatggtaaggttcagaagttaccctgtatggttcaaaaagctgggaagccctcagctccgagaaattgaaattgcccacctctttcctggaaaactcatgaataatccacccttgtttagcacatcatcaagcaataaatacaagtatccctagtccagcagcccaagctgctgctctaacaatggagtacccattgtttctttactttcttaatacacttgctttggctttgcactgtgctctcccatggattttttcttgcgtgagctctaagaactctctcttggggtcggatccggacccctttctggtaacagaagcactgcttcacgaagatcatgcaggtcagtacttaataagtacaaaaaagtctatagcgacactatttataattttaaaaatgattgaagtcaattaacatttaagtgttaaaaagaaagtaaacaacccaaatatacacaaacagtagactgctctggcttgcatacagagaggtccattgcccttttgggtgggcctaagaagcacttctggggagagggggcgtcaggctgtgatggctgcgggaggagtgactcctcccaggatgagggtctccatcctcccagtgctcactcaagttcagtatttccaagtccttccaggggcgtaacgcacgtcagaacggccattagtgtcacagatacgtgtccccttgcatttccaggaaatgcccttggttggcgaactacagtcgtgacagtcgggccacagggcgttttgtgagttatcgtcttgggcaaatgagtgccaaaaaaaaaaaaaaaaaaagacctgaaggtgaacagcatagcggcagggtttgggatgagaggagcccctttgctagcaacggcgagcacttgcgcggtaccagcaagggctgcccatgtctcggagggaaacgtttgtgtgagcgcaggaatgacccggaagaccttggcacggctgcagttttctgggaaatgtaatttcttggtccgggcgccatggcccttataagtagagggtgtcccttggtttcgagttgtatcgttcaccagaggacgactgtgtgccccaggacaatttgcgcatggtcctagctggccggctctaggtcgacggccccaggcggttaagctacttacaaagccgtgaccggtttgcccgcggcgcaccaggtccgcgcagccgcagagacccttgggaagtgtggtcttcgggtgccggcggttcgcggcttccgggacatttgtaccgcagggggaggattctgggaaatgtggttcgccgtgggcggtgcactgggtcagtcccgcgatagcttcaggcctggcggcggcttccaagctaaggaacggtttggggcagtgtcgttcccggaggtcggccgccgttacccgctcaccagctacgcggcgcgtcaggtccgcggaggcgcgggctcggggcgcctgcgggacggtgaggccctgctgaggactccggcaagtgtgggtcgcggcgacggcggggctaaggccctgggtccgcgcgcggtttgaccacggccggggccttgggcatttcctggccttcctgttgagccgtgtaaacgcggggtgatgacggcgccgacctcttggcactgttgtgagagcgaagtgggcgcgagagcagacgccagctacagttttttttgggttatgtcgtcatgaagccggcgctttcagttgtgcaaccttgaacaaatgggttcagtatctcggaatttcagttttgtcttcattttaaaaaataaatctggtttagaactcgacctcaagcgatccgcccgcctccgccttccgaagtgctgggattaaaggcgtaagccaccgcaccagcctaacgaacatggcgaaacgccgtctctactaaaaatacaaaaaaaaattagctgggcgtggtggcacgtgtctataatcccagctattcgagaggttgaggtaggagaatcgcttcaacccgggaggcagaggttgcagtgagtcgaggtcgctccattgcactccagcctggagacagaacgagactccgtctcaaaaaaaaaaaaaaaaaaatctggaataatatgaatgcacaccttgcaaagtggtgaagactgaacgagctgataaagttgttaccgttgttttatgagtcttttgtatacagaataattgattttccccgcaggtggcacctggtaaatagcccttgcggagaaacaccctgttccttcccagggagagattgacgctccggcgagtgattaccagtgtgcttttccattaag

SEQ ID NO: 67452 - DNA, 2479 bp, Homo sapiens
aaaccccaccactgagcacgtccctcccagggcaaagcagatcagatcacaggcccagccctgggaggcccagaggagcctcaggtcctcaggaaggctcctggccctcttcgccctaggaggaccccccccccgccccaagccggctccacctgtagctgtgggcgtgggagggagacagagcgctctggcggccagagaaggaaggaagatggagggagggcggacttctgctccctgacgctgctgctaggccccctgcggccctcctggagcccacacctttcagctgcagtctcccagccttcgtccccaggacgaagcccactaagccagtgcttttccactgcagctggctgttccgcttggggagggttcccagattgtgcaaagtgaggaagggtcccctgtccctgccccgcagggcccccactccaggcctcccccatctctccctgtctctctcagaggtagaggcagcattaaattaaaatttaattaaaatattaaaaataaagtaaaaaattcaaatatacaacagtagactgtctggcttgcatacaaagaaggccattgcccctttgggtgagccgggcaaggtcagggtctaagaagcgcctctggtgagaagcggttgtcaggctctgatggctgcgggaggagtgactcctcccaggatgagggtctgtgtcctctcagtgctcactcaagttccgtatttccaagtccttccagggggcgtaacgcacgtgagaactgccatttctgtcacagatacgtggccgcatgcatttccaggaaatgtccttggttcgcgaactacagctggcacaatccagcccagggcgttctgtgagctgtagtctccagcaagtgaattccaaaaaaacctcaaagacctcaaagaccatacagggtggacagcgtagtagcagggtttgggaagagaggagctcttttgctagcaaaggcgagagctcgcctggtacaaggtctgcccacgtcccgggagataaacattagtgtgagcgcacgctagacccagaagagtttgccacggccgcacggttttctgggaagtgtagtttcttggtcccggcgccattgtccttaaaagtagagggtggcccttggttccgaggtgtatctttcacctcatcagtatgactatatgccccaggacacttcccgcatggtcctaactgccgggctctgggacgacagccccaggcggtttagttttttaggaaaccgagatctgtttgcccgcggcgccccaggtccgcgcggccgcagagactcctgggaagtgtggtcttccggtacctgcggttcgttgcgcctggaattttgtcccctgcgcggatgattctgggaaatgtcgatcggctgtgggcggcgcactgggtccgccccgctgtagcctcaggcctgacggcgactcccaggctccgggacgattctgggcagtgtcgtccccagaggtcggcggccgttgcccgctcaccagcgacgcggggcgcctgcggggacggtgaggccctgctgaggactccggccagtatgagtcccgggggcggcggcggggctcaggccctgggtctgccccgcggtgtgaccccggccggtgccttggttttcctggccttcatgtcctcctatgtaaacgcggggtgatgacggcgccgacctcttggcgctgttgtgagagtgaagtgggcgcgtggttagacgccagccacagttgtctttgggttatgtcgtcatgaagccggcgctctacagttgtgtaaccttgaacaaatgggttcagtatcttggaatttcagttttgtcatcgtttaaaaaatagatctggaaaaatgtgaacgcacaccgtgcatagtggtgaagactgaacgagctgataaagtttttaccattgttttatgaggattttatttacagagtaattgattttcctcgcaggtggcacctggtaaatggttagcccttgcggagaaacaccctgttagttcccagggagagattggcgccctggagagtgattaccagtgtgcctttccattatggtgtgtcacaggtgccgcaagataagcctgatttttcatgactgctttttcctgcccttctgtgccctcaggacactgcccatctctaagataagagcctggaaagaggactctgttggctgttggaaattgcagagtaatgcctcaggtaggtcggtgtgtccgcaaatcttcctgaaacactttatcaggactgtgtgtttgctttgcttctcctgcctgttcccacctaaccaagtccatttaagggactggatccatggttcctttcagtataggaaggacggagcccacaggagagctccaaggtattatcctcctcacccagtgttcctcttttctacagttttctgctagaagactttctagtcttgccaacattttaaaactgtaattcacaatgcaac

SEQ ID NO: 67453 - DNA, 1031 bp, Homo sapiens
tttgtttttgtttttgctttttctgacctggtgtgttaatgccctgggttggccctctaagaagctggccacctacttcgggcctcaggtgtcagacgccccagcttcgaggtctatggctcccagcaactcgagcgcctgcgcctgcgcattctcagccggacgggagcgcccagaagtctccgggcgccggtgggcggccttgtggactgcgccgggcatgctcggcggtgtgacggctcaggactgcatttcccagaggctgcagctatccggccaatgtagcctgaaactacatttctcagcggccactggaacgacctcaatctctgcctcctcgccagttcattgtggtcgttgacccggcagcgagctttggagttcatcgagggagaagtcagcgcccagctccgaggttggagcagccccgccgggcaacttgaatttctgcaaacgaacacagcaccgggagctctgcagacctgtgtcggcgcggaacccggactgagacatgcgtgagcgttgggtggaccgggcgaggatcccgggccggcgagtgcgggagcggcagggcagggagggtgcgtcggccggggccggtgtgcatccgcgaagactgggtgcatggcctccatgcgaacctgagctattaatatttgttactattttggataaaatcactgtaattgatttatgtaaaggagcaaaagactcttcaactctcagtttaaaaaggaaacgatagttatgataccttttgcatgcagcgggaagaaatgggattgccaggaagcctcttcttgtttggaaaaaactgtataaagtatttacaccttttaaagatgagagcaatgtcatctgaaaattatcagtgcagggaaaaggacttcaaaggatctgttgtgcagattacttaactaatgacaaaattatgtaagaaaggagagcaagatgacagctgtaaacatttccatcaatctccatattgcacagaaataggacccagctttttcttaaggttcttcaatttt

SEQ ID NO: 67454 - DNA, 1028 bp, Homo sapiens
gctggttcctgtgcctacaaagccctttctccctccatcccattacatttcagcaacggaagccactttatataaaccctgccctgattcaggatcctagctgggagcaactcccttccagggtcccctgactcaaaagcaaggaaatgggaaaggcgaaaagtcctagaacaaagccatcttttgcgtctcaacaccgagaacagaagcgtggggggccgacagcgaagggcctaacgtccaagcactcacctgcgcggggtcccgcagcgccgccgctgccatcggagtctgtggtcagagcagggccccacggtgcgggaaaccacggggcgggggtagggggtctcgcaggctgaggctaccacccacctggccgtgccccagacgaggtgtgaccccgggctgagggtcgcactcctagcctcagtctcccccgtgcaaaatgcgcaaggggcccggggcgcaggctccgggggcgccgagagcgcgcagctccgctgggtacccccgttgcaaggggtcacggctggtgcaaaggcgcggagggggtcccggcctcactgtccccctcgcggtccgggaaagccggcggggcagcttcacgggcgtagccccagccgccccgcccccaactcggggtccccagctcctggggactcagcctccccgccgggaaatgacctgcgaggctgcagtgcaggaagttccggcccccaccgtggcggccgggagagttgccctctcccgtactgtcattggcctggcgccagccgctggtgcacaggcagggcctggggatcgcgagtttctgcccagcctctcgtcaggctgagggtccagggcgggaaggagagcggatctcgtcgggtctccaccgccgccgcctgcagccctcgggccttccccttaaaggggccgctcccgagcctgcagccgcccgcgctaaaccccgcccaccctccgaggtccaggaggagagccccagtgctcttcctgcgcgtgtgggcatcggccagccgcttcac

SEQ ID NO: 67455 - DNA, 607 bp, Homo sapiens
cctttggatactgactttcagtaaaggcctccccggctccgtgcctttttttctataaagtgtccttactcttctggggtcagaaacccttccccttctggggtccccaaacaatgctcctccctgagacaaatgaggtgtgggaaggatgtgagtgacatgcccttcttccaccaccagtgtttctgctgaaaccatattcactttattaaattaatcagggaagaagggacggggagaaatgaaaataaccaagcttgcagcacattcagcggtcatcatgaggtcatcctgctctctgacctgccctttctcacagtggtttggtgcctgttgttctagaatcacacagacctgttccaagatgatagttccccttaactgctctagagataagaacttgaacattacgaaatgttaagttttggccgggtgcagtggctcacgcctgtaatcccagcactttgggaggccaaggtgggtggatctcctggtcaggagttcgcgacaagcctggccaacatggtgaaaccccgtctctactgaaaatacaaaaattagccaggcatggtggcaggtgcctgtaatcccagctactcaggaggct

SEQ ID NO: 67456 - DNA, 1131 bp, Homo sapiens
ctccagccggacatggtcatgactatttcagcctgcaaggtcatgactctctggcccacctaggactcctaggggaaaggaagtgcctggtctaccgcccttcccctgcaagtctgaatgctgtgtggacagaggaggaggacccaataaggtaggggtattggagtactcgggtgcctgggaagatccaagcccggcctatagggtcaaggtcttttccaaaacaggggaaaccctttctggttcccgaaggtcctcccttccctattcgctgaacaggtgggtgccaagaagcccctgtcttgaggacagagagactgcggtctggcctccccagacccaggcagcctctaacatcacagccacagagcagaaactggcctggcttcctcccaggcccagaaggccccagctggccacctccctttgtttgtcttgggaggggcaactgctaagcaaacagggaaggggaatcccgattcggcctctctgtctgtccggctagccgttacccaggcccgggctctggtgcccactgaggcctggctccttcctgaccctttgtgtggaagggacacagggcaggagtgggtacagagaacacccagggctttccgaaaaaaatagcccaggcctcccacagatgagagaggagctatgtggttcggtaaacctcagttccagctacaggcaaatgggattaactgagcacttactgtgttggggccctggcctagccccatgcatgccagagccctccagatactgcctggccaccctgcagggtcctatcagatctcgagtctccaaaagaggaaacaggcttggggtcataagggaatgaggttagcaggggtggtaatcccacccagatctctctgactctcagatcacgggttttttttttttttttttttttttttctgagacagggtctcgctctgttgcccaggctggagtgcaatggcacaatcatagctcactgcagcctcaaattccgggattctcatgtgatcctaccgcctcagcctcccgagtagccagggctatagggacgtgccaccatgcctagctaatttttaactttttgtagagataaggtcttgctatgctgcccagactggtctcaaa

SEQ ID NO: 67457 - DNA, 2145 bp, Homo sapiens
catcaaaatggagaagtcaggtgggcttcttttgcaggaggaggggaagggttgatggagagggttgggaagggagttttttcaaaagaggcggggacagcgtaccctggagagcgctggggagccacagccccggagctgtgaggtgggactcgcatttctgtgtggttgggccaggagtccaggacaccacctgactctgacctcttgcagacggggcgggggaggggggacgcaggttatggcgtcagagcaggatcgaatccaactctgccgcctacctaccaggtgaccccaacaagtcacttcccatcttagaggccgggcttctccttccgtaaaaggactgattttgcccgttcctgcgctgtccccgggaaaagcccttaccaccgagttagtgggactcccagcactggggtgatgagcgcaaggtctcagcacagataagagccagggaggctggattctgacttggtacttggcctggctgaccaaaactgggaagtccctagaaacggaggcaccggacctcctgggaccaggaacccgggctcagagactgggagagggaaggaggaggcggccaaccggccccaccccttcccgccagcttcaggccccctcccccatacatacacctcggtttcccagcatctccagtcctcccccaccttcgccccggctctcaggttcctccctgggaggtccaggagcttctggccaggggcatagtagttgctagggacccttttctaggtactaggggagggggctccccaacctgcgggcaggcagctgcctccacgatgtttggttttaataaagtctctttgtttccttctctgtctctctgcccctctgctttcccttctctgtccagtccctctctccccggcttctccctccttctaggcctctgcggcccctccccgccttccctcccgggctgggggcggcgccgtgacgcggcggggcgggggaaggaagggggtgtcgctgacgccgcggcggcctccggcggctccggccttttgtgcgggcggttgggtcgggtgggggcggcggccgcggaaggccaggccggtgccctgcggggacgcccagcgcagcccagccccgcgcagcccagccctgccctgccctgccctgccctgcgcccggggcgcgcccaccgcgccgcatccatgttcgagtaaggaccgggcgactagagctcagggaccgggcgcgcgggggaggccaccggagggagggggcgccgcgggcttggggagggggcggagcggccgctgcagaggtcgggggcctctgcacatggctctggccggggcgatcggggtgggggcggggcagggggcccccgggcgaggggtgcagctggggagtggggcgcggacgcagggcagggcccggggtctgggtcgccactgccggcccgcgacgcactgggttgcggggtttggctgggggcccgcgggttcatctggcggggagggccctcaggcctggcaaccccctgcctggtaagccaggggtgagcgcgaggccgaactggggctccggcctgggatggagacaggatcgggaccagcccaggcccacaggccgcggagccctgggcgcgccgggagtaggcagccccctcctgcctgggccccctcccaccgtccttggctgttgcgggtctcggggctgccgggggtgggggcttcctgcgtctctccaggaccgcgtgcttgaggtcatggagggcggggggtcctgtgtgctcggaattgacttcttactccccttccggtccaggtgggcgcatgtgcttccgactgtgaattgtcttgcaagtgtgtgtacgtgtgtctggggctgctagcctgcagcagctttgggcctctgatagagttcctgcgtgtaacttaaccactaattctgaccgcggctctgtgtgtcactgtaagttacctgtgtgtgtctggggctccaaatctgtggctgtgagcagctggttgtgtgcgtgttgtgtctcattccatctgtagctccctgtgcaaatataaattacccctgtgtgtctgagtgtgacgttggagtgtttgtacatgtgtctggagttaccgtgtgtagcagctctgatccttcttgggc

SEQ ID NO: 67458 - DNA, 2079 bp, Homo sapiens
gaagggcattttgagcagaggcaccgaccaaggcgggagctgggagagggagtgcagggctgatgagggcagagagggaccacccaggaggaccctgatggactcagatgatcccaggctccctcccactacaggtatgggcagggatgggaacagggagaccagggaggaggctgctgggatggcccaggggaaaagcagtggcctgggccactggctgtttaattattttattcacgtattttattccacaaatttattttacaagtgttacatgagtgcctaccctgcatcctgtcccgcattgtgctggggacagagcagtgacccacagacccgtgaaggacttggacctgtcatcagacagtgacggcccagagtagtccaggatgggagctgcccaggggactgtggggtcacgcatgagccaaagtcctgaaggacaaataaggatttgctaggcaaagaagaactacgatctggacagacagaatggcatatgttaaggcttggaggtaagagagacaactttgagttgccccaggtggtggagggaatcccacctgcaccccagaatacatcaaggcccctaaatgggaatcctgccttgaaataaaccaagcccatggccaggtgcagtggctcacagctgtaatctcctagcactttgggatgctgaggcaggtggattgcctgagctcaggagttcgagaccagcaacgtggtggaaccctgtctctactaaaatacaaaaaattagctgggcatggtggtgggtgcctgtaatcccagctactgcggaggctgaggcaggagaatcacttgaacctgggaggcgcaggttgcactgagctgagatagtgccactgcactccagcctgggtgacagcgcgactctttgtctccaaaaaataaagaaaaaagaaagaaaccaggcccgtatcctatggcaagtggtttgccgctttgagctagtttcctcctctgtaaagcagggatggtgaatcatatcaaaggcaccggcttgagaaataatacggttaatcatacggagagcttgacatatttcctgataaggagtcaacaaagaatgtccttttaaagttcccaacgccatccccacagtccttattacagttcgtgtttgcacagtgaagttgggagtgtcctgtttgttcagtgtctgcctccccaccagaaggctcattccccaagggcaggggccatgtcctgcgggctctactgatgccagctccagccagcgtgcagattattcatttagcctctggtggttattgagcattcactatgtgcctagagttttgggctctagggacccggtggtaaccaagacctgaaggtcacagtctgggtagacagtaaacaaacagtaaacaagcaggacactccagatagcctggggtgtggcgacagaggtgcctgccttaggctggatgatgcggaaggagagcatttgagctgaaggggacagagctggtgatgccggggccatggaaggacattcaggcggagggactacaaatgtggaggccttggcgtgggaatgagattggagagcttagggacaaaagcaggctgggatggccaggggagaggaaggacagggagagggaggacatgaggtcagtgaggttccagggccaaatcaccacaccaaggtgaggtctttgcttttacctggagtgaggtgcacccagggcagggctcagacctgactcagatggtcacaggtctcctctggttgtaggacaccagtgaagaggctgctggggtgtccaggctggaggtgatggaggctggagcagggagaaatgggtataataaaaataacggatgctgggtgcggtggctcacgcctgtaatcccagaattttgggaggccgaggtgggcggataacctgaggtcaggaaggagttcaagaccagcctggccaacatggtgaaaccctgtctctacaaaaaatgcaaaaattagcggggcatgatggcgggtgcctatgatcccagctactggggaggctggggcggaagaatcgcttgaacctgggaggtggaggt

SEQ ID NO: 67459 - DNA, 600 bp, Homo sapiens
cagcagcccgagcagcggccgccgcccgcgcggcggggatgcccggacgccgggccccggggctgggcccccggcggtaaccggagcgggggggccgcgccccccctcctcccccctcgccggtcccagagccgcagctgctgcgcccgcgcgctcccggggacattctaaccgccgccaggtcccgccgcctctcgccccgctattaataccggcggcccgggaggggggcgcagcacgcgccgcgcagccatggggaggctgctggccttagtggtcggcgcggcactgggtgagtgcgcggggggcgcgcgcggccggggggcaccgcgggggcactggcggggcggcgggagtggcgctcgggacacggggcagccgcgcgagggccacccccggcccatccccgggccccgccaagtcagcttcagaagttgtgcgcgcgggagccgggcttggggagggcagtggaggtgagggtgggctccagcgggtgggggccgggctggcacagcctggcggctgcaggcgcccagccgggggcgaggaaacgcggagtcagctgctcccggagccccgcaggctgcaatgtgacaccca

SEQ ID NO: 67460 - DNA, 4277 bp, Homo sapiens
acctggcctttcccccacagctcggaatacctggccatcacctctgaaagcaaagagaactgcacgggcgtccaggtggccgaatagccctggtaaggcggatgggctggcagaggggaaggggattgggaggggccgaagtcccccaggtccctaattccccctctcttgctccccttcaggccctgggccccgcctcaaggaagagccagccgtaatggggactctccaggcaccgcctgcccccagcgtgggggtggccactcctgggccccagaaagcctcagagtcctgccgacggagccactggggtgggagggggcagggggcttggctcgcacccccactttcgcctcctccagctcctgccccgccggccgcgcaccgccatgcatgatgggtaaagcaatactgccgctgcccccaccctgcttctgctgcctgtttggggaggggggcggtgaggtgggggcagcggccccgcacccctcctccttgctgatttgcacacattggccgcttcagacacgcacttctggggccagcccctccccgcctcctccctgcctggcggcaggggtcgcgatgatgggctggagcagtttggggcagggggttctgggacccactccgactccccctccccggcatcatttcccctcccgcttcctccggctggacctggggtcccccctccctgtaatgcactcctgccccggcccaacctcgccctctctcaccagccttgaactgtggccacctagaaaggggcccattcagcctcgtctctttacagaagtagttttgttcatgaaataaagactcttggacttgatgcatagtttcgattgtgagccccgtcaccttccccccattcccgtccccgaatcttcgagcccgctttccagggaccctacctgagggcccacaggtgaagccacttagtgcctgatctgtgtcggggttgggggagccatgggctcaggggtgagggagagtggaacggagccaggaagggagggggtgccgtggagggaagagaatcgaggctgatgctggggtgcaggggtggcatggggtgtgtggtgtgcccagcagtgtgagtctctggagaggtgggcgctggggagaaggagagggaaggagagacgggtatggatggaaaggcagaggaagccaggctaaaccagcgtgtcccaatgaggggccctgggctgagtggaggaaatgggtgcggtggaggtgggtttggctgggcacagcgggcacgtgtgggtaagcgggtggggccggttgtgcgggtggcctatctggggcaagcagccgaggccgactgtgtccggcgtgtggttgagcacgggcaggtgtctggcggtgaccctgcacgtctggtgtttacctggccctgggtctgacgtgggccgcgcctggctgctggcgggacagtgtgttatctgcctgcggacgcttccggccacttggcctgggcctctgcccttagcgctgtgttttcccggccaagccccccatcccccctatctagtgctaggactttctggctccagaggtcaccgcggccgggcggaggctgccaaagcaaaccagccccgtgacttgtaggaagccagcgggggaggggccggggcaggatgagcagggcaggcgggagaggctggggctggggttggggcccaggaattgggcagggaattaggcagaggtgcagcaagtggcgggcacagccaggacctggggctggaggacgcagaaagggcggggggaagggttcgctgggtgagggtggagtgggcttagggcagctggggccctccatctgatctcttctggtcagacccccacccttcagcctgcactttctccctaaacccccagcctccggccaggcctgtccctgttcccacatccccgcagacaggcacacctgggtccccctggaggtccaaggcaagccccgtagctgggcccgcctggtccagcccccacaagcccggccccatcagccaggtggcctccagtgctgccaatcgaatggtccggcccctccccgccccttcacccgcccctcgcccagccccctcctcctcaggtgaggcagcctggcctagcaggccccacgccaccgcctctgcctccaggccgcccgctgctgcggggccaccatgctcctgcccaggcctggagactgacccgaccccggcactacctcgaggctccgcccccacctgctggaccccagggtaaggacaagggcccccagactcacagttccagccctgaggacaggggttccctcatccccccacccagcctaatgcccacctcctaatagaggggttcctggggacctgaagagggggcactatgacgtccccccaagcacctaggtgttctgtcctgctcttccttcagactcagccgttggaccccagtcctttcctccccagacccaggagttccagccctcaggcccctcctccctcatactagggagtcctggcccccaaattcctcctttcccaagacttatgatttcaggtcctcagctgtctcctccctcaaaccgggatcctcagtcccctgctccaccaggctcaggcatgggggtccccatccctgcaaatccaggcgtccccccgctgctggtcagacactgaccccatccttgaacccagcccaatctgcgtccgtgatcacggcgtgctctggccaaggcccagtccctacagcctgcctggatggacgcctgggactgggggcgccaggactgggctgggctgggctcccccaggccctgcctccccgtccatctcctcacaggtcccaccctggcccaggaggtcagccagggaatcattaacaagaggcagtgacatggcgcagaaggagggtgagtccccttccctgagccccagctttggctctgcctggcgccccgccctctgtgctcttttctctaccctctactcttcggagccccctctctctgggcacccctcccagatgcatccccacccctgttagtcctcctccacctgattaactattaaccacattttctgtgcagctgtgccaccaccagcctcccttctaccctatgtgaccttcctggcgtgctgcctcagtttcccctcatcccccagtgatttctcagctaactctggacttgtcctctgctggggctgaggcggggaagctgtagctgtcatggttaaggacacagatttggagtgaaacacacaggcttgcatttgaatttgctcttgccatcttttttgctgtgtgatctggtgcaagtgacattattcttagggctttggtctccctctgggtcaagcatggataccagtcctccctctgtgaggttgctgagtgcatgacacacaccaggcactggtctggggctctgcatataagacgcatgccatcaagcagagctgtcatgacagaggttggcaaactcggagtcccagagacccaggacccccaccgatcccagacattcctccacctcctggctctgtgggcaaaagagcagagggaggactttggactgggcctggatggatggagaggggagagacggcagagaaaccaccataaggatgagagagagagactgcgtcatggagttgctggcccttgggagtctctgggcagcccccagctagcctggcttcctttctacctctcacacatgggacccagctggaggggcgcatggaggggcgtcctgttctttctgccttcccctagctggggctgactccctctcttcttccgcaaccaggatagccgggctcagtcctgggcagtagcactttctagctgtgtggccctgggcagacggcgtgttctccctgggcctccattctctcatctgtgaaatggagagggtgacagtgcatgtccaacagcgtggggcgaggcctgaaatgccaggatgggcaggaagcactgagcgtgttggctgaaatgattagttcagatctctggcctcctcgggtctcggcacagctggcaattcagaccccaaaccaatcagctgcagtccagagggaacccaggctcccagttactcaggagaaggcattgcaccctagccgagcaggtggatgacagaatccagctccttggggacaatctctttcctggagctgccggaaggacagccccagggcttgggcccatgggtgaatgagccagggaagaaaagcagaaaatgcccgaatggacagagatggcctgggtacaaagag

SEQ ID NO: 67461 - DNA, 907 bp, Homo sapiens
aggaagatcgcttcagcccaggagtttgagaccagcctgggcaacatagcaagaccacgtcgctaaaaaaattaatacataaaataaaatgaggctggcagattttcaagtggaggggcaaatttgatcttgcaactgggtaccatgagagaggtctgatttagggggtatctaggggcaaagcatctagaacagcagaaacgactgaggcagcgaggaaatgccagcggcagggaagagagctaccaagagggcaaaggttgggggtcacagtcccaagaagagatggcccaaagcaaagacagaaatacaaaagcacagtgtcactggggaggagacattccctaagtgccaggaaagtgcagggcggaggtggagaccgtggcaggtggcccggccatgcccccctcccagctggaaccctgggggagctgggcacctggttgttcacacggcaggggaggaacagccctgtcaactgctggccccgggaaactgggcctggggaggacatgcttgggcataataagttagccctgggggcagggcagagctggcctcgggcccagaccctgccgcaatgaggacaggcctggctgtggccccagcatggtgtctgttgcaggtggccggactgtgccatgctgctccagacccaaggtggcagctctcactgcggggaccctgctacttctgacagccatcggggcggcatcctgggccattggtgagagcggttcctgtgcctctgacctcccctggcccctgcagcctccagcctgcctgccctcacccctcccttctctgcagtggctgttctcctcaggagtgaccaggagccgctgtacccaggtgagtggagcaggctgggaccctctgggggagccctggaggacacgtgtatctg

SEQ ID NO: 67462 - DNA, 1028 bp, Homo sapiens
agtcactggctttctgtgggctgctgggtgcccacgatgggcccttccaggcctgtgatgagctggcccaggcccaagtccacatggagaactgcatccgtgacctctgtgccacaaggggttcccggcagatcctgtgcgaggctctggggagctatgtccagcagtgccagcagcacggcctcctagtgaggccctggagacacctggtggactgcggtgagtggcatcctctccatgccagccagcacgttctgccggccaggtccagaaaaccagttccgcccattttgtggggttgcataattaatgatctcagagtagctacttcaggcctggcccagtgaggcgctcgacatcactggccttggtttcatgcttcccaccaaattggctccacatccagacaggctcaccctgaccacagtggctccacaccttgcagccactcaggtttctcagcccagcaggaaagagagctccgtgggtctcagaagctccagcatgatttgcactgcgtctctgtggcttcaactgactccttcttgtacctctcactgtggccaggggaatgtgagtctccgattgacttctgcctgaccgcgggctctgcccttggggagactgcccaggcagaagttgggatgaggttagcagtgggcagtagtactggctggtgcccaaaggacaaatgtctgcggcctctcacccttgtcctgctgccaagtgatctttgtcaagagcattaagcagtctttcaaacatttttgttggagacccacaatacaaaatatagttcatttcaggatctaattctattagttttctatctcttgctgctgtaacaaattgcaacaaactcagcagcttaaaataacactttttttttttttttttgagacaggatctcgctctgtcacccaggctgcagtgcagtggtgcaatcatggctcactgcagcctccaactcctggctcaagtgctctttctgcctcagcctcctgagtagctgggactacaagcatgca

SEQ ID NO: 67463 - DNA, 1024 bp, Homo sapiens
caaagacaaaacaaacaaacaaaaaaacctgctgtgatttgctcacacctaacaaaataagcagtaattcccagatatcatgaaaagcctagtccatgttcagatttttctgatcgttcctaaaacatccggctttcctcccttgcaccaaagctttgctggcccctaatgcttgcccattaagggttcctagctggttccaacattaggggcgcaatcggggcaggtcatgttctacggggtgggggtggaaggtgccgctttcttgctcaaccaacaggcaacaaaagcctgtccgataccatcctggggatcaagacacccctaaaaccaggttctaacccacctatgttagatccaaatgtgaatctctgacacctgggccgtagggaaccctcaaagggtttggaatagggaaggcggggagcggggtggagtgggggggaggtaagacagtgttcatggagtgagaaaggtgggccacctaggggctatttctggaataacaataggtcgcatttatccaaggttcccagggtgccaggcgctgtcccaaccacttaatttattttaacttgcttaaccctcaaagtcagtttgaggtcagtactcttttcggagagatgggtacggagtcctggagaggttaagcaccacgacagagccgagattttaagcactcggtcagggagttgggcaaatgtggcctgcagatcatgtttccttacccgcgctttttctcctccctgcatagccgccacgtgtcctaagcacagcagctaccagcaacgcttggacccgcgccgggtgcagctctgcgtccccgcggccgccctgcctgctccgagggctgcgccaacgataacgcgcacctgtgggcaggggccaggtgccggcacccgaaggagtgcggctcggcgcacggcggcccctcctaccaggtgagctgggggcagggtcttgctgttgtgagggggtcggcccatcatggcggtcagggagcccccaaaacatgccagggatg

SEQ ID NO: 67464 - DNA, 884 bp, Homo sapiens
atgagaaggtcggccttgggggaagggactggacagccccacaggagggggaggggccaccaagggctggagccgccccaccactcccgccagccccctccccagattccccactcaaccctattgggggagcaggaggacgatgtcaccagggtggggaccagatggctctgcattctggagcagggtgggaggagaggccctgggggggctggggacatcccgtcctggccactctctgccagccccctcccctggctacaggagggtgtgttgggcgctgtcagtggggccagatcacgtccagctgctccctctggtggtcatactcggcaggacctctgcccggccccaagcccttagcctccctcccctaccctgaaattaaccctctagtggccaacacccactgggggacagcaccaacccgaggacatgatgatgatgaagatgatgatgatggtgaagatgatgatgatgatgccaccccttcttcagcgtctactctgagcctggccttgtcctaaaagctcatctattaactcattctgatcttgccaaagccctctgaagttagtgctgtcatcatcaccactttacagctggaggaagtggagacagaggtcagggaacctgaactctaggttacccagctgagggcacagccgggattcaaacccaggcatccggctccaggttattttgcattctttctttggagatcagagttcatggatagatggataattggttgttttaatctggactaaattttagtcatttggatagattctgtccactaaataagaaacataagtaaatgacacttgttagctaagatgaaatagtagtaatgtttatactcactcagccttcacagccac

SEQ ID NO: 67465 - DNA, 939 bp, Homo sapiens
ggccaggcacggtggctcatttctgtaatcccacattttggcaggctgaagtgggaggatcgcttggggccaggagttcaagacaagcctgggcaacatagagaaaccccgactgtacaaaaaattaaaaaattagccaggcatggtgtcgcacgcccatagtcccagctactcaggaagctgaggtgggagaatcacttgagcccatgaggttgaggctacagtgagctatgattgtgccattgcacttcagcctgggtgacagagcaagacccggtctcaaacaaacaaacaaaaaatgaagttaatcataagacaatgtcaagttcagagacctctgagccctgtccaggattatacacgtgatcttagtgatttttccattttggagcatgtgaaaatgaggcacagagctgctcaagttcacacaaccaggagtgcagtgcctgggccattccaggtttccctgtcaccaggacctgtaaacctggcctgcccatggggacgccaggtgtgttgtccccgacaagagctcaggggaaggaaagtgtggggttaaatacatatctgtggttttggaatgtgtgaacatgcaagtgtgtcagcctgcgcatctgtcaccgtggccaaccatgtgcctgtttgctcaagcatagggtgtgaaccagtgtgtgtgtttctgcttttgtgggtatgtgtgagagcggcgggttgtccttgatggtgtttctgcttgtgtatctgtgcccatggaaatctgtctgtgtgtacacaagcttgttggccttcctatctttgggaccatgtaggagtgctggctgcatgtctgtacctttggggtttttttgttttgtttttgtttttgagacagagtctcgctctgttgcccaggctagagtgcagtggcatgatctcagctcactgcaagctctgcctccc

SEQ ID NO: 67466 - DNA, 2613 bp, Homo sapiens
gggtctttgggtttctctatcagtgtgtcattctgtgtgtgtctgcttctatggatgtacatacatacatggttttgtctggttttgtacctgtatatctgggtctttgggattgtgtgtgggtgtgtgtgtgtggtgcatttctggggatctcaccacagcagatagcgcacatgcgcgcgcacacacacacacacacacacacctccctcccgtcctctaaaacagccctgttaaggacctcacggagcactgggatcgggggtcagtgggctcctgggcagtcaggctgggtgaccttcggccctggctggacccagttcccagggggcagccgcctcagcccaaaagctcttggaggcgtgtgtgtttgtgtgtgtgtgtgttcacaaccctgtcctccacaatcctcctagcctctccagcctgcctgctggctgcctgctgctgctctctctgaactgagagagttaaccaagcgggccagggcagtctgggctgggggccgccccctggcccccctccagccccagctccagtttcagctgctggttggggagggcatgggtggggtggggctgggaggggaggctgctgggggcggcgcgtccagctctgggccagggggtccaaagtgctcagcccccggggcacagcaggacgtttgggggccttctttcagcaggggacagcccgattggggtgagcgtcccccactccttccctccaggcctcacccctggtctggctgggccgcctattttgggagcaggagtggccagcccgaggcttcccaggcaggccaacccaagagggagggagtgtggttgaggcagtgggttctgcagggtgggatgtgggtgactcctccctgccctgctggtgcgtgtgcaccctggcagggtgtggagttgggacacacacgtgtgtagggctggttgcgtcactgcgtgggggcaccggaggcccagaggaggagtattggatgcctgacggtgtttacaccccacgtcctgctccaaccagcagtttggggagaggttgttgttcatgtccattccggccccactgtgtgtgtgtgtgtgtgtgtgtgtgtgtgtgtgtgtgtgtatccctgccccagcatgtgttttctatctctaaggcccactgggctgggcctcatgtcacttgcctgacatccgattgtgaaagatgtcacccagaggcgggcagaggggctgtcttttccttttctcgttgctgcccagggaggagacggggtgacctttcccacaggggcagcctgtggcgatgtggcagctgggcctcaccccggcagggctgtgcgtgaccccctgagtgggggaaggcaggctgttgccatggtggcctgagcgagcagaattcctccagggtgaagtgggagatatttatacccggggtcaggccgcgagcgggcgggcggagagggcagggagctgggatttcgcggggcacagtgaggccgggcatgtaggcaggtgggacttgggcgtgccctgctgtctcctgctctgtgtttgtgtgaggcagcgcctcctctgccctgccagggtaggtctgggaatcgggggcctgctgcgggaggtggaggcccaagggaggccccccggggactgtgtgtctcacccccgtccctgctacgttgtgttgttgtgtgatcccatcgtggaggttgttttggtgacactgtgtccccacgaagctggggatacccgtttctctagcttggagccaccaagatagaggacaaacacttctgtgattcagtccccagactgtctctgacttaatcccttgggttcaagccctatgtgggagagcaagggcacacactgcctaatccgtggtgtcccccccaggacaatggcgtctcttggccacatcttggttttctgtgtgggtctcctcaccatggccaaggcaggtgagtgcaggggaggctgcccgctacccacctcagccccaggggtggcggtggggaccgaagaaccaagttggagaccccaacctagactaagtcggctggggtaccaagaagtttgggggtctccacgtggggtccagtcacaggctggtatttgggggaggggagaggaagccccagatcaggcaaagatggggtgggatggggctgaatccccgatgggataactgggtcacagacagcctgccgtgagtcagggagctggggcagttaggtgccacctgccccatctgggacagtgcagagggggcagctgggacccagagagtgtgggcagcctgcccagacaccctcagactctaagcccagcaaggcagagcctccagtggtctcctcatgcccctccctgccaggaccccaggaagcattcaacccctgatttctctctctttccagaaagtccaaaggaacacgacccgttcacttacggtgagcggggggtctaattttgagtcctgggggagagcctggctttgctggtcctttgattccccctcgccctcccccagagtcccagtattgatatctctgtcattctccttccctctattttgtccttcctctctgattccacctgtctgcatcttttcctgtctgtgtctatc

SEQ ID NO: 67467 - DNA, 1025 bp, Homo sapiens
gtggggcacggtgtgggtaggggtgcagaactgaacctggggtagctctcccctgcgtgcccggagtcgccccctcttcattctcctcccccagtgccccgagatgccccccttcaatcccttctccttcctcaacacctccggatttgtcctttcccttcctccagcgaccccagaatagagccctcccgtttctccccctgctctctcagaggcgtccactcaccctagacctgcctgccccatccccgttcccaccctctcccaccactatgccctcacccctgccccccgtcgccctcagcgattccccctcctgctcccaccccgggctctgaagccaggaaacccaagaggaaatgactgagcccgtctgggtccccgcccgctcgcgctcccctggccacaccctccgcctggacgcagcagccaccgccgcgtccctctctccacgaggctgccggcttaggacccccagctccgacgtaagtccctctcgtgcgccacctccatccgctgcccctctgcccacgggccgggctcaggtgggtaggggtttgaccccttccgctcctctccgccccccatccacgcccacatctctctgcctcctctcctgggctacagtgggccgctctgcctcgctcccgcccgcctgcctcagtctccccagctctctgccacccccctcggaccagtgcctcttaggtctctccagcgcgccatccctgcaaggcggcccctgacaccaactcactttttcctctgagcgcgggaggcgttactcactcttcctccttcccctcctcgccgactcccgggctctgggcccctgggggagggaagaggcctcctatctactcctctgccccagtcccctccttgcgtcagtcccagtgagggataagcgcctggcggaaggcgcagggaggtgtttctctgcttcaggagtgcccgccggcccttgcagctgctggaagacccatttatctcatgcttcttgttttctttggggacctgcaggg

SEQ ID NO: 67468 - DNA, 712 bp, Homo sapiens
ttcaggggtcctagggatctagaacatggtcgagaagagcataggtgctggtgggcacttcctgaaggcccttgggctcgaccagattaggccagagcaggtcccctgaagtgcaggacttagaccagagctctactcaggcttaagggtcgtgccaaaatcaagagacaaggtcccggtcacagggcttacataacagtgtttcacaacttcaggtcatagcccattcatgggttactaaatcagtttagtgggctctgagtagcataagaaaaaagagagaaagaaagaataatttttaaaagacattagtatatcactaataaatgtaagattgtatatatataatatacatagcatgtcatatacatcatatgcaatataattatatataatgtatagaatatgacaattataacatatataattgttattaatgcatcactataaatgttattactgcatcactaatctcaaatataagactgtatatataatatgtagcatgttatatacattatatatgtatgcatatcttcattataatatgtatattatacacatacagggggatactaaaattatttcattatttgcacctaccacataaagcagaacagatgtctaactgatcaggaggggatgtcatctagatatgagtatacatttacatatacaatggattatgtctttttttttctctttttttttt

SEQ ID NO: 67469 - DNA, 1828 bp, Homo sapiens
ttccatttgtttcttcttcatgtgttttatttccttgctgatatctttaatatttgttttaagagtttttttatataattgcaaagtttacatcattgcaatagcatgaattgattgtcttttcccatgagagttaagaattttggtatcctttgtatgccaagtaattttggactgcatcctgcacattttgaacattatattatgacactctgagtcttgtttaaatcctattgagaatattgatggttttgttttagtggccagttaacctgggtaaattcagactgctaagttcctacttgccttctatgccctgtagttccaatgtcagttcagtttttgaagcatttgcaatgctattctgatctatcttccaaatgtgtcatccagtggtcagtctgggccctgggcagaagtctaatcattagctcagtttccagtctgcggcatgctaattagggccagatgagtccatgagttcataaataactttatggggtgactttctcaagcccttccctctctgttatcttccgatactttctggttccctgggctcccctttctgatcctccagacagaaactgcccaatttcatgattgtgccaggtctaggatcaagaggttggagaacagagagggagaaaaaaaagcaatggagtctgatcctttccactgaatggagagaaaagtcctttcctgaatttttggcttctgccagctgctctgctactgcaatgggattgctcgaaagaaaacagaaaagggggagaaaataaattctccccactctctctgaactttaggagtaccctttcctgctccttcagccaggcctctcctaggtttctccctgtctgcaccacagtgctcatttccaagttttggactgtattgagttcaggtcaggggatacaggaggaaaataatatagtaaactcatcattgatttggtggcactttgaatttttgtgttcctttcccaatgcaactgttgtaactgactttccaaaattgtcaaatagctgggccatgtattctgtctggattttctagttgtgttcagtggaaaagaaagtgtagcacgtgtttactccttcttgcctgggtttactacttctttcccagaactggaacttgaaatggacttttgaagatttggtttcagtgtcatctgtcttagtctattcaggctgctctagcaaaaataccataaactgggtggcttaaacactggaaatttattgctcacagttctggaggctggtaagtccaagattaaggtaccagaagattcggtgtctggtgagggcttactctccggttcataaacagtcccttctcactgtgtcttcacatggtagaaggagcaaagtatctctcttgagtcttcttcacaacagcactaatctcattcatgagggatcttccctcatgacctaatcatcctcccaaaggctccacctcctaatactatcacctcagggattagaatttcaacatatgaggccgggtgcagtgactcacacctgtaatgccagtactttgggaggccgaggcaggcagatcacttgaggtaaggagttcgagaccagcctggccaacgtggtgaaaccctgtctctactaaaatacaaaaattagctgggtgtggtggtgcgcacctgtagtcccagctactcaggaggctgaggtgggaggatcgcttgaactcaggaggtggaggttgcagtgagctgagatcatgccaccacactctgggtgacagagcgaggctctgaaaaaaaaaaattcaacatatgaatttggcagggaggacacagaca

SEQ ID NO: 67470 - DNA, 2516 bp, Homo sapiens
ctgcaatggtgtcctacaggaggaggaagatcatgtggacatctgcgggaagggtgttctggcagagggagtagcacgggcgatggctctgaggactgtgagaagtatagttggaaacagcgaggaggccagggtgtccgaagctgagtaagccagagagagtgggaggaggtgagataagagggggaaggtcagtttctgctgagagtgaggaggagccacaggagggctgtgagcaggtggacgtgatctggcttgagttttaacagggccagtagaacaaagcacgcctgggtaccgaaaccagccactggccagttggcaacctgggggagtctaacgcgaggaagcgcccagggttcccccaggatgcgctttccctcgccgccacctggagacagcagagtcacgcccagcgctgcgcaggctgatcgccgcgccgcgcccccgccctcggtcgcaggtggctcgttccgggaattcctaagcggaaaccggtcccaagccccgcgccttcgctcggcccctttaagagccagaatttccggagggctgacccgggggctagggatgcccaggggccgaaccacaagttgggaacgggtgggggaggtggcgaaaacttccgaagtggaattccaacttttcctggccctgattccccttgggcatccctgagggggcagagcttcccttccggggactttagagggttcctcaggtcatctaactgggagacacaggaggcccgaagcgccccccctccacccggtccggaggaaccccagtggaagtggagaagtcaggcgccaccaacaagcctctcccagccaggactttgcttagactcgctcctcccggcagggcgcacctaggcgggtccatcgccagccggggagaggggtttgggcagggagggaacaggtgcgcggcgggacccgccctatctcaacaggtgaatcgctccaagtgggtctcggttgcatggatctcggtgcgcttggtttggccggagcagatgggggccggaagggacctgtggtccgcaggcgccctcccagcgggccagtcacttggttcgggccctgggggacggagcgcacctgggtcagcccacttccggggagggaggcagaggaacccctccccgccgctcacccctaagcccagccctcggctcccacccttgtgtacctgggccgaaccattcaccggagcgcgcagcgggtggagtgtggctcggaggaccgcggcgggtcaagcacctttctcccccatatctgaaagcatgccctttgtccacgtcgtttacgctcattaaaacttccagaatgcaacaggacggacttggagtagggacaaggaacggaagtgggaaggggaggagcgtgcacccctcctggccttggtgcgcgccgcgccccctaaggtactttggaagggacgcgcgggccagacgcgcccagacggccgcgatggcgctgttggccggcgggctctccagagggctgggctcccacccggccgccgcaggccgggacgcggtcgtcttcgtgtggcttctgcttagcacctggtgcacaggtacggggcacggggcctctgacgctgcggaacgccggagggaactgtagagggggatggatggagttggaggcggcgggaagcgggaagcgggggtctcagaggctgggaccttccgatcccctgggtcttgggcgatctgttgcgcgcgggagtgagaggaattccccatttgtgccggggagcgctccccgcgcccttatctggaagatagcaggaagtgaaactccctggacggtgagacccggagcggcagggagaatggaactctttgtggggagggagtggaagaccgcccgatctctgggaaaagaaaagccgggatgggacttgggcgcacccggggatttctaagttttggagtaacggggagagggcacgggagggctggatcagacgcttcctagagggacagagacgaaggaacaatgcctaggcctcgggtgggtgtgggactggggactccccatcccccgcaccccacccacctcccgcgggctccggattatacgtgcgtaagagtctggtgggatggatttacggacttgaaaccgacttctgctggcaggctttcacctggatgggatatttgggtggtgatgaggtctttcccgagacacttttggttcagtcatttgaaatgactttagagtagggtgaggtggtgggaggctgatggagatattgtgggggctttagtccctccatggcaaagcagttcaggcaaacaactccatggttttccctccaaattcaaaaggccccgggtaacctggaatccttcgtagtcggttttgaagtggggccttgggcgctgggggcatcaacatggccatctgggcttgcctgcccaggccacacagaggccccttgttgtgggtgaatggcaaagggaagaggggactggtgtggttcagaggccacaggctggg

SEQ ID NO: 67471 - DNA, 565 bp, Homo sapiens
ataaaaaatataaaagccaggcgtggtggtgcacatgcctgtaatcccagttactcagaaggctgaggcatgaggattgcttgaacctgggaggcagaggatgcagtaagccaagatcaagccactgcactccagcctgggcgacagagtgagactctgtccaaaaaaaaaaaaaatccagacgtggtcagagtccatgggcagtgaatgaggacagttgatggtgtgcaaaatcgacccacctcttgctacatccccaaggcctcatctcacccgagtccctcgccaaagcacagcggttttgccgtgtgccctgctgggatggcgctgcatggcacacacactgtgtaagtttgagtgcagctgaaacgaagccgattccagacacccaggggcagggcggggtgtccgtgtggctgggaggcctccttgtgttagggggatgttgccatcggccaggtgccctgctgtaagccaacacatggagtcttgtatgacatgtgctctgcatgagtgatgccgctgggctgtacactgccatcttcacatgtgtgaatgagcacgt

SEQ ID NO: 67472 - DNA, 3235 bp, Homo sapiens
cgggtcctgtactacatggagaaggagctggccaacttcgacccttctcgacctggcccccccagtggccgtgtggagcggggtaagcaggagccttggggtctgagggcttttaaggtgggggggtgaaacatgtctccctgatacctgccgcagggactcttggtgcaaaccctggaccccgggctcctccagcagtcagtgacaccccccttccctgcagccatgagtgaagtcacctccctccacgaggacgactggcgatctcggccttcccggggccctgccctcaccccgatccgggatgaggagtggggtggccactccccccggagtcccaggggatgggaccaggagcccgccagggagcaggcaggcgggggctggcgggccaggcggccccgggcccgctccgtggacgccctggacgacctcaccccgccgagcaccgccgagtcagggagcaggtctcccacgagtaatggtgggagaagccgggcctacatgcccccgcggagccgcagccgggacgacctctatgaccaagacgactcgagggacttcccacgctcccgggacccccactacgacgacttcaggtctcgggagcgccctcctgccgaccccaggtcccaccaccaccgtacccgggaccctcgggacaacggctccaggtccggggacctcccctatgatgggcggctactggaggaggctgtgaggaagaaggggtcggaggagaggaggagaccccacaaggaggaggaggaagaggcctactacccgcccgcgccgcccccgtactcggagaccgactcgcaggcgtcccgagagcgcaggctcaagaaggtgagggccgccctccctggcgtccagaccgtccctgggcccccagccggtccccgcggctcatacccttctttctttctcccttgcagaacttggccctgagtcgggaaagtttagtcgtctgatctgacgttttctacgtagcttttgtatttttttttttaatttgaaggaacactgatgaagccctgccatacccctcccgagtctaataaaacgtataatcacaagctctggagagaaccatttgttcggccgcgcggggcgggggaccggggctgctcccgtatgcgtctgtaaagcgccgcgtcccgggggcaccggagtccggggccgggaggaagagacccagcctggcccggcccgcgcccgcgccgccggccggagaacgtgccccgcgcagccgccgcccgcctgcgtgcgcgccccggccccgcccaggcgtgcgcatgcgccccggccctccgccttcgcgcaccgcaggctggccgtccgggacgcgcgcgcgctcctctccccttccagcccatcccccccagccccccaccgacctactttactgtctccaaactcgggcagcccacctggcccccgacgaccccagcccctgcaccgggtaccccgacgttccatccagacccgcgtttcaccagggcggcgcgcggcgacctcgcgccccgcggagccccgggctcgcgcgcgcccgcccgcccccggagacagaccagcgcgcgcgccccgggccgcctccccccagcgcgcgtccgccccggggctcgcgccgccgccgccgccgccgccgcgcgcgcgcagctcaagtaaaggaggaaaaaaaaaagggggaaaaatagaaagcggcggcggctgcagcagcgatccgccgccggactgggccaagccgggcggcggccgcgcgagccggcgatccagggcactggcggcggccagccagggcgggccgtgttcaaaaaaaaaagtcgcggcggcggcggctgctcagggaaggaggcctgagggccgcgtgcagcgggcgggcagctgggtgggctgggggcggccgcgcggcgtcccggagcctcgggccgcccggagccggcgggcgggcggaggcggaggcggcggcggctgcagcggctgcaggagcggcggcggctgcggcggcggcggcggcatctcctcctcacatgaccccactgtttgtccccgtgatcagcgcgagcggctcccgtatctcctccgtcccctcctgccgcgcggcgtgagcgccgggctcggggcccccccggccgcccgccccctcccctccctccctcccctcccctcccctcccccccgggccccgcgccccccccgcccccgccccccccatggacatgctggacccgggtctggatcccgctgcctcggccaccgctgctgccgccgccaggtaagatccccggcccggccgtgcccccgcgccccggccccggccccggccccgcggcctgcaggccggggccgccatgatcccgagcggccgcgggcccggctcaaaatggaggccgccggcgcgggggggacctggcgcctcccgcccccggcccccggcctcggcggcgcccccggcctcaggcgcggccgggtgggactggggccctgcagctgggcgcgggggcgggggcgcgggcgcgggccgcgctgaccctgctccctcctgtgcccctggcagccacgacaagggacccgaggcggaggagggcgtcgagctgcaggaaggtgagtgcttgccgggccggccgcgcccggggagggctgggggcgctcggcgcggccctgaccgtgccccgaccctcctcggccccaggcggggacggcccaggagcggaggagcagacagcggtggccatcaccagcgtccagcaggcggcgttcggcgaccacaacatccagtaccagttccgcacagagacaaatggaggacaggtgagcggcgggccgcgagggcgaacgggcgggcgggcgggcgcgccgggaaggctcggacctggccccagcgccggcctcgccgctctgccgccccctgcaggtgacataccgcgtagtccaggtgactgatggtcagctggacggccagggcgacacagctggcgccgtcagcgtcgtgtccaccgctgccttcgcgggggggcagcaggctgtgacccaggtgggtgtggacggggcagcccagcgcccgggccccgccgctgcctctgtgcccccaggtcctgcagcgcccttcccgctggtaggtgccctgccacccctgggtgggggggggagggagtggagaggggacactggctctgctcttggggagccccgggggtggggcaggtgtcgcccagcggatgctgccttcagg

SEQ ID NO: 67473 - DNA, 1258 bp, Homo sapiens
caggtgatccacccgcctcagcctcccaaagtgctgggaatacaggcgtgagccatcccgcccagcaatggaatttaatcctaggttttttttttttttttttttttgagatggagtctcgctctgtcaccaaggctagagtgcagtggcatgatctcggctcattacaacctccgcctcccgagttcaggtgattctcctgcctcagcctcccaagtagctgggattacaggcacgcaccaccatgcccaactaatttttaatagacacggagtttcaccatgttggccgggctggtctcgaactgctgacctcaagttatctgcctgcctctgcctgccaaagtgctgggattacaagtgtgaaccactgtgcccagccaggacttgggctttcaaagagcgcgttgagaagccgctggagaagtgagttcggaggggtgtgatggcaggcttgaggcttcagaggcccactggcagctgcgtggacagtgagcacaggctatcagtggaggcagggacagggcttgggaggccctggccattgtccaagagagaggaagtggagatggggagaggggtggggtcaggacccattttggaggaggaagtggtgagactcacttgaagagtcaaaggtgactccagcagcttccttaagaggttgaagaaagcaggaggggcaggttcagtggagaacgcaagagtgatctactccggccgagttcaggcccagggaggccctcagggacagggaaggcagatggcaccccctccctgggaaatgccaagccgaggaagagtcagaacacatgacacagtgactcagagagatgggggcagacgctgagatgagggttggccaggcaggaaggaaggtgagaaggtctcatggcctcacgtgccagtagggctgggccaccacgtgtgggagggaggacacccaggcaccaggccatggtcatgacacgggtctctttgtccctcccggtctgccaacctcctgagtcactcctgacggagatgactgatccatccctggcccgcctcccaccctgtccctgggacagtgcctggggcaggcagctccattatcctccttgatgaaagagctcccagccagcactggccactccagagcctcctccccaggtgggtgatcatgcagggctgggctcttgcgactggccgggggtagagatgcaccgcactgctgagaagtgctttctaggagttcaagaccagcctgggcaacacag

SEQ ID NO: 67474 - DNA, 952 bp, Homo sapiens
ggccagagtgcaatggcatgatcttggctcactgcagcctccgcagttcaaacaattctcctgcctgagcctcctgagtagctgggattacaggtgtgcaccaccatgcccagctaatatttgtatttttagtagagacggggtttcaccatgttggccaggctggtctcgaattcctgacctcaaatgatctgccaacctcggcctcccaaagtgctggtatgacaggcctgagccactgcacctggctctgaccacacgtcttccatcaaggacttacatcattctttttggccacccagaacctctgaactccctgcctgtgaatctacgcctgcccaagggagaagcagaaacttgctttctcagagtcggctcccatgtagggcacaggcatgtgaccaaagtccagccagttaccaagcccaggtgggggcagtgcagcatagctgtgacgttaggcccggaggccactctagggagctggcagcacacagccagctgccagggcggcagagagaggtgccgagggtgtggcagcagtgcccagcgtgtgaaccgcagagtgtgcgccagtggtggaggtggtggtgtctgcaagggtatcatccaggcataccctccaagcctggtgttctggctggcctggagattccacaagctacctaataccctttaaaaacaaaattcctaggctgggtgggatggctcacgcctgtaatcacagtgtctggggaggccgagatgggaggatggctccaagtgagaggatctctggaggccaggagtttgagatcagcctgggcaacatagtgagatcccatctctataaaaataattttaaaataaaataaataggccgggcatggtaagctcacacctgtgatcccagcactttgggaggccaaggcaggcagatcacctgaggtcaggagttcgagaccagcctggc

SEQ ID NO: 67475 - DNA, 871 bp, Homo sapiens
tggcccaacctgggggcctgagcagcacgaaaagggaacctggcattatttcacttcccctttctggaaaagatgctcctgggccccttcctcagaacttctcatcagtccgcacaaccagagctcaggtgcagtgtggcttggtgatgaatactatggttggaaaaggagggatgggggcagtgggcatggagagggtctggaggaaacacacagccatgattccagcctcactcccttaaacgtcctgcctctcagcgcggggtctgtgctagttcttcttttcgccttgccctgcctcctgtggataagtgcttttgccccacttttttttttccttttcattatttatctctaatcacaggaaatgaggacatttctcatctacaaattgcacatcccatcaggaaattgggccaaagatctctaagccttcagaagcggtcatccagtaacccacttggcaaagtttcaaaggtctgggaaagtagatgcgaggtcaagcagtgcgggaggggagccaactctgcaaacgctggccacggccagctggccaccagcagcttacccgaggaggggttgtccaagctacatactaaccccggttccctctccccaaacattgtcctctgccatctgtcagtccgagctacgaccagcctcgagaaaacagagttaggaaagtaaacacactgctcccaaatctagctattttaaataaaaagctcacccatgtgggctgcagttgagaatttctaaagtgccatggcaaacattacaccatttgagtttccacggcgtagccttcattcatccgccaacatttatggaggcctaccatgtgtcaggccctgttttaggtgctaaggat

SEQ ID NO: 67476 - DNA, 1940 bp, Homo sapiens
agggctaaaaccctcaggtcctcccttcctgcagctccttctacctcagacactgtgctgagggccccagccggtcagatctttctagtcatctagacccaggctcatggccacccctcagagaggccctccatgctggcccattccaaacgcttgcattattcctaggaaagggatgtactggtacagcatgagggtgtttgtgacctgtgccctttggccagaccctgacacagtgccttggtcataccctgcacttggtcataccctccagtccagagactggacacagtagggctacatcaaatattatagatgaatgcatggatgggcgatagagttaagagtcggggcctcagctcctggaggtccttgctctgccggacacacttatctttgaaattctgacttccaggtcgtctctacggacttcctcggtgatacccactcgtccatcttcgatgctaaggccggcattgcgctcaatgacaatttcgtgaagctcatttcatggtaagggggaaggagctggagacttagagggaggggaactaaggggtggtcggaaggaacccccttgaacctcccgacccctcctccacaggtacgacaacgaatatggctacagtcaccgggtggtcgacctcctccgctacatgttcagccgagacaagtgaaacgggaaggtcctttctttccttcccaggggccggggccggaacatgtgcctcccgttccagcatctggctgcccgggggaggaaggacacccggggcgggcgccccacgccgatgggtccatggtgaaataaaaaacagtgctcacggctgcgtcccgtatctctgcgccggtcagggcgggttctgatccgggtttgaggcccgccccacccttactcgatcgcctgcgcccacgggcgaggggtcgcgctcgactccaagccgggttccacttcaggagaccgggaccgcgatggcagcggtagaggccccgcatggccggaagtcactccccaaagcgctgggccggcagcggtgggacccagggccggccacgggctctctgacgtcactgggcgcgacgccccgcgccgggactactgctcccagaaggtcgcgcgcgggcccccgccagtcaggtgggtgccaggccctggccgtggcgaaagagccggcggagccggagacccgctcccggagacgccgcctcgcgatccccgcgcgggcgggaccgggcggccggcatcatgaccctgtttcacttcgggaactgcttcgctcttgcctacttcccctacttcatcacctacaagtgcagcggcctgtgagtgcgggaagggcgcggggcggagagggcgcggggcccgggccgaccctcacctcccgcttctccaggtccgagtacaacgccttctggaaatgcgtccaggctggagtcacctacctctttgtccaactctgcaaggtgagggccaccgggaagccacgtgttctggcccccaggctctgcagacccagggacccgcccccgttgcctatccgcgcccccgccgccccacggtgggaccgccctcgggactccgcactgggaggcgtcaggatacctagagaggatggactttaaagagggcacgacctgagaagagacctagaagcaacttttgcgtagcacttagtaaaactgagaaaacctcagtagtgtggttggctaacaggttttttttggtgcggttaagagtgatcactgattccgtacgtgctgctaacactgcccaaggagcagcaccttcagacctgactcagatgccctgtgatcacccagaactcaaacttccagccccctcggggacccggggacctatcctctatctccccgattcctgtaattttgccaccatctggtggttcctcttccagatgggcccccagaacctgtcctgc

SEQ ID NO: 67477 - DNA, 520 bp, Homo sapiens
ctgttttgcctctttcgggttagctggtagtgagcgggagaacgagggaaggcgggcggggctgcagtctctccacgcccttttcatttccactcaaggagacctacctgggaagagtgagcgctgcaagacccagcctgaccgcgctaagattactatgcagcgcccgagcccgctgtctgcccggcaaccgatgacgtcactgttggcgcgcccgtgacgtcagaggcgggcgccacacttgaagaggctgagggaggcggtgtcgccgccgcggcgctgtcatggagctagcgcaggaagcgcgggaactgggttgctgggcggtcgaagagatgggggtgcccgtggcggcccgggccccggaatcgacgctgcgcaggtgaggaccgctcctggagtgaggacaccccaccctggagattgagtctccgggagtgagaactccacccctcattgaggactcgactccccccaattccccatcgagagtgacccgacttactgagggctccctacc

SEQ ID NO: 67478 - DNA, 1815 bp, Homo sapiens
tcccaccaccctttgctgactcctttttcggactcagcccgcctgcacccaggtgaaataaacagccttgttgctcacacaaagcctgcttggtggtctcttcacacggacgcgcgtgacaaagaagtatagatcaagtgaaatccagaagtgttgaatattggtagcgtttgagatgtacttaagagtgcgttatactattccccttaatgtgcatgtttgaaaatactcagaataaaacacttgtgagggctacgggaaaaaaaaaagggtcagctgtggcccaagaaaggacagggaccaagcccacggacgtgctcctctgagttgcactagtctctgggccttggctcccaccctgaacagctctcatctttaaatgtcttcagctgtcctcctccaggaagccgggtcaggcgcttcctcccgggcgtctccggtcttcctggaaaccacaggtcgggtgtcaacctactccaggataggggccccgaggggccagccaggcctcccagccttgcccaaccctggggttgacacggactttagcgtctttttaaacttccggcgcgggctctgcggtggcacaggagggtcctccaaactttcctgcgatctcaaaggtccagattccacattggggatgggcccaactgactttgcttcgctctcattagccggtggtcctccaggaaagcggggccgcctctccgctgtgctctcataggcccaggttcttgcgttcgtgtgtccttctctcactctgattggcctatattccccctgagggtgtggccaaatctcattggctctcgcgcccgaatgtatgacgtcatgcgccagcgcccgtcgcttttgctggacgtcatcctcgggagcccacccggacgaagggggagagtagacagcagaaccagcggcggcggctaagcagagactgtagtagcggcgacagcgacgacggcagcgatggctggggcggggccagccccgggactcccgggtgcaggaggacccgtggtcccgggtcctggcgctggcatcccgggcaaaagcggcgaggaacgcttgaaggaaatggaggcggagatggccctgtaaggcccgcgacagagagtgataaaagtcgtcccagagccagagccaccgaatctcggagcctccaggcctcgataggccggagatacggctctaacatggggaagtgggaccttcgggattgtgggggcggggataggggagaggttggcaggggtgagggtcccctcgcgatatacccacagttccaaaattggtacgaggtcctgagcgctgatgtctgttctactcctccaggtttgagcaggaagttctgggggctccagtacctggaatcccaactgctgtgcctgcggtgcccactgtccccacggtccccacagtagaagcgatgcaggtcccagcggctcctgtgatccgcccaattatcgcgaccaacacataccagcaggtacggctgagctaaggcatgtaagtcagggaacacaatgcctcgaacagagtaggtgtttgtgtacagagagctgttgacgttttggcttgttgactaattagcatgacaaatattttatatgccaggcactgagaacacagtaatgactgagagagacatttctgccctgtgggagcttatattctagaacatgttgtccagtagagctttctgcaatgacgagactgttctgatatatttaaaatttatatttaatagttcgttattctcattagtcacatttcaagtgctcagtagccaactatatatgactagtagagaaa

SEQ ID NO: 67479 - DNA, 1112 bp, Homo sapiens
cctaagtgctggagaagaagcggggaggctgggatcctagggcaaagggaggaggggggcgtgcctaggttcctgggactgggtggggaggggccgcgtgcttgacccctgagggtgaaggaaaagggggcgcggggtgctgaaatacgggctggggggccataactcccagtccctgacaagtagagactagagagtgggtagttgaggggtctctttcattgctcacagtcctccctaaactcaggtacaagctcatccctggcaagcttcccacagctggactggggctccgcgttactgcacccagaagttccatggggggcgggtgagtgtggggagaggcggtgggaggtggggactggggtcccgaggcaccggggctagaggtgtagactccctgatctttgaggactgagaacacctgcgccctcaaggtggcatgacctggatccgggtcagccgggccccaagtgccagggttgagagcttagaccctagagtttttgagggggcacctgggctcccctcactcgggatccgttactcctcacagagcccgactctcaggctcttccgtggtccggggactggacagacatggcgtgcacagcctgggactcttggagcggcgcctcgcagaccctgggccccgcccctctcggcccgggccccatccccgccgccggctccgaaggcgccgcgggccagaactgcgtccccgtggcgggagaggccacctcgtggtcgcgcgcccaggccgccgggagcaacaccagctgggactgttctgtggggcccgacggcgatacctactggggcagtggcctgggcggggagccgcgcacggactgtaccatttcgtggggcgggcccgcgggcccggactgtaccacctcctggaacccggggctgcatgcgggtggcaccacctctttgaagcggtaccagagctcagctctcaccgtttgctccgaaccgagcccgcagtcggaccgtgccagtttggctcgatgccccaaaactaaccaccgaggtgagagggccgcaaagactgcggggagggcgaagctggagtcctgagccgggacccaggcacctaagggggcggg

SEQ ID NO: 67480 - DNA, 1180 bp, Homo sapiens
cgggtaacccacgggcgcccgagccccagccgcgcaagctcacgattgggccagaagtgaggatgaacaagcatttagcccaatagaaagtcgtagttctcttgctgggcgtggcttgaatgacttcagtggcctcctcctgggagggagctgaagccgctcgcaagactcccgtagtccccacctctctcagcttccggctggtagtagttccgcttcctgtccgactgtggtgtctttgctgagggtcacattgagctgcaggttgaatccggggtgcctttaggtgagtgtggagggttctgtaacctgggaccccagtctagcgggctgaggagccggaccccagcttccctgagaacgggttgaggcttccggctggcggcgtccggcctccctggaccccggggccctgttctgttcatcgtaagagctaacaatgatacggttcttccttgatgccaggcaacatcccaaacaactttaattaatttatttaactctcccaccagccctatgagatagggcctgcgattatccccttttgtcagtaaacaggctcagagataccaagcgacctagctgaacctacacagcgaccaggatttggcccaggagtttgtcctccagggctcttcatggctaattcacaggcgtggcctctcgcggcttgcctgggccgcagcctggctcccgggtgtccagtccatcctcccttttggacgttggaggggccgcagcgtcatctccgatgcaccctcatcctcagataccgggtagagatctcgccggtaacgatccttcctactgcgtctgtgccccagcagctggtgttttacaccccacttccccaccgaaagactgttttagtgctccagacccccaccaccaccttgcgtcgcttgaatttgacactgctctgcaagtctctgtatagccccacgactcctaggattccctggaatatagatacttttctctcaggctcccgacgaacactgtcacttcttcagagacattatattaaaggtgtttaaccctgggtccgcagagttggtagaattcaaggaatgctagtacttgaattggggtggggggtggaattgcatctgtgtttttactaaccttttgaggcagcaacctcggtagtactagcagcagcggtgattttgttagcaat

SEQ ID NO: 67481 - DNA, 1055 bp, Homo sapiens
gagggatcgtgggaggttatggcgtgggttggaagtagcaaagaacttaaacaccatgaaaaaaaaattttttttttgaaatggagtcttgctctgttgtccagactggagtgcagtgatgtgatctctgctcactgcaacctccacctcccggttcaagcaattctgcctcagccttccaaaacgctgggattacaggcgcttgccaccacacccagctaattttttgtatttttagtagcgatttagagagtagtttcaccgtgttgaccaggctggtcttgaactccgtgacctcaggttaaccatccacctcggcctcccaaagtgctgggattacaggcatgagccaccacacccagccaacaccatgaaaatttcaaatgaaacaggacggccagtgaaaagtcaaggtgctggactccttgagtccagctgcctgattctgcccagggtttgccaccagtgccagtgtttcctgtacattcctttagagatagctcatgcatctagaagtatttgtaaatatattgatctgattggatatggtgcccttttgctcacacagcccctgccacactggcctcttcagtgcacaggaactgtgagcaaatgtatttcgacacaccaggctggctccaaccccggatcctttacacttgctgtttgctcgacctggaatgtttggccaccagctgtccacaagctcacccctcactgccttcaggtcttcatttagcgaggccttctctgaccactcagccttcaccttcagctcctccatctttgtgccccttcactccttttgtttctttctcttttttcaatttttatttatttttttagtttttggagatggagtctctctgtcaccaggctggagtgcagtggcgcaatctcagctcactgcaacctcagactccctggttcaagcgattcttctgcctcagcctcccaagtagctgggattacaggcacgcgccaccacgcccagctaatttttgtatttttagtagagacggggtttcaccatgttggccaggatggtctccatc

SEQ ID NO: 67482 - DNA, 3690 bp, Homo sapiens
ctaaatgcccccaaagggctctggagccagaaccagttggcctcctccagccctaccccaggtaagcccctcgctgtcctgcatacacctgtaacatggtgtcttctctgggctggggctcgaggagtccagcctgagcagggcccctacctcccactgttccttccaggttccctcccccagggccccgcacagctcagccctggggagatggaagagtctgatcaggggcacacaggtgagtcgggcgggggcactcgtgcctcagccccactgtagcccttgatttcctgcctgaatggtacagtgagttggcgctgggattcctggccctgccctcctttgccttctctgtccccacaggcgcacttgcaacctgtgcgggtcatgaggacaaggcaggctgcccacctcgcccgcaccctcccccggcccctcctgctcggtctcggccctatgcgtgctctgtctgtggaaagaggttttcactcaagcatcagatggagacgcactaccgagtccacacaggtatgggcgccctgccctgtgtgaactgtcggctttcttcccaactccgctcctgagtctccacctgtgtgcccggttcccgcgcaatcccctagccccgtggcccgatccacccctaacttggccagctttcgccgccttcttccttccttcaccggcctccccttccgaccgctctaggagagaagcccttctcctgtagcctttgtcctcagcgctcccgggacttctcggccatgaccaagcacctgcggacacacggggccgctccgtaccgctgctccctgtgcggggccggctgtcccagcctggcctccatgcaggcgcacatgcgcggtcactcgcccagccaactcccgcccggatggaccatccgctccaccttcctctactcctcctcgaggccgtctcggccctcgacctctccctgttgtccttcttcctccaccacctgacggggtgtcggtagcgtcttagccaagagtccaattaaagaacgaaaagcgggccggctcggcttctgacctggcaccgctgctacggcggcctagcaaattccgccccagaagcgccccaggaagggcgccgagtgccctctcctggacgatcgcgggtcgcagaagcccaggccagcgagccctacagagtgaggacactgaagtgtgcaggagcgaaggttaacagtaggggagattgtcgatctcatcaccataataaagagtttcctgtgccctcccttcaggactagaaagccgagtttagtctgtgcacacccccgcccacgccccttgtcctgtagcggcccctggtggccctgcgtccgctgtccagcgggatggacacttcttccacccccgaggcgccccgtcctccccaggaggcagccggccccgaggactcggtgtccgggcacaccttgcggcatgccggtcctggactggtgggggctgtgcgaccgcaagtcactcgccccttccactgcaatccacggcgcgcggagtctgatctgggaacgctcggcccgggagagagaggaacgcgtgctccgaccctgctttcggccacccgcctcctctccgggagcacacggaccccgagaccgcggcctctccggcgtcttccctccacaccgtgccaagccgccgccaggtcgcgcctggaacggagactgactatgctttccaccgctccttctccagcccacgcctcctgcagccgcgaactgcatttcccagggcctcgggggtcccggggcccgagcccgcggcaccctgggagtggtagtccacgcgggccgccggcctagccaagaacaatgggaggagcctggggctaggaccacacctcccggagacccggcaacccgctttccgggtcctggccgggaaccccgccgtcccggccctcgcgccctggctgccggcggaagaagcgaggcgtccggactacatttcccggaggcccccgcggttcgcccctctgcggccgcgacgcgggggtctgtgctccccaggtgcggtccgagggcgccggccggccgcggactccctctcccgtggtgccctgcgcgtggccggcccggcccccggtctcccgcggcggcgctggttgttgtcgtgcgccgcggccgccccgccccgcccccgctctctcccctccccccggccctgcgcacgggccgcccctccccccgcctccccggcccctctcacggtgccaagatggcggcggcggcgggcggcggcagttgccccgggcctggctccgcgcggggccgcttcccgggccggccgcggggcgccggcgggggcgggggccgcggcggacggggcaacggggccgaaagagtgcgggtagctctgcggcgcggcggtggcgcgacggggccgggcggagccgagcccggggaggacacggccctgctccgtttgctggggctccgccggggcctgcgccggctccgccgcctgtgggccggcccgcgggtccagcggggccggggacggggtcggggccggggctggggcccgagtcgaggctgcgtgccggaggaggagagcagtgacggggaatccgacgaggaggtgaggcggttggaggcgtccccggcgccgggtggggcggaggccggggcttccaggggtctgggttgtcccgggggcggcgtgggcaggccgggtcctcagggttccttcggagagacggggcacggagggagggcggctgcatgcagcttccgggggaaagggcctctggaagtgggtagagaagccccggctgcagccaggcactcgcgcccgatgtcggtcccgctgaagtgtcttgggccgatccttttcggcagctggcaaagctagggcggtggaggtttgggcgaggaggcagtggggactgcatgtccagccagtcgtggttgacagcggcagcgtggccttggcagacaggttggagctgtctgggctcttacctgtgggccgccccgccgggcctcgcaacctcctggtttctccagggccccagtttctcttggcatctcaggtagagtggtggagggcttcctcttggggctcgggttgaacaggagtgggatgaaggccgggactgggcactctagcaggtcagagctcagctcaggatttctcccccagcctttcagaacaggcaggaaggtgtgggttgcgttgccctggacggttaataacaacctgagagctcgcagtggagcctgtacgaaagccatctgatgccctccccgccccttcacttgcgggcccctgttcccaacttaatgcagaaataaattgtggcccgaaagggtgtcagtggaggtcccactttggtctgaattggactctgaaggaatctgagtatggggcctgctgcctttcctgaggagaccctgtcgtcttctctcttgggccagtgaaccatggctttggctgtgctggtgtggtccggcactggggatcggagttcgaaatacctggcgcctccatccctagggagagaccctctcttccactacccgcgacctttgagtctttttcgttctttttaaataggcaggggtatgctaagtgggaactggggatattcctcgatacctcagatggaacgagggctttggcactgactgctgtttctcccctccaccccggtccc

SEQ ID NO: 67483 - DNA, 1151 bp, Homo sapiens
ctaccttaacctaggacctcccgacccctgcaggccagccacctcctgaaaccacggccccaccccttacgtggggctacgccggctccctacatctaggccccccacctccagcacgcccttgccctgccgggagtcccatctgcacctctctgcagcgccacggggttctgcccccgcccgcggcgggagtaggggtcacggctccgccgccgcaggggctacatagctccgcgccgtcggggttgcactgcccagaagaacactttcggaacgggggcgttacgaaatcgccgtggtcattgagtccgcagttttcccggaactcatagtctagcgggaaagctgcgctccagtgcggccgcctagcccgcccctgcgcgggcaacgccctctcccttcgccctatcccagcgtgccccgcccctccaggacgcttccagcctattagcgtgcgccccggtcttgtcacttttctccgggctcgccttttcacccccctccagcctgctccgcacgaagctccgcccactcccggcttctctacataaagcccaccctttccacgcggcccctatcccgcctctccagccatatccattcgctgttgccctacggtagcccgcactatctgcacaggctctgcctgccatccctgtctgatctgcataaggcccaccgcttagacccctaagcaagcctctctggcccgtagcccacagacctcgccccttccccgctccctatcacctgcaagctccgcccaagcaaggctcggtctcggattctcacccgggcaggggggcggcccgaagcgttgcaggcagctgctgcagcacttgttgtctgggttccagtattcaaggcggccgcagtactgggaggcttccggcggtggcgccagggccagaagcaacaaggccgtcaggaggcatcgtccaggccccatctggggggccgtgatagcgggacttccaaacacagcgcctctgctacactttccggggaaatcgggcagaagaaaggacgcggtgatgtgggggaacagaattctcacgcctcttcggaagccgggaatctacccccgagccctcatcccccaactgagccggttatcagagaagcccacaaggccactaggggactaacag

SEQ ID NO: 67484 - DNA, 1768 bp, Homo sapiens
ggcatgaaggttgggggtggaaccttacaccccagcctaagcatcatgagtgcatcggcgatcctttgcccctaagaaaccagaaaagggatggaggggactggcaaggatgaacagcgggatggaagggactggcaaagatgaacagccgccgtgtgtagcctgtacgcatgggggcgcgaccaagttcccgggaaaacggcacgaagaccggtgggaggagcctgcagaaaggtccaatgagaaaaaaagccgggcggtggggagggactcaggaacccggaataggcgggacatggtgacgacggccccagaaggggaagggccagggagccgttaacccccgaggctccgtgccgggtctcacctggctgaatgtcggcttgttgtgaagccgggagcaccggtccccgtgccggcagaccccgatcttaaagtaaaaagagcagttaaccctggaaaaggtgcaaagacaaaggtgaaccgagggccggggaagctgggcaccccagaaacaccgccccaccacccaggaccccagtaccccggccccgaccccccgagagtccactcccagcgcccgttctcacttgtccttctcagtcccgaatatcgaagctaaatattcagccatttttacccaagccctccaggtctggctgctcttacgtcacttccgttgcttaggagcactgggaagtgtagttcgttgccctctccaggcgcttaccaagcgctcggaaacgccccagggcgcttgcgcgtgggaggcgcgcgccctccccatagactccccggtaggagttcttttaacagcgcatgcgtgcagtgttgcctcgcccaaagaagactacaatctccagggaaacctggggcgtctcgcgcaaacgtccataactgaaagtagctaaggcaccccagccggaggaagtgagctctcctggtgagttgggggtcgtttcgcccaccctagtaaatataaagagctctttaatccagccagcttactagtgggggtggggatgccctgctttcagcaaaccgacctttacatttatctctgatttgttctaataggggcgtggttgttcgtgatccttgcatctgttacttagggtcaaggcttgggtcttgccccgcagacccttgggacgacccggccccagcgcagctatgaacctggagcgagtgtccaatgaggagaaattgaacctgtgccggaagtactacctgggtaaggcagatcgctagggtcccaggagaagagaggggactggactagagcacccgagggaagagggcctcggggcctggattcttaagtctaagagatgaaggacctgcgaacgccgactcctggatttgagtggggagggcctgggtcctgaggaatgaggaagctggggcctcaatttctggatcccaagagaggagggggattgagggcctggactcttgggtcctgtgaaagagatggttgaggaatcagattcctggatcccaaagaggagccagattcctgagtccctgacaacagaaatctccatttgaacttgggtgtgggagagtttcttccaaatagatctcggtgggagttggagaagatcttcattgccttatgaggttttggggtttgtttgtttgtttttctttctccctaggggggtttgctttcctgccttttctctggttggtcaacatcttctggttcttccgagaggccttccttgtcccagcctacacagaacagagccaaatcaaaggctgt

SEQ ID NO: 67485 - DNA, 1021 bp, Homo sapiens
aagagtgcccgacacactaataaatatttgcaaaatgaatgaagttgtacctgcaaagagattaacagatacctggcacctagcgagtgctcagtgagagggaacccaacgttattttacattagtcttcctcttagggatgaagggaccccaacggttggttaaatccggtaaagagctaacttggtgttgctcaacccttctcacactacaagtcccgggaagcctcgcgatgccctaatcctttgtttcccaccgtgccccgcgcggcgcaggcgctgttactcagggtgagtctgggaagctggaactacacctcccaggaagctagggggtagatggtttgtttccggaagcaaagccccaggtgggtgggacctaaagctgggagactacggaggcagctctcaattggtcaggatgcgagattgacggctgcaataactaataggaacaagctactgccgaaggggcccgcccacagaagggtggtggccacggtccaggctggacacaaccaaaggcggaggacccgtggcccacgaagctcatctttgaactgtccccgccttctcccgccttgacttgtgaccctaggccctttggggcgcctctgacccagctagccagatcccggacccaaaccatgttccctgtgaaggtgaaagtggagaaatcaggtgaggaccctgacgtcgggggcctgtcgggaccatcgggttgacagggtgtggagtcccggtggaagggagtatcgcggaaaggggactgcacgacttttccctgaagcccacctgacaatcgctgtatcaggcagcgagcgttgcctgccaccttcacaccctcccggtgtgcgcttgaagtcgctttgagattgaatggggtggctcgggcaatgacgtgcgtggtaggacatggggaatcctgagccggtaactctgagaagggcccttttctttcctcttttttttaatttaaatttttaaaatatttaaatagagacggagtatcgctatattgc

SEQ ID NO: 67486 - DNA, 1832 bp, Homo sapiens
gctgcacaggcacagggatctccatcctgctcctccgcgttgcagtgcccctgcgtgcgcagccgctcatttatagtgcgccctgtgccggcccctcggagggctgcccagggacactgggaccgtggccagacccggccattaggagagccttatttagaaacccaaacaatgacttggccatttattaagcgcctgctggatgcctggcaaatgctgtcaagaaggtgacatgaagattccccaatttccagaagaggaaactaaggctgaggagggggagccttgcgggtgtggggagcacagcgtggtgattggggcccaggacccaagaggcccacggaagagtttccagtccctttaatccactgcctcccccctggcagctctgaggatgacgcagatggaggtctttaggagcagattcctggagaatgcggtagccccgccaggatgtcaggaggacatagaacaggccctccctacccttatcctcagccagaccttgggcccagtcccccggcaggccgggcctaattctgtgcctctgactcagcctctggtgcgcagaggccagggggcgcgagcatgaacagttcaggctggccccccgggggccgcgcgctggggctggaaatagctcattttgatcccgctacctcggccaggagcccagacctggcaactgatgcaaccagctgctcctgcagcaagaaagaagttagatgaccgttgggacggactgattggcccaactgatggaggaatagcggttagagagagggcagagcgcgccccccccccaacccgccccactgcccctgcaacagaaagaatggtagttagaccggggtcgggacaggacttctgcagcaagaaggcgcttaaaaagcgggacttttaagcgagggtactttagatcacctcctaaccgcaagcccagcctcagatccttcccattggtgcacggtcttgccaattactgctacactcggcaggttctccaatcaaacacgccctgtcgggcaggcagtcgtcccagccaatcctgaaacacctccctccgggtacttctgtttcctctctttcattggtcgccttggaggccgctcgcctccggcgcgggcacagagaggggcggggctgatagggcgttgctaagcgacggagatgcgcgcggggcctgttgggtgaaggagcagagcggccggaagcgcggagggagccgcgggatggaccgcaggtgaggccgatcgctcttccagggactacaggaggctggggaggaccaacggcgagagcagcacagcctaggacgggctggatacggtctggagtcgctagggctccaccgcactggaactacaattcccaacatgctccacagccgttggcctctccagccgtagccgttagcatcccgggggtcccctaagagtcttatgttcctctctgagtgggccccaaggaattattgcctctaaaggtgtccaagaaaggcttgagatctgaatttcttcattttgaaatggcccccagacacgcctgggcgttgtctttgaactttctcgcggaggcggagcccagtggatcctggggcttgtagtccatctaccctttgccttcgtgtcccccaggaatgtatgggaaatgctcggtgatataatccagccgcggttctttctttctttctttttttttaagacagagtctctcgctctgttggcccagactggagtgcagtggcacaatcttggctactgcaacctctgcccccgggttaaagcaattctcatgcctcagcctcccaggtagctgggactacaggcacc

SEQ ID NO: 67487 - DNA, 533 bp, Homo sapiens
tctcacatagtcaccacttagatttgtagaatacaggttcagctgctgtaacaaagagtcccaaattaattatggctgaaacaagatagaatttattcctccctcacctgcagtccaggcagaagccaccagggatgatgtggcaacccgtagttgaggtgtcagggacacaggttacttctgtcttgttgctgtccgaactctaggccgttgccctttccttcatggtgcaaaatggctttcaaccacatcagctttccaaaatcacatttcataccctgtttgtcaagaacttagtcacgtggtcacaaggctacaagggtacctggtaaatatagtccataggagactggctgtgtgcccagctaaaagttacattcctggctgggcacagtgactcattcctgtaatcccagcactttgggaagccaaagtggcaggatcccttaagcccaggagttcctgaccagcctgggcaacatggcaagaccccgtttctactaaaaatacaaaaattggcagggctgcagtgg

SEQ ID NO: 67488 - DNA, 2043 bp, Homo sapiens
aggaaggaaggaataaaggaaggaaggaaggaagggagggagggagggaggggagagaaggaaaaagaaaagaaggaaggaaggagagagagcaaaagaggaagaggaaggaaggagagagagagaaagaaagaaaaaaagatggagtagggttgaaagagaatgtggagataaaaaggaattaatgattgaatgaacaaactaagaccccattggcctaatcagaacttacacccagccagctcacacccatgcagctgtgttgactgagaacacactgatgtacctccttctaattgataaacagcttctatcccaatccctcctctgagagcctccagcctccaggctcctccctgagaacccagatgaccctgattccatccatttcaaccatgcctgggagctacagctgcacttctgctggctgttccaagcctggaggtggccgtagcattttgaacatctggcgtgcggtgtggccgcatctaagtccaaggcactctgtccccgacagtcccgcttgagatccttacctgcccagagtccatagcttcagccagcctctcggggctcagctccaaggaggctcctggccttctgacccacgaggctagctccttctgaaatggggtggtaggcggggtggtgaggggagcccgatgggcagccgcgccctccccgcacccccgtctttgcactccttacacagagccgagtactggtcagcgccgtcaccttcagctgcatgaggctggcctcagccaggctggggggctccaggaggccccgtgacaggtccacacaccgcagcatagcaccgaggttcccctcataccacgcctcactgcccagccagcaggtgtcagggcccgaacagcaaagccccttcctgcgtcctcccagcctccctgggccctggctccctactcacccactcttggcagcagagtccggctcctcctcagtgggcactgccagcagtggtcggaggctgagggtccgcagctgctgcacgcagcccttcacctcctctgctgtctcaccagccacaaactgcccatagacggatgctcggagaaatgcgcctgagagccgggagcccaggagtcgccgagaccaggcctggagctgggtgacagggagcgagggctcagcgccaggctatgaggagcctccaggctggtcctcaggatcactgctcaccaacagcccgtgagtgacgagtgggggccaggcacacagccggagaaccagcaaggcccgtgtcagctctcctgtgcccttaaggtggaaggccccgccatcaaagctcagggactgccagcccctggaggggggaccagcttgggaacagagcacgtaacaggtccggagcatcctgggtccctggctgcctccacaccagggaaggttctctggaggcagcaagttcaccaactgccccttgcccagaccaggggcagtgactgattaactgggcaaagcctcaggatcacaggctccttgggggcaattaattattaacaaatggggacagagttcagagtaacggaaacgggaggtgaaccccagtaacagcccccaagaatgctcagcacaacagcctgcacttattaggtaaccaccatgtgctggggaaagcaggggctccggagcaaggatccctgggctcaggacaccgggctttgtgatccaggacaggctacttaatcacttttgtggcaattgcttcctcttaaaattggaaacgctgtagtgttattgaatacatttgaaaatacggttctcacgtttgtaatcccaacactttgggaggccaagaccgaggagtttgagactaccctgggcgacatagtgagaccccatctctacaaaaaatacaaaaattaactgtgtgtggtggcacacacctgtggtcctagctactcaggaggccgaggaaggtggatctcttgagcctgggaggtcaagggtgcagtgagctgtgattgtgccactgcactccaccctgggtgacaaagtgagactctgtcgccaaaa

SEQ ID NO: 67489 - DNA, 1781 bp, Homo sapiens
accccacttccgtaaaaaaattccacccccagatatccaagttttgaagtcagcgggttggtggggggccggcgccaggcgtcactccctagactcacatccaggttcccaacatttttttccctagaacctgacccggaaatcaggagtccccagcgcccctcctcgagaagtcaaaggcctcaccccgggccgggagcggtggctcacgcctgtaatcccaacactttgagaggccaaggggggcggatcacctgaggtcaggtggccaacatggtgaaaccccgtctctactaaaaatataaaaattagccgggcgtggtggcaggcggctgtatatcccaggtgaggcaggggaaacacttgaacccgggaggcggaggttgaggttgcagtaagcggagatcgcgctactgcactccagcctgggcgacagagagagactccattaaaaaaaaaaaaaaaaaaaaaaaaaggcccatccatacagtctctttttcaggccccaggaatctggaccctcagttccttcctctctaggacctgggagccccagttcccaaactccttcccacgactcagaaagacagaaccctcacccttccgagcctgggttccggcggaggaagggttaagtggggattgcgcggggcgggggcgggaggaggtggctcggaaacagccccgacgcggcgcgctgacgccacggcgctcacgcaagggaatcttccatcctccccttccccccaagtcctgtgccccaggtgtcctgctccgaggcggggcgcgcggccgatcgtggcgctcgtggaatccccgcgcaaggggaattcctgctcagccccgcacgggtggccatccggaaatcccagggcggggcagaggcagggtcaccgccagcgtagaccctgaggccaggctccggacccttccccaccgagacccacgccgattttaagcaaccacgccccccccccccccccccgcactcagcctagtccctgcttctaggggtaggagtctcggttgccagcaacccctagcacctccaaggacccagagatccagcctcccaagcctcccagcccttgcaccctcggggccctgcgatcctggatccccaggcccctgcacccccaggacccagaagtctgggatcccagccgcccctctgtcacgatccacgatcccctcctcctccaaacacctagggccctcactctcgggataaaggactgacgcttcagctccgtccctcagggcctcgggagtctttcgatcctcagtccctcactctcttagggggccgaacgcgtcctgcccgcgcccattacctcggggattccgtggcgtggattgcgggcccccagggccgcggcctcggcgctgcgccagcctcgctgtttcccccgcggagccgccgccgggtccccgatcttgggtccggtacccgcgagtttttaaactaggggttatggcaccgcccagtcctgggcagggcccgcccacaggcctgggagtccccgggtcgcgctccggcgaacgcagtccctgaatgggcgcggcggacttgggaggcggactactcagtccccccgggaaggagggagctggggtccagatctttgctctgaaggagcctagggcaccgggctccaagaggagggagaaaccggggggcctggatttcttttcttttctttttcttttttttcttttcttttttttttttttttttttttgttgttgtttttgagaaggagtctctgtcgcccaggctg

SEQ ID NO: 67490 - DNA, 892 bp, Homo sapiens
agtagggaaattgtgtgttttttccccccaggatcgaagcgcctttaacaggctccacagctgacaaggacgttgggatgcaagagagtgagaaggcgccagggtggctgcagggcacattcaatagtcggtctagctcttgctcccgcggctgccttctctgcagctctggaggctgcagcttctggtcctggaccgggacttaggtccacacccacgtgctgacgtcgggcaggctcagcggcctcccgcgcctgcgcagcaccgcccttttcgggcgcggcgcccagtccctacaccccacaatcccccgcgccgttccggaggcgcgctaggagtgggtgtggcctctgcctccacattggaacaaggtgaggcagagggtgtcgcgtggtcttctgggaaatgtagttcgtctgccaggccggaaccaccgctcaaccggctcgcgagactatgcaccccacaatgcgccgcgcgcgcagcggctaagcgatgcgttgctgcctccacgtggtggctgagtgatcatgctccggtttgggaatggggcccagaagggtagggttaggggcggggacggtgctggggatgctgagggtcgccctggaaacctctgggaagattttccagagggtaagtcccctgaacctggcccacgaaagggtagtagtaatgaagaaattggaggtggggcccgctatgaggaccgaatgacagagcagcacctgttggctgcatatgataatcaggctactgttacacctaagactcacacagtaggcacttcctaggccacttaccgctccctgcgcttcaggtatcttagcccattcaatcctcccagccaccattcgagatattatcagccctcctttctaggagtgaagct

SEQ ID NO: 67491 - DNA, 926 bp, Homo sapiens
tgtgtgtttcaatctgtctctctgcctctttccattttctcctctctatccatcaatctaagcctgcccatctttttgtctgcctttctgtatctccgttcttctctgtctctctgtctcagtctctctgtatccagggattctctttcccagcagcgccagtgcgactccatgggaggtggggccggggcgcgtctttgagagaaggggcgggtgcctacgcctttaagcgcgggtgcgcgcggagcctgcgcctttaagcgccggtgcgcgcgctgccctgggttgccggcgaggaggccgcgggagcgcctggacccggcccgcccagcccggcccccgcccggcccccgcctcggccccggcgggggaggggtctctgagcgcggcccctcccccctgcgcccccgcctgcgctgcggtgcccccatcccgcgtgtcccagtctgtctgaccgtccctccgctcccaggcctcgccccacccggccctggggctgcccggtcgcccccctccccaccgcagccggtcccctccctcccagtcagcctccgccgcagcccaggaagccagccgggacgccgccgccccggaccccgcgccctaacctccacctcgggggcctgcacccccagattgaatcgggaattccggaaacccgagcctggaaccctgatctgggaccagcaccccgagatccggccgtggaaccccaagatctggagcctgaaccccagtatatggggctggaatctcaacatcggtcactgggacctcaatatttggagccggaaccccacaatttggaacacagaccccaatatttggagcagaaccccaagatttgacatctaaaacctcaagcctggagctgaactctgaattctgggcctgggaccttgaaatctgggactggatttccagta

SEQ ID NO: 67492 - DNA, 515 bp, Homo sapiens
ttttttattttctaaatcaaatcaaacctagttcaagttccttttgccaggtaaacagaaatatccagtttgccacacttgtgggggattctcttctctctcctgttgttgcaaacacagaacctggggtttacacactccaagaggtggctcagtccaacttgttcccccaagctggagagcactcagcacatctgcagtgaccgcatgtggtcagcagtggtggctgctgacctaggtgctgttgacacctcttaccaaagtccaaccttgcatggatggactgcggctgtgggtgagtccctgtcctcacggccaggctgggccaagggtgcagccccaaggctgactgtaaagactggacctccccagggttgaggactgttccttggggacctagtagtacctggatgtcctttccctcccttggggccaacacctcaagaaaaggccacttgatttccatttcagtcctggcaacccactgagctcattctactccctttctcagacat

SEQ ID NO: 67493 - DNA, 2256 bp, Homo sapiens
ccctctgcacgtgcccagggctgggaccccagacacagacctgccccggacgagggaacgcacggagcttcccaagatggtttgaatcagtaactgacggcaaaagcacgcttgtgcccggcgtctctcccagtgccccgtgcccttgggacccaaagtccgaaccggtagccgggcgcggtggctcacgcctggaatcccaacactttgggaggctgagaatcgtttgagcccaggagttcgagccattctgggcaacatagggagacccatctctgcaaataataataataataaataaataaataaataaataaataaataaataaatagcgggcgcggttgcgcgcgtctgtggttccagctactaggggagttgaggtgggaggatcgcttgggcccaggagttcgaggctgcagtgagccaagatcgcgccactgcactccagcctgggcgacagcgagaccccgtcacacacaaaaaaacccctagcttcctcttctcccagaatgcaggagttaggtgaggaccctctgttccctccaacccaagacctaggagtccgaacacataacgccctccaggcggtgccaggatccccagaactgctgtcccctcaagaacacacgtcccctacgtgggaggccgcgaccagcgactccgcccacttctcccagccggctgttacgtaactgcaacgacagccagtcagacgcggcagcgccggatggcgggaggcgggagttggaggccaagggaagcgctgggcggaagtggctgtggctttgccctttggcctttgctggctgtgtggcggctccgcggttcgcaggtcgttcgctgagcgtctctgcttagccgcggtcatgagccggcacagccggctgcagaggcaggttctgagcctgtaccgcgatctgctgcgcgccgggcgtgggaagccgggcgccgaggcgcgagtgcgggcagagttccggcagcatgcgggcctgccgcggtccgacgtgctgcgcatcgagtacctgtaccgccgcgggcggcgccagctgcagctgctacgctcgggccacgccaccgccatgggcgccttcgtacgcccgcgggccccgaccggggagcctggcggcgtgggttgccagcctgacgacggcgacagtccaaggaacccccacgacagcacgggggcaccggagacccgccccgacggacggtgacaggcgaagagccgaactcgctcgatggcgtggtggagccaggaggctcgcctgactgcatggggggactggggaacccgcctaaggtgagaggtcttaagagactagcttgacgaattggggatgtcagagactcctccttggcgacgcagggggcctagagagccccgtgatggacggcaagggaggcccgccttttccgatgcttggagacaggtcggtgctcctcccccatgagggcttggggcggcctgggacgctggcgggctggacagtgtcaagccaagagctacttgcccgaaggtacggggagccaggacgacccccggtggacagggagagcctgagacgcccttctcttgacccctgagaacatacccacttctggctcctcaaggagtctcccctctcctgtatttaactctgagaagtgcagactttttgctgagaacgttttgggaaggtgccctgatgagcggtgagaagcccggaatccccttctggaaaactttcccccattaattgtgacaagccaggaccatgaggaaggggtaggggtctatcaccctggttgatcaactgaagacccccaaaggcccctacttgatggttttgaggggcaacattgactcatttgccccttccctctcggaatgttggacaaagggaataaaattggggatatgtctacttccctgttggtggtcttaaagcttttatatatttcaggatttttgaaacacccccagcccccctgccaccacacacacacgcacacagacacctggaagggaccatctgggaggtgataggtgtggggatctgactccttccggagccctgtagactggcacattgattgaagcggcatagttttctcccctgggcagatctgtggagggggctcatcctggcttaacccccaaagataccccagttggctccctaatggagggcaagtgatttaacatctttgtgtggaagaggaaatggtggagctgagaactggctcggagcccctgaggcagtagtgagggtctc

SEQ ID NO: 67494 - DNA, 722 bp, Homo sapiens
gagtcctggaaggtgggttaatgtgctcagaggcaaccctcagcctgtagggggcagcagtcactggatgagcgccctggcccacctctcatctggtgggacaacatgtgttctgcagggttcctcaggggcacccatggaatggagccccagttgcccacagtggtgtccactccatgagcaccttttttggcttttcccctgccctgtctcttccccactcccgcttcctgggatcacatcccagataaatcatcacccgagtccttggctccaaggatgcttatgtgtcaagcatggaacagtgcccagttctctgctgatcctctgtgtgcatctgctgctctgttttttgtttgtttttgagacagagtctcactctgttgcccaggctggagtgcagtggcgcaatcttggctcactgcaacctccgcttcccaggttcaagcactcctcctgcctcagccgccccccgcccccaaccccgctcgccacgagtagctgggattataggtacctgccaccatacccggctattttgttttgttttgttttgtatttttagtagacacggggtttcaccatgttggccaggctggtctcaaactcttgaagtgatctgcccaccccggcctcccagagtgctgggattatatgtgtgaagcaccgcgcctgggctgctgttctgtattttactctgctaaggcacagggtcaatgttt

SEQ ID NO: 67495 - DNA, 1430 bp, Homo sapiens
tcaacaccaactccttgcacccaatcctgtagggaggggaggacatactgaagtcactaggcctcccgccctaacaccatgatgcagcattccaccccatcacaggccaggcctcacctcagccctcttctgaaacgcacttggtctctaaaatctgagtcttcagcatcttacaagccacacagagagcccctacgttccatgcccggacacaatgagccccaagaataatcccccattactctgtccactaagggcccatccaactacacatatgccttctcaatcctcccacagagaacattctctggccccacacacagggagcctttctcaaaagctctacacatagcccccagggctgcactccagagcccctttaaacaccttgagaccccgcttcagacctgcaactgtgagcccggctatcaacactcagcgacccccgccccccaccgaatcccattctgtgcactcctgtgaccccaatctgagcctcctcagacatgtccaccctcagcctcctcggatccccccatttggacgcccctcggatttcccctcctgagcgccccttcactccagcaccctgagatctttagctctgaggctgactcccaaatcttcttccctccctgaaccattcagatccccgactccgagccttttaggactccaagctctgagcctcctcggactcctactctgggctcccccggatccccactttcagccctattgacatccatctctacccccagcactccccaaaactgaccgtccaccagcgtcccctccaatttccaaattcaacatccccatccccctcccagccatttccgccccacattacagacgcagagtccgcaggccaatgggagctcccagaggcttcaagggcccgccttccacccaatcggcgctctcactcagtattcgcccgcccccttcatgctcgcctaaggataggccgcgcctcctggcctctgagccattggcaggagggcgtgggcggggcatcgtcgtctggcactggccactcagaacttaggaactgaacctggccattggcggagtggaccccgatgggtgggacgggggcggcagccgtgacagccgcgggaagacatgagaggctgctagaaggacttcccgcggccagcgccatcacctgcccacgccgcagggaggtgagactgaaggaagcacttcctttcccgtcttctcccagcaagggaaacccccaatgacccgacacagagaggccatagaaacgtctttattgaagaggacaggagtcatgctgagtttggggacatgcagtgaaggggcagtcgtgagctgtccttggtggtcggggccccaggtccgccctggaccccctgggccttcaggttctccctcgagctgttggtctggcccaggtgctg

SEQ ID NO: 67496 - DNA, 553 bp, Homo sapiens
ctcctagagtgctaggattataagccagaaccactgtgcctagccaactttcttatttttctattagactgaagtcaacttgtagtctccctgatctacctctagtgggtgacatgtccatggatgccatctgtcttgctctatcctggcaacgctgactctctgaacctggtttctgaacctcacagctgccggggattcccagcctgcatatcttccaaattcccctcctacatccaactctggctgcactccatccccttctacccagtacccagagggagctttcaaactacaaatcagacctgccactcctctgctcttaaacaccctccccttgccactcttctcccctgtcccacttagaatataaccaaagtcctcactgtagccttgaaggcccttccagatctggcctatgccaacctctcacctcaacctcgatcattccctgaatgcagctccaggatctttctgttccaagttcaattctgcctcagggcctttgcacttgctgctgtctgcctggaacactctttttccagctctctta

SEQ ID NO: 67497 - DNA, 434 bp, Homo sapiens
cttgtgtctgtaatcccagcactttgggaggctgaggcaggaggatctcctgaaggcagtagtccaagaccatcctgggcaatgtagcaagaccttgtctctacgaaaaaatattttttaaattagctgggtgtggcaatgtgcatctatagttctatctacttaggaggcaatgtgggaggattgcttaagctcaggaatttgaacgctgcagtgagctatgatcacactactgcattccagcctgggtgatggaggaggaggggaaggggaagggggagggagtaagagggggaggaagaggaagagaagaacagtgtgtgtgaggatgtggaaaaactgctggaactctggtacactgctgggaatgtaaaacggtgctgccactgtggaaaacaatatggcagttcctcaaacactgaaaaatagaatta

SEQ ID NO: 67498 - DNA, 1181 bp, Homo sapiens
ggctcgcttcgctcgctatctgtagtcaatcgtctactcctgtttcccacgcctgcacctttgtatgtgcaatggacactgccaggaaggccatctcctcatggtttaaccccacttcctaacaccctcaagcaagaccagaagccccgcacagcagcactaatgctcgggccccacccctctcagggtcccgcctccctcaagccccgccccgcgctgcgctcacttgtagaagctcacagggcggttgtctgcacccaggcggcccgcagtgttggagcagttcggcgccctgcagtacttgggcatggctatccagcccccgctgagttttgccgggtcagcggctgcactttggttctcgcggagcgccgcctaaccccgccccacccgcgctcgccgcctgcctcacgtgacgtccgtggagtctcgtcacgtaccggggagagagctgagagcgcctgcctactaggcgcccctccacagtgccacagtcccgccctcgtcacgtgacgaatgggccatagcgagtactgtgcacctgcgcaaagccggcccttcgtcaccccgactttcatcacgtgttggggggaagggcggcgtcacggcgtttctgagcctgcgccaaccaaatcaactggctagtcaatctcttacggctccaccctacgcctacatccgggcaaccgttggggcgcacatagttcctctaggtggcggcaaaaaccgaggtgaggcggccgtggccttagcctcgtaaaaattaaaacctgtatgtttcagcgaataatgaaaacgcagtctggatgaaagaccccatgacgcttaatcaggcatccagtacactggctgtggccccgccccgccaggcactcgctccgcctcttcgcccccattggttctaagcgccgcccggcatccctgcgattggctaggccgggcccgtcgcgtccaataggcggtggcgccggctttcccgcggctgttcgctgttccagtgggtcgtggcggtggcggcagcggcggttaggggatgtaacggtcgcccgcctccggcgtgacgatggcggccgtagggtccggaggctatgcgcggaacgatgcaggggagaagctgccctctgtcatggcgggagttccggcgcggaggggccagtcctccccgccccccgccccaccaa

SEQ ID NO: 67499 - DNA, 2459 bp, Homo sapiens
tggacccagcagcgccttaccccaaaagaacaggcaagagaacttcaccaataggtaagggcccggcagagttccaagaagcgcagggtcacccacattgatatccccgcccccagaaaggaccaaacaagccccagatacttagaaagccctcgcgccacttacctcggcccgcgcactgtgtgactggaagaacacagcctccttgtggccgcacctgagagggtaggggctcggtcaccggaggcttcacacccttccctcctcccttcgcccagtgaggagacgagcctcactttacctccccagtaccagctgaacgctcacttttggcacgggtggtcctcggtccgcggcaacgtggggtcctgggacacgtcggcgataatctgggtcagttcgctgcagggacgcgggggtgcaaaattacgctcagacccagcctccagagccaacacccccgcccccagctcagggcccgccactcactccacttcgtgcgtgatcttgttgacatagatgcagctgttgtcggcctcctgctggtaatcacagttccggcactacgagagggcgagtgtgggggaaagggggtcacggaaggattccagacaagattgggaggagagggcagggtgatcccggaggatatgacgacaggactctctttggggatgggcaggacatgagagtcaggatcacttgaggtgcagcggagggcgaacagggagtccgatcacagaggcagggggcagggcggggccacgctgggaacaggtggacctgccggggaagaccccggcgctcaccgcgtagagcagaatgcggttctccttgtcttccttggggtacagcatgttgttactgtggggagggggaggtgccaggggttagttctggagccattcctcgcccgccttctaacatcacccgctccctccgcctcaccattcctggcagaagcgaatacccacgaagcccggctcgtaagtcccgtcgggctccatggcgacgcgcagcccgcgcagccctcccagccttccgcgcttgctccgccgcgctacaggtcgcgggaggggccaggcctaggtgcttcgccaaaagagggcggagctgcgcacacgtgctggctccccgccgcctcgggctcggctctctccgcgcagaggtttcatggcttgcttcaatcttttgatatcttagagtaattgcttccaatttttgggcatcgccgcctcagtttacagaatagtatggatctggtgccagagccgggaaaacgatgcgcatcgtaaaccgcaaaacactgagcatccaggacagaagccaaggcgcttggcttggttgaaggccagtgcgcatgcgcgagtttacccttcgcggactgggcgagctcttgccactcctacctccgggcttcagtcttcgccgcctgttctggtcctttcccgggccgctattggaagaaccgtgaactatggaaggcccctctggattggctgggctggcccaagagtaaggagagccctcttcctggcggtggggaagggacggcggcgattggcggacgctcctggcaggagagcgcggattggtcaggcacggagcaggaggcggggctgatagcccagcagcagcagcggcggcggcggctgcggagcgggtgtgaggcggctggaccgcgctgcaggcatccgcagggcgcggcaagatggaggtgacgggggtgtcggcacccacggtgaccgttttcatcagcagctccctcaacaccttccgctccgagaagcgatacagccgcagcctcaccatcgctgagttcaaggtgtggccatgggggcggggtccggaggggcggggcgaagaaattggggggttcccggaagggggaggctgggaggggccggggagtgactgggcgggcccggaggtgatcccaggctgcggaggctggggacccggtcgcggcggggcgggtccggagagaactcgagagtgcagagatgagggccgggtccagcgaaaaatccgacggtccagagggcgggggcaagaggcgaggggctggattgcggccccgtgcgtcctgactggggggtcttttggaggaaaagggacgtggcgatggtcattgatgcaaggggcggggcctccgtggcctccttcttctcaccctgcctcctcctcacagtgtaaactggagttgctggtgggcagccctgcttcctgcatggaactggagctgtatggagttgacgacaagttctacagcaagctggatcaagaggatgcgctcctgggctcctaccctgtagatgacggctgccgcatccacgtgaggactctctatctgggacactcccccaccccacctttcatttggttattcaacagacacttgctgggctttgccctcagtcatacccgagataggtcctgccttcgtggagcctccagtg

SEQ ID NO: 67500 - DNA, 1819 bp, Homo sapiens
ttgcagtgagctgagatcgtgccacttcactccagcctggggacaagagtgagactccgtctcaaaaaaaagaaaaaaagccaggcatggtggcttatgcccataatcccagcactccgggaggccgaggagggcagaccacttgagttcaggagttcaagaccagcctgggcaacatggcaaaaaccctgtctctacaaaaaatacaacaacaacaaaaattagccgggtgtggtggcacgcacctgtagtcccagctacttggaaggctaggtggtaggatcacttgagccttgggaggtagaagctgcagtgagctgtgttcacaccactgcactccagcctgggtgacacagcgagactccatgccgtgacaccagcacgtggcgtgtcacattattaaggattatacagccaacagttactgggctggtttcctttaatcctcacagcaggccctgtccgcaagtctttcaccgtttcccgtcaacactccacctttcctgcccaaagtttggggttgggagggaattcccaggggttcccaggacttgggctcgcctcccagatcccgcaacctttgcgtgcctagcctcggcaatgaccgcccatctgccacgagggggcggcagcgcaccgttcagacgctgcgcccctggtgcattatgggtcgcgtagtctcaaaggtggcataagcatcctggaacgcaaacggcatttcccagaaaactacgcgacaatctgagcctggtcttgcccagagctggaagctgaggtctcgcccctgccggcgttgcgggggattgtgggatgtaggcatttggctccgcgctccgcgaagggcggtgcagcgcaggcgcgggcatccggtacagacagccgagcttaatctgaggcggggaaccagcgtcccgggggaggcgccgaagctgactttctggccgcagtggaagtgaggcgagcgagctcccttagtggctggagccggctgggcctccttcctgtcctcctgctttcctgcatctctacttgtccctttccccgggctcctggtccgctcccaagcctgttcaagcacgaggcgtttccatctaaaaaaagaaaagaaatctcttttgccgggcgagatgtcagagccccgggagcgaaagtgttggtaatgttagacagaatgagttcctcttcaaaaatctaacttccttgtcctttgctctatgaactgtccttcctgcagaaactgcccttaccggggaaactgcccctccccgccgctgcaacccataccccgcctctattagaaataggcaatcggaatcagcttagattgtgaggtccaaccctagccaacgggggttaaaaacccctgctctcctttattaggtgtgcttttggtacaggtctgggcagcacgcttctgcagaagtaaactttgccttgctaagaaacttttctccgagtgctggtctctctctgtggcaccaagaacttatttctaacagtaagaagaatttactgaggacagcgtaggcttgaaaaagaaaagttttactagaaagaatgctgccgggcactcacgcctgtaatcccagcactttgggaggccgaggcaggtggattgcctgagctcaggagttcgagaccaacctgggcaatacagtgaaaccccatctctactaaaatacaaaaaactaactgggcatgccagcatgtgcctgtagtcccagctacttgggaggctgaggcaggagaattgcttgaacccaggaggtggaggttgcagtgagctgacatcatgccactgcattccagcttgggtgac

SEQ ID NO: 67501 - DNA, 874 bp, Homo sapiens
gttgatagcctagagacaggatttaagctgtgcatgtaggggaggcaccccatggcatgagtggtacagagaggaggatagagacctaacacctggggctgccgggaataaggggttgggggccagaactagatgacaatatggttacgattggcagtgagtgccatgagaaagtacaagtcattttgaaagcatataactggaagcctcacctagtctcaggttgggtggagacagggaggtctttctggaagagatgactcctgaggtgacacctgcagcctgagtagctacacaatcaggccagaaaaaaaaaggcagcaggggagttcctggccgagggcatgagggctggcagcaagtgagcctcgggagagggcagagagctggagcagtcagtctggcagggaggggtgtggtgagaagggaatctggattagtcatcaccaaaagatctgtgccaagcccgggttcagatctggttctgccaccctccgtgaccctgcctttcagaatctccattctctctcctgccctgcagacaaggcttgtgtagcagttaccttggcctggccccagcaaggcctcaggaaacatcagctgcaactagttttgtctgttgtgatgttgttatttgacctattatattaattatattattaacgcataagggtagtggttaaggatacaggctagggagagtgactgcttgggtttaacctcagagtcggtttacttatctgtaaaatggggataataaatagcatctatgtcacagggctgttaggagaacaagggaactgatggacgtcaagcacttggaggagtggttgatggttacttgtttttgtatcttttttttttttttgagaca

SEQ ID NO: 67502 - DNA, 2535 bp, Homo sapiens
ctaaaaatacaaaaattagctgggtgtggtggtgcatgcctgtaatcccagctactcgggaggctgaggcaggagaatcgcttgaacctgggaggcagagactgcagtgagctgagatggcgccactgcaccccagcctgggcaacagagcaagacgctgtctcaaaacaaaaaaaaaaaaaaagaaaagaaaagaaaagaaaccaggctatgtaaaaatattattgtaaaaaattaaattaaatcaaaaaaaggccggtagcccatacctgtaatcccagtacctcacagtactttgggaggctgaggcaggaggacggcttgaggcccggagttcaagagcagcctgggcaacatagcgagacctccgtctctattatgtaaaaacaataatattttttaagtaaataaagaaaccaggccgtggccaaaggaatcttcctgtgtctggggccttctttagaggctagcatactgaggacactctttgggccagtccaggaaggaatgattctggtggcccctgactggggcgggggcgtggtaaggttcgcctgggaggcggcgcaggcgctgcctgcggtttgactgccatccgggctgctgcaggcactgggaaaggcaatccagcctcaatcctcgccacagacacgggcgactgtcccccagcgtgtgagtcaaaccatactccaggcctccaggaggtgtttgtcgcgacaacacctgcagagggcccgtgcggagtcccttagtgagcggaccgaaaaccgccaccctggaaggatattggcatgccctagggtgaaaattcacactacgacactcggggggtgggtcccctccgagttctcgtccgcgggtgcctccacccagacctgaggggtgtcgggaagacccccgcctaccgagtcagggcgggattaagacctccggcgctggaaacgcgtagggcggggcccagacctggatccagctagccgggcggtgtggggtgcgcatgcgcaatgtccgcttcggctctaggaccgcgcgggcgacagcagggccgcggtgcagtgtccgacccgagagttgcggcctgagtcaccggccccgccctccggagccggacgctgcgggaggcccgggagcggcagtggaaccgactcccagaactccggacgtgtgcggcggtaagcgcccggcccgtaccccctccgcaccccgcaactccgactttggcggcccccagacccggcgaaaccgtgaagtctcggcctcaggagccccccagatccatggtctcagattcgaaccctcagacctgttcgatctccttttatgccgtcccggggacccttctccaccctctgtctcatgatccaaaatacaggcccataggtttcagagataccctgtgaattcttccttggggtgtcctgaaccgcgatcgtagatctgtgcccccagttccagcggggaaccccattgtccgggaacccagagctcacagccacgatcttagacccgagcccacagagccagaggtgacactggaatcctgccgctgggaatacctaaattctcaagcccacatttgggatttcctaaaccccgccctggggccctttaggccgtggatgtttgctccgcgcccatgacctgccaaggacctctacattcaggctgggctctggatctcacattctagcgcccagacatgtcgggaacgccttacgccaacttggggtccccaccaagagaacccccaccagatctgcaccctccccttcacgcgtgcacccagtccaggctccctcaagccccacgggtgccttttagacctgaggaggttgcaaacctgatcccccatacctgccccacccatccgcggacaacccgccctcgcaaactcagacccccacccggaggcttcagattcctcccaggtccagctgccggaaatgcgtgtttgaagggagggtgtgggctcaggggcgaagcacccactggtccccttttttccccccagcagtgagtcgcagccatgttcctggttaactcgttcttgaagggcggcggcggcggcggcgggggaggcgggggcctgggtgggggcctgggaaatgtgcttggaggcctgatcagcggggccgggggcggcggcggcggcggcggcggcggcggcggtggtggaggcggcggtggcggtggaacggccatgcgcatcctaggcggagtcatcagcgccatcaggtaaggcggagactatcagaggggcggggcctgggaatgggaggagcctcagtgaggcgtggtctgggaggggcgtggtctaaaaatagaataggattaacctggaggctaacctgggtacatgaattaggccggggaggcctggtttgagagttctgctgtaagggggtggaccccagtgaggcggatatcagtcattgggggcggtgcttgatatgggagtagtctgattgtgtgggaccaggacaatgtggtcctgaggggactgatgtggagttttggcgggtggggcttatgggt

SEQ ID NO: 67503 - DNA, 2308 bp, Homo sapiens
caggctggtctcgaactcctgggctcaagtgatcctcccacctcggcctcccaaagggctgatgtgagccaccacacccggccctacatccactcctgagacacaggacacaatcacagacacctctatacctttccagtcacaatatctttccagtcacaatcacacacccgctaagacacacccagtcacacaatctactctccactgtgatacagttactcccgtatagtcacaagccccacacaccaacacccacaaatgcctcatatagtcacagtcacacacccactcaggggacacacgccatcactggtactttacggcacccagtcacaactgaactttcactgtggacatacacacagtcacactcacacaagcaacccacacaagcagtggcaccccactcccgcatacacagcaccacacacatacacacaaacacacacaccaagggatacaggaatacacaagcggcgtcaccacacagtcacaggcacaggcaattgcacacggccacagtgtcacacaaccaaaaccacgcacacaccttggagacatgaatcacaaccgcacacccgcagtggtcacacagtcacaactgtactcacaccccaggaacagggcgaacaggccacatatacaacggggacacacgcagtatcacccccggtcacaaggaccctgcaccccgatactctctatcacacatggttacacaaaaaccaccagacaccctggagacaggcggttacacgtgcacagttgcagacacccacacccagccacacagccacaaagacacattcagaacggcgcatccgcagccagctcccgcctgcgcgcacagattcgaggctccggacacgccccggccccgcccaggactcccagacccctcaccttctgcctcccctggtcgcgtccgggtccttgcggagctaactagctcgccacgacgtcaagaacgacgtaacgtcaggccgctgtgggctctgggaattgtagtccagagctagatcggccacggacagaatggcgttctcttatctctgagtcggggcctggctcgttttgacatttttgcgcccacgagtcttcggagagggcgtcgccactccagaccttccagcaagcttgaagtcatctgacgctaaaggactacttacctcaagagctccatcgtcacagaaggaggcggccaagttcgcggggggaggggaggagacagagagtcgaccagtaaagcctcaagggaaatgtagtccaaggcctgagaagcgacgttgctggtaatagaaggtaattcagtaccagcctgggcctggccgcggtgaccgaggcgggccgcgtcgcggagacttctgggagtgcttcctcgctctccgagtgcgcaagcgcagcgcaccgagtggacattttggtctttgtccgcgggtcagtacggcccctgggtccacgtggcgcgaaagtaggaggtgggatctgggcgtctcgggtcggtcggaccggggaggttaaaggggaggattcctgatctttaggggcgcggcgcgagggcagggagtgggtgtaagagcttctggcctacgtgcggggcggagatgggggcctctgaggcgggtttgagcgagtgtgaccgagtttgtcctcaaagtttgacctgatgtttgggattgttgagtgaatgtgaaactgggtgcgggattgtgtgtgattgtgcctaagagggagatgtaggagaccagcattgaggtataacgtttgagctgcacttcccttgtcgaaagtgctgataattataacggtgccatcttcctggagcgtcttttttacttgaaaattgaaggggtggaaaagctaagtggtgaataattttaaaacgagtttttatataaaagcatttctttttaattggagtggcatgcaaatcaccgtgacttttttttttaattaaacgagagtgtttcgaaggaactttagtttcggggtgcctacttcagactattcaaatccccatctttggggtacttaaatagggctgttaagcaaagccctagactaaacagcattgtacgctttgagaagcaatcccatataacggcgcccaggatgagggagtcaacggttttaggttaggcacagttatcctcattttttgaagaaagcttaattgttgcagtgtttatctatgagtctggactaaatcctaggtgtcttaattccttaatgagtcgaggcgttctcaggttgtatggattttgtgaagtaatggagaatgctactgacgtctccaaagatgcgt

SEQ ID NO: 67504 - DNA, 1519 bp, Homo sapiens
agctacttggcaggctgaagcaggagaatcctgcttgaacccgggaggcggaggtttcagtgagcacatcgtgccactgcactccagcctgggtaacagacccagactccatctcaaaaaatacaaaaaaaaacaaaacaaaacaaacctactggaaaggggtaggaattggaatctaccttcatcaccccatcattcactgggaaggaaggccaaagcaccaggtcagtggacaggacatttcaggggttaaagtctaactagctgaagattaactggaacaagcccgcatagtctgacaaaatcatatctattgactggcagaaagggagaaaattccacaggaagggttggaatagaatggacgagagagacgagaaaagctctttcgtaaacggttgagttccagctgaaagattctaaggaggatctaatgacagctgcaatctggaatggctgctgtttccgaggtgagattaggagaggcagggattaatgagatattgaatgcaatcatgagtgtaatcaagagggtatccccagtaataaaatgaaaacagcaaagcaagtctagaacatcactggtaagaaaactgtaatctctcaaagagggagtcattatgccattttacaactactgcaccacctggggagaaatcatgttttctattaattttgcaactggctttatctgtctcttccttcctagcctgattaatgacagagctgcttcattgttcagtccgagctgattttcattccacagaagaggaaagcaaatgcccccacgcccagaaaaaataaaaattacacttcatggaacaaaacggaaacacaaactcatctggatgttgacttgtctatatgcaacagcaatcatttcctcctctccccgctgccttcctaaagaacagcaggattgggaaaggagacgggaatcttgagaccgcgggcctttcctggagccggccttggctgagcaggacacacccccgctagcgcacttgctccctccgtctactgcgcgcaaaacccgatggaaataacagggagcctggaataaagctgaccctttcccgtatcagagcgaaaggccaggtacacgaagacggggctgggatctgtctccgagttccccgcagtttccatgggagggagctcgggtaaagctgtgcaatctgcagttcttcagactgcgtctttttgtttgggggccttcattcactccggggttcctgtatctaactcggagccattccgggccgctggacctgggcggctctgaagcgagaaggcagaggacgcaacagggcacccggcgcccagtcagcgccacaaactccacagctactgcctcctggctcacactgaggtctgcgccgcccccgcgccacccccgcgcccattgcctcggtgcaagcgaccaactcacctctcggagccgacaccagcagcgaagccggaaagaactgcgagcggaggcctgtgggaaatgtagtccgccgatgggagggactgg

SEQ ID NO: 67505 - DNA, 2113 bp, Homo sapiens
caaatttgtgcagccactcgggtatatattttgacactgtttagtaaagtggaagatatatgaaccggcaattctgctggtaaataaactcaagcatgtgtaccccatgtgaaagaatgtggctgtgttgtttataaaatgaaaagctataaataactaatagggcatcattactagaaaggatgaataattgtggtatacttcagaagggagaatatagcaaagaaattgaattaaccgcgattttatctaatagggatgattcacagaattgtaaaaataaaccaaagacagtatgacaacattcatataaagttttaaaacggggaaaaactggagtataatgcctagagaagtatacgtaagtgataaaacctcacactgtgtgacttaccctgccacacaaacctgatcacactcccaccatggggacattcagctacagacaatccacgcccaaagcaacagggtcgcacacgcagggcctctatcggtcacataagcacaagtgcacgcttaccgaggaggcagtcacagtcacaaccacattgtcacagtcggcgcacacctgtaccgggtcacagtcacgatcacacattaaccacagccacacacacagatagaaacatgcagttactcgcaggtatccccacctgaactctgccgcacacagtcacacagcatatagtcgcacaccactacggggacaaacgcagtaacactcaaccaggcacaagctccccacagccgcacacacaatgccgcacgtggtcctgctccctctcacacacacaccagcagccacagtctccgaggccgtgctgcacacggtgtgagcgttggaaacacactcatcacaagggcagcctgtcacaatcgcgcgatcattcaccacacacctccacacagacgcaagcgcacgctttcaatctcacctccaccgccgcacaaagccgaggcttggcccccggccccgccctctcccgggtttctcacctcaggccttaccagctttcgaagcagcagaaccctccccggcactggggtagttgctggtaaagccctgagggtcccgccagcgcgtgagttggaagctgaattaccgcgagaagtacagtcttgccgaggagacctctgggaagcgtagtcagagacgtatcaaggccggacaagatggttcccgatcgtcagaattcctgtccgcgccttgcgtcagccccgccgaaaggatcgccccccctagtcaaaccgctcgcgccccagaggcctcatggagtcccgcctcaggctcgggccttggcccccaaagaaagccactccgacgtgtttgagatgggcttagttcccggacccgtcctactgcccccaggcgctggacagcctcagaaagaggacaagtctgcatggaaagataatcgcacaactgagccttctgggagatgtagttcggagctgggaaggcggttggaccctccgaaagtcatcttaattgctctcacagataagccggtgctgggctgccggcctgagtactgtgcgcccagagtgcgcaggcgcaaacatcctgggttgctgttttggcctctttgttcgggcgtgaattttgtttattgctccttagtgcagaggggttatgggaccagaggttgtgagactcagaagtggttggggacgcagaaggggtgtagaccaggaacctgcgacctgatggggggaggtcgaagggaaaggaatcgccaaacgtgggacaggtttggagaggcagaaagagaggagtctgaaattgcaaagggcaggtgttattctgacttctgtgtgctttgtgataaatgagtggggcaggaagtaagaggagtttcactttctccttctgcaattatttgtgtacttggactaagtgtatctcatggccagtatttgactgcttttgacctataaaggtattgtatacacagtcatgcatagtttaataataaggatatatgctctccccacggtctccctctccctctctttccacggtctccctctgatgccgagccaaagctggactgtactgctgccctctcggctcactgcaacctccctgcctgattctcctgcctcagcctgc

SEQ ID NO: 67506 - DNA, 2325 bp, Homo sapiens
cagaaactaagtcctgtcttctttgtatcttttactttttctgtatatttcaaaactattaaccctgttacttttttattttattgaaaaatatgttaagaataagtgtgacaagatacttgaatatgttgatatgttaagaataagtgtgacaagatacttgaagataggatacttctatctttgtatacacaagaaaagaatttcccctatatttacaaaaggctggggaaaccctgattaaattaggagtgagattgctgccctcactgacgaactagggagtttcttgacctctgcgctaaaggcaggacaagtagcttccaaattctgtgccgtctgcgctattggaaactacctcttaaagatattccttagttcagggtttctccaagcaactgcaccaaagtttctccaaagtattaagaaaagtcaatgcctactgggtgtacaggcacccagtaacaagtttttccgaaatcttgcctctttaaaaaaataatggaaaggtaatgctgattttgttttctactccacaataggtctgcttttatataaaaaatcacctttaaaattacttatccgctcaattccttagccttttccgtttcctattttccagaaaacgcatctttattattttagaaatgagaaaagtgaggcttagaggttactacctcacaaagccatccgtccatcctcacaaacttggaaccagtttctcactaactctgcaccctcaacaccccctcacactctcggtcacccacccgcgaacccacccgaactgtacccctgcccccagccacacaagctcggatcaccgcacatcatagaaggcgattcctcccctccatactcccagccccgtcgcaggcactgcaaatcctcccctccagcgtccctggcccgtttcagtgtccagaaacccaagtcccacagggccgaaacccaactcaccggcagacaaagacgaccatggcaagtcggagattccgcgcctgcgcactccttccgcgggcagcgctcccagaggtctcctgggctgggccaggccccgactcagaaccggacggaatcgagagatcttggcccgtcctccgtgccactcttttgagggtagactacatttcccagaaggttcagcggtttgagtcagcttttcgcgcgaacttttcctccgccagagcttgtgggactgtctccctggccggggcaggggtgtaaggccttagtcttagtttactctatccctgggattgggtagtggtgtaacatcagcttaaacacgctgtgctgactttatgtaacagccacggtgcgatactaagccaggaaccccaggagactctcagacacggttcgggaatgagggtaatccctttggctgggctcaagccgggcgccatcttgctcatcgcgggcgtggcgctgaactacatttcccagaaggcgccgcgccctcggcccctcccctcgcgactcccgcggctcgggggagagctgcacgcgacccaggtgctggcctctgagcgggtcggctcggagactacaggatcaggaggaggttggaggtgaagcgtctggaatccggtgcggaggttgagactgagtattaagtctgttcaggcggaacgcgccgagaagggcggttgtgaaattgtgtttttgtgaatgtatgtcctagcacagtgtgtgtgtgattgtgattgtgtgtgacaccttgtgtacggatgtggggaggactctgcgggtgtcccgtgagtccctgtgttaggactgttattgtgtgactgtgtaacgctgtgtgagggtgtgggttagctgtgactgtgtgcccgcggtgggtgtgtgattgtaactctgtgaccatatgttcgtttgtgtgcagatatagggagctttgtacttatgtagttgtgactctgtgtccttgtgtgggagtatggagggtgggtgcttgtgactttgtgtacagtggtgggtgtgtgactgtgaagcattgggtgtgcgtggagttgagactgtgtttgtgtgtctttgaccaaatgtcacacatagtcatatgtgagagcagaagacagctcggccccgtgatagtaaaggggatttttctatgacactgagttttgagttggaagccccagtttcctctgatagccctcccatggcgggggaggggaacgcagagtaagctctggccttgtcatttgggccctaggggaggtgtattgtctcccttctcatttctgtcctccaagagaggttccccagaggagaggaaataacggttgtgatatctaaaagccatgtttaaggtgcctt

SEQ ID NO: 67507 - DNA, 2375 bp, Homo sapiens
catttggaaaggcaatggaggacaaggggacccatctctacggtcctgttgttaattgggaagagaaaaccaagggaccaggtaaatgaacaaaaaaaaaaactaaccttgagttggccattagtaccaatgctgtcttccacttcagggggccttcacttgcagaactacataaccaagagggagaaaggactcatgacatcctggactggttaaataagaacacagtgttcaccaccagaaaagcccatcacacacaacaaacacacccagatcgaagagggaaactagaatactgtcgactcctccccacatccgagaaaaaggtacgaccaatgcctagcagtttctagggaacacagctcaggaaatactgtagttctttaatgtataaatggcctccaaactcatgcaaggggagttatcccaggaatgaatactacacctatgccctccccttcacgtcttcccaggaaacttcatttatctatcttatctatctatctatctatctatctattatctatcatttatctatcttctatatatcatctatgtaatctatctatatgcgtgtgtgtgtgtgtataagacctcacgaagagattccatcacagacatcacagagtcggaaaaatgacgctttacccaaaacaaactcctacaggctcacggaaaaaaacgaacaaacaaacaaacaaaaaaaaacaaaaaaacacttctaccccgttcacacttatagttggtcacaacagtgctgtcacacgatcacgtcaccgtagaccagggtcacacgatagaccccgcccctactcaccgtcctgagtccgatcaaacagcacccacggcacacactagggtctccgtctctcacacacacacaccacaatgacgtcgtaaacaatagcactaaccaccatcgtccgcagctcccgcgtacagaggcctcaggctcccggctccacgtggaccgacctcgcccggcagcgcggggccacctcaccgcgagctcctcccgcagcccggcccgggtcacctcgactcgccaggcttaactcaataaccacaacaccggaaaaggaagcaaaggtcgaagttcatccgcggccctgaggcctgtgggaaacgtagtccaacaacgaaagagccctgaagctcaagcggagcccgctggccgcaggggccgcaccacgccccagaccctggagtttccgggtgcgcagacccttgccatcagcagaggctgccgctgcgcgtcccctaggcgcggaagaggcggctggtggtccctgacggcaaggtgaagtcgaggcagtaatcgggaacccaggttgggaggacagaatggggaacaggaagctggggcgagggtggtcttgggggaggtggggggccgcggaattctaggtggcccctgcctcacctctggaaagaaccggaagcccgggccggggagggtgaagggagtcgcggacccggctgctcagccgaggaggaaacccggaccccaggctgagggaggccgaagaaggaactggagggccgggctgggaaggcctgaagcgggtacagcctttaggctggggagggtcgaggggagaactcggagcctgagtcgggcgaggttttgctccactctggcttctaagtgtgggggcctcaggatgtgacccgtggtcgtaaacctgagggtgacttggagtttttgtccgttttgcaccatgagaaaggccccagatggaatctggcaggtagcggcggttcagtgtgtgtgtgtctgccttagggcgtgttttacactgttgacgaaaagactcagactctaaagtatttgaagagacttattctgagctaaatatgagtgaccaatggccggtggcccagccctcaggagatcttgagaacctgtgcccagggtggacgggatatatgtggttttataccttttagggaaacatgagacaccaatcaaatacatgtaaaatgtacattgattccctccggaaaggcgggacagctggaaggtggctggccttccaggtcataggtagattcaaagattatttgattggcaatgggttgaaagagttattgacgtaagacttaggaatgtctccaggtagcacgcttcacagagaatagattgtaaatgtttcttttcagacttggggtcttttctatcagtaattccaaaatggaggagggtataatgaagcatgtccgacccgcccacccccgcctttccatcatggctttactagtttttcaggttaggaatgccctggccaagaggaggggtccattcaagatggtctgggtgtgcttaggattttatttttggtttacaacaccagcaccaccggagtttgctggtg

SEQ ID NO: 67508 - DNA, 806 bp, Homo sapiens
ctcgcatccagacccgggtcacctcaactcaccacatggaaaacgaacaccaggtcaacggaaaagggagccggggtcctggcagaagcgtagtgccagccgcaatagggcggccgtgggtgcaaacggaggggagcgccggcagctagcaccgcgcggcgactaacgggccgccccggagactcctgggagctcaggcccacgcgcgagtgcgcaggcgcagacgactcaccctgggccgggggtgaggcttggtgggtgccaggggtgctgaggaggccaaggagggcactgggagctccgttccgggagagctgtctaaggacgcggaaccgggtggggaggccagggaggtaaccaagagtccgagccgggcctggaaattctgaggaggaaaccgggaccgcggtatccagacgctccgatctgtacgagccgggcctcgggcgtggtccatgggcgtgaccttgagggtgacccggagcgagctccgcgaagggggattttgcccgttctgatcccgcggaagcgccatcgctggcggcgggtccccgcgcggagcgggcgctgtgtgttcgcgcgcgcgggcgcgcgctgaataggggtggcctcctgcgcccaacctgctgcattttaggtgcttgcctctctttgggatgttgtggccgattgtgtgtgaaaagtgaacggagtagtgttgctgcgcgaggtttcctctgcgtgtgtctatttttagattaggtgtgagtcgcatttgagactgcctttgagtgtggagaattgcaagtgatttgtaggtgtggttg

SEQ ID NO: 67509 - DNA, 1279 bp, Homo sapiens
aatgagatttacacaaatagccattcacaatcatggtcacagtcacctacaaaccccatttacacaaatgatcaggcacacaatcacactgtcactaaagcacacccacgcaccaggtcgctgtcccaacagtaacacacagcccaaagagaaaccctacttcctcacgcattcaaaacacacccacctaagggctgatcccgcactcagaggcctaaaactatagacattcccttccgcggcactggtgagccaggatttcttaccttcagcattctcagggaaggctctggtccaagctctgattcggattccaagcgaagccacacgcccagctcttccttctccaccggcccgggacatccttacctgcctctacccggagaccattcctgcgaggctcctaccggaagtagctgtggacagcagtgtcctctgggaaatgcagtccgaggggagagcgcctggggtggagcgggtgtgttccgccgggctccgggatgcacttgcgcagtttcacccgaggctggagtgacgccaacctgttaatgttcgttttcggattctggacttcgggttccgctgaggacggatttcggaataggcacagtggctgccccgaacccctcaaggcggcctccgcgggctgtggctgaagataattttcggcgggcgcggactaacccggcttccctttgtggagttgtggtgagaaaggtgttttgttgtgcgcgtgtccgaaggtgactccggaggagaaggtggatatgaactgacggtgagggtgtagcgcgtgagatttgtatgtgaaacgatttaaaaaaaaattttttttttggccgggcgcggtggctcacgccaaggcgggcggatcaccgagaccagcctgaccaacatggagaaaccccgtctctactaaaaatacaaaattagccgggcgtgatggcgcatgcctgtaatcccagctactcgggaggctgaggcaggagaatcgcttgaacccgggaggcagaggttgcggtgagccgaggtcgcgccattgcactccagcctgggcgacagagcaactccttctcaaacaaacaaacaaaactgtatgtcatatatttgactccatttatttatttatttagagacagagtcttcttgccctgttgcccgggcaagaaaaaacaaacaacaacaacaacaaaaaactgtacgtcatatatttcactcaactttttttttttctttttttttttttgagacggagtctcgctgtcgcccaggctggagt

SEQ ID NO: 67510 - DNA, 1839 bp, Homo sapiens
ctttctcaaaattcacgttaagtctcctgcggagacagctctgggaatgatgtggatcacatggaacctgacctctgagagttcccaagggagagcctctgaggaaggaatcctactcctaggttctccccacgacgtcttcccagaactctgcttaagggacacttacaactcgaaaagcctcgttccgaaaacaggtctgtcctttttctgtttgcagattttattccaccactcgattatcccttccctttttgatggccatttcactgcagctggggtctatacagctataaagcgggagaaaaaaggaagctgggaactcagagatgcagagcccaagaaacaatcgagtctaaaactgccgcttaggtgggcactccgccaggatcccctgtgtcaaacaccaggctgagaactggggacaggtgtgccctgagaagacaacgcgggccatgcttcattgcaagatgactctgcttaacataggcatggatcatagtcctcacaggcacattggggagatcttcgacagacccctcagtcccaacattaaacacagcactgcagaaatgaagctttacccgttacacacacaacaccacagacctaaaaggctcttccatcacacggccacagcagcactgtcatgatggaaggtctcaaaccctacagtgtcacacacccgacagccgaccacggccacccaaaggtcccgcatccgagcagggacaggaacacaatcacgcacctgtcgcagcctcctcgccgcgcacaccgccgccttgtcctggcatcaaacacacacgcacaggtgcatacacaggcccgagctacggccctgcacaccctgtctgcgtcccgggagctcggggcttcctcaccgtgagcgccgccctcatcccagccacgcactatgagaatttggaaggggaaccagagatcaaagttcgaaaaccgcccgggcgcctgtgggaaatgtagtccaaggccggaaacgcccggatgtggagaaggcgcgcgtagccggtggacagcaggaacgcgccgcggagacacctgggaggcatcgtccgcgtgggagtgcgcatgcgcagacgcccggccggcaaccgaaggtgaggctggtgggtcccgcgggcgcggagaaggcgggtgacggtgtgacccgtaaggaaggctgaggagggaggcgggagcctgggctggggaaagcaagaagggaagaggagcaacctgggacgaggagttggctggaggaaagtgcgagtccgggcctcagagaaggctgggagggaagcaggaaccagagcgcgggcccgggagcacctgaagaagggaaccggttgcccgaggcggggggtgagctccccagtggcaggaatttcgtctgattttcgtcccctggctcctggagcacggcctggcacacaacaggcgctccgtgtgtgtgtgtgtggcttttcgtacctgtcctgtgtgttgtggtaggggaatgtgttattctgtgtgacgttgtggaaccggttgtttatgaaagtgatagggtccctgcgtgtcttaagttttaatttaaattagatgcgagtcgatttgtgtttgagcctgtgtccgactctggagaggcgacagtgagggcattgtgagtgaaaggttgttactttttgtagaagttctgtgaaattgtgcacgacgtgggggcctatgggattatgactatgtagtgggtgatacagctatgaatatgcctaattttaaaagtatttggtgtacacgacctatgatgactgtgaatgtggcacactgtgtgacttaggtggagtgcttgagaaaccgagt

SEQ ID NO: 67511 - DNA, 602 bp, Homo sapiens
actccgggcgcgcacagtcacaagcgcccacctgatcacccagagtcagcaccacacagccacagtcacagaccacggagacccacggcagccatcgcgatcacacacgcaaactcctctcctcagccctccacacacaaaaggaccggagccggattcctcaccctcagcattctctggttccgctcggggccagcctagccaagttcctcaggactccaaggcgcggcggcagctaaatcggcacagcaaacggtcccgccacctggctaagaggaagccaaaatctcgcgagacgtggcgtcggcctgcgggatcctctgggaaatgtagtccagagcccgactgcgggcttccctatgcctctcatttccaagcctggcttgtttccttttaccgctcctctccaacgaggatcgcagagccctcatgccgagcggctcgctatggggccggctcgcccgctagagtggtcaggcctgattatccctggcagctctgttatctggggtaagacacaggaaaacgtgcttccggttctcggcggaagtagccccgaacggtagaaccgatgggaaatgtagtccagggcagaaaagcgg

SEQ ID NO: 67512 - DNA, 1851 bp, Homo sapiens
gctacagcctcttaccagtgggtctgaaaatggaacagatggccggcctccttgttgttcactaccttcagacctttcttcctccctccacaaactctagttttgaatttcctgccatgagattgtatataactcaccacatctcacttttgttgacctctaccaaacacagggtattttccccctatatctgaaatcttcagctcatggtttactctctgcagcgcgattacccttttctattttttttaattcttgcatttttaactacacccacacagatgagccttgtttacttacccttgcctggacttttcccccctctcgtggctcatttccaacaacatgttgatgggtggttgttccccagccgtcttccccagccctctaccccaacctgctgctccatttctctgctctaatttacggagaaactcttgaactatgttgtctacactgtgtcccattcttctcccctccttctaggttgcccccactccaatccagctacgggccagcacaaaaactgctccccacacattcacgaaggactatgcctgtcactcaacgcaaagctcaattctttgtttttggccccatagcggctgctatcaccacctttacgaacgtggtcacgcacaacgcgacgcagtcataatcacgtacatacagtcacatttaaatagtccattagggtcacacacagcgcctgtcaacgtcgtgtgcgcgtgcgcgcacacacacacacacacacacatacacacacacacacacaagctcccgtcgcggccccagctcctgcatcaatttcactctcgcatccactgctcccatcgcgatcgctcgcccccacgctccctcgccggcaaagccaccaactccaaagacattagcacctcactcccctcagccccggcctcgggccctccggagtcattcggcttctgtgtctcggaatcactcacccggccctgcggtcccttgatggtggaaggttccgcgatctttctattaaccctaaagggacagagggctgacaggaagttgcccggggaacggtgcactctgggaaatgtagtccggagcctgggccgtctttaactgccccggacaccgcggtcaccattaacggaccctgcatttgagccccatcccctcgctgggcaaagaccatcgcccacacaccgctcacatctgctgccgagagcttccagaattccaggccgcgtttaggaagcttcagcggaggcatgcaggctgccctacctctgcaaaaggctcccagccctgggaacaggacagtaagcccaggccatcttaggctggaagtaaccttggtcccgacggccctgggaaatgtagtccagagcctggaacactgcagaaatgccccggggggatggtgcgatggttttcagtaggagctcgctgcgtgggcctctgacctatgtggcatggcgggaaagtcctacaagactgtgccaagcgagtggcgagtctgtcccgtctctgcccgagcctcggcccggctgggtggacacctcttgtcccacaagtaccagcctgggatagaacgaaggggaaacgatccatgggacacagctacatgcccagccctataggggtaccctgtctgggaatccatgagaactcttcctaataccttattcccatcctccaatcgcccttaaagtgtttggtttcaattaatgtttatagtaacattagtactgttttgtaaattccattcatgccattctttttgctgaagtacacacttgccagttttcatttgcttctcttttagatgtacatcatttcaatctacatctaaactttctgacagaggag

SEQ ID NO: 67513 - DNA, 1891 bp, Homo sapiens
ccatatgcatctattatgacgggtttcttttttaaactacttggagtactcataactgattttgtactctagttcagaagaaatgtctgaatgttaaatgtttacataaaaaatgctattttattatatcagtaatggagcttcccccctttaaaactgctgcaccaggaagatacaaccttgttatcacaatttaaagagaaaatgagacttggaggttcagattcctccacagtcatagtatcagctacccacgcagtgacccacattcaggtgattacacacactcatacacagatccatacacgatcttgccccccccacctccacacactcaatatgacctccccacgcccaaagctgcacacatcttgacctcacttctctcacacacacaccaatctgacccgcacgcggtttctttcactcaactacccagacacccctcatcccaccagcacaagcaggcccaccgcggtctcacacacactcgagccttcctttgcccagtctcacatgcatgactgggatcgcggatttgtccccttccgactccccatgctggttcggtcccagacgctcaggtgccacattggggtgcgctctcccggctcctccacacgctacgcagctgcccgcctcaagagcgtctgcgtgcttccagcgttaagtggaattccaagcagcctccggggcacagttagtctggtcactgcggccagactgccgcctcaggacccagagaacgcagcacactttagttgggcccatctatccccggcgaggcttggactacgtttcccaggagaccctgcggtccagtatgtctcccgaggaggggcggaagcccgggagccgccctctgaggctgggcggggtgaaagaaagcttgccccagaggacttaaacaggcaagaaggacttggttaaagactattgcaatagtcaacttccaatacaacagcagctggagatttatagctaacgggctgggtgaaggagttaaaggatgctaaattactaagaggaagttaagtatcaagagtggggggattgttactaaactggcttagctggattcttgctgaagtgctgttcgcaggctatggaggaggcctggccaagcaaaaagggctcagaggagcctgactaaagcttggtctagggactccttgtcaggtgagactcccggaaggctccgatgggcagctcacctcaaagagatagttttgttggtgccagagtccgcgccaggggaatcgggatggctgggctgtagctttcggcaacctgtcgctttctggactacacttcccagaagcctctaggcccagggcactctcccgcgataactagattgtctcttgaggagtgggcgggatcttcccgcggatttgggcaagcggccttggggctttgtgagatagctagggtcgacttgtgtggattctagtagaacggagctgaccctatccgaacaggcgtaagtgaggcggctcggagcctggcgcgacaggaactcccgacctgtgtgggctgcgtggggaacaggctaaggagcgattgtgaggagtgtgtacggttgtgactgggggcgtgtgtctgtgcgaccgtgtatggaactgtgagggcggggaggaggactttttgtttatgtttgtgcgggtgtgagtagagtttaattgtgaccgggttgggcactgtgtttgcgagtgtgaggttcctggaccgcggttgtgactgtatgtccccttggggtgtgtgtgtgtgtgtttactaccatttgccgaactgtgtgtagtatgccttaattttgaggtttgtggctgcttccgtgtgtgtgtgtgcgcgcgcgttggtgatattgttgatggagggtgcgtgtgaattt

SEQ ID NO: 67514 - DNA, 1785 bp, Homo sapiens
tatcttttccagattattacattactatttaaggaagaaataacttggccatagtattttcactgtcacacacgatcacacacagctcatttgctcttggcacccttacagacactgaaatacaagcacaaagaaagcacgtttatataacacagatcaccagttactcaattacggccacacacaaaaaagcagatatacatacagatacccttcataagcaaaccacaatagagatctgtgtaaaatcgtcttactctgttagacgattctacacagttataaaatcccattactacgcagcttaaagtacaaatcacctcacaccccacagcaggaagaatcacacacaggcagaaacacaaccatacacacccggccacggaaagactctcagtccacctggcatctcccattgtcacacacaccccaagggcctgggagggcacacacagggtcctctgcaaatccgaggttccggcgggtccccgcaccggccccagctcctcccccgcacctgcctggccggcgggtcccaccctctctcctgccaggggtagaccctgggaccactcagctcgctctcgcaggccctgagcgtctgacgcctgcgcactgagcgcgggcgggcgggcactcccagaaacctccggggcgctgcaggcgggacaagcaggttccacaggccgagcccacgagcccctcgaggggtgagcggcccgggcctcctggcgttctggccggctagccaagcgctggactacatttcccagaggcacggcgtccggagcgctggactacatttcccagaggcaccgctcccggagcgtagcttcatttccgttagtttgcgagatttggaggcctcgcgtggggagagggccgcgtctgtggaggagcttggctccgcacctgctgggctggcgaacccgaaattgggcttggaacccgggagccagatcttggaccctgaactgcacctctgtcaaggtaggagtgtccgggatgccggagcggacacgcgcggagaaagcgtcgctggggttactcgtgtggccgtgtctccggttttgtgtgcaggctacagcctgcctggtattggcgactgcctgtgcatacacgactggacgtgtgtggctgtggttttgtgtatgagcatttgtatgagtgtgagttgtgactctgagggtgtttgtgactgtttgcttacctggctgggatatacttatgtgactgtgattttatgtgtgccgcgtgtataattggggtttgcctgtgactatgaagtgtgtgacagttgtgacaagagtgtttggatgttcttgtgtcactttgaggttgtgtgtaaacctgatatcgtgggatggatttgccagtaaatttaaggtgtgtgacagtgttgctgtgacacggtgtttattaccgcgtgtttccctgatttcgtactgggttgggtgactgtctgattgtgtgtgactgtggggttgtgtgtgctgttttcatgactgtgtaaagagactaaaattgcagctttgaaagggtgtttttggcggtatgtgtctctgacaaggtgcttggatgtaattatatgccttgtacttaatgggattttgtttgagacaaggtggtctaacaatgtagcataattgggtgattgtgcctctagctgtgtaactgtggaaatgtgattatgtgtgactttatgtggccatttgtatattctgtgaccttatgggggtttagtccagtacagaagtaaatttctttttggtatttctggggttc

SEQ ID NO: 67515 - DNA, 1042 bp, Homo sapiens
gactgaaaattaaaaagctgaactttcaactcaggttagaaagcaagctgattacagtcctcaccgatcaccataactgaccctacaggctctgtcactgaccacagactcccatcactgacccccaaacctcaatcactcatcccaaagagctccatcaatgacctgagaaatccgtcacaatcaacaacggacgccacagaaccccatcaccgaagcctgaaaccgcaatcactaactccacaggcaacctcgacaccccctattactggctccacagaaaccccaatcgtgatcaaccaaaatcacctcaaagatttatcggtattggaatatgaaaatactcctgacaccagcggcaaaaaagccttggaagaccacttccacttccggtccgacttctagcacctcccctttgtaggctgttgatatggcgcatgctctgaataaacttggaagccagtttcctcgaacagtcaacagggcgcagacacagcgcacaggttccgtaatgtggcgctgtccggcagagaacatggccgcgcccttatggtgtttattcgcgtgggccgccattttgaaagcatatccattccgtagagcagaggaattggccgctggcagggtttcctagagcgaggcaggtatagttacataggatgctggagtgtgacccttgtctgactaggcttctatttcggaggagaaagttactggaaatgtgggtctggtgctgtatgttatatttagaaaagctaagttacctttctgaatacaggacactgaggataataattaccagggaatagaggagccagggaaaaatcaccaagtgaaggggatcctgggagaaaccacaggcagatgataggaggaatcaggatagtacagtccattttttacagacgccattcagggaaaaggtggaaaggtcactaggggagtcatctcttgagtgaaaccaccctgaaagtctgagagacatctgaatgagtagtaggctgcaggaagagtggtacaacttttaatgggagaaaccgcc

SEQ ID NO: 67516 - DNA, 1594 bp, Homo sapiens
aacattagctcgtttatggtgtaccattcagtcacttttagtgtattcagagttgtgcaaacatcattatctaattcaagaagctttgcattaccccaaaaatgaaccctttagctattaccaatcactcacagttccccctaatcctgctagtcctaaaaaactctaacttactccttttccgtagatttgactattttaaatatttcctataaatgcagtcatacagtatgtggcttatccacggatgaaggcaaaaatgacgatttagtcagtctagcattctcagagagcgttataacgcctagtacagtccggggtcctgggtgcgttctgcactgagtcggcttggggcaggaagtcatttaagcgacctccttccacttgccccagcgcctcaccccttcctgctctagactacagttcccaaaaatccttgcggctctagtcaacatctggcccgaagctggcgaccttttcctgtttctcagggaactccctggggttggccggtaccatggaggaagattgtcttcagcgtgcagggccagcgtcctacggcagtttcactctgagcctgtgtctggatcacggagacgcggggtagcggttcggagtgcggagcagggatgtccccgagctgtgcagctgcaagaacccgaaaaaacaggcgccatcttctcggcgcggtcctactccggactgtatttcccagaggcccccgcgagtccagggcagccccttcatttgcctgctggaccctccgcctcaagggtaggggaagtgcgcggtgagcggcctgggtcttgcaggctcggctggggcccgcaggtacgtgcatgggagtttgaagggactgaccaggctggtctggagtgttgggcatgtatgagtgtgtcgggcatgtatgagttggtcgggctgatagagggggtggtggggaggcgggcgcgaggcgtgggcttccgtgtgtgagtgtgaccttatgtgactgtgcctctctgtgtgcgcgggtgtgattgtatatcctcgttgtagttgtgtaattgtaacaatgtaaggctgtatgtgtaggtatgactgtgtcccgtgttgggactgtgattgtgtgtggctgtgtaactttgcgtgacatttgtggagggtgtttgtgtggagagaatctgatgaggctgtgactgtgtgttagtctgaggggtgtgtgtaattgtgtttgtatgactgttagcagcacttaagtgtactggatgccttactgagtaaatctactacccagaaataacccagtaacgtgagaatgtgagagtgtgaccatgtaactttatgtagcactgtgtctgcggttggaaagtgcgtgtaatcgtgccggggtgatatgtgtgtcctagtggtcattgtgttattttgaatgtgtgattgtgtgtagtgctcaataggggtcctggggaggggggaactgtaactttgtgtggctcagtagtgcgtgtggtattgtgactatctgtagcactctggttctgaatggtgctatgtttgaggggtctgtaaatatgctagtgtaacttatcctcaaggtagatgtgggacaatgatt

SEQ ID NO: 67517 - DNA, 1128 bp, Homo sapiens
gttgggattacaagcttgagccaccgcgcctggcactagcctgttttttgataacaagactggcggtgcacaaagttgggtctctgtgttcaccgggaggtgggcattggccaggtgggacggtctccagcgcctggtgcaaatctccaccaaagtgcaggaaacagcatcaactattactgcaaagttttggtttggcgcagcgggtagacgttccagcgctgaaatgcgcaagaaagtttttgctgcgcatgtaggcgggtcaggcccaagcgcttcttattggctaatgtggagcgaacctgcacatccattgactgaaagctccgtctatttgaggctaaccgagagcgtcccttccttttgtgttgcctggaaacagactgtccgcctactaacatctgatcgcgtttcccattggtcgccgtttccggaagcccgccctcccgtttccggaagcccggcacaggctgggtctgcagatggcgtccgagtgcacagtggccagtgtgattccgcagtcttgggctgttcggccaagcgcccaccggacgtgggacgctggagggtcagcagcgtggagtcctggccttcagcgtccgcggctgggaaatcggccatcgccacggcgggaactaggactggctgcgtcccggcccttccccatccgtccaccggactcgtgggcgcccgcactgactgtgatgtagtttcctgacctctgacacgtattgtctcaagattaaaggtaaaaacgggactttttcagcccactcgggtaaaatgcccttttatttctaggcaggtgttttgttgcagaacgcctcgaagggagggagtgatcagtaggttgaagtttattaaataaaatacattactagtttatattatgtttataataaagcaccccaacctttaaaaaaaatctcactttttgccagttgtattatttagtggactgtctctgataaggacagccagttaaaatggcattttgttgttgttgctaatcaaaccaatttttagttttggtggttgtcctaacagcagcaacttctcaggctttatgaaatcatatttgttttctttttttttttttttgagacagagtctcgctctgtcgcccag

SEQ ID NO: 67518 - DNA, 1024 bp, Homo sapiens
tgggcatcttaagagtgggttcgtaaacttggttgtgtgcgctgtgcagatgtcagtcaccctgtgtggtgggcaaagccgacttctccgcctctgtagctccgaaactacaatccccagaggcctctgcggtcacttccgctcccctccctacccttcagtgtgtagcgttgacgtcagaaacacttccggtcggtggcccaggcgcgttaagctggttgggacccgggaaggcctccctcttaaggtctttcccacacctctgcaccttgttacctgactttcggcttcaggatccgcagcgtgcacccgcgttccgtgagtgccctataggcagtcagcatgcccctctgcgtgtccctgtgttacggggacgccggctgggagccgcagagctatctcagaactagggcgctctcctttgggcacctccaggccattttcctttcattcgagcccacagggttagagataaaccctcactccgttgcttggggacaagggcttcactccctgtcccgagcttgcggctgagcttgagggtggctgggtcatcctggccccccactggatgggaattggctgctctggtgatttctgtgacatcccagaccccaactgtggggctctggagcggactgcgcttcacttcgtggggagggtgtttccacctaggccactcttatttctcttcacatccccagatctgtcttctgagactttgcccttctccaggaagagcactcaggagaccaggaaaatggccacagggctcctgagagccaaaaaagaggtgagaattaactgtaattctatcttggctgtcaacagaatgggtcccattaccttttcttgtcctggaggctgccttgttggtattgggcaaagtcattcctagccctagtcattcctagtccatagaacaaggaggattttgatatagtcttgtagagcgtccgattctgtcgctgttcagggcgccacttgtaacctgcacggacctggtggactgaacaaaaggaat

SEQ ID NO: 67519 - DNA, 996 bp, Homo sapiens
ggagatgggggtgaaggaacagtaagaccaggagacagtcagatacacatcggatcagtggtatcctcacagtaacagaaacggtcacccccaatgtcagccacagtctctttcatccacaatcactttcacattcagctacccacaatcacgggacgtgatttaaaatacagaagctccctgcactgacaaaatccgccgctcctttcgtcggcaagcataaaggtgtgcagcaacagtcacacacgaaccaccacacccaagcattcaaccagtcagccccgcgcgcagcctggccgctttccccaacacagcagctcaaggtcactggagagcctacgaccgcacacagccctctccggtacctgcccccgtggcgcaggcgcgcagtggagggggccgcggggttctctgggagatgtagttcaacgatgacggccgtggcgcaaagcgttctggggctcgtggttcgcggggtccatggggaacgcggtgtcgctggttcagatctcgcagagctcagagtcctgcatgcctcagtcctcgcctcgctcctcctcgcggaggattctgggaggtgacgtcgcgggtctcggtcgcggggcccgtttgcagagcccgcggcgccgggaggtgagtggggccgggccccgggcgggagcgggaagtcaagggcgggctccgggtggcccggccgcgccagggatgggaacccggcaggagtcgctggggaggccgtgtgtgtttcactgtattaccaactatgtgacaggctgcgggtgtgacagaatgtgatcttgtgtcactgtgtgtgtgtgtttgtgcgcgtgcgcccgcttgtgtgtgactgtaaccatctgtgtctgggggtgaaactgtgaatatgtgtgtttgtgtgtgactgtctctgcaggtgtagctgtgtatgtgtttatgagagactggggtgtgacattgtgtgtttgtgtaaatgcatgtgtgtggttatgtgaccac

SEQ ID NO: 67520 - DNA, 1179 bp, Homo sapiens
aacaacgtatttccaatgaccaaagctaaagacatgcagcgctggcacaaacgccaagtctcacacatctacacccacaagcacaccctaccttgtatccacagtttttcattcattcaagatcccactgtcatgcacgtttgcacgcaggttcatactgaaagataaaagggaaagcgcctccacgaaatccgcttacggacacgatcccggggccacactcagccagacgaatgtctggcaaatgacagtcacttcacgccagactctcacagtccttcacacgccactcccactgcctcagggaaccacaagcacaggcatcgccccgcccggcgtcctcctccaaagattggggcaccaggaccgcgggcccccactcccacccagcacaaagagtccggcgctcagagctagcggtttcccgaggactcaccaccaagcccgcggacacaggccccgattccacacttaacgctgccaaagtggcagagccggcgcgggctgggacagaggcggcactgaggccggcgctgtcggtggctgagagcgccacaagtctcggtccgttacaccaggggcgacgcttcccagaggcccccgcggctcacccgggcgggactggcttcactgtttgcgcgtcctgagaagcagaccacggtgttccagggctcacagctccgcgcaggggagctcagcctaggttttgcacgagcggcctcccgcgagcccagctctgagagattgggagcgcaacttggtgctgagaagaatcgaatcgttccgctgcttcctgcgccgaactacatttcccagaggccttcgcggccctacttccccgaccccacctgcaaaaaggcacttccttcttacagtcggctggagctgcaggttcgcaaggtccgtgaaggaagcccggctcagtgtgtttagttccgtctttttgggtctctacctgaggctagaatacagcggggtgaaggtggtgagagctccagggccagtgaaggccgggtcagctggagccttaaggtcctgacagcggctagaagagggaggagtgacgtagtgtgactgtatgtgtgaaacttcggccatggaatttggagtggggtttccagggcgagagaccctgtccagtgacatctgaggtcgtgcgaatatgcgaccttttgtgtg

SEQ ID NO: 67521 - DNA, 1117 bp, Homo sapiens
tctaggaattcgcctcccacccattttgagtagacgcgccactagcgcgttcccacgcacaaaccttttccctgcggccaacctgcgattctcaactccccgccctggttgctaagggaggcgcgcagagcgcttgtgcctgcgcacttccacaccagcccgtgtagtgtgacgctgggccccgtccctgtgaccgggccaggctcggagctgcagggaatccggactttcgggctctctggaaggccggggagaggccagtgtgggaggacctggtggggaggaggccgtgttacaaaccctgcgcggagctgcaccgctgctgccagacactgcgacgccgcgaccttttctactccggactacgtttcccagcggaccccgcgggagttgggccggcggcccctttgtgtcctccgggggcggaggcagctgaggcgcttctttccgggcccgtaagggctgggttccatccaactaagggtagcggtgagacccgagtgcagattccccgagccttcggggcaggaaggagatcttccaccagttctgttctgcaggtcgggagtgggctgaggagtggcgtgtgggtctccggaagctcgtcgcaggccatctgtgtgactccggtgcgagtggaggttggtaccgttcagtgcgaggctgtcaccccgtgtgcctgtccacgtcctgtgtgactgggtgcgaggaagtcaatggcaccgtggaatgtgaggctgtgagttgaggcgggagcgggcgactgttcgctgcaccttgttgggccgatacccgcggcttctttgtgactgggttgtgagattgtcgcttgtgatagataccctggtggctgagccttgccggtatgggaaagggtgcccgtgtgaggcagtccatacccatggcctctgactgtggcgtgggtaagacggtggttggcactgtagtttttcagactctgattatgtgggggattgagtgagagactgtgtgccacggagaggcttttaaagccagcccaagtcatatcaatgtgccaccaagtttcagaatcactgatttattggagaggaggattgtggggtcaggtcctcttttatttgatcttggtgctctt

SEQ ID NO: 67522 - DNA, 1536 bp, Homo sapiens
ccgagaaaagaaataagcatcatagaacatcagagctctcggagcagacgaaacaatttaggataacaccaacctctagaaagggattagtcttccccacagggctgtcaagctagaataggacatctttaacagtggtcttcttcctaagacacttccaggggtaaagcctcaccatcagggaaacttcaaaaagagcctcttactctgcaaagaaactgcagcagctgtaaccgcacgattctcagctggcttaatgatgtccgtgtcacacgaggagtactgcggcccgggaggggccaagcgctaggagcattaacaggcggcaggtgagcccaccccgcggccgcacaagcgcacacgcacacgtccagggcggaggaacactactagtaacacccgcctccttctagcctccctatcccaaagttatggtgccgattttgtccgcggcaggggctccaggggcacactcataaattcggtgcggaggaacacaactagcagcaccacacccccgccactgccagaaccaaagtgacggtgccgacacccctccgcaagcgcaaggccgacttccataagtaattagccagagcaccgtcccgttcctgtcagcaccgagccccagccaggacaccggtattcccagcaccatacaagaactactttttcgatgaagcaacccaaaagctgcgagcggttcccggtgaggccgcccactcacctggccggcgcagacaagctccgtgcgtcaagacataacagcgtaagtgtacgacgttgcgcagcgacgcgggggccttcgggaaatgtagtctacaactggaaaccggccggatcgtgtctgcgcaggcccagcagctaagatcgggtccggcgctccagaacagaacgatccctgaggctcccttgctcgaactgtgggacttaccctactatggtccgagcctaccctatttcattatactcaagtaacgccccagaaattccagagaatctcacacaaagaggttgagtcttgccgtggtgccttcaggggaatgtcatcccgggctagaagagctgcaaaaggctgtcaggtaaggtctggatttctctctgacagctctggccgtgacgcagtggccacgataccgggttgctgctcaacggggttcggaagtgtgacgcattctttgcggccatgtgtgtgtgtgtgcgtgtgtgtgtgggtctgtgcgcgcgcgtgtccgagtgtcctctgtgggtgcagagtgggtagtggccatgcctgtgtgatgtgcgtcagattatgcttgaggctattagtggcgcatttagtattgtgtgcggaagggtcttgggaatggtttgattatagctttgagggtgactgatgtctgtttaatcagattcagcctgcgactgagtatcttataacctgtaagaaattgatttttctttgcatggtcatgaatttaaaatagattcccatgaaattatataaatgtagtgaatgattcattgagagttcgcctgtggcagtgaatgtgg

SEQ ID NO: 67523 - DNA, 1728 bp, Homo sapiens
cgggaaatctattaattaggtcccctgccgttaactaggtagggaaatcctaaggcccaaatcaatgaataaatagatcattcctaagcaggattttaaacggaaggaactcgaatgcatttcacagaaacaaagcagcagcacgaactcacagggaaccggcttttagaagagcagcagcgattcgtttctccttctcaagcgccttctctggaaactggcagggctggggaagcaggcagagttcaggacaccccaggcttttcttgactcgattggaacccaccctccacgcttccctggccccaactaaccgccacctgcatgcacaaatggaaacgacagggcagagggtcagcagtcacccgcgtctgggttcgcagctccgggtacgctgtagttccgcacccggttgcccacgcccgggaccacccactgtgtcttttcggaactgtccagcgtgtcctcctagaccccagacacccaccccaaatctaggtcccagcgttttgcaggggaccttcatcctggggcgttcacctctgacttccctcttgggccttttcgctacggccgagcctaagtggctgaagcgcggacgaggatgcgcggggcctcggtctccaactgcaccacaggccgcacccacgaacctggtccggcacagttactaccgcccgggcctccaggcctcagggctgcagaagctcagtcccgggaaaaaaagcacaccggcctgaggctccacaggaaccttttctccaccttggcccggcctgcaaaacctggcccactccgcgctcttttccctcagaaaagcagcggccacagtggcgcccggctcccagccccagcctcacccgactcagaggatagcccagccctgggagtcagcggcgccagaatacgggagagcgcctgtctccgtcgcgaatgcgctagcgcgcgggggggcggaggcaagtcccgcagctgctccgggccgggaggggcgcgtggggccgggtctcggcggggatagtcgggccggggagacggagccagaggggccgcagtgtccctcgcctcaggcctctacctgtaatggccgccccgtgactgaccagtgccattaaagataatccaggcctgctcccctgtggacactgcggtccaaaatttaaaaaaacaatattccgcctttttatttttcatttggttctcggctcggagacaggcggaggctgcgagccccgccccgcccccagcgacgcctcaccggaacctttggaaatcggcttctgcctcgagtgcgcaagcgcgcggggggcgaacgctggggcccttcagggagcaagggagaagtgtggggccgcacctgccgaggggtcgggaggtttggaggagggtggaggttggctacaggatcccgatggggatggagtgttcaaatctaggcctgtagccgtgaccctggcgtgagttggatggaggaaaccccagtatcgcgagcctggaccaaggcgcggcgcgtgctgcctgtggtgtttgctgagtgacggccgccgcgcccccgcgtacctggaccgagtgcctggccgctggcggagtagtgtttccgtgcacggggctgctgcgtgcgcgtgtgccgttctctagcgggggattaggatggtgccgcagagaaggctgcgcggtggtgcctgactctgacgctggctgtagcgggtctctggggtctttgcggtt

SEQ ID NO: 67524 - DNA, 1410 bp, Homo sapiens
tggaggtaggagagaggctggaatctgggtatgagttcacagcaggttcctggggtcagagctctgggaaagacgaggttctgagacaggtagctcgctctcagagctcacaaagaaataacctcccaggcgtttccaatctcacagcaagtcaatgccttcttgctggaaaacttgatgtagagttcagtatccaacttccctcttgcagacattttttgtgtgtgtcagccgcaagcagctgtgaggagggaggagagaagcagcagccgggaacctacagccaagactcaaagtgacaccgcagtgccaccgcaatcaacgtacatgaaaaggacaagcacctcatatccccgtcacgcaagcacagccactcactcacctgtcacagcctcacaaccgcacccaccgtcaaggaggcacatcccagcctctcacacgcagtttctctgtcacacactctcaaacattccccatctgacatatacaacattctctcacgtgcgcactcaaataccctcctctgctgttcatgcacccacgggcctgagattccgataacaactggccgtccacactagaggcttccacggttaaagggcttcctccaccaccccggctggtttaggttgggctccaacgtaacttgattgcccagagccctccctgcgagtactctgtgcctgttatatactgaaatgagttcaacccaccttgcaaaagaaccacgcgaaaacggaagggaagccatagattgggtgttcccgttgccctctgggaaatgtagtttaagcctaaagctccatgaccgcggtggcttgtgggaaaagtggctcggaaccccaaatcccggttagattgcaggcaccgccggacgctggctcccggaggttttagttttccctctaccaggagtgtgaagacacagagacttattgcgctggcgaagatggctgaggcgaaggcgtgtccgacttgtcctcggagttctgagggtttcagtgaccccagaaggctgagaagtggaatccgaactcgaggctgcccgaagcctcgggctgtttgagtgtagagccggtaggggagggctttcaaagtgtggccgcgagggcgagcgtgggggatcggttatgagctcccgagggcggggactctgctctgtgtcccctgaggaagtccagtcttgttataaggtatgagaaaagtaactttttaaaaatggacaaataataattgtatgttttatatactgatagggtacaatatgctgttttgatctatgtttacaatgcgaaatgattaaatcaagctaattaaatccatcacctcacttttttgtggtgaaaacatttaaaatctacttttagcaattttgaaacatgcaacacattatttatgtagttgctattc

SEQ ID NO: 67525 - DNA, 1940 bp, Homo sapiens
cttcctagaaggcaggctgaggcggaaagggtattgactccggcttctccaccagaggaccttgcaattccagtcaattccctcggtaactcttatggaggagtggcaatataccttaaaaaaggagtgtgtgttgcggggtattccgctgcttggttatgtcaccaggtggattaaatttggacaaaatttcccaaggtgtaggtactctacaaacactagttaccctcaggaatgtgcgatcaacaaaagaatgcaagataacaaggcccctaggcagcccctgggtcttgtggctcccgtcgaaggcagagctctggagccgcctacgccggggacaggcgactacacctggggcccctcaccctcgggcctcctgcacgtggcagggaaggcagggcgtctctatctcaaagcattggctgcgcctgttacctgcgacaggattcccgacaagggacgggtacggcgtgtgcactcaggagctcctagagctaggggcagcaactaagaagctacctggcggatgttgcgagaggactccgcccacagaacggttggcccccaaccccgcagccggcggacttcccgaggccaggggtctgaacgcgcgtgcgcatgggcgcgcgcccggcgcgagaacgcgcgcgcgctctcgaaagaaaaaaaaaaaaaatcctctccgcggggtcccgcggcaatttaggccggggtctgccgacgaccgcgcgtgcgcgggcgtgcatctacgccctcctccaccgccccctccgctgggggtctagcgcactgctccgcttcccccgtttcccccgggctagcgtcctaggggtaagtgactcgagcctggcagagagtgagggagaggttccgccgaatgaagggaggaggtagacggggccaggagaaaggagaaaccgccccggcggggcgaagagcgcggctctcgagctgtagtctgcaggagacacacctccctccctcacgcccctcggggctgcggaagtgctctacagactggagctgcacgaaggcgaccagcggactaccgttcctaggaggcagcgcggcggtgcgcctacggctcccggcagcccccgcgcgccattctctttttgagttcgcggccggctagggcgaaactacagttcccaggaggactcgcgcgaagcggcttggaagtgggcagcctggaagtcactcgggccaccggagctggcggcgtctccagcgagcggcgcggagctggacgccgcgatcgtggggcccgcgaggcgggcagccggggcgtccaggtacgtggctccgggtgcaggatcggcctcgcgcaagggtggcggggaatcggtggctgcccggaccccgagggtcagcgcgggcggacggccgggtgtgggtactggccgtggggggcggcggcgccgggactcgcgccctccggacccagccggactcgtgcccgcatggctcaactttccaggcgtgcaccccggcgctgtggtgaagagcttggaggcggggagcggtggattcgcgtcccggctgtgccactcgggagccgcgatctgggaaaaccgcgccgaacctcaatttcccctgcagtaaaacggagtaggagagcatcttggcggagactctgttgagataatataataaaacatttggcacataggaggcacttactacgtatttgggttattgttagctctccgaaaaatgaggtgaagatgttatcgattgcatagggtgaggattagttgagcgtgtgcatgtaaagaggtgagtccttagttagcacccaatgcaggctagctgctgttaaccgagattattttgttaagagcgttggtttggaaggcagagagaccccaggttcaaatttgaacatttaccagctgtgtgactttgggcaactggcttcacctctctgtgccttggtt

SEQ ID NO: 67526 - DNA, 2805 bp, Homo sapiens
ataagaatgctgatagttcctccttagagggtcgctgtgagggttaggagagagaattcatatgtagcacttagaacagcgccttgtgcagtgagcattccggttgtggttgttattattagccagccaaagccgttcagttgtgcttccaaagctggctggaagagtccagcgaccgtgtttaatcattaagctgcattgcctctgtgagctagtgcctcctctgcacgggccaaggagcccgcctttagattgtacggttctgaatgaagcatccaggcgcaagctcagggcaggggacggtgtgggcacaagtccagccctggctctgtcagtgaacaggtggcctgtgcctgaatccgaggtaataggcgagccgcctttgttacctttgagctttctttcaagcccattcagactcctcagaccacgtgtctgatgagtaaggaggccttttctttccctcccccaaagggaatgttggcaaaacagctttctttgggaacgcgcctgttcacgacgaccagccatctcctggggaactccggtggctggctggcgtgttcctgcggctgttgaataagtcgctgttaggagctggcacggcaggttcccgtttccgcattccaggcacccacagcgggctgggggcgggcaccactgaggtcggcctggagagccaaggcaggtggcctcgccctgggaggaccagggacaggaggagtccacctggggctcccctgacagccacctgcccactttgtgatcagagccgtgttcggggagtctttcaggtgagcgatattcattaaatttggcagtgacttgcagagaaagttcatcatgtttcttcctctccggagttagacagttagctttttttgttttctctttttttcccccctcttctccctgaaatgtttacctgtctgctcctaactgtgaagaaagagtgggccgggtgttgacggactgagaaaaatggaggacatttctcccaagagaaggaatcggtgactcttttagtgagttgagctcctgctggatgcagacttctgtgccggggctgggggcgatcccagcctggtgtagatgagctctgtggtctcgcctgagtccgctttcctctctgggcctcagtttcctcttcttgtgaaatgggaactagcagcagtgcccaatgagtcatctatgtaaactgcttcaagcctgggcactgagcggtgctcaagtcccccctccccaaccccaggcccccattttccctgtgtgacctcatctgtgacctctcagctgcttgcttgctgtaccccagctgcactggcctcctgctgttcctccctcggagactttgccctggctgttccctctgcctgcaacacttcccctagaattccccagcgccgcctccctccctccttccctcaagtctctgttcagatgtcaccttctccatgaggcctctctccttattaaattgcaccttctccctcaccctcgcccttactctttgctttatttttcttcatagcatttacttccacttgacatattttgtctatgctctgcttcccagctctaggctccatagaagcacaggcacttttgtgtccatccttgtagaaccgttcctggcacgtggtagatgcgggctaaattgtgatatgaatgaatttatatcaggtgcaacatgatccaaggatgggtggccagccccgtttggggtttgaggagggtgtcagcttttccaggaacctgtggctgtgggtgaggcggcatgtgcagatgcctccccctggtcacccagtggctctctggcacctgcctgcagcatccagccctctgccttcctgtcctgcaacccctgcagtctgtgcagcccaggcctggtagtgactcatctgggcagcctgggtgcctgtggcatggaacaggaaagcttggcctagtaagtggagaggatgtcaggttcatttaggtggagaagactgtgtggaagataccacccatatacacacatctcatatgtatctccagcccctgcttgctgttcctgcagggggaggccagggagtgcctgggaagtagcaattaaccagccaggcacagttgagccatctcccctgctttaatgggtaataattcttgctctggggctgaacaagttttaattaaatggtgagcgcgaagaatctgaccgtgtaatagctgacacgtcctcatctattttctagctcccggtgtcagcaattgattctgtaaaaatatcctgggcagggcttccctgagctccatgagtgaggtcagtggccttcttggatttctcccagcatgaggcaccaggggactgaggtgctgatggacttcgcgccgctgtagcatacatcatcgcatgtcaggacctgctgctattttaagaatgtgcagagcaggagggaagctcttctgcaacatttaacacatatgtcccttgagctcccagtgcgggagtttggggttgagttgaggactctcctattacacttatttcatgtaatgcctgagccccaacactgtgggcacagtagttctctgggccacaggttccttatctggaaaatggggataattaatagatgattaaacgagaagtcaaagtgagatcaggtgactcagtgctgtgtctagtgcatagatagcaaattagatttaagaaagacaattctttttaagaattcttttcaagcccctttttaatattttcggtctgtccttttttgtgcccacccccgaccctggttccacccctgtgtcagcatcctcccg

SEQ ID NO: 67527 - DNA, 892 bp, Homo sapiens
cacatcacttctacttcattctgttagttaatgtgagttgaagagtcagcccagattcagtatgggagggatatcacaaaacaagttccaggaggtgtggtccactgtgggcacctttctatcctggctaccatggggttcattttctcatgtaagaagtgcagagctcagcaggctaaggtgacgctcaccttaccctctctctgctgctccaggtcaccatccttagcctcatattcataaaatggttgctctacctccagcctgatatccttgtgatgggcaggcagaaccagggctctaaggaaaggagacagcacctgtatcaagaagccaaagccttccctgaaatctttagcagacgtctgcttgtgactatttggctagaactttgtgacatggccactccttgctgcaaggacatctacagtttttcagttgggcccattgccaccctgagcaaagggtcaataaggaagaagacggagagtggacatgttgggcattcacctgccagcactccatccagacagccacagaagtggtgggtaaacagagacagcatacattcacttatcaactgtttagtaaattcctggcatgggcagggcactgggcttctcccaaagactgtaagagtgtgcaggattatttgcagacattgaccagatcattgctgagctcacctctctcatatcagtgttcgaagttagtctaatgataagaatagtagccagtctcattaagggcttaccttgtgtagaggaactgttacgaatacttttcataagccaactcagtgaatcttcacagtggccctatgaaatgggcattgttatcaccccctcttctcagaggcagaaacagaggcacagagaggttcagtaacttg

SEQ ID NO: 67528 - DNA, 1038 bp, Homo sapiens
atacacacacacacacacacacacacacacacacacactgtttcttttttggcaggcagggctagccgtcctcctaggtgttgctgtgtatccgttagggatgtaaagctgggggcccctttctgtattggtgttagtggccgtggatgaccattgctcagagccattatttcatttggggtgtacaaaaattgtgctgttgtaattctgtccacctcttcatttattagtgggactattcctctagagagaacctgcccctcatctattattcagttatcctgagggtactggctcttttgaacttttgtttgccttagaaatgactattgaacaattgggctggtggtttctaatctgttgtgtgttttttttttttttttttcctgcagagattcaaatcttccttgtttttatgttcattcatttgacatttgccggtctccaccactgctcataccctgtcctgagcttgccaataaacagatgaaccagtccagtcatctcattgtgtgggcacggctgctccaggccttacctttgaccgggtggggccttgcgggtgtttgtcgaagtaatgagactgtggacattcccatctttctctctctttcccctgtcgtgcattgtcagaccttatagtctttggtgagttcctgctctacgccaaggaattagtcctttatgcttggggcaagaggtttttgagtatttggatttcttctgatctgaaactccattcctagacaaaagaacaataaagggctctactccattgcagaggcaagccctggtaacctggccaggggcgagccctgaccccagccactgttgtctgggtcataaattcttgagagcagtagcacgcttgaaatcatttagatgctttgggatcagttattcattatattgcacgatatctaagggcctctttgctgctagagattacaacacattcctcctgggggcagaagatttattgtgcagtgatgtgcaaactcattcattcattccattgttaacttcttcattcagcaa

SEQ ID NO: 67529 - DNA, 608 bp, Homo sapiens
tggtagactcttaatgcccatttcaaccccgaagaaactgaggcccagagaagtgaagtccttaatccttgtcacataggctgttggggctggattggaacgtggatagccccacccacagtccgaccacgctctcttcttctccctcactccaactacagctgttaattcatggtattgacacagcctgtgtccaggaggagccaaatgtcagtgtcatacatttctgaagtcaagaggggatcaaatccacatcagtggccttttcaccattcccactaacctggattccaacacaccttttatgacagtaattattacagggcagaaaacggggactttcgattgctgaccactttacacgaggcccagataaggtgtgcatctaggccctggactttgagccctgagcctgcttaactgattgggctgaaagtgttctcacccatcaaatcctccttatcaccttctccagaactccagctgtaaagggagctcaccactcacagggtgtgtgttgtatgtgacacctcagccagccaaatggctttacttggtgtcctctcagaagaggtgtgacctccttctcttagcgtggtctcctgtgg

SEQ ID NO: 67530 - DNA, 530 bp, Homo sapiens
gtggggtttggggcatttggagttgggtgtgaggctgtggagccttgcagctgatggcttggagtcacactgcaggcagctgggttcgggccccaccctgcactagctgcatgacctggggcaggtacttcacctccttcctcaggctcttcatttttcaaatacctgcctcgttgactttgggctggagggagggataaaggatgataattcactgaggtcatcttatgcagagtgttcagtccacagacaggcatccacgtggctagaggcagggcctggggaaccaccacttccagctccagggctttaggcaagtggctttagcctccattgggctgcatttcctccttctacagcaagggccagagcagtcccaacctcttaaggctgcggggttcactgagtgagtaggtacctggggagtatttagcacaggccctggcactcaaggtaagtaagccccatggcatgagctgtcatgatcataatgcacaattaagaatgtcagcttgaggcctagcagtcag

SEQ ID NO: 67531 - DNA, 831 bp, Homo sapiens
ggcttccctgatccagctctgggggccattgtccttcctgactggtggatggccctggcaatatttggtgttttccctggctctgccccaatatcaatccctccacccataagttcagagtcctcagagaagggtatccatttcacagaactcctatgcatccttcaaagcccaccttaatgccacttccttcaggaggccctcccagatttcttcaccacccccagagtgaatagctccctcccctctgccaagctcccaggtatcttgagccattcagcacactttgttctgattctcacactcaggcccttctccccccatagtgtgtgagcaccttgatgccagagaccatcttcctctcatctttgcagcctcagtaccaagggccattataagcacagcgcagatttcatggagtggctgaatgatttgtttgctgtgtgatcacctgtactgagtcaatatcggtcacctttggtcatgagcatgccccttgacccagattcctgcaggagcctgcatataggggccctgcttgctgggactggggatgggggtggggtggggagttcaagggaaggcaaggtctaggatataaatcccaagggcgtgggctcagcagggcccgttctcatgctttctggcccgggaggagtgattctccatctggcaggcccagctgcagtgctgggacagggacatgagcagaggccacaggaggagagagggaggttgtggggggagctcggggaagcccatggtaacccggggggaggaaaaacagccacacagtgttattgttacagaaccattaaatacaacttatac

SEQ ID NO: 67532 - DNA, 1450 bp, Homo sapiens
gcctcaaaaaaaaaaaaaaaaaaaagttactgggtgcggtggctcatgcctgtaatcccaggactttgggaggccagggtgggcagatcacgaggtcaggacatcgagaccatcctggctaacacagtgaaaccccgtctctactaaaaatacaaaaaattagctgggtgtggtggcgtgtgcctgtaatctcagctactcgggaggctgaggcaggagaatcgcttgaaccagggagttggaggttgcattgcagtgagccgagatcaggccactgcactctagcccggtgacagagcaagactccgtctcaaaaaaaaaaaaaaaaaaaatagaagaagaaaacaaaaactaacattgattgagcatcagtttaacttgtgccaggcaggttctgtgcaaaaccatttcctagatgagataagttttcctttttacagacgaggaagcagtagtccagagtggctagctgatttgtccacaaagcagtaagcggtagagcgactgacctccaggacccaaacttgcagcccctctgtgccggtggtgactcacccttagcacagtacctggcagcaggcgatgccacctgttcactaaggcatggcgagcagcacctctgagtcacaccattctgggtggtgcacaaagcagatgagttctcaccctcatggaatgcgcactctgcctcgagagacggacactttctctcatatcctgcgtccagttgcaggcaaagccacaatcattgctcacctcccagtcacactcagggtaaagagcaaaggtctttgatttacaagtccacacccgccacccgcctctcctcccctctccctcatctgcctctctccttctgctctctctgccactctgacctcagcgcagctcctcagacacaggcacattcctgcctcaggggcctttgcatttgctcttccctcttcctctatatgcttgcatcgcttgcctgcttgtcttcaggtctttttttttttttttttttttgagtctcgccctgttgcccaggctggagtgcaatggcacaatcttggctcactgcaacctccgcctcccgggttcaaatgattgtcctgcctcagcttcccgagtagctgggattataggcacccaccaccatgcccagctaatttttgtatttttagtagagagggggtttcaccatgttggccaggctggtctcgaactcttgaccgcctgcctcggcctcccaaagtgctgagattacaggcatgagccactgcaccaggcctgtcttcaggtcttttttattttattatttatttatttatttatttatttatttatttattttgagacagagtctcgctctgtcgcccaggctggagtgccgtggtgcgatctcggctcactgcaagctccacctcccgggttcacgccattctcctgtctcagcctcccgagtagc

SEQ ID NO: 67533 - DNA, 1865 bp, Homo sapiens
gcgggcggatcacctgaggtcgggagtttgagaccagcttgaccaacatggagaaaccccgtctataccaccccgggcgtggtggcctgcgcctgtaatcccagctacttgggaggctgaggcaggagaatcgcttgaacccgggaggcggaggttgcggtgacctgagatcgcgccattgcactccagccttggcaacaagaacaaaactaggtctcaaaaaaaaaaaaaaaagaaaaagaagtatcctcttccaggaagcttcactgacacccctaggctgggtcatgtgcctcctcagggctcccacaacatctccatcccaacacagggcctgacacatgggagttgagacaagttaggttgaatgaataaatgaaacacacagcacactcacggagatgaagagacaggaaaagggggccaacagcacaatacaggttcgcttcttaaatgagcggtaggcatggccctctgcgctcccggggggccacgaagctgtcctaagggtgtgggcgacagcaggcgggtactggggagccacggaagggtggggagcagggaagggcggatcgctaactgcaaatgaatgaaagttgcatttctctgcatatcgcacgctatccagtcccaagttgttttcttctaaaggaatttcctaaagaatcgccccccaaggggcctcctacccgaacctggcatcccagcgctgtgcacacctcagggttccagatccttgatctcgtgacctctgacctgcagtgacctcgccaaccgacgcggccgccccgccacgcccccgcccgcccgatctcctccgccggccacgtacgccacttacgcagccggggcgtccccgcagccgccgccgccaagcctgccgggtgcatccttcgccgccgccacctaagccgcggttcggagcgtgcccgcccggctcccgtacccacgccccgccggcgaagagacagccaatggacgtcaggattgagggaaggcctcgcccccacccccccgacccctccagccccccccttcacggaggcctggacgactgggcggtgccttacgtaagaggcggagactgggctactgggctcatgcagtaaagcgagtcaaggcctgagtggcaggagggcgaggccgggaccaatcccaggaggaggcggtgtctgccacgacagaaaatgagtgtctgccccttgccggggctcacgcccctaactccagcactttgggaggccgaggcgggaggattgcttcagcccagggattcgagactagcctgagcaacatagtgaccctcgccccgccccatccctacaattttttttttttttaatttagccaggctcagtggcttaacgcctgtaatctcagcactttggaaggctgaggatcgcttgagcccaggagttcgagaccagcctgggcaacagcgagatctccatcgctacaaaacattttttaaaatgtaaatatcgagcgaaaaggtcgatgggaaatgcagttctctgcagacagccgttcagtttgggtcattgagagcactggagagccagaaaaggctgtggagcaaggaaaagagaaacatttgtgttcctgaggggctaattggagttgtaggggcttatacaatttttgacatcccttaggtattaaagtaaatatttatttattttgagacagggtcttcctctgttttccaggctgcctcggaccccctgagctcaagtgatcctcctgcctcagcctccccagtaactggcaccacaggcatgcaccaccatgcccagctaatttttaaattttttgtcaaaacaggatcttgctatgttgcccaggctggtctcgaattcctgggc

SEQ ID NO: 67534 - DNA, 1411 bp, Homo sapiens
actcgggaggctgaggcaggagaatcgcttgaatccggggcaggggcgcggaggtttcagtgagccgaaatcgcgccacttcacactccagcctgggagaaagagcgaaactccgtctcaaaaaaatatatatatatatatatttgggtaggaagcacaagtagggaccgtgcttgctgccagaacaaccaatagaaactccttgaaggccttcctggcacaaacgtagtctccagcaccctctgccgaccaggccccgcgccctcagtgctgagacagcctccagccctcggtgccttaggggttgcgcgtcaccttggagaccgcgtgagaggagggcgtgcctctgcaaaggcggaagtcggctgtggaagtgtgggcggccattttgagaccgggcaagaggggcgggactggtgcggccgagtgacagttgaccggttttaaccaagtgactggtaccacggggccggggaaaaagctgtgccatccaggggcggggggatgccggggacggggaggaactaggaaggggaggggaaggggaaggcgagaaggggagaggcaggggaaagaggggaagagtcgtgggagctgggagaggagggaaagaggggaagagtcgtgggagctggcagaggagggaaagggggagccgaacgtgaagggcgaagggcggggcggggcaggagagtcggggtatagagcaggcaggtgttaatggcatgggaaggaagagtaagaagtggggcaagaaggtgtcgcggtacgaggggaaggtgagactcaagaaggtgccggctaagaagctggtgccggcgtggaaggagaaggtgtggggcgaggaaacaacgaagggcgaggaaagatcccgaggcgaagagacagttttcatcgagaaggggcagggcgaggaggaggggcgttaccagagggcgggacggggcgacgggcccgcgcgggaagaaccaatcgccgagaacccggggaaggaacgggtccataaagaccaagtggaggagtaggggcgcggtcaggagcggaagcagagtgaggagcaagccccgggcgagaaacgggggcccggccgggagcaagagcaggggcggggccgggagcaagagcaggggcggggcccggagacgggcgagaccaggtacagtacccagcccctgggcagaccccgagcgaggagaaagcggcgataccaagagaagtgcgagggtggggcaagaggttggggcacagccgggtggaagtacacgggtgcgatcgcaggcagaagcagtacgggggaacttaagagggggactgtcaaagcgagaaatagaaaccaagaccaggtgaagagcaagagtggaatacagggagggggcggaataaggagcaaggtgaggataaagttaaagga

SEQ ID NO: 67535 - DNA, 1855 bp, Homo sapiens
aaactccgtctcaaaaaaaaaaaattgtgaatcctccacttacacatgacattgaaagccatagagctggatgagttttgtaactagttagttcatataagcttgggaaaaaaatgtggaaggatgcattgaaaaagactggagagggagccccaggtacacatcctagctgttagtcctttggaaggttacccagcctctcagtctgtctataaaatgagaataacacagctctccaaatggcacgacacccgctaccttttggcttggagacgctgccccgaaggcggaacctccaggacagctacgtagcgtcccgagcactcagactgaagccagggcagccatgttcattattggaaccgtgaggtgggtagggggggtggtgttgagacagctgtcattttcagttagggcaaaagccaacttccggtcaccatcttgagtgacgacagaggcggagctccaactgacatgttcattaagggcagggctccgagggcgccacctcgagagcgacggcgggctacccggggcgggctgaggcaggttgtagccccgccccgggccttgggctccacctctcggccccacttccgccgggcaagcgtttgtaggcggcgctgccgtaaatcaggcggtctgcttgccgcatcacgcaagatggcggccgcggcggtgaacggggcggcaggcttctcgagctccgggcccgcggcaacctcgggcgctgttctgcaggccgcgaccggcatgtacgagcaactcaagggcgagtggaaccgtaaaagccccaatcttagcaagtgcggggaagagctgggtcgactcaaggtaaagtcggcaggcccaggaaaccgagtgttgcgggcgtgggaggcgctacgaggtgtctggacccaaccaagtcccgggccgcggaagccacctcggtgccagcgagactgaggcgggctgggggatccgatggggtgaaagatttggaacagccaaagtgggggctcggagggcgtcaagaagcgagagagggacagggagcgttgatggtcacgcctgtaatcgcagcgctttgggaggccgaggcgggggagcgtcgcttgagcccaggagttcaagatcagcctgagcaacatagcgagactctgtctctacattttttttttaagtgagagatgactggaatggacccacgcgggggtggtgggggaatgattggaagacttatggcagaactgagtgaggggttagatttttggtgcgtggaggcttaactggtcggagtggcaggattgggattcgggcttttcctgatggtggattccaggcaagaccaagtgggaagtgaggactgcccggagtgataaaagaatgaggctgaaaaggtgggctgtgtagagggtgtgtggttaagaccaggctgggttaggatctgagagatctggggcttaggctcgcatctgttgggagagggggcagcctagttgtgaaggcaggactgaacctagaagaaatattcttacaagtagagaacaagaatacggggcccagagtgcttcagaccaaacatctgttgggagggagtgtaaatccagtggcttggaacaagctgctgagcctgctaaggaaagatgtatgggctgaactgtggggggagatttggacctccccctcccagatatagattttggggatagcccagctaccccttccccaatagattgtggggaagatgggccaagaatggaatgtactcctgtccccaccgccgcgtgattccactgggtcaggcactgagtgtccctccttgtttccccagtggggctattaataattgtaatgtgatgtaatcttaaat

SEQ ID NO: 67536 - DNA, 1455 bp, Homo sapiens
tctctacaaaaaaattaaaaacaaatcagccaggcgcggtggtctgcgcctgtggtcccagctactaggtgtaagccaccaaggctgactgatttttaaaaatttagctgggaggctgaggcgggaggatctcttgagcccagaaggtcgagactgcagtgagccgcgatggcgccactgcagtccagcctgaacgatagagcgaaatctgcctcaaaaacaaaccaacaaaacaccagcagaagacaactgagggaggaaaaggaaaatggcaccgaagttgtttttatgtcgccgcaacagtgacacccgccgccagcttgtcttgacagcggagatcccgaacgcactgcaatttacagctccagggggcgttcctacaaccccgacaggttagccgaggggcggggcgggcgggccccggggcgggttcggcgtcctcctgcgccaatgggagcacccaagcccctgcgcgggaagatgccgattggtcagtgccgccggacgctgcggggagctcgtgcgcgcggcgcttttggggcggagcctgccaccggccgccagggggcgcgccgagaccacactttcatggaggcggtgaaggcggaagcgtgggagggggccgcggtggcccaggacctgctggctctggggtaaaagggtgtgcggtgaggctggtgggtgcaggaaggccaggtctgccccctggacgcggacgaaaagggattcccagtgacatccccgccccctcccgctgcctcggtccccacaggtatggaggtgtcccgggggcggcgtcgcggggcgcctcatgcccagacttcagggggctgtgcgtgcggctggcggcggagctggcgacgctgggcgccctcgagcagcagcgagaggcgggcgcggaggtgctgagcgccggcgacggtaaacacggagcgggagggtggcaggggggccgccacggggccaccgagccctgacacccctgtcctcgcaggccctggcgcggaggaggactttctgcggcagctcggcagcctgctgcgggagctgcactgcccggatcgcgcgctctgcggcggggatggcgcggctgcgcttcgggaacccggtgccggactgcgcctgctgcgtgagtcccgggatgcagaagtggcaaggccatggcctccggagcggcgggctctgactttttaggggaaatcgaggttcccaaggggtgtggtcagaactttggggcggcccagagggtacgaggtgggtggggtgagcatgttggggcaagcagagcgctctaaaatgggcgggggtagaatttcgttttattttttatttattttattattattatttttgagatggagtttcactcttgttacccaagctggagtgcagtggcgtgatctcggctcactgcaacctccacctcccaggttcaagtgattctcttgcctcagc

SEQ ID NO: 67537 - DNA, 1263 bp, Homo sapiens
gcctcccagggtccctgcaccgggaaccagcagagcctggcgcacagtcgcctatgggacgcagtggtgggattcctgcacgtgttcgcccacatgatgatgaagctcgctcaggttcgagcccctctggtctccatccacctgcttccgggcgtcccccaagtggtccatttccaagtcttgcccctttggtcagtttgtcacccgagtgctcccggcatgttccagactggttccctctcagtggccaaatccatcctctttctggattggctgtctgcatgaccccgcctcctcctctgcccctccctccccaccaatcagctggttttccatccacgcttccattggtctgacgtgttggccccgtcccaatggccggagctcctctatgattgattgctgtttttctctctgatgagtcatcgcagatgtggacagtccttgggctaggatggggctggtttctagattagagcctggggctgaggaaatgttttgcttctttatcttacttgcggcagatgacacccatatcaggcattcatgatgtaaggtccctgttgagcaccaccttccatttccataatccttgttcctctttccctcacccctttgcagccttgccaatgtctcacgaacacttaatccatttgctctgcttctgtctggtaactatattcaaggctgccatatactgttccgcaggtcgtgcactgcacaaaggcacgatctctgagagcattcacatcctacacataatggtgtatttattacaatagtttagttttccagcagatggcagtaaagcatccagcatgttataacttccctacaggaagtgttttaggggacgcctttttttctaatttgctcaaaggtgccccaggggctggcagaaaccctaattcgttgtcatctgactttttaaaaggagttaaacttagaatgcaattcctccgtgtcacagcagctgaagttgtgctgttggtatcctaaaattctagagagtgttggtatcatcatgtagaattccaaatcctgcagggctaattcatccgccaccatctagtctaggttgcaaaagctagaaatccagtgcaaagtggtggcttaagaaaaataaagaatttatcagttcatattacagatccagggcttagagtgatgtcagcagaactgcctcctctttgactgcatttgcaagcaggctgtctccctgggctggaaaaaatggtgcctcaggctcctatccactctact

SEQ ID NO: 67538 - DNA, 2010 bp, Homo sapiens
acctctgctgggtgcttgaaggtttggccacaacccgaaggcggcaggtctgcaaagggatggctatgcagtgtacatgcctgttcacctgtcacatacatgcacttgggttacctcctctgcactgcgcaggcgtgtagacgtgcatctgcctggatacctgtgtgcacagtacacacgtggatgtacccaggacatatacctccacatgcatggcacataactgcattttgtaggcctgcagtgtacaaaacctatacataatatataattcatggcagtacaaatgggacgctcgccctcagctccaagaccggaacctaatggagacggggcgcgatccggcgaagtccaggagccctcaccccagcccctgcccggcagagcacagtagctttgtgggaccctcctcctggagctggggaccaagggctgagacttgaaactggagagctcaggatcctgcaccaggcgcccaggcctgtggcaagagggacctcagaacacctccctcggaacttggccatggcctaaacgtaaggctgctgcgtgcattcccgcagagctccgtggcctcatggccgcgcgcaatacaacgcgcgcgcacgccgccagagctccgggtgcttcccggtgagttcgcgcgcgcacgctcccgcgctaccggcactggaactgggtctgtgaggcccgggaaaagcttagccccgccccctcgccacgagaggcgcctgcgcactgggatccagtaagatttttctcacgctgtctgtccagcttgagtggcgcgaatgcgcacgcgccaattgcgcctgcgaggaagaagtcacgtggcagccggaaagcgtggcggctgctgctagagcctttccctttaccgcacccaaggagctggagcgacaacaacgacgtcgtttccgtttccaccacctcttcctgttcccgtccttgaggacgccgtgccgggtcagtgttagcctccagccctggttgtggaaggcgacagaagtcatggcgatgtttgagcagatgagagccaacgtgggcaagttgctcaagggtatcgacaggtctgagcccggttggaggaagcgctctggccaagcggggcggaggagagggttttccggagacagcaaggggtgttcagggtcctgggcttgccgcggggtggggtttctctatcctcctggaggaggagatgcttaaagaaacggcactgagctgggggtagtggctcacgcctgtgatcctagcactttgggaggccgaggtaggtgggtcgcctgagcccaggagttagagaccagcctgggcaacagccaaaccccgtctctaaaagaaagaaacaaaagcactgcaaaggcctagaagcgagagaatcttggtaccactcagtctcttcgtaaattgccttaaggtttccttctctgctccgcctcctttgagtgcctcttaatctctcccttctctgctctataagtcattcattctccacacgtttactgaaataaactgtcagtgctaggcaatgctgggaaccacaggcgaatcagacagcggcagatcatgccttcacggtctgagttccctttccataagggagacaaacctgacagcagacagcgatagccgggagagattagaactgaaatgggggaagcaaaggccagagtgttcaggtggacatggaggaagtaggcagcgaggtaggcaggagaggatggggctggatcagggtggaggcctgaacaggggaggaaggggtgagtagcagagacattcaggaggccaggtgtacaagctgcagtgactgactggctcagaggttgaggaggcatcctagggaagagccagggctccagtggagtttagagcttaggcgagaggtctgggataagaataagttttactagagattatactggacataattcactacctggatagagcaagtggccagtgccagatttagaggggaagggcgggaggagcaggttacagtggccc

SEQ ID NO: 67539 - DNA, 521 bp, Homo sapiens
actgcctttgtgatggtaactggggcctggaaggagtttatgatctccccctaaagaattgtgggtgctgtagcaggtggctggaggtttgtctcccgcccttctcaccttcagtctggtctctccttccccacaggtgtgtccagcatcatggcctcctcccagtaacttcaggtgtttaataaagatgtgttgactcagccctactgtctcctccctggcttcctgcctctgccccttgcccaccagagggagctcaggagcaggcctctgctctgggttggcccccgcaccgtacccccagcccccaccacaccacaccccatggcggggtttccgcctcctttttcccctgcttcgacttcctcccttgccccaccctaccttcctgaccttttaggtcttgggtggggagggcagcattgagtcagcaaggaggagggagtatgaatgggatgtggcagcccagccctgtggtggaggctgagcacctctgggaggagtgaaggtgaagtttccct

SEQ ID NO: 67540 - DNA, 7275 bp, Homo sapiens
caaaaaataataaaaataaaagtagatttgtgtgtatgtggcttcctttactagaaggtagtttcatgaaagttgggatttttttctgtttttagtgcctgcgtaaaacatagtctggcacagaataggtgttcaataaatatttgttgaatttgtgtcgctgaatgggaacccggtgcagtgcattccaagcctgagctggttcaggtccgatggcggggcctgcccttatgaatcattcatgatctggccccgcccatacgcgaacgacgcgcgcgttcacgccggagagggggcgcggctcgcccccgggctgagtcgggcggccaggaagcgggactctgcgcaggcgccaagctccggagcgcggccttggtgccttttctggtttggcaggcgcgcgcgcgcgggagggcggcaacctcggcgctgtgcgcaggcgcggcgggcagtgcgcaggcgcgggcggagggcgggctgaagcagctgaagcggcggtagcggcggcggctcgggcagaggggcgggagctgaggcgggagcggacaggctggtgggcgagcgagaggcggcggaatggtggactaccacgcggcgaaccagtcgtaccagtacggccccagcagcgcgggcaatggcgctggcggcgggggcagcatgggcgactacatggcccaggaggacgactgggaccgggacctgctgctggacccggcctgggagaagcagcagcgcaaggtgcgcggcccgcgggccggacgggctggaggggcttttctgagggggcccggggaggggtgggaggtcctgaaaggtaactggagcgtctgtgatgggaacgggggggtcccgagaaggaattggcgggtccgggaagggaattggagtcctgaggaggaatcgccgagctagaggaaggaattgggaatctgaaaagagaattggcggctgggtggggaatatgggagtcaaataaaaggaatcgggaaggctgatgaaggatttggagggtctgggcgtgccattaggggaaaccgaggagatgactgggcaggctgaaatggaactgggatccgaggcgggcttgaagggtcggagcatgggttgggggtgctgggaggagaatcaggggaggctgagaagggaatttctgggtctgggaagtgtgaggaggagcttgagtgtggaggggttggttatttggagagcagaaagatctgaaggagattggaattgggggagcctcaggttgggggagttataaaggggatgaagaatcaagtgtgaggatggagtggagattgtggggtctgaagacgggtgggaagactagggaggctgggaagatgaaaacaggggctaagggtagaattgagcatgaaaagacatgggcttagggtgtgaggagggtagaggtgccaggactgggggtctgaggagggtggggtgcggaaggaagaagttaaggggcccgtgaatcagacgtttttgaagggggtgagatttatttgtggtgccctgttccaaaggggagaagattaagagataggaggaataataagaggaattgatgagggatggagaagccgaagtagaggggatacggagagtggggataatttggggagggatttctaaagaattgatgggaagctgaaaagctaaagcgttggagagaatgaggaagtgtagagggagaaggtgagatcggtgggagggagggtgagctggaatggtggataatgggagagaggttcgtttaggaaaatgaaagtctcattagaaagggaatgcgtaatggatagactgagaaaggaatttgaggagggggtgctggctcctggaggtgcagtcccgggactggagagcgtgtgtgtgtcgtgcaggcagaatgagtttggggaggaagcgttgagagtgtccaggaagaattgtgtcttttttggagagaccggaggtaggtgaagggatcctgaagcagagactgtgttcaggtggcactgtttttttggggggcggggggggcaacttggtagggccccacagcagtgaaaaggtgatcagaagtggagtgggatccccgagcgaggtgtcagtgtctgtgggggggggataaatccagtgtggttgaggggggagctctgagtgtgtgcaggaagagctaaagaaaggagcgtggtgagtgggtgtgtgtggggggaaggggttgttcagaagttttgtgcgtgaaatgggtgggaggtacttgaagttggaagcatttcgtgggatctggagatctggattttctttccagatttgttactgattcgctctgtggccttggacaagacccttgaactctccgggcagttttgttatctgcaaaatgcaaagggatccgagggttccctgcggtgattctgttaataaagagggatgtgtgtagagttgggactttggacagggctctgaaggtttgggagagtgagtttggtggagatttttcaggaacaggctacagggctttgagtggtgacctggcagagtggggagtgactggaagcctctcgagggcgcgagttggtggccaggagcttggcacaggcagcctagcccaggctggaggggaaagggtgggaagggtggaaggagcagctgttccaaggcagcctgaggtggggccgggcataaccttgggtccattaccagcgttgcttgaatttcctcatccgtagtaactgaggggcatggcagtggcttggtgggaggggtgtccttatccgtggccccacctactgcaggatggacaggttgcgatagttggcataaattcactttttgaggggaaggtgagatctgttctggagtctcaacaataatttattgcctgaggcagtgccaggttggaaaaggttgccaagagacctggaaagttgggagggagcaggggccacagtggtggttttgagaatgtctaggctttgtcttctgcagctgaaggtgctggagaaaataaacccctcccccttttttctcaggtgataagggtggggggaccttccttttctctcccttcctgtcttctgccactcctcaagtgactccttttgcgagccgggtttcactccctcccgagagttagggtgtgggctttgttcgtggttatagtgtcccttgcctacagggtgaggctggggcaccattcaggccctgggtggaaaccaggactccccagaacctccaggccttgctgccatgtgtcattctcttacctcccagctcccttcctctggggccgggcaggtttgagggaaaagggtggctcacagagtccgctaataccatctgctttcgtgtctcagccagagccagattctagtacctcctgctttacacctcctccagcaaatatttacccttagctgctctgtgggggaaactactgcttcacctctgtgccctttcctgttatggggtagggattctttttgaaatgggggaaggagtaatggaaaggaatacaccaatctgtgtggctctctaccttcctactaagaaacatccctgcactcccaggctggctgggttgtttgtttgtttgtttgtttgtttttggagacggagttttgctcttgttgcccgggcgtgatcttggctcaccgcaacctccgtctcccgggttcaagcgattctcctgcctcagcctcccgagtagctgggaatacgggcatgcgccaccacgcctggctttttgtatttttagtagagacggggtttctccatgttggtcgggctggtctcaaactcccgaccccaggagatccgcccgcctcggtctcccaaagtgctgggattacaggagtgagccactgcacccagactggctgggttttttctacattgcagtgttgctttagtgaatgacagattgcccttcttgcctctccaaggctgagccactgggcacgggaagaatgacagtcctgggggttctgtacatgcatactccaaaaaaatatgcatccagaacagctgtaggccctcaaagtgggtagaattgaattcttctaggaattaagcaagagttggcccaaatcagaggggacgtgtgtctcacttctgcttggaagccctttgctctgacttctagggacccctgtaacccgtaagtaggttatgcaacggtttttacatgagagggccatgagtgttctcctggcgggatggagaagcattgttctggtctttgagcaaattcttgagcaattacagttctgggccacagttccctctcccaatttctaaaagtggcctgggtaacctcatcaccctctgttgtcctggaagggtgagatctcttgaaggttatgccaaatctcattacagcaagaagaaatgactcacttgctaagttttcgtgttcattgaaacatcactatttcaggggcctcaatgtttcaaccctgaccgttggctttttttttggagacggagttttgctcttgttgcccatgtggctgtattaggtatgagttaactatttgaaagtttttgtttgttttttgtatttgttttttttgttttgttttgttttgttttttttgagacagagcctcactctgtcaccaggctggagtgcagtggtgtgatcttggctcaccacaacctcttccaggttcaaggaattctcctgcctcagcctcctgagtagctgggactacaggcgtgtgctaccgtgcctggctaatttttgtgtttttagtagagacagagagtttcaccatgttggccaggctggtctgaaactcctgaccccaagtgatccgcctgcctcggcctcccaaagtgctgggattacaggcgtgagccactgtgccctgccttgtttttcttgaagtagatctttttttctttttaaaggctgataatggaggccccaaagtagccatctgttactttgttccattactctaattgcttgcctcttaggatctggctaggactaacagttttcaaaattgagtaacacacttgacaaaaaaaaaggaaccaaactcaaactcaactgttatctagaaaaaagactgtgtaaatatgtgtgagaggcaagtatactctgtttgccctcttgtaagagggataggggaggccactcagctgctagcactctgttctctcccctcatcctctccagaatgtattttagaacttgactcttctaatgactgaagaaaaggtggggtatgggaagatggcctgggactgcagggtcacttacactcacctggctaagagttgagatctggctggtgccctggagtggcacctgccactcacctaatcctaaacaatccagggtgtgggcccaggattgccctctgccttttgaaacaccctccctggttccggcttctaagaccaacagggaggctactttggtggcagggagctgactcaccctccagttggaactggtgctaaaagcctccatttaacggcagccgactgcttggccccaagtgggctgccttgtgggggggaaagttcagtggaaagtgttggaggaagcagggtggtgtgtgaatatccaagtagtgctggtgctattaagctctgacacagtcagggaggtcagttaaaatgtggtcttatggccgggcgcagtggctcgcgcctgtaatcccagcactttgggaggctgaggtgggcagatcacctgaggtcaggagttcgagaccagcctggccaacatggtgaaaccccgtctctaccaataatacaaaaattaactgggcatggtggcaggtgcctgtaatcccagctacttgggaggctgaggcaggagaatcgcttgaacctgagaggtggaggttgcagtgagccaagatcgcgctactgcactccagcctgagtgacagaacaagactccatctcaaaaaaaaaaaaaaaaatcagatgacagaggggagcggggacaagttttaagtctaagcctcctgggtggggagttctgctgtttcaacatatgctccagtcatggcagactttggccagacagcgccctttttcagagtgaactgagtgtagcacaagttatctgccagtgctagttagcaaacagaatggagccaaaaaagaattgatttgggaaggcccaaggaatttgaaaccgttgagatgaacactttccgtttttgctacactgatttatgttgtgctgggaattgtacaagcctttgaccagaccttagggttgttctttaaaaaaaaaaaaaaaagattcccttgctgctgcttttacttttttgaagggcagaagggaagggcaaatataattagtgaacagctgtttgctctagtatcacttgctcgttcaggttttctgaatagctgaaatatcaacatgtttatctcttcccttgccttagtatatcctagagcagtgttttccccggctttatctttattccttcatttaatgaactccgtgttttcatcactcacattttgttcccttccctcagtttccttcctttgccttcatttatgtatttagtttacagaataacaaaagcactcgtgttacttttaaacaaggtaaaacttaaacagttttttcctccgtttctttttttatggaaataagaggcaagtgatagcaagtgggtaattcaatggcagtggtaactgaagcactgacctgttacaagagagacggaagcttctacttgagcagatacaaatactgtcatccgtggagatttgaaagaagtctttctatcactgggtagtttgagagctcattagtcttctttagaatgggtttaaacttggaaacatcaaagcaagttacaaggaaacttagttttacagtgttggcagcctaggcgccagaatttgttataaagtgtctgaaagtggcccaggtatcacttaacttttcttcaagaaggtctatgagttacattttactcggtatcccaggcatcaaggagtgtaactttcaatgaatcaaagagaaacagaatcattttaaattccagcctctgtttaaagaaggatcttatgaaggggagaaattaaccacctgacccagggaaggatcccgcctcctccagaaagtgaaatcgccgggtgtggtggctcacgcctgtaatcccagcactttgggaggtcgaggtaggtggatcacgtgaggtcaggacttcaagaccagcctggcgaacatggtgaaaccccatctctactaaaatgcaaaaaattagccgggcacggtggtgcacccctgtaatc

SEQ ID NO: 67541 - DNA, 1233 bp, Homo sapiens
cagcctggacgacagagtaaggctccgtctcaaaaaaaaaaaaaaaagaaaaagaaaaggagttaaatctttgcatatatttaactggcaagagcatccttacatcagtgcatgggaagttttatccaagtagcagtttccctgggattataaaaatccccgaggcatttgtcttggtgttgtgcctttttttggttgtgttttttcacgtccctcccctcccctttctccataaacaagagaggcattaacttggaatgtccgtggaaagtcttagaagctgattggtgtaatttgcctgccttccctttagtttgaacagcgtttactctggaagaggtcagtggcctttttcttggttgtgatttatgcaagtgttatctgaaggcgagtggagtgagtttacgtgggatttgctgtttgccacctgttgttgtgctggctccttccttcctgggatgagttccattctctccccctcccccaggagtgaggctccccagccagagcagtccccctgtgcttatccccttccttcgtaaactgcagccatttgtgattttccataaccacttttatagacacataataatttcctttgaatcagtttgcattttaaattaagttttgaaaggaaaactgacaagagtatggcaactggaaaacccagctcccctggccataaatataatagaaggaaactgcaaaaataaacacattgaaaacaaaacagtgttgtttccaggtggttaccactcgggctgaaggccccccaggcttgaggcctgctccctttgttagaaagggattggcaagtgttggtgaggtgttaaagacccaccagcaccaagcagagactttctctttgaagtcatcaggtttacaagagaatcaaaggaaataactttctcaatgtgattcagggtgtaatgtaaggtgtagataacccttaaaattttccatgtgtgtatgtcacacttgggaaaaaaacttgatctcatctggtcgaggtgggcagggcagcaccttgtccaggagcacacagcccctcttggctctgtgtgtcatccggccatactagactcgaacatatggctcatgactggatgatgcttgattcatcttcagtttcaagtgttagtgcttttgaggttttgtaagaaaccaggacacattgaaaatacagtcatttctcagtatctgtgggggattggttccaggaacccccttata

SEQ ID NO: 67542 - DNA, 5280 bp, Homo sapiens
agatagagaacccatggatacagagggctagctgtaagaaatgtgggtttatcatttgttcctcacacaacttttttctttcttcgtttttcttgcctttgttccttttttttgagacagggtgtcactctttttaccaaggctggagtgcagtggaacaatcttggctcactgaagctttgacctcgggctcaagccatccccccacctcagcttcccaagtagctgggactagaggtgcacaccaccacgcctgactgatttttgtgtttttgtagagatggggttttgctgtgttgcccagtctggtctcagcctcccaaagtcttgggattacaggtgtgagtcaccacgcccagccaactttttctcttaaggctccagttttcttcttagagttgggcccctcccacgaagaaagcacactgccaccccttcatcggatttgaaccctacattttgaaaggaaagcagtgccctcctgctgagttaacaaggcttatttaaatgtttttcttccaaatatcagagcagaacagattctttgtcttccagtggaactatccacatggggcagaagtagttggaagcggcagttactaccctgcagaacacaatgaagtcatcttgggaaatatcgtggatggtgttgcaatgattgaatgggatgctagaacaccagcaatacaatagcatttgtgtcttcagcttcaggcaggaataaagaagactttgtggtttgttttatgttttttaaagtttcccccccaaaggtgtggggctgagtgatgtctgtcactagctttctagtgggtttttcttttcatcttttcccctccctgatgtcttttgagagtgggtggaagccacagtctaggtggatcagaggaagcacagaaggcaggcagtataccccactttgtgttttccatgtctgaagggaacacatttggtttttgttctgttttgattttttagagacagggtttcactgtcacccaggctggagtgcagtggcctaatcataactcactgcagccttgaactcttgggctcaagggatctttcagcctcagcctccctagtagctgggattatgtgtgcaccaccatggccagctaattttaattttttttttttttgagatggagtctcactctgtcacccaggctggagtgcagtagcacgatctcagctcactgcaacctctgcctccccggttcaagtgattctcctgcctcagcttcccaagtagctgggattacaggcgcgcgccacgacgcccagctaatttttgtatttttagtagagacagggtttcaccatgttggccaggctggtcttgagctcctgaccttaagcgatccacccaccttggcccaacaaagtgctggggttacaggcatgagccactgtgcccgaactaatttttaaattttttgtaaagactgggtctcactatgttgcccaggcttttaatctgcaaaaagcccaagataaagagttttaatatcttacctcctgagtagtaatgactgattccagttctaataatgtcttaattacagctatacagattgaggggactgcaggaagtgaaatagatgcatttcttttttctttctttcttttccttttttaaatacacacttcgtttcggtggtgaaggccagtttgaggttaggagaggcatcttggaaggaagctcgcaggtggttcggcatctggacatgctgggaagttgcctgagggggacgtcacaataagaggactgtgggtctacagcctgccttagcaaaatgacaggccttcttttaccaaggccaagggcagtggtggaagctgacttcagttggtgtcatcaaggcctcagtatgtgtaacggttaacaaattactattctatgatcaatctccatctgggtgtgagtaaaaggtatttagttgctatcaccatggaaaccaagttgcttacttactgttttggggagtgccctcataccagaggcagtgctaatggtggagtgttaggccccgggcagaaaaaaagatcctgccacttggtatcacaggaaaatacctacaggcacagcagccttgccaggtaggggatgaaggccctctgtcctcggggcaggagttgggccagttgattgtgttgatgaggagtgtgcatttgtgcatgagagagggagaagaaaaaggagagcactccatgaaatccgctgctggctttgtagcctagaagagtgctttttttctctaggagtttggaactggaatctcagctatgtgacttcttaataataggacaaaatatgcctgtatcttttgcctacttccacaaacactgataaattaaaaagaactctaaatttcccacaaatcccaagcacaagtaactttttttttaaatccacatcctccctaatccaaatctaacagcaaatccttttctctctgtcactccctgcttttctttaagaaaatgagtaccttgccttaaactatatattggatgaaaatattaaacactttcacaaagtgcttctttggctgttactggtatgccttgcatttggaagggtcagagatttgaagacttctgtgatcttccagttctggcctatgaaatacagtcagtttcaaaattcaaaatgtctggaagagccaacttgccaggccggttcaagggcagtcagatgaatcgacccttcttacaggctgtctacgaaccagtcatgattcagatattcaagtcctggaaggtatccagacggtaaacatcaccaggattgtgaggcagttacttttttttttggatcgtttgagctacactgccaagactgtggtaggacttgtctgtgtaaaacagaaagggctgtctctaaatgtctttttcaagaatgtcggctataatcacccgacactgtgtctcatggtggggtgagatgaaatacctagaccggttaggggagggccttcttggccattttttgaactaattttccctttccctttgtaacttttttttcttcttttcttttctttttttttttttgagacggagtcttactctgtcacccaggctggagtgtagtggtgcaatctcggctcattgcaacctccgcatcctgggttcaagtgattctcctgccttaggctcccgagtagctgggactacaggcatgcattccacgcccagctagttttggtattttttaggagagacggagtttcaccatgttggccaggctggtcttgaacccttgacctcgtaatgcccacctaggcctcccaaagtgctgggattacaggtatgagccaccgcgcccagcccctttgtaactttcattaacactgatgaggcacaagccataggatagaattgaatccattgagagctgtgagccaattgagggatgattggttaatagattgtggcttgaagctgtggaaggtaaggggtgacacttgactcctattagccttgtagaaacacctcagagattcacaggaagcaaactttgaccataaaaatataagactcacagcgcaccgagttctcttagcagctaccttagagttgagaaagttttgggcctctttaataaacaagcacaaagcagttcttgccaaatacggcctgctctggggccacagggttagcttaggagacaactttcttgcctaaaaataaatgcatgttcctatcagacattccaagcatagtttaaacatgagacttctgagcagcagctcaagctctgtgggttcaattatgtcagagtatgggcagtgagggtctttggggagtgtgcccccttatttgggattggttgtggctaccaaggaaatcagatgatcaaatgcaaaacttcctccatcttatttctatatgatcttttttttttttttttgagttggagtcttgctctgttgcccaggctggagtgcagtggcaggatctcagctcactgcagcctctgtctcccagattcaagctattattctcctgcctcagccttccaaatagctgggactacaggcgtggccatcatgtccggctaatttttgtatttttagtagagacagggttttgccatgttggccaggctggtctccaactcctgacctcaggtcatccacccgctttggcctcccagagtgctgggattacaggcatgggccaccgcccccagccttatttctacacgttcttgatctatcacaggctggtgggggagacagcatgcatatagataatgaacaaggtaacttcagataggattatgtgcaataaattaaataacagctagcattttaccttgtgctagacactattctaagtgcttcccatggactgactggtttttgtttttttttctttcctttgagactgagtttcgctcttgttgcccaggctggagtgcaatggcgtgttcttggctcactgcaacctccgtctcctgggttcaagcaattctcctgcctcagcctcccgagtagctgggattacaggcacgtgccaccatgcctggctaatttttgtatttttagtagagacggggtttctccttgttggtcaggctggccttgaactcccaacctcaggtgacccacccgcctcagccaccccaagtgctgggattacaggcgcgagccaccatgcccgacccatggactcacttgtataatcttgtgaagcaggtgttgttacccttacatgcagaaatggatccatgggcctttaagccacttgcccctgtgacagtgccaggatttgaatgtagaagttgaggctttcaagtttatgctgttatttctacactacactgaagtctagtgattgggaatggctttgcgagcgggtggtgaggggaggagtgtgcagtgcaggtacttcagatggagaggaaggtctcaaagaggtggcatttcagctgttccttaacggatgagaaagagagaaccaagagagcaccagaggaacgcgcttccaacagagaaaaccaagcaagggggcccccgaggagcagaaaggcccgagtggtcagagcggagcccgtggaagagatgggcacagccagattgcttagagctgtgttgttagaagtgctgatgagtctacattcaacttgcgcctgcaaactcagtccctcttagatgccagtaggtcaggaacctcatgcttccaggactctggcgctcctaccctttcctcccaggcctcctggacaggccaaaccagaactgacttctaaagtgggaaccccaagac

SEQ ID NO: 67543 - DNA, 1389 bp, Homo sapiens
tgaggcaggaccctaagggaaggccacccggtttgcgctttcctgatcaggctgttgacacccttctagcacaagaaaatgtatggaaagtaactgcctgagtcagctgcatctccagttgtgggatccacgtgccaggagaacacgaagtacacacaggtccgcagtgggagcccgctcggagacacctccccgccatcacggctgggactgtgcatatccaaacacttcttgcctctgagatgagcagttttcttccccttgactgtgccagggttcaattagcctgggcattaattaaaacttgtcaacacttagagtggggcccccagaaatctgtcacccctcctagatcattatcccaggctaatcaaccctctctaaggcagtttccattcttgacttagtgggagggaggaacaagcccctcggtgctggggagctctgggggaggtagggactgactgggcccaacccactttgttttggaaggtcaagcttagtaattaacctgaatgcttgggggagggggtgaaggagaaagaactgagtctagggatgtgccaggtctttcaaattgctaattatcagcgagcatgaggtcatccgtaaatatatctaattctttagcttgtaattaaggtgctcattaaaagtgcagggaagtcttgttttcctaaaaggggaaaaaaacaacaacacaaaaagtctttgttttgacctgacacgatggctcagaacagggggaggactcaaggcacaggactagtttcctgccttaaagagcctttacaggaaattgactgcaaacagtattggtgaccctgccaaggaggcaaacctagggtgatgtcattgttcgaagctgtcaccgccaagcctctggccttggggcgaggagagttggtgggattaaaaaatgagtgtgtgtatgtgtgtgtgtgtttagcagtctctaaagaggcgagtcaagggaaaatcctagcgggagaaaaatcacaaggggtggggggtgtctcagaaatattcttagctgggttcaactttcctcgtttttctaagtttaaaaaatcctctcttactatttttgctcatcaaaatgctgctgctttttcagagacagccttttttgagccattccctatttagtgttttgggtaattggctgttacagtatggaatttgtggcccaaaggcagcgtggtaagttagacactaggtgcacggtgccccattgttatgaagtgtggaaactgagacgctggactagtctgatgtatctgtttcttccaccaaaaaaaaaaaaaaaccattttggagaactacccaatgccagtgacttggcatctctgagtcgctaatcttcccatgtgcctccaggaaccgtct

SEQ ID NO: 67544 - DNA, 827 bp, Homo sapiens
agaatcccttgaaccagggcgtcggaggttgcagtgagctgagatgtcgccattgcactccagcctggtgacagagcaatactccaacttaaaaaaaaaaaaaaaaacctgcaggccatacaaaatagggcctattgggtgtgaagagctacccatttgtgacccctaaccttgcatggtcttgaccctgtctctgcctctcctctagtctcccctttcctcttgtctgaattgctgctgcttaatcctctcactaggagcgagaaaattgtactttgccccttagtgacagctctgataaaaggtggttgaagtggatggtagtaaaaagggtttgctttagctgtggttttccagcctccggactcctccccctttcccatcaccatagataattaagagttgactcctcaaaattcctcccaccatattgcatatttttaggcttcaggtttttgtgaaccaaaatagtggaaagtttttttgtttgtttgttttgggtagcccaaagcaacacttttctacagaggcagccattctgcacgcacaataacctggtgaacaatgccagctttctattaataaatgaactgccagttcagaatttgtacccatgtggcagatggacagaaatagtttctttaggattgatctcttaaatttgactttgggaagatactggcagtccaggttttgtgacagagatccatcctgagatctttgtaaatggaaaagcctgaatgcagcgtttcttattgataggagagttgatggatttcaggaaaatgggatatagtagatgtgcaatgaatttgttgacttggaaa

SEQ ID NO: 67545 - DNA, 7837 bp, Homo sapiens
gagctggggatacaggtgctggtccccacctcactcccctcaacctctgcaatatatgatacataacccacacacacagaccatatgcaaaagtggtgggactcctttgtacctgtcacctgcatcagtgattatcagcattttgccagacttgtttcatcagtgtctcccaacacactccccccagacattacccatacgtgctcaaatagatttgggtgtgcgtgtgtgtgtgtgtgtgtgtgtgtgtgtgtgtatttttttagagacagggtctcgccctgtcacccaggctggagtacagtggtgagatcatagctcactgcggcctctgaactcctgggcttgctttgttgcccaggctggtctcagaactcctggcctcaagcgattctgccaccttagcctcccaaaatgctgggattacaagtgtgagccaccgcacccggccaatgtatgtatttttaaacataaccacatactgttatatttaatgcttctgaccatgtcttaagaaaaaaacaaaaactccctttggcttccttgacatcacagtctctctgtttctctgactcttcttcctcatctcctatggctaaattctctccctctgtccactgcttacacatgggcatttcacaatgtcctttttccctgaaggaacttaccccctcccctcagccttaagtaccccatctgtggggatgatgcccatgcctgtagtcctgactcactcaccacgctctatcgcagttatttactgatgcatctctctcccctatcagacgctgaggtctttgatggagcaaccttgtatttgtccgtgtatccccagcaccacacctgtccatagctggagctcaggaagtttttttttttttttttttttttttttttttttaaagtcagagtctcactcagtcgcccaggctagagtgcagtggcacaatcttggctcactgcaacctccacctcctgggttcaagcaagcacgtctgggtaatttttgtatttttagtagagatggggtttcaccatttggccaggctggtctcgaagtcctgactgcaagtgatctggccgcctttggctcccagattgctgggattacagacaggcatgagccactgcgcccggcctcaggaagtagttgaatgagtgactgaatgaatgcccacgtgagcaaatgacctgtttgctgaactttagactgacgttgcctgatgcccactgcttgtgcagtacgtacttcagtctcagcgtgtctgagaccaaactcattttcaagtcccacttcttgggcttggcattgcccatttgtcagccatccgagtcagaaaccttggagtcagcttttgacttctcatcctgtaacaggcaccaagtttgatttctttcccttgaatatctcttagaaccctcaccttcctccttctctttattcctaccattgtccttactcaggaccatatagtgagggtttaaaagtgcagagtcttggccgggtgcggtggctcacacctgtaatcccagcactttgggaggccaaggcgggtagatcacctgaggtcaggagttcgagaccagcctggccaacatggtgaaaccccgtctctactaaaaatacaaaacttagctggatgtggtggtatgtgcctgtaatcccagctactcaggaggctgaggcaggagaattacttgaacccgggaggtggaggttgcagtgagctgagattgcgccactgtactctagcctgggtgacagagtgagactccaatctctagaaaaaaaaaaaaaaaaaaaaaaaagcagattctaaactcacagtgctgctgctggctgcctgagcttgtgtggctttggacagatgacttaaccactctgtgaagatggtatctgatgcacaggaaatgctccaacgttggctcttgtcgtcatctgtgcccatgtctccctcagcagcctcctgactggccttctccagtctcctggtttggattgaggctccctagaccctacctttctgagactggtatctagtcaggttactctgggagatctccaccccccactgcccagagagcaggttctgagctcttcagtctctccaccttctggccccggctgacaccatccctgccacttctcctggggtccccaaacatctgtggtacttttgtctttcttgcccttggtgttcccactctgcagaacaaccttctctccaggtcaccactgatcgcaatcgcgctctcctttcaaggcccagatcaggtgtcacctgacctttgctgtcctcagatcacacctccctgtagcgactggctcgccagtgtccctctctgaccgagctgtgcactcctccagggcagcactgtcagggtctcccccagacccttggttgtgattctctctccttgtcctgaatctcagttttcctgatacatgggatgctacctgaaggcaggtttcaactttcaatctttttttttgttttttgggtgagatggagtcttgctctgttggtcaggctggagtgcagtagcgccatctcggcttactgcagcctccgcctcctgggttcaagggattctcgtgcttcagcctcctgagtagctgggaccacaggggcctaccaccacacctggctaatttttgtatttttagtagagacggggttttgccatgttgaccaggctggtatcaagctcctggcctcaagtgatccacccacctcagcctcccaaagtgttgggattacaggcgtgagccaccgctcctggcctggaggatttcagatttaaagcaaagaggatattttccaacaaagcaactgcttttcttttttctttttaaattttgtttatttatttttaataaagatgggatcttgcatcttgcccaggctggtctcaaacttctggcctcaagtgatctgcctgcctcagcctcccgaagtgctgggattacgggtgtgagctaccatgccctgtctctttttttgtttgttttttttccaaattgaaacagggtctcactatgttgcccaggctggattgaactcctggcctcaagcagtcctctcgccttggcctcccaaagtgttgagattagaggtgtgagccaccatacctggccctgtagaggggaggcattgatgaaggtcaagaagtcctgttagctctgccttcagaatctaccccaggtccttttagttctctccagcctcactgctggaaccctcacccaagccaccaccttgcagtccacacacggccactgggattggggcggcgttctccgcgcgaaatctggctgtgctcctcccccatgaggccctccaaaggcttcctcttcttaggatgaaacccacactgccagccgaagctcctcaggctcccaccctctacaagctccttctgctccagccacactcaccaggcccgagttcccacctagcaccttccctgggaatgatctccccctggttggctctttctacttattcagcctcaaatgtcatctccactgagaggcctttcctgacctgctgagcttgattccctcccctccccagtcacattactccgtgttatggtacccatccctgtctccttagcttgtttttgtctgtattggctcttccactagactgtaagttgcatgagggcagggatgtctgtttaatcccagtgctcaggatagtgtatggctcgtgatagatgcctagtacattttaaaatgagaacgaatgaagtttgggagaggctcagagcagtgagtctcccccttgttgggggactggggagtgcctgggaggggctatctggtgccagcggtttggagtggctgggatgactctggaatcctgtgaggcccagtcagtttctttggttctcatgcagtgcagtgccctcagacctaaccattttgttccgtgctggcttgaaagggtctgcctccctcccagtgcagcccctgcctctcctctttctcgccccccgccctcctccagagaaagcaggtggtgagggctctctaacccagacaggacttgctgttcagccccagcttgaaattgatttcctccagccctccttgagccaggccccgtgaacagaggaggggtctgagccaggcctcctaggccattggtgggagggagaatgagacagccatttggcccacaggccaccaacttttcccccccttctctaaaagacacacaatggcagttgggctgcacctttgtgagtcaccggtgatagcccatcataaattgttatttcctatatttccagagcagctttatcgggcgttgcctgtgcagtccgggaaccgatttggtatggggtcagttaacatgctgtcttgttgaaatctgtcatcatgcccatataaggcaaactccttggattactttttaccttggcagaatcacaggaatgtcaaggtaaccaggccacctcagcatagctctgattctcacccggtcacctgacttgcccgccctcccccatgactcacccagtggctcagcatggggcctgctgcactgtggctgctggaatctgccaaggacctcctgggactgcccttggttttgtgtcttccttagagtagatcaaatgagaggaaccatgtgaagtagctcacacagggcctaacagagcaaacacaagacgtggaaagcagacttggtgaggcttgagtttagtttgggggttgcgggggtcccagctctgctgcttaacagccctgtggccatgggtatatcccccagcattcagagccttatctgtaaaattagagcacgcagaacaaaccctggtacacactaagtgctcaataaatgtgagtcatttgtgtaattatagtagggtaggccttatgccccacccagtcataaaaatgcctcttgctgttgttggttcaggctcagccccttagtggctttcatggggcaggttgacatggtacccagagtcctcctcggtcctcttcccatggtgtagtgagagcactcaggaccacctaggcctttcctagaaaactgaacccacaccttcccagtgctgccccaccctggtcccccaccccctgcaggacaaaccactcctcccttgttttggggccaggagtcagatctgcccctgagagcagcaggggcccctttgtcctttgacgtcatacccacaccgctcctggagacagccaccccttcatgccagccccaggaaggcttgtaggtggggcgagccagggtgagagtgtagccctgttcctcggccagggcagatgtttcaccatttttaatggagcaattatgagtcagaggtttcagtctctactggttcctcccgatcctataattactctttggctatagaatcctattttgatctcttcttttcttttctcttctttctctctctgtggtcatggtcaggtttttctttttttaaatcctcccaagacactgctaatgttgtctgtctcatgcatccaaggaatctgagatggactgaatattgtcaagggaaaaaaaaagagacccccaaatccagagtgatttcttaacccacccaaatggctttttgtttgtttgtttgtttgtttgagacggaatctcgctctttagccagggtggaaggcagtggcgtgatctcagctcactgcaacctctgcctcctgggttcaagcgattctcctgcctcagactcccaagtagctgtgattacaggcacatgccaccaagcccagctaatttttgtatttttagtagagatagggtttcaccatgttgaccgggatggtctcgaactcctgacctcgtgatccacccaccttggcctcccaaagtgctaggattacaggtgtgagccaccgtgcttggccaacccacccaaattgtgtaccctacaccatcctagtgcttgggagccaacacccactcacaggaggctaagggcaagtttaggtaactcttaacaccacgaattagttgcctgctggcaaacttcaaactccaagcctgaaatttctggttggagtcacctcccagatggactcagggattcattcaccccctcatccagtgctcacggagcctctgtgaggtgcaggcctggagaggagccctgtggcctcagcaaagggcaggcaggctggtgagcacccaacctctggatcgaggggactcaattatgcggataaaggcccctaatcctctcagtgctccaaactcactctgcttctgaaagggatcttcgtaccctgggttcagagagtaggaagcccgcagggaccgagtatgcatgaaacaagcccaagtctgtgggggctgtacatggtcaagatcacagatttccagaccaagccagctccaccctagctgggatgcccaccctgagacacccctctctgctttcactggaataggatggccctgacttggccgggtggactgttgaatcagagcctctcaaaacaggaaaaaggaaaaggatcaccaagcaggagtttcagttgtcaaagacaaaacccttaccacgattaaagattactccagggcctcgcatattcacccttccaccagcagggcccagtttacggatcatttgaatactagcaaaaaaacaagccatctgctggagagattgaacagagggagaaacaggagtgtttgccctgcttccagacacccctttcctgtggcagttcctgcacctggcaagatctactggggaattcccggggtcccactagctcaggacgggtgtgtagcacttgcctaaataacaatcccatcagtgccctgtctgaccttttctccccaaatgccaaaggcctcttgtctggatgaacaaatccctgggcggatttgtccagactaaaacgttaattctaaagactgggccccttaggcactcgctaagattccaggccacactgtctcaaggccagaattggcttacttggctatctttttgaaagatcaaagtttaaaccagatgatctgtagtcccccacccccaccctgaaacctgagcttagctgtaagcattgaaagtaaatggggtgtttgtagctcaccctccctgttctccaggtgaagggccccgtgtgcctgatcatttcatagcaaaatgctagatggggccagaggaggccccagcctctgctgctgccctaattttaaaactgccttttgggagtgtaagtttcctctgttaaaggtagttatttcaaggtaggcctcaccatctcctcctcctggtgagaagctctgcctggagggctgagcactgcctcccgctctgtgggccccacctgccttgggttgagacctatctcttcctggactctgtgtggggagtgcaggctcttccccttggggagaacccagttctttgacgtataatctgagtggtttgggttggttggttggttggttggttggtttcccatgtgtgggatggctccggaagtctgtttgagaacagaggcaggctcagatgggagcagctcctaccccgggccgcctatccccctttaccctggggtttcttttagctccaagcatccattccagtctaacaaatctggtggcagagtctcttttttttttttttttgagacagagtctcactctgttgcccaggctggagtacagtggcacaatctcggctcactgcagcctccgcctcctgggctcaagcgattctcttgcctcagcctcctgagtatctgggattacaggcgtgtgccaccacgtctggctaatttttctgtattattagtagagacggctggtctctactaatagttcaagac

SEQ ID NO: 67546 - DNA, 938 bp, Homo sapiens
aaaaaacagaaaaccacaatgagataccactgcacacccaccatgatggctataatcagaaagtcagataataagtattgactaggatgggagaaatcagaaccctcacattgctggtcaaagtgtaatgtggtgcagcttcttgggaaaacagtctggcagttcctcaaaatttaaacatgttttgtatttttagtagagacggggtttcaccatgtcacccaggctggtcttgtctcagcctcccaaagtgttggaattacaggcatgagccaccacgcccagccaagttcctcaaatttttaaatataagaggtatcatatgactcagcaattttactcctaggtatatgcccaaggcagttgaaaacatgtccacataaaacttgtacatgaatattcacggtggtgctaatatccaaaagatagaagcaacacaaataatgcccatcagccaatgaattgataaataaaatgtggtatatccatacaatggaatgttattcagacaggaacgaagtactggtacatgctacaacatggctgaaccttgaaaacatgctaaggagaagccaaactcaaagatcatataccatatggttccacttatatgaaatgcccagaataggtaaattgcaagagacgaaagaaaggtaggttagtggttgccaggggctgggggctgggtaggagggaagtggggttggagagtaactgtaccagttttgcggtggtagacatgttccttgtatttttggttttttgttttgttttgttgttttgagataaggtctcactgtcgcccaggctagagtgcagtggcgctgtcatagctcactgtagcctcgaattcccaggcttaagtgttcctcccacctcagccttctgagtagctgggactacaggcaagagtcaccatacccagttaatttttaatt

SEQ ID NO: 67547 - DNA, 1185 bp, Homo sapiens
ggaagatgagagtgcacaaaatcaacaatgtgaacaaagcgctggactttattgccagcaaaggcgtcaagctggtctccatcggggcagaaggtgagctggaggtggggcagcgagggtcctgctcggtttctgacctttaggctctgaagcacaacatctgcatcctgaagagaagttttgttggtggcagggcgcttggggcactcagagccccagtacatactcagcagtgatcacaacaactgctcttgatatgatgctgggcccacaagctcccccaaacccttggaaaaatccggtgggcgcagtccaaatctaggaagtgcaacccacccaaccacgggggcgacggcttctgcagggggaggaatggttttgactcggactcaggtcgccctcactggttctccttgtgccaggctcagcagacagtgacaaacatgtgccatggcctctctctgtaccaggaacacctttctcattatgccctgcccggtatcagagaaggactggaggccccatgtcaggcattgggacagggagtgcacggccaaaggtcagtgcctagactttgccctgtgtgcatgggcttggagaattttgcctctgaccaccccaggatcctcctgggccccacgtagataaccaggaccacagtccactacctgcaggccctcactagagcagcaggctctcagcaggggcccctgggttgagctcccaggcgcttttagagacaggcgaggcctgatggagccccagcagcatgagctcgcagtccactcattagtcagagtaagatttcttcaccctgacatccatgttgtcccagcttctagaaaaacaaagtaaactaattgccgttaatgacagggctctgagagtttggccaagactccgggccagaatgtgtgtgctgagttccaaggctctgccccggcccaggacctctgcgatgaggggtgccaagccttgcatgccacagtcgaggtggttggtgtttgtttaaaaaaatcacaacccaaaaattcagtcaggccctgagattttctgtccttgcatgggtctttcctccaggctctgttccagccttctgcttctcacagctgcatttattttgctcaaatgctagtctgtaaatacagaaggggttagaggagagacccatgtcagtcatcagtt

SEQ ID NO: 67548 - DNA, 789 bp, Homo sapiens
gtgacccatatagcttgtaactgaccaacttgtggccttggggaaggtctctttcctccagagaccagcatgccaagtgaaatcctggcatttagccagcccacggactggccttcctgtaagtcaggtccgccagggtgtggaggccacacagcacaaacaccagcatcctgcagtggccacctcccccgaagcggcctgtctggttcagggcggcctcccatggaaggtgctagcagttataaagcagttgtcaggagtcaggcactgatccaagcatttactcatttaatccgcacaacagccctatgtagcaggtatgtcactatccccatcatacagatgtggaaaccgagatagcctggcttacccgaggtcacactgtcagtaggcagaagagtcaggatttgatcacagactgcctggccccagaggtcatgcttgcagcctctctgccacactgtctccatgcagtgcctggcacaggccagactgcagtgaatgggaattagtcactgctgtgggtgcacagggccatacggcactctcatgacagtgagcgggccctcctataacctttgcctttccttccccagctggaaggatggtcttgccttcaatgccctgatccaccggcacagaccagagctgattgagtatgacaagctgaggaaggtgagtgtctccagctccccttgatggcccacagacgtgccctgtctgaccccctaactccgggtcaccatccccatgcccttccatcgccagcctccagatctgggttctgca

SEQ ID NO: 67549 - DNA, 995 bp, Homo sapiens
tgaggagtcacagacctctgtttgaacacagcccaccctgggaggtgggtggtggcatcctaggctctcaggcggggaaactgaagccctgcattacagtcaatggcagagctgggatttgactgcccggcgttcccactcgccctgtccatcatctgcaccagggctgcctgcctgcccctgccaagcccttcgtggggagcactgggctttacccgttttgcagctccttcctgccaggaaaggctcagcatgtgcagcccaacctgcactcacggtcccagccctccagaggccaggcagagcccacagagcttgcgtggcagtggccgccctcctgggcccagctgacctcatgctgcctcacagctcctgccgggccctcagcgttcacgcagaggcccaagcactgctccccccgcttgccttgtggtctctgaagtatctcaggcagcattcccgatgcctgctttgaagtgtcagcagttggcacaggttcagaggaggaggcagaatcgattcttgtttactgaacatgtactacacgctaggcaccctccaaggccttcacatgcacaggcttccagagggtccctgtgcacacccccaggagggctaggcgcagttagccccatttgagagaggaggaattgaagtttagggaaacagctattcctaaaactagaaggggggggccgtaccttctgtggacccctgctttgagcctcccaactagcaggtgcattacctaccgtcagtctggcctggccccactctgccacctcttggtactgtgaccttgggtgggtcacttgacctcagcttccccacctgtgaaatgggcatcgctgtagttcggtctcacaggattgttctgggcgtgaaacgagctcctgcaggcaaagggcttagcacagtgcctggcacggcagctgccatttaggcagctgccagggagccacagtggtggggagtgtggttcttcccagcctcgg

SEQ ID NO: 67550 - DNA, 1959 bp, Homo sapiens
ggctgcagggcgctggctggtcagaaaggaaagtgctgggtccctgtgtgctcctcaggacagccccgtggtgctgctcctgctgcctcgtttccccagagacccagtccaagctcttgcaagagtgctctctggggttcatgttttataaacgcagagtgaaccccaggtctagcgccagtgtgcccattctgtcctgagatcatttatttctagtcaccgaagcgttcccgcctcgttcctttattcactcactcattcagcaaccctgaacaccgccagtgcactgagccccaagctggatgcgggaactcagcggtgaaacatgattcccttgccttgcggcagccccgtgctcacagagaggacttgagtttcgggtgccagttgtctctgccaagttaggagtcagggactgacctctgtgacccccacaagctgcagccctggctgtgttttccacactggcctggggcccatgttcattggctgaggaacctcttggacctcatctctgaggagcaccgcctggggccctgggtgtgtgtcccgcagcatggcgcggggtgtgcacgtgcgtgtgtgcgctcacacgagcaccggctgccgcctccccgcctgtctccaggtgccatgtgtggaggggagaggctgggcgtcgctgcctgcagcactggctctgagccgttggccaagcctctccattttccttccccatcactctgtagaccctcctcactctttctgttcctgttctgttgccgtttcaactcctcctcttggaccctttctgtgcttcctgaaaggtacctggtctctctctccccgtgtgcaccccctgcctcctctacactgttcactgccccctagcaggacagggcaggacgctctcctgtagttcaggcccagggactatgtccaccactctcaccctccaaagccccagcacttttctgccccacggatggtgacttctgtcctctggagctcctattaacattgcctccaaggcaggagagtggacaggcctgagtgtgctcctgtgcacggaccactaggctcctccgggacccgggcgcccctgctctgttgcccccagctctccagctctcggcttcccatcctttcaccttcccaccgggagagactcctccgcagtcttaggtccaacgcagccgacccgtccagcctcaccctcctctgtgtggggcactagagggtttgcgagcagcagtgggagggctccccaaccctcctcggtgcctccagggtctgggctttctggacccaggggcattttgcagtcagcagtgaggatgccaacaaggcctattgggacagggcaccatctcactggagctgtgcttcctctccttcccctctgtgaggagttccgtgggccatggaccagctgctttcaagggacgtgcccgtcaggagggagggtggccagcccccaggcagccctgactgtgtgctcccctccaggctgaaactgccgccaaccggatctgtaaggtgctggctgtcaaccaagagaacgagcacctgatggaggactacgagaagctggccagcgacgtgagtgttcccccagtgaaagtcagggccacctcattatcctcagccagaggtcactgtgactcttgcagggggaaagcaggtgtggcagcgagatgacctagaaaaggctgcgtggtcacagaccatggcatttagccagctggtgtgtacacgacctctccgtttgcttccacaaggctaagggtcagaccggcagccaccttgccagccagcccctgggctcccgagcttgggttcctacagagatgctcagggacagtgtttcctgggcacctcagtgctttagaatcacctggggagctttgtgaaagcccctcttcccgtgccctggccctggagagagtgattcagaaggatggagaggggcctgggaac

SEQ ID NO: 67551 - DNA, 690 bp, Homo sapiens
ggggctcacacggccgtgtggcggcgctcggagaagacacgcagagtgaagtcagcctcgtcgccggcgtgggcggtgctcggcaccaccaggtagtggcctggacgcaggcagcagcggcgggtcacgtcgcggcgggcgctgaggggcgagcggtcggcgcgcagcagccggggcaggagcgcatggctgcgcggggaatcccagaggcccagcagctggggacggggcggcatgaccacggaccaggctcacccccggcccttcatccccgcaccctccagcgcgccccgtccaccctgcctaacccctgtccacgcctcccctgcccccggacccggctctgcccccccacccccagggcagtttgaccaagccccagggcaggttgaccaagccccagggcaggttgaccaagccccagggccggttgaccccatcccagactcacctcctctggaatctgaaagaagcaagagcaaggggcgtcggggcaggggagaggtggccgccgctcagggtctcctccctgccccttctcacctctgtgctctctccctccttcttcgtcctattagacccttattgaacctttgccccgcagtccccgacccaggccctcgccgacccctccccaactcttccttccccatctgcgctcccagcgccttctctgtatccttggtcccc

SEQ ID NO: 67552 - DNA, 1229 bp, Homo sapiens
tcagatatgtttatatacacaaatacttaccattgtgttacaattgcccactgtgttcagtacagttaaatgctgtgcatgcttgtagcctatgagctgtaggttactttatatagcctaggtgtggggtaggctgtaccatctacgtttgcataagtcactctatgatgttcacaccctgacgaaattgcctaaccatgcatttcttagaacttaagaccgtatagatgaccatatagaaaaccagagactgggccaggtgtggtggctcacacctgtaatcccagcactttgggaggccgaggtgggtggatcacctgaggtctggagttggagaccagcctggccaacatggtgaaaccctgtctctattaaaaatgcaaaaaattagccgggactggtggtgggcacctataatcccagatactcaggaggctgaggcaggagaatcacttgaatccaagaggcaaagatcgcaccattgcactccagcgcctggaccacaagagtgaaactccgtctcaaaaaaaaaaaaaaaaaggaaccgggaaggtcatgaaaggagcgtgctcatgcacaaatgcctgataggaacgattgcggaagactctccaaaaaccacaacctcgcacaaagtccactgcaacgttacacagaaagtacttttgtccagtaactgcctgtccaaccttggactgatgccacccttgtttcaagtctcgtagccaaggataattgattcaaaacactttatgtaatcctcctcattttgcctttgaaaacttccccttggctgggcatggtggctcacacctgtaatccaagcactttgggaggctgacccaggcagacccctagagtccaggagtttgagatcggcctgggcaatatggtgaaactctgtctctagaaaagatacaaaaattagctgggcatggtggtgtgcgactgtattcccagctactcaggaggctgaggtgggaggatggcttgaggacgggaagcgggggttgcagtgagccgagattgcaccactgttctccaacctgggcaacagatcgagatcttgtctcaaaataataataataataattattattgttattattatttaaaaatttaaaacttcgccttgcctcaatctcctctttttttttttttttttaagataaggagaggccagctatgcagtggctcacacctgtaatcccaatactttgggaggccaa

SEQ ID NO: 67553 - DNA, 3786 bp, Homo sapiens
ataaaaaataatttaaaaagtattacttctaactataatggaactaagctaaaagccaacaataaaatgaaatttagaaaatctctaaatataagaaaactaaacaacatacttgtagatgacctatgtgtcaaagaaggaatctggctaggtgtggtggctcatgcctataatcccagccaagggaggccaaggccagtggatcaccttagatcaggagttcgagaccagcctggccaacacggtgaaaccgtgtctctactaaaaaatacaaacattagctgggcgtggtggctcatgcctgtagtcccagctacttgataggctgaggcaggaggattgcttgaacctgggaggtggaggttgtggtgagctgagatcacgccactgtactccagcctgggtgacagagtgagactccatctaaaaaaaaaaaaaaaaaaaatcaaaaatgaatttagaaaataccttgagctgaataaaaacaaaaacacaggaaataaaaatgtacaggatgctggcaatgtagtaattagcgggaaacttatagcttaaaaaacatattagtgttgagtcagcctggtgaaaattttaaaaaccccaacacattagaatggaaagaaggcctaaaatcaataatttaggcttccacctccaaagctagaaaaagaagagtaaatcaaactcaaagaaaatagtaagaaggaagtaataaagatctaaatggacagcaatgaaacagaaatataaaaacaatagagaaaaagcaatgaaactgaaattggctcattgaaaacatcaacaaaaccggtattgaaaagattaacaggccaggtgtggtggctcacacctgtaatcccagcagtttgagaggccaaggtgggtagatcacttgaggtcaggcgttcgagaccagcccggtcgacatggagaaaccctgtctctactaacaatacaaaaattaactgggcatggtggcacacacctgtaatcccagctggaggctgagacaggagaatcacttgaacccaagaggccgaggttgcagtgagtcgagatcatgccactgtactccagcctgggtgacagagtgagactcttgtctcaaaaaaagaaaagatcagcaaaactgggccgggtgcagtggttcccacctgtaatcccagcactttggaaggccgaggcaggtggatcacctgagatcaagaattcaagaccagcctggccaacatggtgaaaccccgtccctactaaaaatacaaaaattggtggggcatggtggtgggcacctgtaatcccagctactcaggaggctgaggcaggagaatcgcttgaatccggaggtggaggttgatgtgagccgagatcacaccactgcactccagcctttggcgacagagtgaaactctgtctcaaaaacaaacaaacaaacaaacaaactagtatactggttttcaatgaaatcagttagctcattaaaaagttcaacaaaagagtaagaaaaataaaaaagacagaagccctcaattaccaaaagcaagaatgaaggagggaaaaacactaacatggtacacaaattttaaaaaatcacaggggaatattatgaacagatttaggtcaactaattaggcaatttaaatgaaatgaacaaatccctagagagacacaaattaccaaaactgactcaagaacaaaatagaaacacagatacaatttttgtacaagtatccattgaaatgtattgaaaaatgaaaatgacatagaataaacaaaacaattttgagaaaggagaacaaagttgcaaggcatataatgtgactttaagactcactattcactttgggaggtcaaggtgggtggatggcttgagcccaggaattccagaccagcctgggcaacatggcgagaccatgtctctccaaaaaatacagaaattaactgggtgtggtggcatgtgcctgtagtcccagctacttaggagggtgagcccaggaggttgaaaccacagtgaactgtgatcgcaccactgcactccagcttgggaaacaaagtgagaatctgtctcaaaaaaaaaaaaaaagaagaagaagaagccaggcgcagtggctcatgcttgtaatgccagcactttgggaggccgaggtgggcagatcacctgaggtcaggagttcgagaccagcctgaccaacatggtgaaatcccatctctactaaaactacaaaaattagctgggcatggtggcaggcacctgtaatcccagcactcaggaggctgaggcaggagaattgcttgaactcaggaggcagaggttgcagtgagctgagattgtgccattgcactccagcctgggtgacagagagagactccgtcttttttaaaggaaaaaaaaaaaaaaggccaggcgcagtggctcacgtctgtaatctcagcactttgggaggccgaggcaggtggatcacaaggtcaggagttaagagaccagcctggctaacacggtgaaaccccgtctctactaaacatacaaaaaaattagccgggcgtggtggtgggtgcctgtagtcccagctactctggaggctgaggcaggagaatggcgtgaacccaggaggcggagcttgcagtgagcagagatcacgccactgcactccagcctgggcgacaaagtaagactccgtctcaaaaaaaaaaaaaaaaaaaaagagagaaagactcactataaagctacagtaatcaggaatatgctatcatgataaggatagatatataaatcaaggaatcagaagaatgattaagtccagatttaaaacaacaaaaatggtcaattaatttttaacaaaattgccaatataattcaatgaggagaaaaaacagtcacttcaacaaatggtgctgaaataactggacatctatagagtgagaaaagaaccttgacccttaactcataccacacacaaaaattaactaaaaataactaaaaattaactagaaataatatattaactaatgagacaaaaattaactaaagttaggccgagtgctgtgactcacgcctgtaatcccagcactttgggagaccaaggcgggtggatcacctgaagtcaggaattcaagaacagcctggccaacatggtgaaaccctgtctctactaaaaatacaaaaattagccgggcgtggtggcgggtgcctgtaatcccagatactcagtagactgaggcaggagaatcgcttgaacccgggaggtggagattgcagtgagccgagatcacgccattgcactccagcctggttgagaagagtgaatttccatctcaaaaaaaaaaaaaattaactaaggtttaaaaactaaacttaaatgctaaaactataaaccttctacaataaaatgtaaaaagaaatctttgtgacaaatgtttctcacgaagatttcttaagcaaagatttaagtaggtcacaaaagcacactacataacagaaaaaataactgataaaatgaacgccatcacgattagacttttgttctgaggaagacatctttaagaaaataaaaaggctcggtcaggcgtgggggctcacctctgtaatcccagcagtttgagaggccgaggcgggtggatcacctgaggtcaggagttccagaccagcctggccaacatgatgaaaccccatctctactaaaaatacaaaaattagccaggcatggtggcaggtgcctgtaatcccagctacttgggaggctgaggcaggagaatcacttgaacctgggaggagggggttgcagtgaactg

SEQ ID NO: 67554 - DNA, 1036 bp, Homo sapiens
atctgcctgttgcagcctttacccctcccagaaaagccccccagtcccttaagcaggagagaggaaaccatgggggaggaccaggttgaagatgacgagggccaacagttagacgtggacacagacagcctgaggtcagggtaggagtaaatcgagggtcggggtcagctttgggtaaatcagaccacagagtcagatggggccccccaggatcagagtggggaaaattggtgtgagggcttatggacggagctgcgggcggagtggggcctgagctggcatctcaccgggttgtaggtgggctggtagcccggtgcggggacataggccatcgctcgaggctgcgctagtggctggtcctgtgagaagagctgcaggagtgggagatggtggcggatggcaggcggtggtggctcttatacccagggtaagggagtggctggcaggggagggtccacagggctcctcttctgggactctcaggctgtcggcttctcctagagcgcaccctagtctcccttcccttgccagcttccctggtgaccagccaggacccaaatcacctgggtcccctcccctacgccctcctgcaaagaggaagtgctcatgaacttcggccctgccagggccttatcagagcccataaaaccctgcccagacttctgttggcagagggagggtgagaccaggcagggcagggcaggctgcaggaatgacccaggacaggtgggcagcggaggaggagaacgcggaggaactgcaaattcctgcctctcccagcaactgtgaagggacctacgttgattgcgtgcccaccacacatctttaccacgtatgttgtattgtagggagagtggtttagattactagtgtgtggagccagaggttctaggttcaaatcctgcctttgccacttctcagctgtatgatcatgggtcagtgccttaccctcaatttgcccatgtgctcatctgtaaaatggggatatagtagtatcggctgggtgcagtggctcatgcctgtaatcccagcactt

SEQ ID NO: 67555 - DNA, 3410 bp, Homo sapiens
tagtagctgggcacggtggctcacgcctatcatcctagcactttgggaggccctaggtgggtggatgacctgaggtcaggagtttaagaccagcctggccaacatggtaaaactccgtctctactagaaacacaaaaaattagccgggcgtggtggcgggcacttgtaaccccagctacttgggtggctgtggcaggagaatcacttgaacccaggaagcagaggttgcagtgagttgagattgcaccattgcaacaaaagcaaaactccgtctgaaacaaaataaaacaaaataaatcactggatgggctttacagaaggatagagatgactaaacagttagtaactgtgaccagtggaaattctccaatctgaagaaaaggtcagtgggtcaatccaaagatccaactgacctgtaactggaaatcaattagtgagttgaatagttgcacgaaagcatgttattatattatatgctgacacagctataggctgagaggttaagcatgttgttcatggccacagatccaggatggaaacctagacttcagagcctatgatcccatcgtgttctgtcagactaatacttatatttgaatgttttaaagtaggcctttttttaaaaaaatgatagggctggccatggtggcacctgcctgtaatcccagcattttggcaggctgaggtgggagaatcgcttgacctcaggtatttgaggttacagtgatttatgattaggcaactgtactccagcctgggtgacagagaaagatattgtctccaaaaaaaaaaaaaaaaacacacagataaaagtgtgagttaggggccaggagcaatggttcaggcctataatcccagcactttgggaggctgaggcaggcagatcataacgtcaggagatggagaccatcctggccaatatggtgaaaccccgtctctactaaaaatacaaaaattagctgggtgtggtggcccacgcctgtagtcccagacagaagaattgcttgaacccgggaggtggaggttgcagtgagctgagattgcgctactgcactccagcgtggcaacagagcaagaccccgtctcaaaaaaaaaaaaaaaaagtgtgtaagtcagaagctgcttaaaaccctaattcagaagcactgctccactgtctattgccaggagctaggaaggctggcagggtgtgtgaagagcgtctggtacctgcagtgaacatttttcctgcaccagagatcaccaccgcccgacagtcagcgtctctcgaaatcttgttgaagcactctaccatctctctgtgaagcaacgagtgaagggttacaaatggggcgggaataccctgccctcatgtccatcttcccacaacgttccactttcacccagtcccgcagccccgcctccccccgcaggcaggcctccaggatctgcaggtcagacctccagaagaccttgttcatggcattcctcttgttgggccggttgagctggacatgcagaacatgtttctgcgcagacgtcacacgaagggactcatagctgtggtctggggcttcaccgagggctactccggaagcctcctcttgtgcagaggagccagtgaggcgaaggctaatactgagtcccgggtagttggagcctgtcagtcctggggagaaaggaacagcctttgatgaccccagactgcaagacacaggcctatcgaattagggagtccttcaaaagggagcacacgcacccctgaatttaggggactcgggcccttcgtgaccccggatagccctccccgtcctacatctgctataacagcacgacagcgcgacgcacccccataaggcaagaggtgactcacgccgggtcagtaggtcgcggagtctgcgagaagccactatccccgccgccatcgccgccgccttcgtctactgcgttcggacggagtaacgtgcccgttagcggagggggcgggcacagaaggccgccatgttgagcgagggcaccgatgccgcaacctgacaggcaatgacgccgttctttccgccatctttactaagggcagtcgatttccggttgccttacatagagccaggctcagaaatggaccctttgccccagtgggaacctggccaaagaaaatagctcctgcaatggcgtgaacctgggaggcggagtttgcagtgagccgagatcgcgccattgctctccagcctggcgaccgagcgacactccgtcttaaaaaaaacaaaacaaacaaacaaaaaaaaaaacagaaaagcaaacagctcccgctaaagttcatcacacagctgtttcataatggtggaataataggcgacagctgaaatgtccaaggacataattgcagcagagcttgtaatcatgcatgtatatatcatgttaactaaaaataaaagaaaacttgcagtactgtgagtttactcaggtaaaggaatgagtacagacgggccaacattaagcgctgactgtataatatgaactcccaccaggaggtcgtactatttcctactatatgcagaggaaactggcccaggcacgggaagacactaggttcaaggtcggtgggcttcagaagggctaaagcaggattacctggcaccagagttcatgttcttagcctggcgcagtggctcacgcctgtaatacaagcactttgggaggccgaggcaggcggatcacctgaggtcaggagttcaacagcagcctggtcaacatggcgaaaccccgtctctactaaaaatacaaaaattagccgggtgcggtgtccggcacctgtaatcctagcgggaagagaatggcttgagcccaggaggcggaggttgcaatgagcagagatggcaccactgtaccccagcctgggcgacagagcaagatctcaaaaaaaaaaaaaagaagaaaaaaaagttcatgttcttaaaaaaaacaaacaaaacaaaaaaaccgaaattcccttgggaaaagccagctaccaaaaggcataaaaagtactgtaaaactgctggccgggcgcggtggctcacgcctgtaatcccagcactttgggaggccgtggcgggcagatcacgaggtcaggagatcgacctcctgacctagctaacacagtgaaaccccgtccctactaaaaaaatacaaaaacttagcgggcatggtggcgggcgtctgtagccccagctactggggaggctgaggctggagaatggcgtgaaccccggaggcggagctcgcagggagccgagatggcgccactgcactccagcctggggacagagcgaaactccatctcaaaaaaataaaaaaaaaaagtactgtaaaactgcttaagtatgctttttggggagacattgagcaaggcggtgaacagatgtctctgggccagtgagattgaaggaagtatc

SEQ ID NO: 67556 - DNA, 1434 bp, Homo sapiens
tcctgggttccagcgattctcctgcctcagcctcctgagtagctgtgactacaggaacgtgccaccatgcccggctaatttttatttttttagtagagacagggtttcaccatgttggccaggctggtctcgaactcctgaccgtaagtgttccgctcacctcggcctcccaaagtgctgggattacaggcgtgagccaccatgcccggcccactttcttattttttgtagacagggttttgccatgttgcccaggtctcaaaactcccggccttaagtgatctgcctgccttggcttcccaaagtgctgggattacaggcatgggccactacatccagctatatatatcctttaacccagcaattccactggcaggaatttatctcctgatcagtatcagggaagctggccaagatacttgtgtagatacgtgttacagcgctgtttgcaatagcaaaaatagacctggaaactaccctttgggaccaggttaaatcatgacacatccacacaatgatactgcaagggtaaagacaagtcactctgaaatgatacagaacacaaaggttttgggtttttttgacaccctgttgcccaggctggggtgcaatgaccccatcacagttcactgcagcatcaccctccagggttggggtgatccacctcagcctgctaggtagctgggactactggcatgcgccactatgcccggctgatttttgtatttttagtagagacagggtttcaccatgatggcaaggctggaaacctttttttttttgagatagggtctcattgtcacccaggttggagtgcagtgatgtgatcactgcactgttaacctcctaggctcaactgacccacctgcctcagcctcccgagtagctgggactacaggtgttccaccaaacccacctttttgtagtgacgtttcaccatgctgcccaggctggtcttcaactcctgagctcaaagtatgtgccccaccttggcctccccagattgctggaattataggtgtgatgacccactgggcctgatagagcttgctcgggcagggcccagtaagaatgccactaagcctgatggattttcctcaaagactcaattgctagcaccattctcagtctgcagcccaccctgctcctcttgggtctctgtatgcctccagagggcctgtgactgtgctcaggcctgcctgtgtcttcaggacagagagggagaaaagcagacatcctggaatcccagcaagtgctgtgtttattttccaaacaattttattgaaatgtgccaagagtacatgggcagcacaaatgtatgaacaggaaaaaaaaaaatcacatgtacaataattttttaaaagtgaaggttaatcttgggagataacagttcccctctccctccccctgcagatttccagcgtttccattaag

SEQ ID NO: 67557 - DNA, 5496 bp, Homo sapiens
cccaaattccttgccctttaactggctgagccaccatcatctagctaagcacacctgttccccaccactcacacccaggttcagtcagggcaaaaaacaacacatgccccagaaactggggcagccaggccagtcttgaccccttctagtcttgaatcgccctcccaccaaaatctgctttggaaattactgcctaggtcagactaagaaaaaccagacaagaaaagtcttttatttattttttgagatggagtctcactctgtcacccaggctggagtgctatggcgtgatcttagtccactgcaacctccgcctcccaggttcaagcgattctcctgcctcagcctcccgagtagctggaattacaggccctcgccaccacacctggctaatttttttgtatttttagtagagacggagttttgccatgttgaccaggctgttctcgaactcctgacctcaggtaatctgcctgcctcagcctcccaaagtgctgggattataggcatgagcccccactcccggatggaaagtcttttagaaagaccagagactccaacccataccattaagaaccgactgctccttcctaagagaagtatcttacacccaccgacaaaagcctctggtcatcaggagaaagattaactctcttccgcctctcctgggctctggggccggccccctgtctgagaatcactgggcagaagtgcgtggaaggtgggtagaattggattctatttcaggagcgatccacgcgaaccacagggtgaggcactcccgccaggttagcagctcccacaaatgggagttctaactccagccctgcccctcactagctgtgccacctacagtaattcacctcatctcatctctctcctggcccatttcctcctttgtaaatcgggaatcccagtatctcccccaacctcaggaagcgttaaggattttcaattaagatgtctttaaaatgtgtgggacaaggccaagattaaaacgctagcaactcgtaacccctaaaccctggaaaaccctgcaaataggcggccctgtaagacttcaagattttggaaagagtggggactgggccccactccaaaagcaacgactggtgttttcggagggactgattacagggggtcgaaatgcttccaacatggccaggaaatagtttggtttatcaaatcctcggtacccagtgaatccccggaaactgtaagcaaacttgtgatggtttcaaggcttcgctcaactcctaaaaggctaaaagtgcatttcacaagtcctcttcccattttcaatgcctacaaaaatgagagcatctaggctcaaacacatccatttctgtatagacacaaggctgggccttagagattaagctgccatcagacggaattccccactctagagaacaaggccgccgcccacccgttcccgctcaccaggcgctcccctaaccgcccacgaggccgggcgggaacactgcgcctgcgcatggagccagcgaagaaaatgataaaggggaaaaaaaccggccgggccgcgtgcccggcccccacacgccagcccgcggcgcctgcgcactgggccattcgcctcacgagctacttcctctgcgctcccccacaccccgctccggaccccgcgcacgcgcaggcgcctgtcctcgcgcaaaccccgccgtttgcccaacggccgcccctcccccacaccgtcaacgacgcgatggcctgggcgcgtgcgcagaggcccccctcaaaaaataaaatgccctcaagctgggaaattgtcccccagttcccggccttcccagcgcctagggccctggcctcaccccaccgccgccgccgcccgccgccccggctcctccaccgccaccgccgccgcctccgtgctggtcgccggcgttgtcagtcttgagccgcttaggggcccggccgccctcactgccgccgccgtagtagcggccaccgccgcctccgccgcccgccgccgccatcttcaccatcgctcccgaccgcctccgctgctcgtccggctgctgcctctgctccagccgccgacgccgcttctccgcccggggcagcagcctccgcgacatggcggcgcagaacccgcctccccccgcctctcattgggggagggacacgcccgtcacccgccgcccccacccgatagggggagccactggtcccgccgcggggggagggtaggccgccacacgccttgcgcgcttattggacattgcccacgccgttctgcaggagggcccgcccttgtttgtctgagacactccttataggtggtcgctttctgccagtctttccgtcgaccccgccgccttaaaataaaatccaatttgataggtcggatttctggcgctgctggcctccctaaaagcacctgataggaacggcgctctaaacctcccaagaatctccgcctccctcccactttcattggtctcctcgctaatccgtcagcaccagtcacaatgacgaccttcccgcgccacttcgcaaggagacaaggaagccccgcccttttttggtctctctccagtggtggttacagatgcccattcttctgcgtctccactgattggtcaatggagagtggagcgcaccctctcaccagatggtaggactgttgatacgctctgattggatgaaatggggagccccgccccagggtaggcgctctttggtgcagtatacgaaacgagcgaaggcgagaacgcatgcgcaaatacgctttcaggcaccgcccagaggcggggcccccttatggagcgaccgctgtgtgtgcgccggaaggctagaccaagattgacaggaactcccagggtatctctgtcgccatcactataccgtgttcatttctacctctaggaggaattgttaaaatcccaaatctgagccttttcctcagtagaaaaccactcgctgctgccgactgtcttcggaccctgtccagttctaaattcagccgcaacccctttcagtttcccttgggagaaggctcttccgcgcactctccatgtgtgcccatgcagtcccttccacctgcaatagtccactacccctcctgcaggagctaagggccaagtcatcttgtccgtgcgatctaaattaacaggtccctgccatcccagacccccaggattcccttcaaagccataactcgggccagtggttttcacctgacagctcgacccctctgagcaccacaggaggtcctggccccgaccctggagagggtggccacctaccaagcgcccagtacagcacctggcacagtgcaagccccctgcacaggggaggcgttcttgtgatctgtgcctgcgtcgggcctttcttcctcaagggcggggtaagaccacccgcactgcaccaagagaatgtcggagggtatctccagactccggcgaagcccaactggcggagcctggggggtggagaggagcgcgccccagttatcacgcgcaggcagcggggtcaaacggggattaacccgggatcccgtcctacggcatttaacattatggggctgcccgcgcagggtgtgggggggaacaccttagcgaagctattggcaagtgacgatatcgccaaaggggggaaaagaaataaaagcgaagctagcgtcgtgagaaacgcggcggacgccccaaaagtgctccaggacctttctgcccggctgatgggggatttcgagttgaggtccgggtggaaactaagtttgaaatggaggccgtgtgtggtggctcacacctgtaatcccagcacttggggaggccaaggcggaaggctcgcttgagccccggatttcgaggttgcagtgagccgtgatcgcgcccctgcactccagcgtgggcgacggagcgagaccctatcagaaaaaatggggtttatggcaatacaagaggggacaggcctggtggctctgccggtgaggggaaataaagttaggggagggggccttgctggggacctcggtcagctcccccggacaccaggaagatccgaccacgccaacggaacagagacgggggcggggccgcgtctgaagcacgtggcccgcgtgacgggaggaggccgggccggtcgcgacgaagggcggggtcgctccgtcccaacgtcagaggaatgcggtggggggagggggagagagagggcccctcccctccccgcccccgcggccggcccggacgcccctcgcgccggcgcgcacggccggagcacggcggaacggtctccccggcgccgcacgttccaggccgccggcccggcctggtgacccgcaccccccgcgctcccggccaccgccccgcccccaccccgctgctcggaccctggcccccggccgcgcgcggcgccgcccgccagtgccccggtcaccttcccgcacccctcgcccccagcccctaccagctcggcggcgagcctgaccggccgtcccggatcgaaaagagcagacactgggaagttttgggagagggaggggcgggccttaaagggaccacgaccttttttcagccccgtggggggaagaaaaattgggggcagggggcgcgggagcggggacacggcaggagaccgagggtcgccccgcgggggaatggaggaaaccaggcgagaaaggagcgggaagaccttggagccgcggtgttcgggctccgcgtcccttttccccaaaaatccacccccgccccccgcagacggaaagtcacgcagttgtttgagactcgcgcatctttcctcctggtcaggcaagtgtcttggctgaggcaagtgtttggggtgtacattgctcacataaggaaatgggctggagggacgcaagtgactaacccaggatgccacagcttgcaagtggcatggcggggctggtctgacgccggagcagacgcatcaccactgcacttgcagggcttattagggtgatggggtaggctgtagagatggggggttcagagcaggggactggagccaccctaccggggttccaacgtggaagctgcatttactgtctctggccttaggaaagtaacttagccttcctcatccgttagggggatggcagtaggagcttcgtctgggtcgtcatgaggaatgcagagaatggaaacgggaccttagaggactacccccatttcacagttgaagtaaaactggcccagagagtggaagaaccgcgaaaaattaccacagctgggcagcctctgaaagagcaggtcgctcccgttcttaatccacacaaaacttaatcggacccttgcagatccttgtaaacccatgccagccgggcacggtggcttcccctgtaatcccagcactttgggaggccgaggtgggcagattgtttaagtccaggagctcgtgaccagcctgggcaacatggtgaaaccttctctctacataaaatacaaaaaaattagctgggcgtggtggcgtgcaactgtagtcccagctactggggaggctgaggcggaa

SEQ ID NO: 67558 - DNA, 842 bp, Homo sapiens
agacatgagcttctatgcccggcccacttcctttattaaaaattatttttccatgatgtgagtgagagcccaaggggagacttctagcatgaagcccagagctccacagcaaacaggagcttgagtttgaccctaagccctcaaccagcgataccccaaacagctgccatttgagtttcacgtcccttttttttttttttttgccacacattcatgcatcacctgcccacttcactgcttaataattttctttaaatcaacccactcttttgtttttaattcaacacatttatttaaacaggagatgtcatttcactccaggaagtggaaaaccagtgtcagttggcacacatagactctaatagtacaaataaatccaatgattcagcaacaacagagaagtgctaaaagcattgggtgaaaggtgttgaggaacaggttggtcaccaggtctcaaggtgacacccacagatgatgcaagaattcaaaggctcacgcctataatcccagcactttgggaggccgaggcgggtggatcacttgaggtcaggagttcaaaaccagcctgggcaacatgacgaaaccccatttctacaaaacataccgaaaattagccgggcatggtggtggtgtgcacctgtagtcctagtactactaagctgaggtgggaggatcgtgggaggtggagattgcagtaagcctagatcacaccactgcactccagcctgggcgacagagtgagaccctgtctcaaaaacaaaccgacaaacaacaaaaaataaaacaaaaaacaaggggagaagatgaccatctgcaagccaaggagagagccctcagaagga

SEQ ID NO: 67559 - DNA, 1636 bp, Homo sapiens
ctcccaccttggcctcccaaaatgttgggattacaggcatgaacggaggggtgtgaaacccctagttgtcactggtccctgtcacagtctcttctgcccatggctccttaaagggcaggttggcctgtggggagaggtgggagctgggtcagaagggcaccaggtctcaccctcccttctacttgcagccagatgggcagtcacctgggctctgggatgatcctttctgtgcagcgtccgcctgcggtgccactggtgcagggaggcgcgggcctcggagctgagcccccggggagcgcggtctgtttcgggctggtagtgggcaatgtggtgcagcgccccaaaccacgtggtcaggtagtacccagctggggacagaaagggaagtcagctccgccctctcggcttccctggtcgccccaaatccccctgcagtttgcctgccgtccctcctgctgcggggggaggctgtttgggatcccggaggtactggatcgctgggctccagcattctggagttgggggctcaccctctccccgcagctcatctggatctaagagctccataagaaactctacgtccagctgcgtgtccccaatgtccgggctccagatgagttcctcggtcagcgccggcaggaaggcgtcggcccccaggggatctgggaaaaccagaggaaaggtcttgagatggatccccatctcaaggcgcgtagacaccttccatccgatccccaggaccacgagggctggctgcccctccaccttgtcgggcatgacagcgcctcctaccagaatcttcaggaccgcatagattcctcccaccagtgctaccctctcccgcctggctccaactctcaaggctctccccaccacgctagacgttgacccctcccttaccttggttctcgcctcgagccaggcccgcatagacatctctgcacacctccaagaggagcgccaccttgcggcgcggggcgcaggcagcgtggaggtgcgcaaggcgctcgtggatgcggctccgcaaggcgggggcggggctctgcccttccggtcccggcccctgtgcccccggaggccccgcccccgcccgcagggctgtctgtcgccgccgcagccgccgcagctccggtgctcggagtgtgcggagtcgtgtccacagggccggcttcaggggcgccagcaccgcctggcacaccgccgtctccagcgcggggcctgcggggtgtgggggacgggtgagcacaggaccgccaagttgtcccacgcccacccacgcgctccaacaacccaccctggcccacagccacccctgcctagctctggtcccccgtgagtgtagacatggttgtgaacatgtgtggaagagttagcctgggtgtgaacttgcgcgcatacgtgggcgatagaacgcgtgggatgtgtaggaagggcgtgtgggtgcagaaggaaacgtgtgcgcaccgatggagaggacgaagttgcacacttgaacccgtgggggctcccttccagtcctcccattacctggatcctcgtccttcttggggagcccaggacccctgcttccaaagacagccctgatgtaggagtcctttgccaggtgatcctggaggtcagtaaggaggtgccgcac

SEQ ID NO: 67560 - DNA, 2505 bp, Homo sapiens
ggctcaagcgatcctcctcctcctacctaggggattcagggcatgaaggaacactcaggaggagttaggaaggacacgacagtgtgtgagtgtgtgtgcggggagggttagatttacaaggcagagggaagtttagaaaggaaaagagaagggaagagacgctttggctgggaggcaggtttaggagggaggtgcagtggtgcagtggaggcggtaggtttaggagaggcgcggaacaaggggaagccataggaggggtcagcaggggtccctcagcatcctctggttgcctctaacaatcaggtacccatagcaagcgggaccggggcaacttatgttctttgcagcgagggaccttagcaaccaaggtgcgagaaacacgcgatcattggcaacttggcaagtggatgtggtaaacgaaccctgaacacactgcgacccagaaacccaccagcctagcgatacagatcgctaagcaacagccctcagaatcccactccccgaagcgctccctacttcccgccccaccgcggccacccttgggccccggggcctgcagcattcagccaggccccggcgcggcccgaccctcctacccggatccccgactcacggtctggctctgccatgggcgcggtgctgaagcccttgaggctgtcaccgaccgctctgtcccgtcaccaaccactgtgtcccgtcaccgactgctctgtcctgtcaccgactgctctgtcccgtgacggcaccagaaatgggagtggccgtgatagggcacagaactacaactctcagcagacattgcggccgcagacgcgctttcgtacaacacccagagcgccccagttaggtaagaaagcgcgcgaggaccggactacgagtcccagaaggcgtggcgtcagcagccatgttggtaaagggcgcccggaaaatgtgggaacggctagagagttgtagtcctcccgaatactctgattggtcaggatgcagtacgagggcggggtgtgagcgattcagcatattatcattgggtgaatcagggggcgtggtggggaatttcccgcagggcggaagctccagaactcccggcaaagcccagctacaggcgggcgactgcggggggcccctgaggcggcgggggccatggctggggtcgcgtgcttgggaaaagctgccgacgcagatgaatggtgcgacagcggcctgggctccctgggtccggacgcagcggcccccggaggacctgggttgggcgcggagttgggcccggggctgtcgtgggctcccctcgtcttcggctacgtcactgaggatggggacacgtgagtgaaccttaggctgccaaacggagccctaggacccggcgtcacattcctcattaatctctgatccctgaggcttcctaacctcatactcctaaatctgacttccgatgctgaacttcctgacctctaacccccgagtcctaacttttaacaaaaccaatcttctatctagctatgatcctaacccaatcatttcttaccttcttttcttgaactatgattctcagctcctggaatccacattgtatccactgatacccaaacctgactccagtcctgagacttctgttagaactgtggcttctcctgacttctaacctccaaatatgatctttgattcttagttcccgatttgagccctagagtttgatttccgaaattaatacttggtccctgactctaagatcctgtcttctgagcagtgttcttcaaatcttaaattcaaagagagagaatgtaagctcttctatgttgaattcctaattaaagtaaaaaaataggaaaattaaaaaaaagaatgttagctccatgagaccaaggattcatctgttaaacaaatattctttacacattaccacgttccaggctccgtttaggtgctagtgataaaggcagtgaagaaaacaaacaaaaacttaagcccttgtggagcatacattttagtggagctaaataaacagattgataagaccacaaggaaggaaagaaatggaaagacaggaagaaacaaagaaagacacgcagaaagaaagaaacatagaaagtaagaaaaggaaataaagtcagaggtagttaagtactttggagaaaaataaagcaggaaaatgaggcaatagataaacaagataagagcatttcaaggagaaggaactgcagttgcaaaggcccagatgagggattgtactgggttttttgtctgttgtgtttactgctgtatgcccagtgatgcaagcagggcctgatccaggaggcactgaatattgatctcaaccagctttatagtctcgttaattttcattaaatttcattaattaattttggtttcattaatttttttttactttctattcaattggtctctgttctgacttttttttttgaaacgaagtctcactctgtcgcccaggctggagtgcagtggcatgatcatggcttactatagccacaacctcctggctcaagt

SEQ ID NO: 67561 - DNA, 944 bp, Homo sapiens
tactctgtcctgtgactctagccacgctggcctccacagactcttcctccatatccatctcctgacctcagacaacctgatgcgctctgcttggattcccctctctgcaccgtggctttgaaactctctcaagacaataagctgtggcagtcaagtgtggggcccacctcgtgtttcctgtctttcaggggtcactgtgattcattgcacgatgtccagtgtcttcaacactgttgcttcatataccgtatttcgtctgactcttgtttgtttgtttgtttgtttcacgtgggagtgaattctggtccatgttacttcattttgggcagaagtggaaatcccactgaataaacattgattccacgaatttgctgatgaaactctgacctctgacctcccagatagctgacagggggttccagaactgtggtcacaaggcctagcatacagtaggcgccccatgtttgttcaatgaaggaatgcaagaggacttgaactttgccctctcaccccggtctttgtccccagggcactgcacttggctgtgattcatcagcatgaacccttcctggattttcttctaggcttctcggccggcactgagtacatggacctgcagaatgacctaggccaggtgagccacgagggatggtgtagggcttggggtccagggttcccagtgtgactccctaccgcctgtcctctgcttctgcagacagccctgcacctggcagccatcctgggggagacatccacggtggagaagctgtacgcagcaggcgccgggctgtgtgtggcggagcgtaggggccacacggcgctgcacctggcctgccgtgtgggggcacacgcctgtgcccgtgccctgcttcagccccgcccccggcgccccagggaagcccccgacacctacctcgctcagggccctgaccgtactcccgaca

SEQ ID NO: 67562 - DNA, 1815 bp, Homo sapiens
aactgcctgctatgtgtggcggaggtgcacaactctccctacctctctctctaaacgcaagagctccaccacaccccagccctgaccccgtccgattcacacttggctccccattttcctttgtggtcttagggaaaggctggcatgaggttgcagcacggagggcaatgtcacatagcaagttcctaaaggacaggaggtacccagcgagcagtatgaaacaagcgcataatgggtgtccaggacacagtaggcattcttggcacatagtagggcctcagcactcactggacaactggcacataagtgggtgccatgcacaagacgttggctaacttgggaaataactaaaattcctactacaggttcgccccctgccggagggcatcttgcaaacccaattcttccgtaaagcaaacgtctgcgccccccggccggcgcaggcgcactcacgatcgcgggcaggtccgccgagcgcagctcccccttgcggagctccagggcgtgtgcggcctcttctgggcatgcgcagaaccgctctatgtccagctgagggagtgcgctgtagccctcgcgcgcatactcgtacaggaggttccggtttcgtttctctgtagtgaaacttctccttggactatcgttggagatgcagcctccccggggccggaacccccgacgagtcagcaaaggccacaagcgccgcgccatggacgcagccatcttggaccgggaacaaggcggcacttcgtcccgcccactccgcgtttagaccaattgcaaggcagcgaacctgaccgtgacgagccaatcagatcctgaggaaagttgaccgcgatagagtccttcgtcgcccaatcgtcgtctgtgtcccgcctcttcagtgacgcgaggcagaaccagccaatccctgcacggatagcgcccggaagaggctagaagctggattcagcgtgtccgcgacctcacctttaggtcctgtgaggtcggtggaatcctggggtcctccaaatctaccaggccatctccccagtttcccagttcttcctgcgtgcgggcgagagtggttgggccctcgggaacccactcagagcgaggctaaatttacggagggactttctgttagcagcatgagggcctgtggttagacctatagaggtatttcctttgatttaagccagaaagtcctgagagcggatcggggagcatttgcggatcggtcactttttcctcctttctgagtctcttatcccctaccacagggacggcccaggtggcaggatgtcctggtctggccttctccatggcctcaacacgtccctaacttgtggtaagtgggggacttgggcttcagggacgaggctagagggggagggttattcgctcttggacttgtgtgcctccgtcggagccccgagggaaacgggggtggaaaaacacggtggggttttggcagagctagggctgctagagcaagaggtgggaagcagctgcatggagggctactgcgtgtcaagcggcgtttgggtcagttttattatttatttatttaagatctccctctgtcgcccaggctgaagtgcagcggtgtgatcacagctcactgcagtctcgacctcctgggctcaagtgatcctcccgcctcagcctcccaagtagctgggaccacaggcctgcagaaccacaaccagctaactttttgattctttgtagagagggaggtctccctgtgtcgcccagtctggccttaactcctgagctcaagtgaccctccacagcctccaaaagtgctaggattacatgcatgagccactgagc

SEQ ID NO: 67563 - DNA, 1053 bp, Homo sapiens
tcctgacctcaagtgatccacctgtctcagcttcccaaaatgctgggatttcaggcgtgagccaccacgcctggcctgagtttggcttttgagtgttgagcggccaaacctcagtcgggttacagacccacaaggaaacccactgcggaagaaaccatttctaccccataccccaatgtgtgccagctactgtgacctttggaacccatgacccatcttcaacaaaatctcttcttgcctcagttacttctctgaacattcctaccaccttcttgctctaactggaacccagctctcctgtgggccttccaagtggggaggtctccgtgctcctgggagctacttcctgaccattctccctccaccctccccaaaacccccagcgatgaatctcatcactaccttgcttcatgcgtcatctgctgacccagatcatgactcctctcttctccctaattttagctctgggctcacggccgctcccgctgctcttagcatcattctcagtgatttctataaccagatagttcttccgcagccccaacctctctgttccctgacctctctctagtgactttttccttccccaacatctccctctcgtggtcaaacccagaccttgtttgaataacagcagcctcttcagaacctcaatctcacactcactctccacccatcactttttctttccacctcattccctccagtgccccactcgcatgatccttccaacccactgtgatctcccatccgttgtccctttcatattttactccccctcaccctcccatgccctcatttcttccttagccagcttaaattccatggttaatcattaaaaacattcttgacctggcacgctggctcatgcctgtaattccagcactttgggagggcaaggtgggaggactgcttgaggccaggagtttgagatcagcctgggcaacacagcgatactccacctgtacaaaaaataaaatgaaaaaattagccgggtgtggtggtgcacacctgtagtcccacctactccagaggttaaggtgggatgatcgc

SEQ ID NO: 67564 - DNA, 2258 bp, Homo sapiens
caccagcgatcacgagttacttcttgccatttttgaaaagtaatgtagttaacaaaaaaatgtatttggccgacaggggttgggggcggtggtgagggagaggttgttgtttaaaggcgtgttgttttccatgcaaagctctgtcctgtcctacgtgtctgagtgtcgtgtattactggaacatttttaaagaagtattatttattttacaactagactcccataatatttgtctttcaaaatatggagtaaatagacgctgtctaaagttgaagaggcagtatacagagctttcgaacatatcactgaacattgcaaaagtaacttggcagaacaaaatttaaattgagggttggggccgcagcgaaacacataatgtgcccaagttgctaaatcgagaaaccgccctccaaggcttctgattcacagattctgcgaagggactgacggccagaagacagaaaatccagcaacggtaaaaagcggcctggccttccccgggctgttgcgcccacgtgttggtttgcagcgtttggcaggggttttggatggtggcctccgcggacgagcgcagggatggagaggcctgggcgttcgaacacccacgttcaaagcaaagcccttccagatttagggctttctaacgtgcatttgtataactttgggtttaaaggagcctcaggccgagggagggcccgggaaagcgacgctgcgggttatgggactcccagggacccgcccctccgggcagggcctggcgcgggaatccttcccggggcgccccagctgtgggcgagaacgggactgacgcttgggtcccgacctgggtcccctacctgtcccggcgctcacctggcgggctgctcggaggcggcagcggcgggctaagcttccctttcccactttgttctgggaggcagtcgaggggctccccgtgatcggcgtggcccagggggccccgggaccggcggtctgggcggtcggtcctctcccggggcgtggcggctgcagcccggcgccgggggcggcgactctgagatccagcgggcgggggcgggaggccgcccctcctccggctgcggggcccagcgggagcgagggcgggcgggcgggggagcttggagggctgcgtgcagcgagggggaggcccagttgccgcgaggccagcggggagcggggccagccccgcgcccctaggatccggggcccacccctgggagagccacctcctctgggtgtgcgagttccacatccccaagacgcccccgcggggggactggtcctagctccccacccccacccaaattccgtttccttctggtcctggcctcctgcttgcggccgtctccacccctcacatccatgggatcctgcacaggtccacggttggtaaaccgcttagctgtgagcccgacccagggcctgattcgaaacacttggatcaaagtccctggccacagggattttcttgtatttacgttgcttcccagggccagattctcagaagcccggggctgatcttaaattaaatcccttcaccacacgcactctctgtggcaatgacaaacctgtacccttccaccttaggactcccctgtcctccccatccccccagctatagacaactgaattaatccggaggttcagtttcggtcaggctggggccgcgacccattttctccctttacctctgcccttgggtctttgcagtcccttctgatggccctagattgcaccagggacctcaaggtgactgatctcagacaccccagagctagttttctggaagccaggcctcccccacgctggtaaatcattctccaggcccactggctcatatctgccactgtgctaaatgctttgtatgcatgacctcctcatggacgcctctcccgagaaactgaagtccagagatacctggtctgttgcacgtagtccaagtcgctagcttggaggggtcacacagccagagagcctggattccctaaagccccttcccctagaaacctcagccaggccccacagcgccatcgtgaggacggcgtgagactgcgtgtgcagcgcggagcacagtgctggactcagagccaacgctaatttgactactattacattatttgtaacaaccgcctttgaaagcattttctgctgtgggttgtaaaattactgtattattggtagagtttttagcacagatccacacgcagttccttatgtgaaaggcgtaggcctaggtttgttttgcattccggattttg

SEQ ID NO: 67565 - DNA, 1613 bp, Homo sapiens
cccataaaaaggccatgtcacatgcagtcagtgcttagcaaggggctattttaatcgtcacactcaccagtcagagacacaaatctcaatcctgccactatccagcagttctggccacagaccctcctcctctaggtccaagacctgcttcttgcaacaccagctgggaatgcaggagacagggtaatgagaacaggcaggcctttctcaacaaggggccggacctttggatagcaggggcattcacctgaatgaagtcacgaagcacgtctgagaaggggccccaggcacggttgtcctgttttcctccaccacccagccgtccccaccgtgttgcaccatccactttcggaggccttctgtgaaataaaaaaggcttgtgcccaagttccagtcgcccgcctgttggttcctagtgagaccccgcccctagcccctcccacgtgctcacagtgcagctcactcacctgacccttcccaccgaggccccgcccccttcccctcccaccagctcagggcaaagccccgctcctctggcccttctcactgatttgcagcaaagccctgcccctccaacccctctctcgggctcccagaactgccccactcccacccctcccacaggcaaacggtgaagccctgcccagtcagccctgcaccctgcgtgccaatgctgcctcgtccctccgacacctcccaccggctcccaatgctgccccgcccctccggcacctcacaccggctcccaatgctgccccgcctctccgactcctcccaccggtcccactgcggccctgcccctgcggcccctagtaccggtcccagtgcggccccgcccctccggccccgctaccgctcccactgtggcccagcatcctggacttcctcttccgagatcccaccttggccgcaggggttgcgaataaggttgcgtccgatgggtctgcgcgcgcagaagcggcccagggggcaaggcctggcgttacgggcgggagactggcagctgcgggcgaggtgcagcagcgcgcggccggtggcgccgtggtcgcgggccaggatcagcagccacagggcctggccgtccaccagggctcgccagccccggcacacttggcggcagcgcccgagcagcgtgcgcggggggacgtggctcagcaccaccagaagcagctctgggggtagttggctcaggtccagcgcctcttcgggttccggctccggcgcggggacccgggcggcccggcccctggagaccgaggcgcccatggtccccccgccaggcccggctgtggctgcgggagaggaagggtcaaggcgtcagggaccagcagcctccgcggcgcgcagcctctgcctgccctgattctgccagccgcacccccgtcttcaccatccctgggccccgtccccaagtccccatcccccagcccgtccttgatagccccgatatcccggagaccccgcggtctgtgtgtatgccccgaattgcatgcaatcagcccccctcggcggccgcaccgacaccgcaccccaagtcctaccccggggcctggcggcgctcctcgccgggatgccctagctgtgccgcaagctccccacgcccctctgcgtcc

SEQ ID NO: 67566 - DNA, 1543 bp, Homo sapiens
cctgtctcaaaaaatatatataaataaaaaagttttaaaaagagaaaaataaacaaagaaacgtgcctgccctgttggagtgtccacgaggaggccactgtggctggagcagggagagtgagagggagaccaagcttgaggacagggcagtggtggggatggcttgtatggagccttacaggccacggtgaggactttgggtggagccaggggaggctctgagcaggtgaaggaagtgatcggactccacgagtcacaggcaaaggccccagggctgacagctgccccagggcctgcgggctcccagccctgccagatgacctgagatctatctattcccccgtcatggggcgcggtttctgcctccacagatttcattccctcccacccgcccctcacttggcccaaggcacgcaggactccttgccgttcctggaacacagccagctctttctcactgcggggcctgggcgctggctgtctgccccctgtgtgccctctccccagctcatcccaggctggcgccttctcaacctcaggtctcagactcggtgtcccctcctcagaggccttccctgctgaccccagctaaagtagcctgtgttgctgcctgccccacccccgttttacttcgatctgcaattctttccttgattggttaacttgttcattggctgtttacacccgtaaagctaagtctgtgagggtggtgaccatgagttcaacgcctctgccaaatcctcccaggccccttcttgggctggattggggactctgggctccccgctagttccagtcctgcgcattctaggccatcaccgtttggggatgggtctctctgactcccccactggacttcaacctcagagggatggggcccagagctgcgtcccagcattgcccagcacaagatagatacttaataaatattgattgccttaatgaaggccaccacatgccaggctccagccgggcaatgccagggacagcgatgaatcagctacagtcatgccctctgggagctcgcaggcaggcagggaaacacggttactcaacacaggtgatgagcagtaagagaatcccgtggcgggccgggccaagacggtgaggtcacaagctggacggtcatggagtgctgtggccgccgactgaactggtgccctgtgtgggtctggcatgccctgtcccgggctgggtgaggctgtggacatgccgggaggtggcaacctccacagagggcagaggtcagacactggagtcaaacagaaactggttcaaatcccagccccaccaattcctgtgtgaccatgggcaagtcggcaaccctctctgaatctctgtttcttcatctataacccaagaatgataatactctgtgaggctgccttggggttaaatgagattgaaagccttgggatcgatattgattcctctttttctcatgctccacatccaagtatctggaaaatcctgtttgccttgccttcgaaatcgatctagactctttttttttttgacatggagtttcactcttctcgcccag

SEQ ID NO: 67567 - DNA, 1964 bp, Homo sapiens
aatttaaaaaaatttttaaagaagatgtctgctgtttgttttcaatattttgaccaattacttcgtaaaaacttatttaaaaattgaagagcaaacagtctcaggttcccgggctcagacagaccagcgttcaaaactcattaccttctttctatgatgctaagccagctatttcaccctctgaacctctgtttctttatctgtaaaatgggtattaatgatattataccacagggttgtatatgcagcgagaaaatgcaagtaaaacacttatcccggtgcctgcctcctagtaagtgcttaagaactgtttctgcccattaactcattactttctcccagcccctaactccttctgggggggaagttagaaaatcggtatcacacgaaaacagtcatttcccctttaaggacctcagtgggccgggagccagccttcccgcaccttttccaaaatttccaatccccgcttggcattttctgcccgaaggtctccgattggacgctctgtaccaatcggaggctggagcgggccctgagaggcgcccgactccgcccccgcactggccctgcccactgcccggtcagcctcgttgctatggggactggtgggcggtgaggggggaaagccccggatgttcgttggggattcaacatggcggcgggagtgtccgcggtggtggcggtgcaagagagctgagggaggcgcgagggcgcggagttccaggtcgagcagttaggccgcgagcgactgcggcgccgagccggtaggataaggggtccggccaggggcttgcggtgggccgggcgctggcggcgggacggcgtttccgcgaggaggggggcggggccgccggggtcaaaggtcactggtggagggaagggtcgcgtccgaggggtcgggggttaacgcagactggagggagttgtagtggaggtcggagatcaaaccagcgaagggggcgtggcgaaggggagtgcaaagtttgaaattcgaagtgggggcgcgttcgaggggttctgggcgagtctcaaaaaaggcagggtcaaagttaataatttgagggaaggctgcccccacgagggtcagaggtcacagccccaggggcgccaggttggaggtttaaagctgcccctagcggagcagatgaatgagttttaggttcgggggcgtcttttaggggttcaaagctggggcgtgcctagaaggtacaaaggtgagaatctgacagcggggcagctgtttcccagagtcaaaaattaaaacccaaggagggcgtattgcgggggacgggggggggggggggggccgggtcagagatgcttcctggtgacaggagaagggggaaccctcccacaaataataatggcaaacactcatgaaacactatgggctagaccctctttttaacgctttacttgtatgagcttattcagtcctcactatagtcttagggggtcttaacctggtattaagaggttaagtgatttgcacaaggtcacccgatgcataagttgtgcgctgggattctaactccggagttctggcccagagccctgctctggccgaccgcctctcaaatcatcataatgtcggttaatgtttaatgagggctcacactgtgctccacgccctgtgtgcccggtcgtatttcactcctgctgcaatcttgtgaagtgagtgctcaagatgaacctactttacagacgggaaaaatgaggctcagaagcttctgctgaaggcagagttagaatcgaagctgggcctgggtgattccagggctcctgcccctggtcgccacattgtccgctgccagccattaggtctctcctggaagcagggggctgggcagggctgggccactccctgggcggatcggattgtctgcttggtttccttggaagggtgtgatctggcagggaagattcctgtgagcctatgggagtagggtgtttgtaggtgg

SEQ ID NO: 67568 - DNA, 646 bp, Homo sapiens
ctggtatccaactcctaggctcaagtgatctgcccgcctcagcttcccaaagtgctgagattacaggcacaagccaccgcatccagccactctacagactcctggctgcccttctgtcctagtctcctccggctcccagccactccctgccctggattctgacctgggcacagctctgactacactcaccagacacccctccttctccttctcctcctcccccatggcgatgacaggtctcaggcagggagggtgggcagccaggacaagggcgtgggtttgtgtgcgtgtggtggtggtgggagtgtctggtcgtgcgtgtgttgtgagctctgccagtgtttgcctgggaatctgctggggacttccaggtgcagtatttgttgatctgctccctcccctggtttttccccacccgctgggcactggttaattcccaactttccagggcagtcacttcacctctcttgcctcagttccctgatctgtcaatagagatacaattaccagttcccaactctgcagggttgtgaggttcaaagagtccaagactcaataaatgtaaccatcatctcctgcttgcttctgtatgagcccatgtttcttcccaggggcgatttgttttttgttttgttttgtttttgag

SEQ ID NO: 67569 - DNA, 778 bp, Homo sapiens
gttggccaggctggtctcgaactcctgggctcaaatgatccacctgcctcggcctctcaaagtgctaggattgcagcacccagcccactgggtgtgtttgagacaagtcaaccaaacccatcgtgtttcttctggcagctcccgcaaaactgtacatgtgccccctaagattccaagaaagacctccaccatgccccaattgcttcaaaaacatctgcccccaactcgtttgtgctttcaccactgctaggaaataggggtgactcagggcgatttcctctcctttcaccactctatgggttctgagggttttccgtcagggatctctttctagaagaattccaagctctctgctctagcctcctttctgtttctctttcgaattcagtctgtcctctgtcatctcctgaccactgcgtatctgagcttccccagccctgccctggcggcacattccaatttcaggaggtgtgtttgcttttctttcttcagctgggattagccaatccagtggttcatggcccttgcttgcttcataatcacctagggaactcaaaagatgtctggcctgcaatcccagagatgtgattggttttaatcattacattctatcagtgattcctaaactttaaagcgcatcggaatcagctagagtcttgctaaaccgtagaaccaacctcattggcaccaccttggcagagtgttagaaatactgaatctcaggccctagcccagacccactaaatcagaaatgtgcaggttaggctggcacagtggc

SEQ ID NO: 67570 - DNA, 2679 bp, Homo sapiens
ttcctctctctggctgccttttgcaatattcatcgacagcgtcaattcctttgctcaaatcctgcctctctgtttcagggttctgttcagtccctgtctccagtgacccttcataccctccccgggctagacccctaactcccacagcctcaattaccatctttgacgatccttaaatcttggtctccagcctcaatttctcccttaagctccagacccagggtttgtgcacctcctggacctcgctactaggcatccacattgggcttagtatcttcccaacctgcttctggcgcccagtctcccggctagaggggcctggtcctaaacttttctcccccttccactccatagccagccagtgtcagggcccgttcgctctgcctccagggcgtccctcccacctgcacctccttccctccccacagtccctccctcgtgcaaaccccctctttcttccccaccccctcccccagctgcctccctggactcccgatcccgtttcattccctccaatccgccctccatgtataagccagagagacatctctccaaaaccccagactcaccatgatcctccccggcttgaagcccttcacggctccctagtgccctcgggacaagtccaaactccctcaagtggccaaacaactggcctctgctcgttcctcacccctccctgtcttcaactcgaccctccatcccgactgcctctctaagtgcctgtaacaagccagatctctgtcaccgagagccttctgaacacaggtccctctgattagttcacccggacccaatacagtttgtggaacgcacagatcacaaccaaagtcacagcaacaactcccgtttattgacagcctccttgatccttagcgctttctgtgcattctcttcccaccctaaaggctagatctcgcctcgccattcccatcggagagagcaagcggcaaggctgagaacagcgcgatgagaaagccgagcgcccagaagcccgagtgcagacgcccactgaggacagccttgggtgaggcgggccacccaaggggcggggaagaggaggcctggaacgcctgaatcaggaactgtgacttcgctcggggcagctggggtggacgcgcgcgagcctgccccctgcgggcctggaggcccaacctcagactccgccgggcccgttgccctgggcaacgccccgcgcgccccgccccttccccgccccccagccccaaaccccaggcctggccgactgcccgtcacccccacgtccgaccaatcccgccgaggagggggcgggcctcttgggccccgttccaccaccgtcgctcccccctcgccgcgaccccgccttactcggctcacacctcccgcccttcgggctgccctcgccgcccgttggctggcgcgccgttcgtcacccgggcgtgagctaatgccggcgcgcggcggcccccgtcggggcggggccaggggcggtgacgcacggcgcggtgacgcagcgcgacggcggcggcggcggcggcggcggtggtcggtgcgggaggagggaggggagcttgcgggcccgagagggggcgacggcggcggcggtggcctgaggaggcccgagcggcggcggtggcggcgaaggccgaggcggtgagtctcgggccgggccggcgcggggcggcggcgagtcggggcgcgcggggctcccctcagggcgacccaggccgcgcgggcggccccgccccctcagggaccccgaaccgcgggcggcggcggcgggcgggtgcggaacgcgggcctcggggggccgggccccacgggagaagccccgcgcccgtccccagtctccctcctgggccctggccgaagcttccctccgaaatctttctcatgccctcgggattgccgaggggccgggccgggggcctctcctcaggaccccccgcacatccccctcggagagccccggaaagcctgccgatcccccgtgtgcgccctgaaaggtccccgcaaaacccacccctcccgtggagtcgcctcctcgagcccttcatgggtcccagcagctttcctcgcagacccccgccctttggccccgaagcccccgtcctcctcctgtctccagaaatagtcctcggaggccactcctcgtccattccacagcgtggctctcatagctgctccaggagcctccctcacgagccctgcacacctccccaaggctccctccggacccctgtccattccagaactctcccccggagccctgcctctcacagcccaacaggctcacccgacttccccctcccggatcctaagaattttccctcccacttaccccattccagaaacctccttggagattttccgctcataccccctgcatttctgattccccctcccagaagtccttcagaatgcccccgacggaccgtgatcatcttccctgaagatctccttcccatatccccaaaataaatcttcctcacagactttgtgaaatgcccccagatcccaaaaactcacctagaagactccatccccctccccaccgtattgcaaccatctctcatacacactcccccttcacgtatccctctggacctttccacagatcccaaaagtctcccccagaggcctcctgtctccccctggtctcaccaccctaaaatgccctagagatcaccctcatgt

SEQ ID NO: 67571 - DNA, 1573 bp, Homo sapiens
ttaatgggaaagaggaaatgtgtacctatatgtttgtgggcttgcagtacccttacatgccttctctatgtgctggaacccagggtcctacccagccttctgcaagccctgtctgactctctgtgtagatactctctgtccctcattgtagggtctgcatgtgaccccagcctgtgtcctcccatccaggatgtgctggaaggcgggaacctacgaaacgctctgcaggagctgcagcagatcatcatcactcccatcaaggcctacagtgtcctccaggccaccgtggctgccgccaccaccacccctactgccaaggatggggccccgggggaaccaccgctgccaggtgctgagcctcccctagcccaccccggcacagacaaaggcaccgaggccaaggaccctccagctgtggagaactacccacctccaccagctccagctcccactgatggcagtgagcctgccccggctcccgtcgccgacggagacatccccagccagtttacacgggtgatgggcaaaggtgagaccagccacagcctagcaggaaatcctgaggcagaaagccaagtgaacccaagcaccagggatcaaatccaagttcgatggtgggagcagggctttgtaaagcctactggagactggaacactacagagagtagccaagacagggtgacaaggccccttgcccttgggcacgtctgggctgatggtggataacagcccttcccctcaaagcgtctccaggctgagcagaaatggggcagtgggtcagaagaaattccatgtagtaaagggtgagcagttgaggggagtccattgatttctctcagaggggaccaaagtccaggggatggggatggtgaaatttatcacagcttcagcctttcctaaagcagcatgatacagcagactttacacttggatccagatcagtctagatctggatctggacctgaggcaagtgactcaactctgagctttaggtttctaaggctaaaaatgtgtgtagtgacaagattgtgtcaggcactatgttgtatatcctcatgataacccaaataccatggctagcacttaatagttgatattcatccagcctgagtctcctgttccttcttgtgcacgagccagctggaggctggaacatggcagagggcatactaggggttaacctcctgccctttctcatgtccccccagtgtgcacccaactgctggtgtcccgaccagacgaggagaacatcaccagttacctccagctcatcgaaaagtgcctgactcatgaggtaaggccttccctagcatactcaaaaagggaaaggcggccaggcgtggtggttcacgcctgtagtcccagcacttcggccaccgaggcgggcggatcatgaggtcaggagatcgagaccatcctggctaacacagtgaaacccagtctttactaaaaatacaaaaaattagccgggcgtggtggcaggtgcctgcagtcccagctacgcgggaggctgaggcagaatggcgtgaacccggcaggtggagcttgtggtgagccaagatcgcgccactgc

SEQ ID NO: 67572 - DNA, 1744 bp, Homo sapiens
gagaagaaagaaacagtgataggtggagaggacgggattgacaggagaatgaaaaaggcttccccaacctttcaaaaggtaggaggggtgacaaatgctggtttctttgggtggtggtgtggggagtgtccaaatgctttaatggaaggagacaaatgttcaatttatttaggaagaaatgcccccaaaagctttaatgaacaaggccaagtgctcaatcccttttgcaggagatggcttcaagtgctttaataaagaaccatgtactcaatcgtcttcggaagaggggtctccaaacggttgactggagggatcccttctggagggagtctccaaaagcctaatccctgaactgcacggcggggaggaggggaacacctgaatctcagaaggaacccgcccccttcgtcaaaggtgagcgcttcatgacgtcacgggcagacctgggggctggtgacgttgttcagcagaaaccctctcccgatcccccgccttgctgcaacagaaaagcgtggcgcctacctgtggccatcctcccgctgggcctgggtctggatggtgggcgccatagcgacgaggcgacggcagcccggacggggtcctagcgggaccgaagggggacgcagaggggcgtgccgacttcaggggacgcctgatccgaggaaggcccagcttggcgccgctccccgcggaaagtgggttgagatgaggtgggcgggcgagaagagctccagcgagactcaggtgaacgcgcaggcagcaccggggacggactcgaagctccggttccaccaactgccgccaagacgctgaggacccaacgggtctcctcaggccgcgacgccttcggggaaatgaagtccggctcggaaccacacacggattggcgagcgtctgggtgaagggcggagcgagggagagaggtgcttctgtgattggtggagagatatctcagtctggacgcagatttgagagtgacgtaacgttggggcacctccttcccctccattggcttaattgcctagggggcgggactaactagcaaacggggactagaaatagggatgctgaaaagcaacggggagagacgcagtcgtaacgcacttccggcggtctacgcgaggaagatggctgcatcccagcagcaagcttcagcggcttcctcagctgctggtgtatcgggtcctagttcggctggcggcccgggtccccagcagcagccgcaaccgccagcacaactggtgggccctgcccagagcggcctcctgcagcaacagcaacaggacttcgatcctgtgcagcgttataagatgctcatcccgcagctgaaggagagtctacaggtgattggccttaagcagcgagaagcaaactggatttggtagtctagaggggcaggccgagggccaggttagtcggagagagcgctaagcagaaagaggaatagaacctgctgttttggcctggctggtgcacgcctgtgttcccagcactttgggaggccgaggcgggcggatcacttgaggtcaggagttcaagaccagcctggtgaaacctcgtctctactaaaaatacaaaaattagccgggcatggtggcgcgcgcctgtaattacagctactcgggaagctgaggcaggagaatcgcttgaacccaggaggcggaggttgcagtgagccgacatcgtgccattgcactccagcctgggcaacagagcgagactccgtcaaaaaaataaataaata

SEQ ID NO: 67573 - DNA, 3256 bp, Homo sapiens
gagaagcaggcagaaaaccaggggtgagatgccactgccaacaccaggcctggagccagggcagtaacaatgatagtagctaacagttcttggcactttaaacagtgtgccaggacccgtgcctgtgtctcatacacctgctctcactgttctcaccttatgaggtaggaagaggtggttattaaacccgttttccaaaggaggaaactgaggctcagagaagagtagccgccatgcccccaggttccccagcaaatgactggcagggccaacctctgactctaagacctgggaaatccagaggccaagccgacaacccccagctggcccttggggtggggtagaatgacctcgggtggagctgatgctgtccccttgcctgcctgtccacagcgcctggcgcatgagtgcctgtcacagagttgtgacagtgccaagcactctccaacgttggtgcccacagccaccaagcccgacgcagtgcagcctgacagcctcccctacccacagtacctggcggtcatcaaagcccagatttcctgtgccaaggacattcacaccgccctgctggactgtgccaacaaggtcacgggcaagacacccgcaccacctgctggccctgggggcactctgtgaagtgggggacagggagtggggcaggcagtggttggtgggtggtgtgcaaagggaatgaagagcgtcctgggcctaaacacagcagcctcctctcttcctgcctgagcaccgcagcgggagccagcagggggcagcagaggccaacagggagctcgcaggccgggcccctgcgtccctgccccttcttcctgctccccctcctagcctagggtagactttgaactgtgtgtgttgatgacttctctgttccacaggccctcccccattcttgcctgggtgtggagccctggctgtcccctctccctcagtccttcctgactgtctccagctgggaggtggtctctgtgtgccactcctctgtgtctctattacagttgtgtctctctcatcctgtctctttttcccttgtttctctgttcctgttaatgtgtttctccccatggtcctatttctctcactctgacctctctctcttagtcccctttagctgtcttctatccccagctcctaactgggactctgtgtctatgcagggggccagcacccctgggttatctggggctaagggaagggacttcatttccaggggccacagccaagcccagagtcccccagcggctcgcatgtcagcccagaccccagggtccttggcctaggagaggagcagtggaggggcccaggctctgagctccacaggtctgagcagggagcaactcaggcccccacccaagcctgcgtcagcggaacttgagtgaggggcgttgtgcaatttgtggcaaggctggcccagctggatgcctgggtcccagtatttttagccccaaaggagaagtgaaaaggccccagccggggtgaatcatcagtcctggggaagaacccaggcgcctgagccccagctccgggaagcaggcactggggagggggcttcaaggagggagtgccccctcagactccctgcttccctggaagcttcaggaagctcagcctcagccttcaggcctgagcaagtgcagggcggagctaccagcccaggctcagatgttggggtgtgaaagcctcaagtgactcagcctggttggagaactgccccacccagtatcttctgtgccatggttcccacattcgcactccatggcctcctgtcctggaccccacgtctgcaaggaaaccctaggaccatggatacctctgtgattcacgctgagcccaagtccccacactggaaaactgggaaatggccagctgtgtgtcccaggaaattcctccccttattcttccttgaagtgcccgagcatgtagggcaagaaggaaggctgaagcgctgtccctaggaggaatttctccttcaggggagcctcagttttgcccatttatctaattgaatcagttttttacccaatcccccgattttgtaggataatctcccttatctaaagtcaactgattatggactttaatcacatctacaaaacacttccatggcgacagctagatgagtgtttgaataactgggactgtagcccgtccaagttgacacataaaactgaccatcgggccgggggcggtggctcacgcctgtaatcccaacactttgggagcccgaggcgggcggatcacaaggtcaggagttcgagaccagcctggccaacacggtgaaaccccgactctactaaaaatacaaaaaattagccgggtgtggtggcacacacctgtagtcccagctactcgggaggctgaggcaggagaatcgtttgaacctgggaggcagaggttgcagtgagccaagatcacactattgcactccagcctgggcgacagggcaagactctgtctcaaaaaaaataaaaaactgaccatctagtccttgtcatctgggcaccctcacacatctccttaaccacacttaatctccaaataagtacgataacatagtcatagtcccacccaacatgatgcagttatcttgcatacaactgaagacaactaaccctttccccaacagagcccaccagcagtggtggagatgtcggtccatgagcgcacacacaagactgagggactgtcggccctcccaggtggtgtcaacacaacatcacacacaggtgggggggcctgatagcccagcacccatgatacagggcctaccaatgcttaaaaccacacccagggagcccacagaggcactcagtgggtggtggggtgatggatacacatctatcaggcacagggcggaggtgggcaccactgagttgcactcagcaaacacattgggtatcttgtgcccaaggcctgtatttgtggagctgatgttctagtgagagacagtaaatgtgacaaaagtaaaatatatcagatggtgagaaaacagaaaaatgagatcagaagtggagatgttggggccaggcacagtggcccaggcctgtaatcccatcactttgggaggtgcaggcaggcagatggcttgagcccaggaattcaagaccagtccgagcaacatagcaaaagcccttatctgcaaaaaattcaaaaattagccaggtgtggtggtgcgtgcccaggttcccaggtactcggaggctgagaggtgggaggatgccttgagcttgagaggttgaagctg

SEQ ID NO: 67574 - DNA, 3945 bp, Homo sapiens
catatggagaatcgtgttactttattgaaaaacattaaaagtttgagaacttaagttggattgtggtttcgtgagcattcattatggtttatatatgttccatgtatttattattaaatagatgacaagggttttcttattcttgtttatatatgtttgagaccagtctcactctgtcgcccaggctggagtgcagtgacgccatctcggctcactgcaacctccgcctcctgggttcacgtgattctgctgcctcagcctcccaactagctgggattacaggcgtgcatcaccacacctggctaatttttgtatttttagtagagacggggtttcaccatgttggccaggctggtcttgagcttctgacctcaagtgatctgcccgcctcggtctcccaaagtgctgggattacaggcacaggcacgagccactgcagtgggccttttaatttttgttttaatccttgacagaggtcaaggaaggcctcactgagaaggcgatattagagcagccccgaaggagagggaatgagcttggggacatccacacatccaggcaagagtgctccagacagagggaactgcaagtgccagggacctgggacaggaatgtgctgggatttatggaacacataaaaaggaggcttgggcacaatgagggagcagggataggagaggaaatccagacaggtcacagagggccttggtgaggacttgggtttgctaggtaactaaacccagagggagactacacagtctggtgcacactgcatgctccagggacggggtgtacgtgaggtgcacagccaccacaaaacagaccgtggggactccagcacacagcatgtctgccccactgcagagctaacccaccatcctacaatcatggtgcccccagggaccccatcccattgacagtcccacaaacatactttcagggagcaacccagccacatgaatacacaaacaaccctctaaccaccactttaccagataagctatctctcaccccatcgcagactttgcccatcacaggctgactcagccctgtccttagcccagcactatcagaagcagcctcatcggcgctgccccagcttctcaggtactcatgtctgcacgtctgctctgcccacagaggccgacacaagaacagtgacatggaggggggagctcgccagctactctccccatcacgcaggctgtagacgtcagaaaccaaagttcatcggtttctctgccttgtgactcgggccacaggaactgcattcagacgccggcctgctgtggtctgcacatgcagtctcagacacccacgacaaaggacgtggacatatgtgaacacttcacacacccagggactacacacactgagccacaaaggccttgcacacggccacagctgcagagtcacagatgctgacacagcttcaaatgtgtgtgccgggtgtggtggcacgtgcctttagtcccaactacctgggaggctgaagtggaaggatcgattcagcctgggaggtcgaggctgcactccagcctgggcaacagagcgagaccctgtctcaaagcaacacacacacacaaagttgtgtgtgcacacagcctcagtcacaggggagggcagtcattccctcacccaggcacctgcgcggagttacacacacttagtcactgcagatcccacagtggctcagagctacgcacagatatgcaggtggggatgaaaatctcatgttcttaagaatgccgcctcagagacaaattgcagtacagttacaacagagcatccaccccacacccagagatggccaaagtacacacggtacagtcgatcacacaggcggtttcacacattgattcacacagccaagtcatgcgggattgtatgcacacagccttctcacaggaaactgggcacactcgtgtccctcacgttcccccactgcatacccaggcacacaggctctcgcagccccagatgccaaggcgcacacctttgcacccgcaagcacacatactgttcacacaaccgggtacacatgacggctagcccaggcccgccgcccacgcagtcgcaggccagggtacacacggccagcgccgcccttggccacgcccgctcaggcccaggcaatcgcgccaggcgcacacacggcgcgagcacacgtgccgcgggtacacgatccccagctcgcccgcgcactcggccagctctcacacccccgcgtttcccgtccccgcttgtttttctggaaactctgctctcccctcccctccccctaggccggaagtgttggctgtatttttagcctctctggtttccgcccctttccttctttccccgcccgcccaggactggccccagcgccccgcggggggaccccggccatccccttccccaccgtcattccagaggggattcccggccgccgctggggccgcggattttcccgctggctacgtagggagcagggaggagtcctgccatgaacttccttctggcctgggacgcccgagatctgaggggagggctgagggcctggtctcctggatctgatcgaggacaggctgggggtctcccgggtctgagggaggaggagttaggggcctgaaccgctggatctgagggaggaggagatgggggcctggacccctgggtctgagggaggaggggctggggtctcgggggacctgaggatctgagggaggaggggctggaggcctggacccctgggtctgagggagggggggttgggagtctcccgggtctgaaggaggaggagttaggggcctggacccctggatctgagggaggaggagctgggggcctggacccctggttccgagggaggaggggctgggggcctggacccctggatccgagggaggggggtgctgggggcctggagtcctgggtctgagggaggaggggctggggacccagggccctgggttactgcgagggaggagggactgaggccttggctcctgggtcccccaggtctgtgggtttggggaggtggaggaccagtccttctgcgagcaaagcatccccctcctttgagagtggccctatcccaaaagtcctgactcttggggccgatgactcagcagatgggagagaggagggggacagcctgactcagggatgggaaatgctcccggtctccagggagtagaaactggaatccctcctccaggattgatcgcagcccgagctgagccgggctccgcgaacccaaggatgcccccaacccccctttccccgcctcaatcctttaagctgcgtaaggatttggagatcggcctagaggcgggtcccaggtccccctcctcccccctttttccccgttgtcctcaaggctctgtttacaggagacgggagccctggttacaggagaggaacccgagtgtccgggctgaacctcctcgtcacggcttccaggaagcccccactcccccgccccttgcgagtgagtcacgggcgagcaggaggccacaaccgtgccagagccgcccgcggcccgcccagctcacgagaccggcccgggaaggcccctcagcaagcgccgcaccagggattcccccccgccgctctcggacgaagcaggtcgacgtggagcctggcagaatctccccaccttaatacaagcccgcagcctgcaagaatgaactttccaccattataactgcgcactgtggcaatgatttctacccccacattttcactcagggcatccagctctccagcaccccttagaaaatagtcttcctagatcttaagagggttttcacttagggcgaccctttgataacaaaagatgtgccagtgtggggaatgatccttgaaaatgtagtctgggcggggtgcggtggctcacacctgtaatcccagcactttaagaggccgaggcaggtggatcacctgaggtcaggagttcgt

SEQ ID NO: 67575 - DNA, 7739 bp, Homo sapiens
gtatcctggaccccacccaacccactcactcacccacccaaccccagcaagtggggagagggagagcagtccaggtctccttatctgtctgggctgtttaggagtgagaccacacaaggcaggcagttctcagagaattcccctccaaggcctgctggctctttcttggcactttgctctgcagatttctttccgtaagtgcttatttctcacagtctttctcctttttgtccagtttctttttctttttaatttttttaaatagtattttttgtagacatgggatctcactgttgcccaggctgatcttgaactcctgatctcaggtaatccacctgcctcatcctctgaaagtactgggattggccgggcttggtggctcacacctgtaattccagctctttgggaggcggaggtgggaggatcgcttgagccccggagctggagattagcctgggcaacatagggaaaccccgtctttcaaaaaaaaaaaaaaagaagaagaaaaaggaaagaaaaacacaaaaagtgctgggatcacaggtgtgagccactgcgctcagcccctttctgtttctttttgtgatcctcccaaccctcttctccctctgaatctgtctctgggactgtctctgtctccccgtcttccctcccttcctcaccctgtctatctctctctgtatgtctcttggtgtgtgtgtctctctcgatgtttttctctctgcctgtctgcctgtctgtacccctctgcgtctctccccgcccccatccgtctgtgtcgcacgcgcacccccatcgggcttctgctcttgtcaattgcccctggggccctgcccccacctccgccccagtttccttctacaagcctcagtctccagctttgaaaactgggcaggcgtccccccatccgcacccccaccccttccccacgcattccccgctcggtcacggctgtccaccggccaagctcaggcgcgtcctggcccagggccgggcggaagggaaccagtccagggccagccaggctgcgccgggggcgcgcgtccgggaagcgcccctcctgccccgcccccggccccggccccggccccgccccgtgcttgcagtttcctataagtagccggctctcggtgccagcctcagcctgacttcagcgctcccactctcggccgacacccctcatggccaaccgttacaccatggatctgactgccatctacgaggtgagtccccgccgcacggcatccccggtacctgcatgcctgagtccgagtccccacctctctagcgccgcaaactccagcccgggacgcttgcctcccttctccaactggggctccctagcgccgcgccctccagcctggggcccctgcctcccgctcagaccagcttggtgatttggaggtgaaaatggaacccgcgacacccggctcttcgctcaaacatgggtggggcggcccatgcaagtggaaagtcggagaacttttctcagaccgaggctgcctggaggcggaagtggcccccatacctggctcacccctagtcgttgctgagggcgtggttttgcgcggaggcgtctctggggctgaagtctcagggtggggggatccgacttctgtctctccagtccctgaccgtagagacagagaaccctaaaaccgaagcaatccggacttccaggtcaactttgcccggtttctccagttgtgaaactggagatcccgacgcgtgggtcatatccggggaggacaagagacccaaaattgggaaacagtggtgcgccctgacttcggggtccccctcttggtccagccggggaagccgggattcctgggtccctcgggataaggcctcggtggtgggtaaactcagaacctccaactctgggttcctggcatccggaacccaggggtttctgcgggcgggtggggctcaggcggggagcccacaaaccggcctggcaagctctagttccctgcagctggggtggggcgtcgccctgcattttcaggtgccttaaccgacccatttccgcagagcctcctgtcgctgagccctgacgtgcccgtgccatccgaccatggagggactgagtccagcccaggctggggctcctcgggaccctggagcctgagcccctccgactccagcccgtctggggtcacctcccgcctgcctggccgctccaccagcctagtggagggccgcagctgtggctgggtgcccccaccccctggcttcgcaccgctggctccccgcctgggccctgagctgtcaccctcacccacttcgcccactgcaacctccaccaccccctcgcgctacaagactgagctatgtcggaccttctcagagagtgggcgctgccgctacggggccaagtgccagtttgcccatggcctgggcgagctgcgccaggccaatcgccaccccaaatacaagacggaactctgtcacaagttctacctccagggccgctgcccctacggctctcgctgccacttcatccacaaccctagcgaagacctggcggccccgggccaccctcctgtgcttcgccagagcatcagcttctccggcctgccctctggccgccggacctcaccaccaccaccaggcctggccggcccttccctgtcctccagctccttctcgccctccagctccccaccaccacctggggaccttccactgtcaccctctgccttctctgctgcccctggcacccccctggctcgaagagaccccaccccagtctgttgcccctcctgccgaagggccactcctatcagcgtctgggggcccttgggtggcctggttcggaccccctctgtacagtccctgggatccgaccctgatgaatatgccagcagcggcagcagcctggggggctctgactctcccgtcttcgaggcgggagtttttgcaccaccccagcccgtggcagccccccggcgactccccatcttcaatcgcatctctgtttctgagtgacaaagtgactgcccggtcagatcagctggatctcagcggggagccacgtctcttgcactgtggtctctgcatggaccccagggctgtggggacttgggggacagtaatcaagtaatccccttttccagaatgcattaacccactcccctgacctcacgctggggcaggtccccaagtgtgcaagctcagtattcatgatggtgggggatggagtgtcttccgaggttcttgggggaaaaaaaattgtagcatatttaagggaggcaatgaaccctctcccccacctcttccctgcccaaatctgtctcctagaatcttatgtgctgtgaataataggccttcactgcccctccagtttttatagacctgaggttccagtgtctcctggtaactggaacctctcctgagggggaatcctggtgctcaaattaccctccaaaagcaagtagccaaagccgttgccaaaccccacccataaatcaatgggccctttatttatgacgactttatttattctaatatgattttatagtatttatatatattgggtcgtctgcttcccttgtatttttcttcctttttttgtaatattgaaaacgacgatataattattataagtagactataatatatttagtaatatatattattaccttaaaagtctatttttgtgttttgggcatttttaaataaacaatctgagtgtaagctgggatcctggcttcttcgcggtctagagacaggaatggagagggagggggtgactttttggaagctgggtgcagttaactcttcctctccgagccccgcggcgcttacctggcaggaagtgacgtcaccgggcctggccgttcacctgaaagggtgggaccaggtgaggtcaccagatgggaaccgggggagccagttcccgggcgtcgggggcgccgcgctcccgtcctgctgggctccttgacccagcttcgggcgggtgcggtcggggacgggatgtttccgtccccacggggccgcgggaggcgggaggggccgggtggggaggacggaatgtgctggggcgcgcgcccagagcgagcgggggcgggcgcggggcggggcagcctggggtagcggaacccgtttcgggactagaggttccgggggggcttcgacaccttctggatgttggggaagcgggtttagggtctcaagaggctaggatctcaacatttgggagtcacaggttgcatcccctagcgctttagactctagacccctggtggctcggagttgcagatttctggccacccgggaccctggagcccgggaattaccgggtcttggcatttccgaaccttggaagtccgaggcttcgcacaccgaccagggtcggccccgcgaggccagggcgtgtgggtaggggccgcgcgtctaggaggggccccgggggagccgcgtcttcagaccatacaaggccagcgtcgtcgggaccaaccccggggccccgcgcccggaagccgccctgcgtcagcgcctgcggctcggccctgccgcccagccttcgccccctgcgacccctcttttttctccttgccccgcactcctccctcctccctctcacttccctcttctctcctttccctaccctcacccttcctcctctttttcacttcctcctctgcacccttctgccccgccctacaccctttgccttctgttcttctctccccctccaatttgtcccctccctcattactcctctcccacttccagcctccccatcctgccgtctcttaccccctttctcctccttcccgtctcccttctctccctttttccgtccttctttccctctccaccctttccttgccctcccactccccattgtcctcttcccctcctccccctagccttactccttctcctcttctctctccctctgaagcccctttccctcctctcccttctctctaccctcctcaagcctccctcctgctctcaggcctccttggcccactccccttgctcactgacatttggtctcctcttccaggaaactgcttcccttgtgggaaagggctcaggccctaataagtagaagaggatcaggcgagagggagtcagaacccctgagatgcaaaggcagcagaggggcagagaccaagagcaagcagtgaagagacatttgcagaaacagtcttggagactgaaagaacaacatctctggtccttcctttagccagatctgattctctgccccttccccaaaaaatccctcatataagaaaacggcacttctcaccatctaccagggcttaagccagacacccaggagtatcccttgacaccttgttctcaaatccacaccccagtccaacagcaatcctgtctgatccacctgcaaaatagatccactatccacctgcccccaccatgacccccaccctggtcctagccaacatcgtctgccatttgcatcttcatagcagccccagccccagtctctgctctagcccctgccttcagtctctcctttctccactcccccacgagacaaccaaaggaagcctgttatgagacctgagtcaggtcacataaaagtcaaagtccgaagtcctccccacagcccacacaatctggcacccatcgcttaccctcccccttggccactctgctccagccacactggcctcctagctgctctaccaagtctggtctgcttcatccataggagctttgcactagctgttccctctgcctgaacactcccctggtgtccccatggctcactcccctccttcatgtctctgctcaaaagttgccttctctgtgagatcctccctgaccactgctgttgcaatccacaccccacctccaactaccccatcctccctaccttgctcgactttttccatgacatttatcatcaccacctaacattaaaatgtacttaattcttatgttgacagcaatctgcctccccactagaatgtcgcgtcctcaggggcagggactacttgttcactgctgtattacacacagctaaaggaagccaggcatagtgaatgttcaatatttattgaaaaaacaagtcgactcaaaaacatagttttccttttcaacagaggtcgaaaactccaagacagatagctatgttcatctgtaaaggaggcattaaaaagacagagaaatacagaggaggcagagtcatatacagtttgccgaggacccacatctctacagaagtcaaactgtttgcacacaattccatgcccagagcatctaataagagacgatacccccacctggtggctgggacggaaacggcacctccctacaatacagaacacccaaaggaccgtcgccaaagccctaggagtcttttgagcccaataattcaaaagatagaaacgttcattcatctaagtgatgtagatgttttggttggtttattagatgtgtaagtttataaaaactgatggggaaaaaaagtgctccaggtgaggatcgaactcacaacctcggcattgctccgctcgcactgtcatataagtaccgcgcgctaaccgattgcgccactggagctccggccgcacccctgcgccggggtcttcttcagtggttcatagccacgtgacctcaccggagggccccgccttgtgttatatatgcaaattaaacattttgcattgaccaataggagacagtgcattgccagttccggattctcacgcctcgcggcccttgctgtaaaagggaaaagtccgcgaggcgtttggaatgtaggggtgtcgcctaccagaaggacacgcctcctcatgaatattcaaaacaaggggtggggtcttaacccttcgctggcgggtcggccggaaggcagcccctcccccccccgcaggcgggaacaggatgtgagccccggcgacagcgggggaggggaagccccgggcgaccgccccccgcctcacagctgggatcggactctcccgccccagatgtggcgccgccgccgtcacacgagccccgtgacacccagccgggagcccgaggggtccagaggctcggacccgggcgtccggaatttctgcaccgcatcctgagagaccccgaggtccagaccccggcgcccaggctggaggacttgagccatccaggtgcgcagcgccccctcctggagcagccgggagcccggacgtcaccccgcgagaccctggaggccgagcgccccgtatccccgtttcaagaactcaggatccaggaccgcagactccctccagggctccgatcccaagaccccgcgttggaggaacttgagatccggacttctaagcgccccaaccagtttcgggctgcagcggccatcgcttcaaggggacccaggactttgggacccccctgtgctcccacctggagggagtttcattcctgcccctagaattaggggaactcagaaatccatcccccaccccacggccctacctagaagacttaggaatgtgggtccccagcgccgccatctgagactccagagtcgaggctcctagcatcccctacgtagaacactgagaaattccgactgcgggaccccagtctccgagagaccccagattctattcctggagcctgagagcccgaagttcacgcccctgagtctgggctccgcacctccctggggaccgcgtcggggtcgcgcaggagccgggctgcctcgagccggggctggaggctccccgggaggtgaggggggaggcgaggggcccaggcggact

SEQ ID NO: 67576 - DNA, 2029 bp, Homo sapiens
cgagaccactctggccaatatggcgaaaccccgtctctactaaaaatacaaaaattagccgggcgtggtggtgcatgcctgtaatctcagctactcaagaggctgaggcaggagaatcgctttaacccgggaggcgaaggttgcagtgatccgagatcgcgccactacactccagcctgggcgacacagcgagactccctctcaaaacaaataaataaaataaaaaatagtcggtgtcccttcaccctttgggtccccccgccccagtgaggtgagcttcctaacatcccagttctcaaagcaaacccttaatcttcaacaaccccatctcagcttttacatcttctgaaccccaagcccagctctattgccaaataccccactgttctacacccaacacaacttctaaacatcccgttgctgatgccagcccccccagctttcaagagctacaacatctctgtctccaagagtcctccatccactcaacgccggtgccggatcccagcaccttgtactgtagcgtgcgcggctcaatcatctccaggggccgcccgttcaccttgatgagaccattgccgcgtttgcagtgcgccacagctgtcgctgtcttctgtaagatacaagagaaacaggggccccgtgagctccggctccagctcccatgttaccccctagattcctgcccaccgacctctcccagaccctggccttctccttcccctccccttcccatccggcgtctggctcaccttgcgtccgaagacctgcacagactgcagcgggcccttggacggcatggctccgagcgtggactagacaacctcaccgcgcggcgccgcaaccggaaaaggaaagctaggggccaccctggccgcttttcagggtctgcgcaggcgccttgagcactgcgtcgcgacgggagagagctttacggcttctgttgcggctaacgggcggggcgtctggtcagcggcgggaaggcccttaggcgctcagagcgggcgggccctgtgaggcggaagtggcgggctctgtgggcggaaggggcggggcctgggagtgtcgtgtgcggactgaagggaaggctgcgggagtgtgcttcgcgtcctctgtagtcgactaccgcagctcttctttgcattctggctctttaataatctcccttcgccctttctttaaatcagttcccaccctcccaacacctgtaatctttctcccctctggactccctcctccccgaatcccccgcatcagaatcttcctttggaatctactgcaagaaatctggctggattctcagattaaggacttccagaatcctatcctccctagaatccccctccttggggatcctctcccagaatccttttcccctcagagccccttcccctcagaatctccctttcaccagaatgtccttcctttcagtttcctcttcccagaatgtttcccatccttctctcagatggccaaccccaaatgtccctcttaagagtgctcaacttagaccccccttttccctgaatctccctccattcggtcctcgtcccctcagtcacccttcccagaatctttctcttgtcaggacccagtacccctggaatctccctcctccagaatctccctttcccggcaaatccccctttcccggcaaatccccctttcccagaacaccccgccccgcaaatccacaaaaacttttctctcagagacccgtccctcaaaatctacctttctcctgagtttatttcccttccgagactcctcttcccagcaactgccttccctggagttttccctccgttagaatccccctctcctaagagaccctcccccaagaattaacctcttccccgtccccaccctagaatctctctcttttttttgagacggagtttcgctcgttgccctggctagagtgcagtggtgcgatctcgtctcactgcaacctccgcctcccgggttcaagagattctcctgccttaggctcccgagtagctggaattacaggcgtctaccaccacgc

SEQ ID NO: 67577 - DNA, 2500 bp, Homo sapiens
tatttttagtagagacggggtttcaccatgttggccagactggtttcgaactcctgacctcaggcaatctgcccgccccggcctcccaatgtgttgggattacaggcatgagccaccgcgactgacatagacttctgatttttaaaatttcccctatcaggttaatttttcaatttttaaaaatttaagttttaatttttttttttttttttttttagagacagggtctctattacccagtctggagtgcagtggtgcaatcatagctcactgaagcctcaacatgggttcaagtgatcctcccaccttagcctttggagtagcagggaccacaggcacacgccaccacaccacattaaaaaaaacacaaaaattggatacatggggtctcaatttgttgcccatgctagtctcaaatacctggcctcaggtgatcctcccgcctcagcctcccaaagcgctgggattacaggcgaaggttcatttttcatctctccattacacctgtccactctgccatcactcgtcagccgtcattactaatagataaattcgcctttaaatgaacttaggaagcctggaaagaaaaatagggacttgggccgggcgcggcaggttatgcctgtgatctcagcactttggcaggacgaggccggaggatggctttttagtttgagttagaggagtttgagaccaggccgggcaacagcccgactctaccaaaaaaaaaaaaaaagtacaaaaagaaagaaaaagaaggaaaaaccagggcttcacggtcactcagacttggcgaggaggcttgggtctgccgctttccactgagtttttctgagcttcagcgttctctccaaaacggggatacggatctcctggggatgctttagagggcctaggagataaagccttgtttcttttataatttgctattcgctgatttcgccgcctcctcgcagcttggcctaccgcgctagtgttccggactaacgaacaaacggctcactaaattcaaacatgagtttcagcctggtcgccgagccggcgggtagaaaaaacctttcccctcctaaccctccgcagatgtcggccccgcactccgcccaggccagccctgcctctctcaagatggcgacctggaagtgcgtcgcccgtgccagccccggaaatctcgtgttaggcgaggtcaacgggtaggttctcgcgagaggacccgtcagccccagtcaggcgtcgtgcgaacagcagctggtaccgaaggcggaggtggagcccgagaggtaagtgcgtgtgcagaggtggcagttccgggcgccggggaggtgtagagaacagattcggaaactggggaggtctagcatgtggcgtaggagggggtcctcactccgcttcgcgattgccaaaacgagcctgccggaagcgccctaaggggttttcttctcccagggaaccagcggggaaactgaggctcggggtggagcgcaggattgtgggacgcgccaaggctgctgtctttcccagcagcagcggaagatgtcggacagcgaggacagcaacttttccgaggaggaggacagcgagcgcagcagtgacggcgaggaggccgaggtctgtggctggggcgctgggggagacattgcgtctggggacaggactccgggcagaaaggcccctgtgggaggctcgaggggttcacagcgggctctggcttctgggaactcccagattgtctcaagagatagagaattaggcaagtcgaagtcaagcaaagggacaggttctggaggccagaaatgggtcaggtccagtgagataacaggtgatgttttgaaagtttactctgtgtgcatatagtaagcacttagcattagtttttttttttagttatgtctagtcattccataactatatttgtagtgcctactatgtaccaggcgcaattctttgctcttagggtacaccagtaaacaaaaagattttaaaaatgtctgccttcgggaatgtaaataaatatagccaaggaataaactatatagtaagctggaaggtactctggagaaaagaacagaaaaggggaatggagagtcctggttgctcttgaaatagggtcatcagcatgagtctgaggggtgacatttgagcaaaaacttgttggaggtgagggagtgagtcgtggttagctggaagtgtagtgttccagtgagggggaccagcaggtgcagagatgggagtgtgtccgccgtgttcagggattaacgaggatttgagaggccaagctgggaggatcacttgagcccagaagtttgagagcaatctcggtaacacaacgggaccctgtctctacaaaaatataaaaaccattggctgaggccgggcttggtggctcacacctgtaatctcagcactgtgggaggccaagacagtggatcacctgaggtcaggagttcaagaccagcctggtcaacatggtgaaacaccatttctactaaaaatacaaaaaaat

SEQ ID NO: 67578 - DNA, 1598 bp, Homo sapiens
caggtgtggaggggcaacccatcccttcagacaattgggaggtgagggccgattgccttacacggtgagacaagcggcctgactcgtgactatttttttggacaaatcaggcagccactgactcccttcattatggcctcagctttatctctgggcaataagtgtgatcccttccttcgctgcgtcctttgcaggggcggtggcgctctgcaaggcccaagggggcgtggtccagatgactttgaatcccagttgtcgcccccagggtcagccaggagactagtcagaagcaaacgcgcctgcggcaatccgcccgatgcctttggtctctctcgggcttccgtccacccgcccctcccccgcgtttccattggctgtagctccggcccggggcgggcgaagagggagcgagtgggcggggccgcgtggcgtcagcgcaagatggcggcctcggcagcggtgttctcgcgcttgcgaagcgggctccggctcggctcgcggggactgtgcacgaggttggcgacgccgccccgccgggccccagatcaggtgagcggaacgagggtggccctctgaatgtggggtcccttccctggagttacggacatatcgccgccccttgggggttccgggacgcctcacctcagggtgctgaatgaaacgccgcttgtgttttggggcccttcccaacctcctgggtggttgctcccctaggctggaggctgggaatccaggtgtgtccttagaccccacctcccacccacgtgggtgccggaggaggagggggttaccgttccccgtttcagtgaccactcaggtgatacttgagcaggaggggcctgggacgctggagtcccagtctggccgtgggagttattttctctgtggcgttggtggtggcgaggtagacgtttgggtttccaattcgacttgcctccatgttgacagagacccagccattctgacctccaagtctatcacttctgtgccttagttccccaagccccagacaagtgattgcccttccccgcctccgctcctatcccttaccctataactctgctacttttagccccaagcagccggacgtcgtaactcccggttctgtctgtaccccttcccccaccacttgtgccctccgttccctctcatcccagtgtttaggccctcccatcccttattctccgtgctttgcttttctgggctgcagaccctccagtcctgttgccttcaggatcctgtgcacctggcctgttagcttttaaaactcctggcatcctggtgcgggacagtctggttttgaccctctgagcagccccacatcctgactgctactccagggacacagatgtccagggctctgtgggtgtctgcctcttggctcctgaacttgattcttcttggactggagggtggggaccatcctgacctctcttctctcttggctgacctcccctttctcaaccgcaggccgcagagatcgggagccgcgggagcactaaggcgcaagggccacagcagcagccgggctcagagggtcccagctatgccaaaaaagttgcgctctggcttgctgggctgcttggagctggtgggac

SEQ ID NO: 67579 - DNA, 1108 bp, Homo sapiens
agcctagggatgcgagactcccttctctatttaaataatactaaaaaagaagaaagaaaacaagattcaacagtcttgtctgtttccatttcggagtgtgcttcctccttcaattgcacattgccgtattcccttccagtttgcattccccctaatgactgagttaactaaactggcacagcctgcctgttcttttgatcccaaaagggtcacttggctattccttgccaccaatgtcatcatcacagccgactcagtcggccagaggactgagggcctcggaggcagtcagcgctaccgtaaacgcgacagcagcgaagtccatctgcgggggatccgcgtcaaaggctgcttccctcgccttgcagccttccacaaacagcctgcggcgttcctcgaaatcccgtagtaatctgaccggaatcatggagctaccatccagatactcgcggaacaacagctgccggttaatttctaagaaagcgagctgctgatgggggtctggcgcggaggccaggcccgggacgctgctggggatgggcccgggcacagggcccggcatccgcgccatggaccgcgcagcttcggccactgggccttcccgagcctcctgcacccgaaccccgccgccgactgccccccgcagtacgtcgctgacgccactcgcggtgcccacctgtgggacactgctatctccggggagctcggacatctccaacagcccagtcggctccgccatagtcccagcgtttctacggagactggaataacggcactgcactgctgtatgcgagacctgcgcatgcgcgagtctcagtgagcgcgtaaacgctgtgcgtgccagagtgtgcgcatgcgtaagcacggtggccaatcctctagcgttccctagcggtcctgagtagccattacgtctgtagccgcctctggtcctctgagcgcctgaggacctgcggactgcgcggtatcttaaattacaaccacttcagtattaatgtaaagttccttatacggtcattttccagctcctgtcttttttttttttttttcagactgggtctcgccctgtcgcctaggctggagtgcagtggtgcgatctcggttactg

SEQ ID NO: 67580 - DNA, 1454 bp, Homo sapiens
tttactttgtaataaagcaatgctgagagacattttccataatgcagggggaaaaatgtggatcaatcacaaactcaaagaacgttacagttataatgctttcgacatttttttctacttctgtgatgctttttcaagataagcttccccctccccctttttttcccctccacctgtgcactgtcttatcgcgatatactcttgacttctgaaaatcaagttgcaggattggtatgactggaatgcagaggttctcttgaagtagtgtcaccacataactattctctattgataaacttatcgcaaccaagttcttctatcagagggttgataacttcagaggcagtcagagctatcgtaaaggttaaaatatcgaggtccaccctgtgaggatttcgctgatattcggcatcaaacgctgcttcccttgctctgcaggcttccacgaatcgcctgcggcgttcttcaagctcttgtattctgccgggagcaatcgggtaattttccagatagtggcggagaaactgctggtaattgatgcctaaaacgctaagtgggtggcggagacggagatagggcaacgcagccaggcctccgttcccgtgtctggacctgggcctgccctcgggaccctcttcgtccactggctcccccagcaagcgggcgacctccgccatccgggcttccctggccgccgccgccgccgggctttccctgcccgccgcggctgccctggccaacgccgccgctgccaccggggctcccctggctgccgccgccggggctgccctggccgccgccatccgaccttccctggccgccggcaccgggcctcccctggccgccgccatcgcgccttccccggcctcctcaggctgtgccggggccggctcccgcctcccgcggcctacctccgcctgcgggacgtctctgtcaccattcgccgcgcctgtctgcgggacactgctgtctgcgggcagcttggacatctcagaccgtggggtcaactcggctgctcccagagaaactggaataactggacagagcgatgcccggcggacaccccagtgcgcgtgcgtgggcgctatgcgcgctgtaaatgcagtgtgcgtaaccgggcgcgagagcatagattcttaccgcaaaccctgggagcagtgcgcatgcgtactttcccggcgcccgccgttctccagatgccccctcgaggccgggaagcgccaacgcatctgaaacatcccaacgacgaagggcgggggacatttcaaccagtttgatgtttatgaggaacgcttacaagatcgcttcttgtaggcgttctcaaggttctgtcctagggtgtttctctttgttctccagtgattatgtgccacctctattatatatcaagatattttagattcatggtcttttctggatttttaaattgtttttcattcattcctttgcctgtc

SEQ ID NO: 67581 - DNA, 906 bp, Homo sapiens
gctatttggtcagtgtcaggttgcaaaagacacacaaccatgaaatgtgacttgacagatactctgcagtactttcactttcagatagctctggctgaacttgcaacctaaatacaaataggattttgtttccttttcactgctagttatgattttcaagaaatccatggtttagaggaaaatgattttgtaatttgtgctgaattctgatgcatgctatcttgtcagtatttcagatgaaagtgatagaaaagacacttgtttattgagggagcagttagcaagccactcagagtagatacacaatggcctgccctaagtgaactggtgggaaataagagttgcttgatcgttgattttttatgaaagtagagcctaggactttccgtaggtgtgagaaagtgtgtgatggaaagaggaggatcagggatggtgtggaggtttctgacctgagagaggggacttggggacttcagtccccacatccatcttgaggttattcactcagtgtcaggttgcatagaacacacaaccgtgaaaggtgacgtgacaggtgctctgcagcactttcacttttagatagttctggctgaacttgtgatctcactaaagatagaaatagattttcaagaaatccatggtacagaggaaaataattttgtaatttattgctggattctgatgcatactatctcattagtatttcagacagaagtgataggaaggacacttactgaggaagcagttagcaagacactcagagtagacacacaatggcctgccctaggtgaactggcaggaaatcagagtcactctatccgtggttggcttacgaaagtagaaccataggactttccacaggtgtgagaaagcgtgtgagggaaagaggaggataatggacggcat

SEQ ID NO: 67582 - DNA, 783 bp, Homo sapiens
gagaatggcgtgaacccaggaggcagagcttgcagtgagccgagatcacaccactgcactccagcctgggcaacagagcaagactccatctaaaaaacgccacccttgtatcttaaagtccctcatgactgtactactctgtgcaggccctccaagaatgcggtgttgcttttgctttcctatttttgtaggtggaagcagctctaatggcttccattgccctttcctactatcacattcctccctgcacaggtcagacaaccaatgtgggattctgccatttgctgagtgtgtccattccacttctgcaacctgacactgagcaaataagcagaggatggatgtggggccaactgggcagtgccaggtgcttccagtgctttcactttcacataattccagctgaacttggaaccgacttaaaaacaggatttgattcccctttcacttctacttatgaagacatcaatagatttccaggaaatcccacgtggagaggaaactgattttgtaattcactgcttgagtctgatgcatactctctagttagtatttcagacacaaatcacaggaacaatatttgctgcttgaggaaacagctatgaagacactgagagtagatacagagtgtcttgcctgccctaggtgaactggcaggaaataagaatctctgtgtccctggttgctttaggaaagtagaaacctatagagactaggagaactttctataggtgtgagaaagtgtgtgaggaaaagaggaggatagtggacagcatagagatt

SEQ ID NO: 67583 - DNA, 1618 bp, Homo sapiens
cctaccacagacctttctccaggcacccctctttataccagggtcattccacaactgtgtccactcctagagggcctcaaagtcaaatccccaagttatcacatagggttctctcctcccagagttgtcagctacagcaaaaatcttctccccatgggccactctctcccccatgtcaaatccctttctcctattccatgccttgccactccacgactcctccacccttggagcttcccccaaaaaaccacctcttctccggggccctcccacaccaggatcatctctcccagcccccaccccctacccgggtcagggctggcgcggggcccacggggggctggggcgcggtggggcccccagtggggtgggcgagcggccagcatggcggcggtggcggcgctgaaaaggcgaccgcctgtctctggcccggccggccccgcggcggggagggcaagcgggacaggaggcccggtgggtgacaacagcagccgccactgccaccgggggcggggagaggaggggacaagggtcagcccagggcacgcgggggaagagtagagcaggtggacgggggaggggcgacacgccccaccctgagtgaccaccagcccctagggacccggcgtcccgccccccacccaggaggccctcctgggcctgctgagaccggaaggcggggcccgactgagcttggcaatcggcacctgccatggcaacaactgtaccattggtcgctggtgccaagagctcagccaatcacagcctagggcagctgttgctaggcgacgaagaagcggcccgcggagctgagcccaaacaaagggcgggagtggggcccggctaccccctcccagcctccctcctgcaactgcttcctcgggcttggccggttccaggaattcaactatgaatagccaggcagggcccgcacctgcctgccacccccctcctctcctcccttggcctcgtgctaagtctcacggcgacgggagcagggcggatcccgtcctgcccacctccctgcgaccgcttgccgccccacccgtccccgcgccgttacctgaaggagcgggcaaggggactcaaactgctcggggagcccgagctcagacctgcccactggctgagggtatccggcggacgcggcaagccagggccccgattacccagtaatgcaaccagcaaaatggcgaccacaacaaaccggcccccccacgccctggactccgcccccatccctccctctccgctcccctcacgtgacccacactgacactccgcctgcgcgagatggccgcttacctgcacgcatgcgcagcgagctaccaatcccacccaagaaccgaaatccaggctgccgctgcgcaaaggcagctagaaacggagcatgcgctctgtgaccgagtgagaatttacccaaccccgcaaaattgaccaagggtgcgtgctccctgtgtcagcaggtcaaggggaggaatgagcagcagacatgggagacggatgagtcttttaatagaaaaacacacgtgcaacagtatcaacacacatctctcgcaatcctgacagcgctgaacttcagttcttcaccttggggggtggcctgtgagaggaagat

SEQ ID NO: 67584 - DNA, 1442 bp, Homo sapiens
cttaatccccaaatctccactccatccccggggatccgccccactgtaagtgcagaaggcgggaaagtgagccgaagagcgccgcacacggccaaccggggagtcctcatccactccggcccactcggaaaagctgggatgcgggataaggggatggtggtggtggcagcgacagggaaggcaaatgggggcttcccacacacagctccaggacccaaggtcaggaactctccatctccgacccaagcctgattcccaaaacacgcccagcgatccaagactccagatgcctgaatccaaactctagcccaagacccttgagtgccgcctcctgcccaatatccaaaatccctattagacggcctcaatgagacgaaccccacgtcaacacccccaatgccaggcccacggccttcttcgactcacgaccgtgacctctgaagccagtcacaaacccctagacctgctggaatcagaatcccccttcccacaggagactggaacccgtgctcagaacccctgcccccaggccaaggccccacccctccgattctggcctggcacccggattcccgcccggcctccgtccctgaccccggaccctcaccccagcctgacctggcttcatggcgagccctggtttgtgcggctccggagtccgcggcgttcacaactccacgagtccggggctttcgcacgtggaaaagagcgcaggcgcgcggcgacgtgcgctgcgtgacgccaccccgtagtcccgcccccgggccccttccccgcccggagctcggcgcacgcgcagtgagcctggattctcgagcctgtcgacacgcaacccgctgccctcgctctctgccttcccagcctttgcctgtgcagcggtcgccctaaactcgcttccggtttcctcttccccaatgcgagcaccccaataatcagggctcatagccttcgcacgggctgtgccctcttttgtattcctagctaaatccctctggcccctgtacacccaaaaaggcttccccaatacatttccagccccaagaacagtgaccgactctgggcttccattcaaacatccgaaaaacatttacagtgcacctcgtgtgtaccaggtgctgttctaggagctgggaatacagcggtgtacgagacataaaaatctccactctcctggagttcatctttttaatggaggaaatagacaccaaacatgttgaatgtttgaaagcgataagtgctttggagaaaataacagcagggaaaggggatagagattttggagggcaaatgatttttgtttttttggcacggtggtcaaggaatgcatcaggagacttttgagctaaagggctgaaggaagtgaggagtgaggcatgcacctatctaggggaagagagttccaggcagggaaaagatctgcagatgcagaggccctgaggaag

SEQ ID NO: 67585 - DNA, 637 bp, Homo sapiens
ggacatagtctctacatctatttccaggaggagtagaaatttcttatggcttgctgaaggggctgatacggctctgggctagtggtctctgaaacaggctggaagcctggcaagaccatttacttggcatgaaagcattacagtctgaaagacgtgaattttaccagcaggttaaacaagcatggtttaaaaattaaaaatttaaagattaaaaactttaaatattaaaagaagaaagatagccaataagggcttaagaaagggaggaaccaagttacaagccttacaagggtaaggttcatctgacagcattgtacactaagttgacttcctttatcaaaagagtgtaaccaatttcctgattgtaaattgcctgggtgttaacctctactcgcccagtagtatttatccaagtgcagcaggaggtatggtgactgtacaaacatcttcctgttcagctaataagtaacctagaagtcttgcacaatgattaacttgacatgaaactattgtagtctgaaagacacaaattttaccagcaggttaaagaagcatggtttaaagattaaaagaagaaagatagctaataagggcttaagaaaggaaggaaccaagttatggagggtaaggcccaagt

SEQ ID NO: 67586 - DNA, 2913 bp, Homo sapiens
aaacaacattaactaaaagaaaccaaacacagtacacagagtactggtctagagagaaggagaattcaaaacaaacaaaagtaacccagctgttacaagtcagggcgagtccagccaggcacagtggctcatgtctgtaatcccagcactttggaaggctgaagtgggaggatcatctgagtccaggagttcgtgaccagcctgggcaacacagcgaaaccctatctctacaaaaaacattttaaaattagcaaggcgtggtggcacacgcctgtagttccaggtgcttgggaagctgaggtataggattgcttgagtctgggaggttgaacctggagtgagtagtgatctcaccactgcactccagcctgggcaacagagcaagaatctctttcaaaagatatatttttaaaggctacatggggtgggtcatgcctgtaatcccagtgctttcagaggctgaggagagaggatagcttgaggccagcagttggagactctagtgagctatgatcgtgccactgcactccagcctgggcgacagagactctagctcttaaaaaaaaaagaaaaaaacagatgaatgataacctttagaagggatcgggaggccggatgtggtggctcacgcctataatcccagcactttgggaggccaaggcaggcagatcacttgaggtcaggagtttgtgaccggcctggccaacatggtgaaaccctgtctctactaaaaatacaaatattagcctgggcaacagagtgagactccgtctcggggcggggagtggaggggggagaagaagggatgggggaaaggggagcacatgaggcttctactgtttggttttgcgatctggattcaggttgtatgggcatgttcactttgtgtaattttgtcgagctgtaatgatttgtgctcttctctttatttaacttcaataaaaggtttacttaacaaaaattgtagctggtgtgaagggtagcagtgtttccctggggccaagagtacaggctttggggacagacagacctgggtcccaatctatgctttgtcccttcggcacattgttgactgtggctggtggcttcgtggctctgagcttgtctccttctctataaatgaggaaacataatacttgcgacgatgatgcctgtaaagcttaagcgcaggacctggcatagatctgtaaggcggaaacctgggatacagaactaaggtctatggatctcctgtgctacccaacttctgggcactcgctgcctccttttccccagcccagacgcgtgggttctactcgattggttgctcactgcgggctcggggctcctcaatcccggggtaaagcccagtatgaaatgtcaccttcaggggcagctcggatcttcccacgcccgcgcggcgcacaatctttggatcagcgccacgtggagaccttacccgcccgtacgatcaatcccttctgtggaacccagctcaaggaccctccagcccagacactagaaagcgaagagcagttggccgccagactgtccgtgccagagctctgcgaacttactccgttgaaagagcaacggggctgcgccacctcccggagagaacccccagccctccacggcagggcgagatggcgccaccgcgtgatactgcgcacgcccacagctcccgtcccgccctcgcgcctgcgggtacggacagcgcatgagcttatgttgagggcggagcccagaccagcccttcgtcctatcctgcccttccagcacctctcagccgtaacttaaactacacttcccagaagcctcctcagccagggacttccgttgtcgtcagcggaagcggtgacagatcatcccaggccacacagaggccggcttggtcactatggaggagataggcatcttggtggagaaggctcaggtacagtggggacttgggctttttagtccgggccgggctcgcggggagagggtgaagccagacctgagtggggggaggaatggcttccaggaccccggcccaggttggggttattttagaggcctcggtggagagctttgtgccattcgaaggcctgtctgggtggccgagtgatggtaggaggtaaggctcagaaagcggggctgggggagtgagtgacgttagtgggtctttgagacggattgatttcgaaccctggccggtagtgcttagtgaggtcggtggcccggcgttgggattgggtcaggcggtgagtgatatatgggatcccgccgtgcggccgagtgatccccgggtctgggctgcggggctgactgatgttcagggctttgctgatgggggtaatggggcgggtagttaagtattatctgtggcttgcctgagtgatatttaggtctaaggtgagttaggagactgtgacataagggatctttgaggggaaactggggaatgttgggactcgttgaaggcgcagtcactttaacagcctatctaggagagccatgtgacattaggaacctcttgaaggggattgggtggcatttgggtctgataaggagttgatgtgacgtttagatcctagttgggggttgtgtgacactggggacatgttatgagtggtatatgataacataagatctgtttgaggggcaagttgacataaagagcttgtttaggtggccaaaaggtttccaggatctatttagagggtcttaagatatcaggggtctgttaggggctaagtgacatcagggtgaagtggggaggggaacaaacattagtgaagttgggaagctttcatgagaggactgtcttcttccaatgtgagttatcccctttcgtctaggatgagatcccagcactgtccgtgtcccggccccagaccggcctgtccttcctgggccctgagcctgaggacctggaggacctgtacagcc

SEQ ID NO: 67587 - DNA, 1887 bp, Homo sapiens
tattttttgaaagttactattattttcatttttctctttgtaaaaaattcatttaattcaatataaaaagacaaaaatctttggcacataaatcgcaactctctgatgcaaatgtttaaataaagctgatactccaagaagacgcaacatattctctttatcccacagacatataggcctatggttgcaaacttttatacacacacagagtcacaattccactggcacccgtgatgttccacatccagattttccaaatcacacattctcatcttcacatagccttgccggcaaccacacggcatagtaccacattgttacgtcaagcacagccagtctaccacagagcctgtcgtcccattgaccaaagtcacaaaaatcacagccccgggtatttactgtggttttctccagtcagatcccttcactcactacacactgactcacactcaaattacacacacgcggaaacacaacccgccagagccagagaggttccgtcggtcccgcaaccctcacagtgccacacacacgcgctcacaaggcaaatacaaatggccaggcactcattctttacaatacacatattaagcgcctattatgtactacacgccgggactacctcaagaggtgaaacaaacaaaatcctgcctggcggagctatcgcccagtcccgcacgcactcggcctcagggtcacactcggcggtcccacgctcaagtggcccggccagtggcccagaggcgtctgttctcctcctcagcttcctgcgtgggttcctggtaagtgagtcgaacccgccggatgcgcgcgcgcctgcgcctccgcccaaaaggatcagtttccggctgtggactacatttcccagaagccccttgggcagtgttgcctggaccccaagggccctttacattgcgttcttaacggttcagtcaccttaaccgttattattcacttgcgggcgagaagtccgagctaggtgaggcggaacgggactcttacgagtaggactggggatagaactgccgcccaaagtgaggcgctccagggcccagacctggcgtgtcgtgcccgcagggagcctcaggcctgtgcgtgcttggggagcggagaagggaaattgtgtgacaaaatgtggcagacggtgtatgtgtgtgtgtgcgcgcgacggggcgcctgtcaggaccgggttgggcgggtgtgggtgcgggtgtgaggctgagacaggtgcctggctctctggtgtgtgtcactgaccctctaccctcctcacggcctcggtgtttgcacacagcagtgtccccaagagggaagtcaaatatcgagctctgggatgaaggttcccagcaagaaggtacagacctgggttggcgattggacttttgaattagaagtgtccctaaaacagactcctgggacgacaggttggaagactgcgcagttggagccgctgtgtgggcagctgcatgtttcagaaccactgcattcccatacctttgatctagaaacctggtgtgagttcagagacagatcccagcctcactctcacacagctgttatgtgcgtgaggtcagcacagatgtggcgctggaggggatattctaggtcggtctgtgctcttaagaaaggcctgctgtctcatgattatttttcttcccccattctgctattcatcaaaacagggatcctgaaaaggagggaacaattgttgtagcaggtctaaaagttcaggtccaggtaagtttatatttcctttttattcataaaatggaaatcacacattctaatcctcacacagccttgcctgcacccagtcatacggcgtggtaccacactgctatgtcaagcacagccacaatctaccacagagcctgtcacctcattgct

SEQ ID NO: 67588 - DNA, 807 bp, Homo sapiens
ttttcattcctctgctgcagcctctgcagctttgaaggggaaagacggaggaagcagcaggagcctagtaccaccggcacagtgacactcacacagccccagcaaaacgcactgcgtccacacgccgtcccggtcctgtgcacagggcctcacgcacacactcacacagtcccctccgtcactcaagatcgcgcaatccccatcctttgatgcccgcgcacacgcacgcctaaggatctggcagattccgtctgcgccccgggttcctcctctgagcgcctcgctctcgcccacccgcactgccgggtcggtcaggttcgagtcccagtccacgaagacctcccgcagccaccgatttcttcctaggacgtgaagaccttacccagctaggtcgtcaaccccaggagacaggaagtggaaccgctaattccggtgcggtggcctctgggaaatacagtcctgagcagaaagaacctcagaagtcttggtctatggtctgttcaggttgatcccagcatacattgggggctcctaagggacccgagcctaatggatttgtgggagttccagaccgtggggtgcagaggttgcggccacgggcgagaatccccatctgagaggagcgttgctgttttcggtgcgtcagggtaaattaccttttctctctatgcaaaagaatgcaaatgagcagaacttttaaagaagaatttaaagtaaaattacgtcaaaatgtagctgctttgacctcttcgtctcagatccgagcataggcttcccctttgtgctatttgaagggacttaggataa

SEQ ID NO: 67589 - DNA, 1804 bp, Homo sapiens
aatttgcatatccccctagtttcactgaaaatttaaggggaaatctcaatattctaaaatcaaaaacgcatgtcttgaacaaatacaaagcacaaactcacccttgactttaggtgtgcagcagtaacgctctcatcctcctccaggtccttcttttggataaaaatacgactggagaaggatacggcaagcgtgagactccaggcatttcttggagcgcagactaagtttgaaaacaccctccctccatagccacaatttccctcacttcacacgaaataggaaggaagtaaaaggaagaggaatcgattcaaccagtacaaccagtttggagctggtttctggggacagagctctgaggacgctgtggttctcaacatgtagctgcccccctggggaacactcgggggcacttctgcgctttcttgtgtaaagcttcattctcggctcaatatctgacctccctactggggccattcctctgctgcagtccccgcagctgtgaagcggaaagagggaggaagcagcaggagcctaggggcaccggcacagtgtcactcagcaaagtgcgctgcgtccacacgccctcccgggcctgtgcatagaacctcacgcacacactcacagtcccctccgtcactcatgatctcacaatccccctcctctgatacccgcgcacacacacgcctggggatccggcagatcccgtctgcacccccgggttcctactctgagcgcctccccctaggccacccgcactgtcgggtcagtcaggctggagccccaatccgcagagatctcccgcagccacagatctcttcctcagacgtgaagaccttaccccgctatgtcgtcgaccccggagaccggaagtggactggcgcggtggccgctgggaaatacagtcccgaacagaaaaagcctcagaagccttgagctgtgatccgttcaggttgatcccagcatactatgggggctgacccctaagggagccgagcctagtggattcgtgggagttccagcccgcggggtgcacaggttgttgccatgagcaaggatccccatgtgagaagagcgtttccctctcggagcgtcagtataatttactttttctctccatggagaatgcaaatgagcagaacttttaaagaagaaagaagaatttaaagtaaaattatgtcaacatgtaggtgctttaactcctttgtctcagaccccagcgataggcttccacttctctgtgctatttgaaggggacttaggataaatttgaaaagcttgaactaaagaattggttggttatatactaggagaggaagtgtggttcacattggagatttcagaatcaaatgtcctggattcttcgagacaatgttcctgttatctggagagaaaaacgtgattcaggacgacatggaaacggataaaaatacacagataattacttgccttatcttgaaggatgaataattaacactttgttaaaatagtataaacaaatgcaaaaaagggcttgcttttcctaggaagagcctgatttcactgttgtagtctaacaatatttaactttcaaaatcatttttctagtttcctatgctacataaggaggaaacatgtaataataaagagcaaaacgtcttttcattccagaattgtgacagaaaacaaataagatgattaactcaaccatatcaataatcacattaaatgtaaatggtctaaacaccttaatttaaaaagattgtcagattggattttttaaaaagtcagacccaaatgtgcatcaatgatagactggattaag

SEQ ID NO: 67590 - DNA, 2758 bp, Homo sapiens
agaaacacttatactcagaatgaagctggggctctctcttccaacaagcatttttgatatgctccgagtgtccctgctaggtagccaggagaccaggtaacccacttccctctgacaatggaacaattccccaaggaccctgaggggcagttctctggagtttgggcactagagtccctcttatttcctcttcttctctcctccctctagaccccataccactcaggagaggccaagtaaaaagacccagaattttgcctcttacaagcttagagatcttgaagaagtcactgaacctctgcgggacctactttcctcattctttaaatagaaaggcagtgggttttttgtttgtttgttttttgttgtttttttttttgttgttgttgtttttgttaatcgtggcgatggttatttatttatttatttattttgagacggagtcttgccctgtcgtccaggctggagtgctgtggcgtgatcttggctcactgcaacctccacctcccaggttcaagcgattctcctgcctcagcctcccgagtagctgggatagattacaggcgcacaccaccacgcccggctaatttttttttttttttttaaatagtagagacgggggtttcaccatgctggccaggctggtcacgaactcctggcctcgtgatccgcccgccttggcctcccatagcgctgagattacaggcgtgagccaccgcgcccggcctggttgttaatttttaaaactgcctttcatttttgctttgccatttatagctctgtagccttgcacaaatgacttcacttctctatgagtcatctgtaaaatggggctctttgtgaagacttaacgataccacgtgtacaaagcactgaatacaacatgcacattaagctccccgaaattgaaactcctataaaataggaatcggggattctcaagagcaggagttctgacttcagcagaggaacccagagctggtggggaaagcagacgtggctgtgacatccccagggacactaaacacatcctcccagccccatcttccccgcagagtcccgccaccggcccgacccctaacttgctccaaccacccgccgacgcccgcagcccgctgtttgggggccgccccctgcagcgccaggtccccgcgcggactacagttcccagcgtacatctcggtcggggggtccgaggggccgtcctgcctcagggataaggtccaggctgcgttcgcggctccgggcagtcacagtcatgcacgcagctcctatttttcgcgttgctaatcgcgtccgttgcagtccaacccatcctgggccgcggcccccacagggtctgtgaggagcgcttccccccgccccgggcgcccgctacgccgcgtccgaaggaggggccgaggccgggctcatctccccgggaggactccttcggcttcgtggggtgtcatgtccattgcggcccgaggctggccgcggggctctgctggagggcgctgagagccgggccccgaggccgcacggccggagactacaactcccaggaggcaccgcggcggcggcgcccacacgtcactcgggccccgccggtggcccggggaagcagcacgggcggggggcaggggctggggccgaccgggaggccggtgccaaggatgggggccgcccggctgccccgcgcgtgaggaggccgaggggcgcgccaccccggcccggggcggccgccccaggggccccgccacccccgcccggcccggcagtcgtggcccgggatgcggagccgggggccgccggtggagctgcgcggggtgagcggcgcggggaacggggactgcctgccgccctcgccctcgtcccccaccggcggaccccggcgggcattcgagagccgcgcggccaggccctcttagccctctgccgtttggggggcacgggtgaacctgccgccccactcccaccccgccccgccccgcccgtacagccaaatcggaagggacgagcctgccctttgaaagggttttttttcttgctcctgcggagggcgccccagccatggccctcaggagctccctagaccccgcagggactgccctccatcccggccgccggggcccgccctctgcatcccgcgggcagcctgtgtgaagcggcctcccgcagcccccggcccctcccccatggaggaggaggagggggcggtggccaaggagtggggcacgacccccgcggggcccgtctggaccgcggtgttcgactacgaggcggcgggcgacgaggagctgaccctgcggaggggcgatcgcgtccaggtgctttcccaagactgtgcggtgtccggcgacgagggctggtggaccgggcagctccccagcggccgcgtgggcgtcttccccagcaactacgtggcccccggcgcccccgctgcacccgcgggcctccagctgccccaggagatccccttccacgagctgcagctagaggagatcatcggtgtggggggctttggcaaggtctatcgggccctgtggcgtggcgaggaggtggcagtcaaggccgcccggctggaccctgagaaggacccggcagtgacagcggagcaggtgtgccaggaagcccggctctttggagccctgcagcaccccaacataattgcccttaggggcgcctgcctcaaccccccacacctctgcctagtgatggagtatgcccggggtggtgcactgagcagggtgctggcaggtcgccgggtgccacctca

SEQ ID NO: 67591 - DNA, 1468 bp, Homo sapiens
tcagcattttcactgtgaagatgtctccctgtgtgctttgtctatttggccgctaggctgccagtcccacgagggcagggacttctgcccacaacacaagtgtctctcaggtcctaacagagatcctggcccaggagagtcgcaggcaagacgttcaacaaactcctcccttcagtcttccttccgcagcaaccctctcatagggatatctgaaggctggcgaggccaatgttttggtttgcgtggcctttccctagttgttctatgtgtttgctcatctccccagaacgaggccagcattgcagcatctccagcacctaaaacatttgctactaaaccattaaatatttgttaaacaaataaatgtggaggacaagtacaggggaccataaacaccccaggagggactgcaaagagcccggggacggtgggaaagggcattcccagcggtagaaacggcgctgtgtgaaaacaaaacaaaagcctggacgttgcagggaaggaacgccggctgccagtgatagggaggagaggctggagcggtgggagttcagagtggtgttgagtgggtgccgggcggtgggccggcgtcgccctcaccagggcaggcggcgggtaggctcaccatgacttcggcgaagatgtccccggcgtactcgcgttctccctgcagccccagcgcgctcagcgcctcctccagccccggcggcctcgccaggcgtcttggggagacagtggggcccgcggggaagccgtcggggactgcggcgcttgaaggctctgcgtcgagggaggcagcgagactctgcaaaggagagggcctgggggcccagcgcctaacgataggcccgagccgggagccggacccctggtccctgcctctcaccagcatcctccaggagggtgttgcgggcgaggccaagcaccgacccttgcagctaggggaagagacgcgcggcgggcgctttaaaggcccctgggcgcgtgcgcactgagcccgcctcgcccgggcaggtgcacaaaggtgagtgccccgcaggctggctctgtcctctcgaagccctctaaggtcggacagctggagacagatcctcatcctgctgcccggaagcagcccctctgggcctcgctttcctgaccataaagtcgggatgatttcaaaatgtagaatcagggtttgcaccgtcagaggatggatgtacaaacatagatcggaggttagaatgacccttgtggtgtcggtgtcgcaatggaattggagataaaattgtgtgaacacatggttgtttacatagaagttaagtgttgtgtggccgggtgtggtggctcactcctgtaatcccagcactttgggaggccgaggcgggcggatcacgaggtcaggagatggagaccatcctggctaacactgtgaaaccccatctccactaaaaatacaaaaagttagctgggcgtggtgccgggagcc

SEQ ID NO: 67592 - DNA, 684 bp, Homo sapiens
agacacacctgctacggagaagttgtttaaggggggtagagtctgatcaggggcctcgggcctctccttgtacccaatgaaggagccgtcgctcttcagcaggaagtaccgtggcctccaggtcttgatgtattcacctgaaatgaggcaggaagggagggagagaggttaggacaaggttgagtgatgtcccaggtaggcggcaggaggcccagtgtgacggtgactcacaaggggtaccacggggcggggaggtgcgggggacacacgagaatgcctctcccagaggagccctccaggtggcccctgctgacgcaggctggggcactgggctgagcccgggtgatccacaggtcatgcctggcaggaaggtgccagcagcagtgccctggggcaccagttgcctcagcgtgtggcaaggagcaagctgtctgtgccagctcctggcctagtcccaggggaggcccaggcttccaaacacacatgccctgtggccctgtaaggccaaatcccatgggctgggattcaccaatacagctgtgcaggtagctccaatgccaaaacacttctgtgccaggcagggtggcactgctgccacaccctcccagcgccccttgactctttccaactgttcttcaccatgaatatccaagcaccctatgcacacaaacacacacacacaca

SEQ ID NO: 67593 - DNA, 1042 bp, Homo sapiens
caggcctacaggcccacggcagcgtggacgcagggtcagcgggtgctgtctgtatcaggtgtgactgctgccctgcgttgctattcagtattagtccggctggttgggttggggaggaatgggcagagaaatcagcccaatgagcctcccctcctctttccctaaaagtaacagccacgggctctggagaacacggtgtgaaaaccacaggagggaggcaaccctcaggcctttgctggctgtaaggcagtgatgctactggaggggaagtgggaggcctgtgaaacgccctgctccgctcagtcaaatctacccacgcccccaggcaggagcctgtgaccggctcctgggtcacctgctaacaccctgaatctgaccaggctgttcctgctgaaattccaaactccttcacagacagtccacaaggctcccagtgaaagggccctgcctgccccgcagccccaggactcatctcctccctgctccctcgctctgccaagccacacaggcctccgtgaggcttgtccctgcacctcaccaagctctgtcctcccttcagacctttgcactgtggttccctccacctggagggctgttccttctcctcccatcccacatgactgcctcaccttgccaaactgggatcagctcagaggccctccccacagccgcatgcatctaaagaagtgcccagtctgtcacctgatttgaattcgctgcctagctcctccccctctaaccggctccttgcttattaacctgtttcgggttggtcttgcttagccccacaaggatagggactttggcaagtacactgctgtattcccagtactgatgcaacgctggcacatacgaggtgttcagtaaatggtggcggatgagtgaaaccttttcctcggctccacaatacccttaggatccatcctcacctctcacccaggcccacaggccagtgcagcacagcccctgccaacccctgcaggcacttctgctgctccccctgcccaggcccagccttcctgccactcccagagctgtgagc

SEQ ID NO: 67594 - DNA, 3040 bp, Homo sapiens
gaatgcactcagttactgtcagccatcaatttcatgattactgttttcactgccactgttagccccatcaggcaaaccctctaaaagctggcaggagaggaccagaggaacaaacccctagtggagaaagattctacagagtcgccgctgcctcacagactgtgggacctttctctccaggaaccacgagccacggaagccagtcagcttggaagtcactgctgcggactaggggcaaccatctgccccctctgaccacatcaccagcccaggtctgctgggtcaatcagggactgcagccagtcctctgggaactccagacccagagcaaaggctacagggcaagccaaggtcatgatctggcctagggagcagggacactggccacagacctctggggctggctgctcccagcaccagcccacagaccacaataagacaccagatccatgggggatctgactgtcccaagcccttcagagcagccttcctccctgggccaggctgggccaggggcacccccactccaagtccccttggcctatgcaaagaggaacagctgggaaaacagctcccggcctcactgcaaggccaactgttactgccttggtggggagtgtaaacatgatgtgtgaccgagctggtaactgggagacacaaacagcttcgtggccagcgacagaggagcatgtagtggtctgcgttggttcctggacccttcacatccactgccaaccaagttcagcccacgagtgaactcctgctgcttctctgggaaggtaggagtggatgaagttgaaaagcagcccattggaggctctagttactccagcccaggcgtcttgctgagccccaagaggtctccaaatgagaggaagaggtcctcacaatcccaagatcaagatgcccccagagagcttccctggggggaagaggtgttcccccaaacactccttcctcccaagttttaacaagcgggtgcaggggcacggctcctcaaatccaagcccaatccctcttcctcttcagaatgttaaggctcagacaacttcagtgacttctaacacagctttcctccctcccctatggaaggaaagaactgttactgcctggtaaataatctgagagggtaatggaatccagagcagcacctccatggtccaaagcaccccagtaaccatgacgttccctccagagtcgttaagaagttcaataaaggctgagatcagtgtaaacccccaacgccacacacgtcaaatacaggaaacagaaacccctcctcaccaatcggcatcacagtcctcccaaaatacgcccctaaaacccactagggcctgtcccgccccgtcccagtcccttaaagatcacaaacatcacagtcctctgatttgggttcccctacgttctaagcagggctcccccaacgccgtggtgatataacccagccacagttggggaagcatcctccccagaagcccccacccctgtaaatacagcacagcaacggcttccacagcgccaaaaaggtacagccctctacacttgatgcggcgcgccccctcgatagcttagcccgcgcacgccaggctcgatctgcccgccgcgcccgaaaggtccagcccccggcccgcgcacgctgcggcctgcgctccccgtcccgcaaacttgcagcgctccccccaccgcctcagtggtatggcccgccgccaccgccccggccccccgaggctggtcccaccgcccccgctcggccacccccactcagctcctgaaggaggggctcgagggccgcggtccccccgccgggcacgggtggtacagcccatcgcggcaccgcggggggcccggacgcgaccatcgtggggggggcgttcggggacacgcgctggcgcactcacctgtcaccggcagccgcccagcctctccggcggggctctacccccgcccatcgccacgctgcgctggttccctttccttgtgtttcccggcagcggcaacggcgccggcagcggcagcggcggcggcgacgcctcctccgaggcaggcccaacggctagcacggcgcggccccccccgccccctccccccagcccccgcttaccgccccctcccaccctctggacggaaataccgccctctcgcgccacaaacaggaagtgacgtacaaagagccagagacgaactctgagagagcgagagcgcaagagcagggcagagaaggaggcgggctcacagcagggcgcctgcgcacattagacaactttgggcctgtgtgggttagagatgggcctcgctaggccgtggggcggaaaggcgagatggggctacgcaggcgcactaggactccgacgtctgctttccctagggcctagccgtagtgattatttcccggcagcccctagtccgtatttacatacgctttgatcttgttttactcagttctgggttctgacgctcttaaaggaccccggagcgggagttagttaggaggggtttccttttcagtgtgctcgtcatggttgagctcaggctctgaagccacacaaccccagacttgaatttcctcctttctggtgactgtgggcagaaggcttgaccgttttctgtgcctcagtatccacatctgctaaatggaaacaatcatcgctgtgtcgctggcttttgaaccattttaatgtaaacaaaacggtttttaccaattagttcattactgcaagatattaatgccacctgctctcatcgtacatattccagtgaatctgggatataacattttataatgcaacttgggcccataaaggccttaaaatcaccctgcggccgggcgcggtggctcactcctgtaatcctagcacttggggaggccaaggcagacggatcatgaggtcaggagttcgagacagcctggccaacatagtgaaaccccgtctctactcaaaatacaaaaaaaaaaaaaaaagccgggcatgtcggtgtgtgcctgtaatcccaactacttgggaggcttgaggcaggagaatcgcgtgaacccgggaggcag

SEQ ID NO: 67595 - DNA, 1398 bp, Homo sapiens
taacgaagtgagcgttatgcggaggcgctgagctaaggcatccaacgtacacgacctgacttctcactcccatttataaagccggtgatacagtcggattctaacccccattccacaggggaggaaactgaggctcaaagaaacaaatcgtaagtccgaagccgtacaacggagcccgaactgagtccagacacccggacgccacccgtccctaccgcaaccggcccagtcccaccacccccggcccgcgcctcacctggcccaccgggcccgcgcccactcgcgccgcccgccctccctcccggcggcgccaactgtcagacactcctcccccggcccgggctgcccgccccggaagcatcctctcaccgccggaagctgaactgactcgtccgcggccgctctaccccaacaggccgccaccagcgagagtgcggccataaccatcacgtgaccgcccaccgacaccagcgagagtgcagtcgtaaccgtcacgtgaccgcccaccgtcggcccggcgctcccctccgcccgaagctagcaagcggcgcggccaatgagaaaggcgcatgcctggcccccgccggcctgcagtctagccgtagtgcgcctgcgcgcggctaggaggggccgtcaggcggggatacagcctggaaggtgcgtgtggggctgggtctcggagtgggagacgtggagtgcaggtactgtgcgatctgggggcgcggcgcctcggctaccctcctcgtgttgtcttccacgctataatgcatggaatataatatatattatatggaatataatatatggaatataatatatataattatagcgttgtcttccacgctataatttatgtcgtcctcggtctctttatgtcaccattcctctccttctgtctcatcccacttaaatcctcacaactccttctgtcgccatcaccctctttaaatcctcacaactcctcttgttgtcatcaacgcccttaactcgctttcgttccctgtaagccctctttgccaccataggtcgtaatcgctccctttaaattcgtcatcgccatatgttacctgcatcctgcttttgttgccatttctcctttataaaatcctcatttctctttaaaccctcatcatacccccaagtcaccttcgcatggctactgtccccatcgctcttcttaaatcgcgctaatgcaactcttacgtcatcattaccccttgtgtctttgtccctcccttggcatcactgttcctctgaccagtcaccatccactcctcatgcttccagttttccccataaggagccacccagccttacagttatttttcttccctccgtgtcttcgtcatttccccgtgtcacatctcacataacatacggggtactgcagcccattac

SEQ ID NO: 67596 - DNA, 1699 bp, Homo sapiens
aaatcagttgggcgtggtggcgtgcacctgtaaccccagctaattgggaggctgacgcgggaggattgctgaagcccaggaattcgaggctatagtgagctatgatcgcgccactgcactctccagcctgggcgacaaagcgagaccccgtctctaaaaaaaaaaaaaaaagaaaaagaaaagaaagaaacaggcccgcagagtgttgtaaacagagggcgttcatgatccctcgaccactggacagatgtccggggaacccaagacggcggcaccgcagagcccgactgggcaccagggggcggtgctgagctcagcccaggcgcccaagttttgagtctgcggcaaagcagtccgagtcccatttgcccggggctggagtcactcggggttggagtcaggcgcctggaagaccctcagcctggacgacagctccccgcaggccattttcacccgcttccgcggcccgcctcatccacttccagaaatgggcacaacttcctctgctcctccaggaagcgccactctgcccgccccttcccggcccctggggccgacccaggctccccatctggcccagctccactcctgcctctgcctccccgaggcttctggccagaagcgaggctctgggaccccacgatggcggcgtttccctcactcaaggccccgctggcccctcgggtcaccgtccagccccctgcgcctctctccatgcgcacccgcagttttcacggtgacactccctcccctccgtgcaccccccctcaggctccgccctgtccctgcggccgtcaggaaggacgcagcctgggtcccgtgccaggccgctgagtgtgcggcccctcccagccaggcctggaatgcggctggaccgcgggggcggccgctgacacccggcgctccagccaggcccagcacacgggcaggtggccccagctcgtccgggtctgggtttcttctagaaggaaggcacagctgcctgccctgagctccctctctgcagtccagctaccaagcctagtggctttatttcagacacagctccaagcgtccctatcctttgcccagagatttaagaccaggagtgaattttatttttaaaaatgggctgttgtccccctttcctcccccattttcctggagagccgactctcagggctccttggagaggatctgtccagggtccaggttttgtgtttttatttcgggaccattctgaaagcaatctccccttcgctcctcaataaatacaggtagactccaggcgaggacttgctttcatttttaaaaagttgccttgacttcctgctagcaaagaaaagaaataaaatttaagaaaaaaaaaaaaaggccaggcacagtggctcacgcctgtaatcccagcactttgggaggctgaggcaggcagatcacgaggtcagaagatgaagaccatcctggctaacacggtgaaaccctgtctctacaaaaaatataaaaaattagtcggtcccagctaattgggaggccgaggcaggagaatcgtttgaacctgggaggtggaggttgcagtgagccgaagtcacgccactgcactccagcctgggcgacagagtaagaatctgtcttaaaaaaaaaagaaagaaaaaaaaaaagtggcctggtaggaggatcgcttgagcccaggagtttgaggctgtagtgagccatgatcaga

SEQ ID NO: 67597 - DNA, 2321 bp, Homo sapiens
ctaaactagtttcacgtagtttaatatttattgtctactatgactatgtttcaaacagtaaataaataaggaaacacaggaaatgtacagagaattacaggaagacactaaaagttcctagagaccttttagatcatcagagaaggctcctgtaaggaggtgacatttgaatggagccctcaggccagagaagtcagccatgggagaccctgggaaaagcattccgggaggagggaacaacaaaaaaaggcagagaaaagcccagaggctggatgggcttgaactggaaagagaccagcatgggtggcacacagagagtgacatggtaggagaccagattggggagcagctaggggaacgggcacaagccaggtcacagaaagccacatatgcagaagtagggagtttggattttatcctgagtgtggtgggcagtcattaaaggaatttgagcagggagggaatggtgctgtgagctgattaggtttccggaagatcccccccatggctgcttcgaggaagactgtggggggcaaaaagaggggggatctgagacccactggtaggctgtactcgtttgggacggacgatggtgatggcctggagtaggagctggtagtggcatggaaggaagtcggtcgagtcaggacttatttgggaggcagaatagacagggcttgtcgggaaatcgtgatcggcaccgggttcagtcactgagataagtttgagggtccactgttcttggagtggcgggggtagggctggagttttggactcctggcgctacctacttttttgggccaggaagactgtagagtccagtttcggaaccctgcctagcaagattttaagaatggcccaccacactactcaaaacagggtcttcgtccccttccccgcagtccggggagtccggaaccgcaggaattccgcccccacccccgactccgcccccgggtcccggcgccccctagcggtgcccaggccggctttcccccggggattctggcccctctgaccccaggaccccttctactgccccgattcccggctgtgattcctgccggcctcccggcgccgtgcgagccgggacccctggcgggctgttctctgcgcccggcctccgctcgcttccggcagtggaggcggctcctcccgaagcggcggcggcgggggcgggtgagtcacgcagccggagccaagaagccggcgcctccgcccccttctcggactgcggcgtgattcacccggcccggccggggcagacagcacgtagaggtccgtgcgtctcgatcccgggcagccccggcgggcacctgtcggacccagggatcgaactctgtgaaggacccggccgctggtagcccttctgttcccaggccccttcatttacataccttgctcactagcggccaatcagaacgaagaggtagccacccacaaccaatcaggaaacggcggcggcagcatcgcttgttggctgtcctctggaaacccgcgcctgggtcgcgagacgcagttctgactccggctcacgactccagactcctaactacccttagcgaccgcccactctcgtggctgccccgccctccgccccagggattggccctgcatggtgatgggcggagcttgtagggggcggattctgaaggaggggcttcagggcgcatgcccgggcagctgcgcgagtgaggggtggaaagaggtggctttttactccggggaacggtggcgagtgggggcttttgcctctcaaaatacgagcccctcacaactacccatgcacctgccaaacccggcaattaagcttcttacacatccagccccgacaggggtctacactacagataatgcccgggttcaaattccgactccggattccccactcactggatgcgtgaccttggaaaaatgatcaacctcttcaagctacacaaagttaaatggggatcgtcttgcctacctcttgacaggatactttaagtaggatcgtatctataagaacacaataccacactcaagcaatgctggacagttggacttaattgtggttaaaggcgggagtgaggtgggagtgcgataccaacggaatcacatcccgggctccattccctaagcagctgtgtgacctgcggcaagtgttttaatcccttctggtctgtttctcctttaaaatgagagaaaatagcgcctagtttacaggattgtttttaaggattaaattaattcatgaaaaatcttcagagtggggtgcaacatgttttgtgttttttttttttttttcattttatttatttatttatttatttatttgagac

SEQ ID NO: 67598 - DNA, 1591 bp, Homo sapiens
ggtttcatcatgttggccagactagtctcgaactcctgacctcaagtgatccacccgcctgggcctctcaaagtgttgggatcacaggcatgagccactgcacccggtctgcttttttcttttcctttgcaattacctgctcctaaggtactagataatttgtgtggtttttttgttttgttttgttttgaaagtagcccggcgtgatggcaggcgcctgtagtcccagctactcgggaggctgagacaggagaattgcttgaacccgggagacggaggttgcggtgagccgagacggtgccactgccatctcaaaaaacaaaaacaaaaacaaacaaaaaaattagccgggcgtgcctgtagttccaggtacttggaaggctgaggtaggagaatcacttgaacctggagtttgaagctgcagtgagctatgatcgccccactgtactccagcctgggcgacagagaacgactctgtctcaaaaaacaaacaaaccaaaacaaatgagagaggtaggaaaactagaggaagagcattccaggcagaggcgagagccagtgcaaaggctctgaagtgctgcctgtcaggagacaaggccagggcagctggactgggagctgccgggaaggaggtccgagaagtgaggccttttagcctactctgtggacctttgttttttactccgagcgggatgagaagaccctggaagatgaatcgatgagaaaaataatttccgtttccgttcagtgacttgaagaaaacaaaataagacgggataatcgcctgtaaccagggtggtcctagagagagattcttcgaggcgttgacattggagctggggccagaaaatggagacggagccaggaattcaaaggctgggggaagggagaagaggagaggccgggcctggggaaatgaaaccatcggcgaagccaccgggcccggcaggcctggagagaagcctccgcctgctggggagggaggcagggaggggggtcgggaggcgcggcccgccccgtccggcctctggggagggaggaggcgccaggccggctcccggccgcggccgcctcccgggtaccccggccggcccagggcggagggtgggcagcggggagggactgggccttcccgccacgcccagggcgggccgcgggcccatcccccgccgcggaggagggcaggttggggaacgtggacactgccctcggggactcggttccttctgcagggccagcctttccacttctgtggccagttctttttaacaagtgcggtgttaaggaaggcgctgggcctctcggagcctcagttttttcatctggaaagagggtgctcctcttactggcctcatcgcggtgctaaggaactgtgcgattccccttcccagggttatcttcagggcaggcagagagctgcagggaaagggggagggcggggcacggtggctcactttttaaacaaaaagtttgtttgtttgtttccagacgaagtcttgctctgtcgcccaggctggagtgcagtggcgccatctcggctcactgcaaccttcgcctcccgggttcaagcaattctcctgcctcagcctcc

SEQ ID NO: 67599 - DNA, 2041 bp, Homo sapiens
tcaagagttaattgccagttattcgctcaacagatttactgagtgcctactatattcgaaatctcctggagccctgttggggaacctatgttgagattcttcttcaacagtcgggatatttctatgtcctcttccttaaccgactgggagcgctcccaagagtaggaaaggggcctgtctcattccctctgcccacgctttcagattcccccaaagcgcgccccataggaaaacttgctagaactcagctcagaccaagccccgccccctcggaggtcccactcaatcagaccgcgacactgtaaggccccgcccccccatgggtccttacagagcatccaggaacgccccaatttggcccaggggcttctgggaaacgggggccaacagccgccaggtacacgaattgacgtcgagcacgcactacaatccccagagggctccgcccgtccaggggacgagccacccccctcaccccgctctccctcagggcatgcgcacaggggcacaggcgggtgggggaagggaacctggacgtccagctgccggcgcctgccgagccccgccctccattgcctccggggccgcgagtctgagctccaggcccggaacacccctcccccaccccagactccggctctaaatttgctttctcccggtccctctgttccttgaaagtccgcgattctccttccaaactgcccttggatccagagacccagatccgaacacatcgctcaaagacgacaatgctccgatctagttcgggagactacgtatcctaattctgatacttcctcccacttctcctagtctcctgactttcaaacgcccctggacttcacctccaaactcgctgtccggctccaagacccgaacattgaactcttcccggcaacctccttcccccgccagtgcgtcttggagtcccaagaatccttgaccctagttctctcgcttctccaaatactcagaatctcagctccgtacctctcacaccttttccagaacacgataaagccccgaattcaacccgtccggaagacccaagtggaatcgaatctccaggttccctgtctcaaaagttcctcccctctgttctctcgcttctccaaaagcccaacgtcccagcttcaaactccctccacttgaaaatactgccccaacaacctcgcctcccctcctgggtcttgaactcagtctcaggtccccagaccctccctatcatcaccctgaatctgaggccccctcccccggtcccacccagaccccgcctccgcaagtccccggggcgcgcttctctctcccccagcctaaggtaaattcccaagccaggcgaccactcctcaccgcagctgccaggttcgccacgaccacctcctggaacgcccacagcgttgcgacccgccagtgccaggacccaccagtgaccggttggagcctcgctcacctcggcggggcctctccgtctggcctctggcccaccagccccgccccggagccgagccgcgagccgcgattggctggagtcccgcccgccgcggggcgtcgattggctgggcggagccatccgcccgtgccccgagacgccggatccgcccacccctccctagcgccccgggccatttaaagaagtgcaactggcagggggcggggcagcgactccggggtggagggcggccggtccaacagaaccgcttccttccactcagctacagtcctcgctccaagatcgtcaccattgctccctgcggttcctttatggtaggcctggactccaccgtggagccagaggggctggcatgcccctccccaagtcgctgtgcaggcgggcggggccgagcaaccggaggaggccgcgcccccggggttccgagggaggacgctggggcgcgggggatgacgtagcggaagaccagccaatagagtggcgcggcccgcgttgcctaggcgatcgtagcctcgcccccttgctgcccctcccgccccctatacgttaccgcgcggccccttcttaatcctcaggttttctcagcacgtc

SEQ ID NO: 67600 - DNA, 580 bp, Homo sapiens
ccaggctggtctcgaactcctgactgtgtgatccacctgcctcagccccccaaagtgttgggattacaggcatgagccactgcacccggccccaactgctcttctttcagttcctcaaatgcatggtgctgcttcctgcctcctggactttgcacgtgctgtgccctctgcctggaacaccctttaccctctttacccggtccccccagtaacttgtacttcctctgtcacagccctctttatgctgacctgcagcaaaccaagcaccctgtgggtccagggactgtgtcatgttttctgccatctccctgaacctttgtaaacacaaaagcacaggcattactgccccagggaccttgatccaaactccagctctgccacttaccagctgaggaacctcatgcaacctcttccgtgattggacctcagcttcctcatctctgaagtgaggatcacagcaccagcctccccgtgctatgtgaccacctttcataggggaatgacacaagatctgtgctgccctcacacatgggggagcagcaggggcttgcatgggccaatatgggcattcttttttttt

SEQ ID NO: 67601 - DNA, 3575 bp, Homo sapiens
aggcaccagccaccatgcccggctaatttttcgtatttttagtagagacggggtttcactatattggccaggctggtctcgaactcctgacctcgtgatccacctgcctcagcctcccaaagtgctgagattacaggcgtgagccaccgcacccagcctctttttctttctttttatgtatttttttaaatttgagagacagggtctcaccctgtcacccaggctggagtgcagtggtgcaaacacagctcactgtagccttgaactcctgagctcaagcaatcctcccacctgagccttctgagtagctgggactacaggcatgcatcaccacgcccagctaatttattttttttttgtatttttgtagagatggggtcttgctacgttgcccaggctagtctcaaactcctggcctcaagccatcctcccgccttggcctcccaaagtgctgggattataggcatgatccaccgtgcctggccagcccttccctttgctgagggggacagcaaagctgagagctgggaagagatttttcagagccacagctctgaagctccctaggctccagttcttaaccctctgagtgcagtcccagctatgaccagcagggtgggcgagtggaattcggtggaattagtggatttccaggtgactcagcgcctctcaacttctctctcttacttccttctccattactcccgaataaatgcttatcagcaaactggtttttactgagaggcccacagctccccattctccacaagtcaagatcctcacgtggtctccctggggaaggggagagttatggacctagagaagaactttcagagtccctccaagggagacagcagagtggggtcctgttggcctccacccttttggggcacgcagatagtcaatatcttcagcgtccccaaggcctgcaagggtggggccccatatctggaagtcccaggcccagctgggagttggtcaagtctgggctgtgggggcagggagtgctgggggatggttatccccttttctgccctctctcctggggcaactccaaattttcagccctcattgactttcccaggactgctgtccccaagtcttcactcatgtctctctgtgactccttcccattaggtactcgcagcaacctgaccccccaactttttcagtttccagcctggggacttgtggtggttaagagcatgagctgagttcaaatcccagtcctgtcagttaacagctgtgtgatattgggcaagtcactctctgggtctcagttttctcatctgtcaagtagggtgatactagttcccaccccattttgaaagctctcatgtgaagagacgacagagcaagcttggcttagtaaatcctctctgggagtgcgaacaaccaccaccacaaccacaataatgacaaccgcattgcataagagccctggacttacacacgactgtgccagtggagtcctcccggggctcccggggccaattcctctctggcttggactcacataaacttggatctcacatctttccccatttctgcccccgtggccacttgctttggcccctgagtcctcatacacctggctggggcgctcatggccccaatcagcctcggcccgaccccatggtgccccttcctaaagttctgcccgtctgtcccgtgacatgccccgcccgccccggctcatgcctgcttgcaccgcctgcgccagggtggtgagcccggtctggccagtggcgccgaagatcgcgatcttcttgacggccatcgtacgggatcgtgggggtgcaaggcctcagagtctcggcacgcgcgggaacccactggctgctgggcggtgctctctgccctactcaagccaggaacaacggggcggagctggctcgaagggccacgcctcagactctccgcccgcggctcaggtcaaggggcggggcctaacgcggatgggcggggcaggcgtcagcttgcattcgctcaccgtccagcaccgccctctctgcgcgccacttagactggaaggcggggccacagaaggccacgcctccacatagcaacaaatagagtggacggagccgagataacttgtcactcagcgccctgcctccgcgctccacctcccggagaggggcggggccaggcgagcctcacccacggcctctcgtagctcacgccccctctcccggagcctggagcggatctggggcgcactctaagccccagggcctcccagaaccagcaaggggagaaagttaggaggacagagtgtgtgtgtgcacttggatgtaagacactgtgtcacggcgtacctatgcacttatatgaccctgtgtgactcagtgacccggagggcaagcaggactgtgggtgacaccttgtgtcatcctctgagtgtgatcccgtgttacagtgtgactacacgtgcgtgacaccacgtgtggcaggcattgattctgttcttttgtgaccttgtggtgacaccgtgggtgacactgcgtcagcctgtacgatagggtgtgggacgtgtgaggtgtgctacatggaagcgtgagactaattagactgtgacagtgtgtgacaccacatgtctcgtgtaaggatgtgtgacaccgggaccccattcgagtgtgtggctgtgggtgtctgtgttgagctgctcattgtgaccccctgtgactatgatgtgtgaggtgcggcggtgcagcatgtgcggggcgactgctatgaaggttcgagtgtgtagagtgtgtgacactgtggctgtgaagctgtgcgtgatgtgtgggcctatgacactgtttgtgactgccggggagtgtgcggctgtgtgtgacaggtgcatttgtgtgtgacgccgcgtgggcggtggttaccctattggatttgtgtggtggtgggtgacaccgttccagtgtggacgccgcgtgtgacggcgtgagggtgtgaccccgtgagaccccacaggagggagtgacggcgcgcaagcgcgtggatgcgggggtgagtttgtgcgccgaggcccccgcgagtatggcagcgtggcgagcgtgaccccgtgggagtgtgcagcgcgtgacgccgccgtgccctcgcgagtgcagccgtgcaccccacgccgcggccgggtgtgactgcgcgtgggcctcgggcggcggggcgcggggaccgcgggcgggagggggtcccgggggcgcgctgagcgcggcggcggcgcgagagagggaggcgcggcggcgcatgcggatctggctgagccgcgggccggcggggccgagctgagccgggctgggccgggccgggccgggccgggcagcggacgccgacagggagggcggtcggtcgcggcgagcagcggagacagcgacgctggcggccgcgggcccaggtgagctgctaggggggccgacagcccctcccccaagtatgtccccacctggcgagcatccctcctccgcgcgcacggggcatggctggagccccgggtctccccggctggagggaggcaaagggtcgagggcaggacgagcccacaacccccccacccggtctagcttccgcgccac

SEQ ID NO: 67602 - DNA, 678 bp, Homo sapiens
catctgctccctccctgccaaaaagaaataatacaggagggtagtgggatagggctggggtgggagttgataaatttggcaggttggtcagagacctgaagaaagtgaaggagccagccatgggggtatctggagggacagactcccaggcagaagcaccagcatgggcaacagccccgaggtgggaccacaactggaatgttctatgcttgcaaggttgcggggagtggtggcaagccaggctggcagcctctcccaggtcctggaatggaatgaggctgacctttgcaccacgctccctcctccccaggagatggcgctgtctggtgcggagctcccgggcacagtggaatcggtggaggaggccttgaaacagcaccgtgactttctcaccaccatggagctgagccagcaaaagatgcaggtggccgtgcaggctgcagagggcctgctgaggcagggcaacatctacggggagcaggctcaggaggctgtgacccggctgctggagaagtaggtcccctagacccatccaccccagggagggggcagaagatggggcccagcataggggagtggtgtgggaggccagggtcccactcctttcatcacgatttctgcttctctggggctctttcctatttctatttaattccatgttgtcttagatttgattta

SEQ ID NO: 67603 - DNA, 1759 bp, Homo sapiens
agggggcagggaggggacaccccctccccgcctttacctcacttccaatgctgccttgatctctgtctgggaggggggagtgaaggggccctagccccctgcactccgccgcctcagagccatgcggttaattcctgacttagtttatttttgcaaaacgtcgatctcctcctcccccgccccgcatccgcgaaggcttttaatgggaggggcgtcaaagctcaaaactgttttcctctctcctcccccctccagttgtaaatgccacttcatgaggggaggggcgaggggaagcccacccctgcatgcttctggctggagcacctccctggggagtcgggggattgggttgtgggcagtccccatggccgcctggagaagccgctggggcccgggggtgtggggcggtgtggcgggcgcacactgtatgtacctataataaaccctttggctttgacggtctatggtcctttgtttgggttttctgggctgcgcccgggaggattgaaaggagggctgtggtggctgtaggggtgggtgcggggtggggagaggggcacgggggtaccgtggctgcggagaacatccagatgtacccttttatgtggacttaatttcggggtctaaacacacgccccttgacgagaacctagagggatggagaatatttcgttatgcttcgtaataaacttccccaaaggagactccgggtccgccccgtcaagttcaggaaaggcggacccctttaaggaggcggaaaagttaaccgcgatgggcaggcgctctgtccaatcgctagtgactcctggagtctctggcccaatgagcagcctatggaggcggggtccgggtgcacacccggaagtgggtgcgggccagccggctcgcccgggggccatggcagcagcggctactgcagccgagggggtccccagtcgggggcctcccggggaagtcattcatctgaatgtgggaggcaagaggtgagtgtgggagactcctgaggtcccatcctcgggggcgggaagcggggtgggagtatccgcctctcctgggggaatccctgtccatcaagggttgctccgccccccccccctttggaggcgcgagattctggaaaaacgccgggggagggggaaggggagggaaccctggatcctgcgggagggggacgcattcctcacccgctcctcttcatctcttgcgtccgtttaccttccccgcccagattcagtacctctcgccagactctcacctggatcccagactccttcttctccaggtgatcgggagagcgagtttggggcgagggtaggagggatggagagggcgtgggagacctaatatccactcccccggcccgtgacgcctgctcggtgtcccttccctgcagtcttctgagcggacgcatctcgacgctgaaagatgagaccggagcagtgagtcggacaagaactgaaatgggatgggggggaggggttggtaggaagaggggcaggaccccactcagtcctgccttttaccccatccatcctctgcccccctttcccgcagatcttcatcgacagggaccctacagtcttcgcccccatcctcaacttcctgcgcaccaaagagttggatcccaggttggcatggaaaaaggggagggagtccctcactgtcttcagtccctgaggagttctttcacctcctctgaatgtccacgtgagctccattctattagaattctcattcagaaccttgatcacaggccggg

SEQ ID NO: 67604 - DNA, 599 bp, Homo sapiens
tccctttatccttctaaacggaggtggctctctgcgtcctttcctctctacagttgtggctcagaatcccacacgcgcctcccccggccgcctgcctcctccctcccctccgcacagctgtctccagctgttctctgcagccccgggagagagagggagggggtgccctcgcaggacagcccggcctcctttggctcaaaggtcccggggctccccaagggtccggaatgtggagcctccgccctgcccccgccgcacctctctctttgtttaccccgccgcacagctggcagtgccccgcccagaggtggcctggggcccagcgagggcgcgcagaggggagtggaggcgcgttcccgctcgtggctccgccccggtgctactggaggctgtaaggccgagctagaactctaaagccccagccagaaagaagttgggcggagacacagcgcggtgggcggaactagggcacccggacagcctggaggtggggtgggaggggcgtgaacaagtgagccgggcgaatcagagtgcggaaaggaaggtgggaggggctagaggcagcaggttaagctcctggataggcggggtttagaatc

SEQ ID NO: 67605 - DNA, 992 bp, Homo sapiens
gggttggagagcaaactattcaaagccagagaccttggggtggcatgatgaggggattcggccaaggatctgatgagaacgttccaggataaaaaagatggagatcagaagaagactgggcttgcttggggaggagacatccatgaaggtgttttatggatgtctccgggggtgggggttttactgggatgaaaggaacggaggattcagagatgggggaaccctggctgactggaccccccaggtccctcctccggcatgtgtcagcgcaacccccaggtctgcggcccaggacgctgcatttcccggcccagcggctacacctgcgcttgcgactctggcttccggctcagcccccagggcacccgatgcattggtgagcaagacggagggcgcggaaggaggcggggcggggggctttgcctggtcaccttgtcaccagccccctccgtgtcctcagatgtggacgaatgtcgccgcgtgcccccgccctgtgctcccgggcgctgcgagaactcaccaggcagcttccgctgcgtgtgcggcccgggcttccgagccggcccacgggctgcggaatgcctgggtgagaaatttgccccacccggctccaggcccaccccagggtctcgctcctgctctcactccagagcctctccagccctcccacgcttcccctctcgggtcccgccccaggactgctctgccctggcccttggccctgcccttccctgacccgcctccacccagctccagcctccctttgaccccacccctacccagctcccaaactgccagtttctatcggggcctggtcgcaactcgtattgctccgcccccacgcccaggccccgcccttattggccacgcccctccctgactaactccctcccccaggccccgccactgtcctgcaactgcggcaaccaatctcctgaccgcgaccccgattccaaccctgccacaccagagccctatccccaaactgctcc

SEQ ID NO: 67606 - DNA, 1940 bp, Homo sapiens
gacggatccgggccagggcggggaggtacaggcccagttgaggagcataaggaaccataggagcccaaaggaggcgcccgaccagtcagggaggacttcccagaggggtgaatggctgagccagggcctgaagtataatgttcatgaatgcgacagcaatttttttttttttgagaccgagtctccctctatcactggagtgcagtggctcgatttcggctcactacaacctccacctaccgggttcaagcgattctcctgcctcagcctcccgggtagctgggactacaggcgcccgcccccacgtccggctaatgtttgcatttttagtcgagacggggtttcgccattttggccaggctggtcttgaacccctgacctcaggtaatgcacctgcctcggcctcccaaagtgctgggattacaggcgtgagccaccgcgcccagcacaattttaatttttcttaaacacttttcctgccttagcaaagtcttggaggggcggccgcccaggcgccgcgagcgcaagaccacgagggggcgctgcttcaccacgctagaggagcgctcccggcaaccacgtggccccacaggtgcgggaggtcggcgagcgcgcctggagggtggacggggtaggttacggccaggcagcccggggtggcgcgtggccctgcgcagggcagtggaagcagcgggccccagggagcatgagacgccgcgctccgtggggcggtcccagcgctgtgcagcgaggggccagggctgtccccggtcctgcgcggccggctcccggagaaactgtggcctcctgggggtggagctttaaaaaacaaaacaaaacaaaacaaaatcacccaacaggaagcggggtgggggcgcccggctctgtcacccgtggaatgcatcaaaatagcctgcgcggccgggggcggttccgggaaagggggcggccgcgaggggcggggctgcaacggagggcggagcttcccaaagaacgggagagaggagtgcagaaccggccccagggggacgtcctcctgttcccccaaaatgacctcgataggcgtttgtgtgggatggggttcctgggtagggcggggctttccagtgcgatgtccctggtctattcttagcgggctgaaacctggagaagtgggagtgggcggttgatccgggttccagggcctctttggagcgaaaagctccgtggagagccagagtctccatcctgggcgtgggagggaagatgggaaatgggccaagaggagcctgtgggaggtcctccccgggacggcccccttccatctgcatccgcgggaaccgttgtgggggcagctctgagaaaggctgctctgggcgcaaggaagggtggttgaacgaagagatcagtcagggacggggtgggggtgccttgactgtgtcccagatttgctgcgtgcttctgacctcagttccccatccttccagttgctcaaatcctctctgtcccagtcctaggccgtttctgcccctctcacttcctagtggtttgcagaggggaaacactgaggctgcctcttctgtgcctggccctgtgttggcacggggaagtgactgagacgccccagacccccttctccctcacagtccagtgaggcagacagacctgccaccagatagtgacagcccagaatgagtcattgagaggacgggggaggcacaggcagatgggtcagggctgggataggggaggagaggggcctgtaggatccaaggggagagtgggtgctgctgactcagtctgggggggttgaagagccgtctgaacttagaccaaaaaggtaggatggggccgggcgcctgttatcccagcactttgggaggcagagacaagaggatcgcttgaggccaggagttccagaccagattggacaacatagcgagacccccatctctacaaaa

SEQ ID NO: 67607 - DNA, 1842 bp, Homo sapiens
ctcagcctgatggtttcacgactgcctttgactttggcccacactaatcaaatgtatcaccgtgggccactgactcaacttccccatctatccagtgggaatagaatattggactgcacaaaatcaaccacctcattttaaagagctataacgaaacaaaatttatatgttatatatttttaaaaatacatcttatagattaaaggactcaagaaacaatagcaagactgtaaaacgttgccacatcaggtgacactttggccagagttatggaaaatgctgacaaaacaagaatttgccagcatgggcaaagatatactgttaccaacccaacttgttaaaatattaatattgagctaattagaagtagtttttttttttttgttttttttttttgagacagagtctcattctgttgcccaggcaggagtgcaatggtgtgacctcaggtcactgcaacctctgctgcctgggttcaagcgattcttgtgcctcagcctcctggaattacaggcgcctgccaccacgcccggctaatttttgaatttttggtagagactgggtttctccatggcggccaggctggtctcgaactcctgaccttaagtgatctgcctgcctcgacctcccaaagtgctgggattacaggcgtgagccactgtgcccagccagcagttcataatatttgttttttattccttgattctaactctgtaaggaatagaaatggggtgattaattttggctcctttaatacccgcctggcaggtgctgagtcagtggtacctgttaccacgctatgactcagaggttatcactcagggacatccttctgactctgtttcagtccatgactcaggaggaaaggttctagggcctcaccagcgccctacacacaccctcgtttcccgaggggcaccattatattcttcctttattggctgtccttgtataatacaaatcttcaagtttagatacaaaaaaaatctggaaataaaagatagaaaagtacccgccaggcaccccttccccttcttcccggacccctccccagcgggcaccgacatgaggtaactgcgcatcttctcctcctcctccctccccgcctcctgggcccccaacttggccctagcccccatgagaccttggcccaaggaagacatgggccccaaagttggagggtgatggaggtgagtacagcattggcagtgaacgcagcgtgtgggcagagggcagcccttagcttgtgctgtgcatggggggaggagacgaccagatttggggtgggcactggtgtggggcccaggagagcccctaagcaagtgtcccccctccatcctgtccaacactggaaggtgggggtcaacagaaactgggaaatggagtgtgaaccaagggcattcagtgggattgtggccaacccctgtgtctggggttggggaagggggcattgccagcctaagtccggcagtgaaatggttcccttagccaggctgggtccgtccctgaattccatcctgttgcaacctgggcgtcacaatgttggttctgtagtggttgtcggggtggttgagggaggggggtgttgagagggtgttgaggggcgcagccccagggagcagggttaggggagaggttgtgcctccacccccaggcgtggggcacctggagatgatggagtgggtggggcggctcgggctacagttcaatctcgaatgtcttttgcaggtcgccagaaaaggggttggagggtttctctacagtggctttgccttctaatgccgcccactgggcctcaaaggggtccaactctggagctggggcaggcgctggctcaggggg

SEQ ID NO: 67608 - DNA, 1719 bp, Homo sapiens
ttggcgtggtgggaacgctgtacccagtgaccccatcctcgagaccgtacctaggcagttgttgtgctgagacccccttaggcagggagaggtagggattgtgtctggaatcgcgtcctggaggccttggtttgatacgggggctgtgtccccgaccccatctccatccccatctagttctaggagttgtacctagaatctctgtacccctgtccttggttttgtggggggtctgtgtccaggatccctatttccagggccttggcaagagatggcccaggggtctgtgcccaagaccccggtctcctgggctttggcttgttgggcctgttcctggacccccacccgggaccaccctctccagccttggcaccctctctccatccgggcgccgcggccgcctcccaccctccgccacatcagcagcggcgccgcccccgacccgagcccccctctcccgcccttctcacgctggccgccgcgctgcgggacatccagggcccgggcgcccccgcctcccgcggccctggctgggcctggctccccgactgctgctgctgcggtggtggcggcggcagctcggtctgacgccggccagggcccggggccgggggatggtgcgggatgcacgcgcgcgagcctcctcggctcccgggaggattccgttccgggggcgggggagcgtccctcggcctcggctccccgccccgaccccgcccattggcccgccgcctgccgtatatgcagaaaggtcccgccccgccccgccccttggcctgaagaccccgcccacacgcagacaccatcccgccttccccggcgcggccaccgccccgccacgcccattggccagtcccgagctgagcatgcctatgaacatcgccgagtcctttcccccggtccgtcctggcctgggctccctttccctccgtgacacctgacctcagatcccctccagctccgcgtccgaaagagttgcttctagaggcgccttgccgccccacacccccaaatcttcccgctaaccccatggttccccagcccggcgggggcgggcaggagcggtgacgaggcactttttgcaaggaaggggagggggtgtgaacagaccaaggcgtcctgatgcgcgatcggttcggctttgggaacgggggcgccggggtgggaccagggcgcggttctggccgctacggcgcccccgccgccccctacgccaatcctgtgggtttggcaaagcagctggcagggacattagagcccattagtaaaggcgaggttgccaggagtgaggggagggagcccgcagccaagaggcactgtgtgtgtgggaggcctcagctgccacagcccttagagcaggtggtcagcacgtgggggggggtggggaaggcgagaaggaggttcccggcaacagatggcacaggcagggctgaggctttcagacaagggggtgcaggggggctggccatctgcacctggaggccgctggcgagctcctccccctctccccccaaccctagcgcagagaaaagagctgggggaaggggagggctgcttttattccgattgaagattcagctcccccccaccccgcacccctacctctccaacacactgagaggctggaacccgggagaaggcagctgttggaggagcgagggaggcagaggtgaggactgcctccaggaccatctcgccttccacgggaggcttgaggca

SEQ ID NO: 67609 - DNA, 5882 bp, Homo sapiens
accacacccttccccaagctcagggggccagcagtattcgtggggtgttgctgggtgggtgggggtaatgatacctggggccggggtgtcttcctgggacgggcctcccgtgccctgcgaatgtcctcctcacccaggcctctcccaggcccatcctggtaaaacttttgggcccaagaacctccacatggtccctgcaagagatatactttgataaggaggggaggacatgggatcacctggcccttctggacccctcctgtccttttaccctctgaagtctccctcagcctcttccccttggggacctgctccctagcctcttacccagcggtggggcccaggccccagggccccacaaggccaaccaacagtctggcccagctgtccaccggtcccccgaagtaggccccccaccttcagccacattgcctggaggagaagaggagggattattcaggtgggagttgcctggcttcttggccaggcccccatgttcctctgtgtccaccctctctcattcccacccactaaatacttcctccactattaatagattcccacagtttctcctggttctcccctggttgctaggaacccttagctcttcctgcaggcctcccaaaacccactttcccccctctcccaaccctcgccgttgctagggtccgcccccgttactagacacccacagttcctcaggggctacctctccacttctctgaaacccccctcgttgctatgcaccgccttcccctctgttggccctgtaggcacccgcaattcctccggtgtccccccgcccgatccccaccccgttactgagcacctccccccgttgctaagcacccactgctctcagcctccgagtccgcaacctgctggggccctcctgtgcttccgggagcctctgtatgcccgcccccttcggccagccaaccaatggcgcggcagcaactcgctgactggcacggagtttctccatctgtgcgcgggggaaggggccagagagaggccctagcgatggagcctggaattaaggtgggcatcgggggcccatctggggggattgctgaggcatcgcgggagcgcaagcgtgccctgtctgcccttccactcacctcaaagtgccttgtacgcgacagacccttctgttccctacactttcttgcaaagtctcccttacaaacctgacgcctctcttctgcacgaatatcttgccaaccccccttcttatttttacccctggcaggctcaacacaattcctttgaatacacattcttcccagcaaacatttcccttgcacatggagcccctccactttgcacaaacacccacattctggcacccaacctccttccttgtgcatataaatcccttgccttgcttgccaactgtttcccgctcacgccttcaactctctcgtgtacataccctcccccccacttgcacactgagtctctgttccctcacacaccctgttctctccgctccccgcccacctgcggaatggtgcgactgggagccctctgcttcctgtaggcctgacatttcccagaacacactcagccaagattcccagtgctgagtcaggaaccttggcatcccagaaaaccacctcccatcctatctttctttctctgtgtgtgtgtgtgtgtgtgtgtgtgcgcgcgcgcgttggaaagcctgctctccccacaacaggctgactcacccacttctcacagtctggaatagaggcatctggttggggcatctttcccaccactgggagagggagggatgccgatgcttcccccacagaaccccgctgccccaacccctcttgtcgggaatcaggcctctttgtctctattcccgtactgtgtgacctcagaaaagccctcatccctctctggacttctccttcccaacctgtatgaggtactaggtgggctcctgccttcgatttctctcattggtctgtgaaaaggtgactcattttagagccttggacctgtgcccaatgtctcccccagttgactcaatttcaagacaaaccacctcctctcccccttcagaggtgaacggctgactcaggagctgggtggcagctcagccttgggggcaaaatatatcaaaatcacctaggacaataaataatcctactgggctacaactgacagtgccaggcccggggccacatgcttcacatacatgagatcatgtcagatagccccgtagctgcaagcaaagggtagaggccggcagatctctgagcctctgttctcacgtgtaaaatggagccctggcatccctattgttcagccttggagaatgaactgaaatcgtgtcagggtctgatacagaacaagtactctatacatgacagagatttcttacggaaaatccaatggagcgtaagtcatttgctcagggtagcggagctgggaactggcagaggaaggtctcgaacccacacccgtgggaactccaagtctttgaaagtccgtcccgcccctgcgtgaagaatgggcgcgcggctggactcgtcaccgggggttttagggaaggttgaacttgtcattcaaccgtgtagggagggtggtttagtcacaggggtggagggagggggcccactggcgcgccaccaggaccccggtgccctagatgcatacctggccgcgcttcggatgctcagaggcaaaccccctccccttgggaggcggagtcggacaaggctccgtctcgttccgttccgtcacgtccggtggggcggggcttcggggctttcccctttgaggggagtatcggttaacccttgcgcggcggggcgggctggagctccgcgggccggaacccgggagtcggggctccccagccacacccctcgcgggatttaaagggataggaggggccgggtcggccgaagcccgaaccgaaggagcgggcatgaggcgctgcccgtgccgtgggagcctgaacgaggcggaggccggggcgctgcccgcggcggcccgcatgggactggaggcgccgcgaggagggcggcggcggcagccgggacagcagcgacctgggcccggcgcaggggccccggcggggcggccggaggggggcgggccctgggcccggacagaggggtccagcctccacagcgagcctgagagggccggcctcgggcctgcgccggggacagagagtccgcaggcagaattctggacagacggacagactgagcccgcggcagctggccttggagtagagaccgagaggcccaagcaaaagacggagccagacaggtccagcctccggacgcatctagaatggagctggtcagagctggagacgacttgtctttggacggagaccgggacagatggcctttggactgatccgcacaggtccgacctccagtttcagcccgaggaggccagcccctggacacagccaggggttcatgggccctggacagagctggaaacgcatgggtcacagactcagccagagagggtcaagtcctgggctgataacctctggacccaccagaacagttccagcctccagactcacccagaaggagcctgtccctcaaaagagccaagtgctgatggctcctggaaagaattgtatactgatggctccaggacacaacaggatattgaaggtccctggacagagccatatactgatggctcccagaaaaaacaggatactgaagcagccaggaaacagcctggcactggtggtttccaaatacaacaggatactgatggctcctggacacaacctagcactgacggttcccagacagcacctgggacagactgcctcttgggagagcctgaggatggcccattagaggaaccagagcctggagaattgctgactcacctgtactctcacctgaagtgtagccccctgtgccctgtgccccgcctcatcattacccctgagacccctgagcctgaggcccagccagtgggacccccctcccgggttgaggggggcagcggcggcttctcctctgcctcttctttcgacgagtctgaggatgacgtggtggccgggggcggaggtgccagcgatcccgaggacaggtctggggtgagtgggacccatcctgcccttgagccacatcacgcaaaactccttattcctccgcctttgcttaggaagttctctacccatttactgttagttgcccaccagcaatttcatctccgggaacctcttccatccactgacctcctccctctgacagccaggttactaattcactccaggcaccccttcttaattctctcctttccccttcctgcactgtctccactcctgggggtctacaatggagggccactgaccgactttatggggcccaggaacccctgaaattgtaggactaaggagcctgccgtgcgtgttcacatacattgttgcagcgacggtctgacatctgtctaatcctctggaatctgaagaacactgggatagggagacaggcagggtgcactttctaccccacatttcttaatctggggcctgtggctgtcttaaagggtcacaaaccttcaccaccccttagcctatttgtatgtacatttttctagggagcaaagcgattcccccagcttgcatcagattcgcaaaagggctgtgtgaccccaaacgccaaaggatccttggcctagccgggagcccacctggtctcccctgtgacccctacatccccaaggagccccctgaacactcttgtttactttgtccaccgtcacccccagcttgggtgtggctctcccctggtgaatcaggaggaccggccgggcaggttcagggagggcgggacagagcagaggccggtgtgaaactggagagcctcacgtggggctgggagccgtggggctgggagccgagtccggagtccatcagcttgccagcttgcctgctgaggcctctttttgctctggggcccctggctggagtctgccctgagccccgcttcaccccacatgccttccttggggacgtgttcacacatgtggccctagctgtgagagacagacctgccttgacgtgcctgtgcctgtgtgcaggggctgaccctcctgggccccattgcttttttctctctgcctgccctctcacttccttggcatctcagaacagctgagctggaagtgggtgaataataataataataataataataataacaacaacaattagcactcactcatgtttagccctgtgctaagtgctgtgcttttattaactcactcactcctcgcagcaaccctaatgaggtagatactttttttttttttctgagacagtctcgctctgttgcccaggctggagtgcagtggtgccatctcggctcactgcagccttcacttcctgggttcaagtgattgtcctgcctcagcctcctgagtaggtgagacaccaggtgcccgccaccacacctggctcatttctgtattttgagtagagacagggtttcatcatgttggccaggctgacctcaagactcctgacctcaagtgatccacccgcctcagcctcccgaagtgctggaattaccagcatgagccactgcacccggctgaggtagatactattattatccccttttacagatgaggaaactgaggcacagagaattcaagtcacttgtccaaggatatcaccttgcaagatgcagatcaaataattctaatccttactgtacaccagacactgttttaagttttttcttcttttttttttttagtcttttttgtcaatttttttctgtcattttttatcttaaaatagcatctatcttaattaagggctttgtatgtgttaactctgagtccttatgacagcactgagattgtctccattcaacagatggggg

SEQ ID NO: 67610 - DNA, 3061 bp, Homo sapiens
gggattacatgcatgagccaaagcacccggactggactgggcacttgtgaggacagctttcttcattgctggaggcacaccaccatggaagagatctaggtgggggacctaagtagtcagcctgtttgatcttgaggacacgggaaccccccccccaccccaagagatctgtgaagtgtctagggcagagcctgggtggtgggtggggcatggagaccctaccggtccttgtgtagtttcagaagcctcttcacatcttctctgcccttggggaccgggccggccttatcaaaggcctccttcaggagctggctcttctccaggccgaagacatgacggggagcaggccctgtggcagcgggtggaggaggcagtgggagcggtgggggaacaggggtctgctgactccagggaggggatggtaaagctgaaaagtccaggggacttgggggtagaggaggagatggaatgctgctggcttggggtacaggggtttttggaggagaaattggtggttttaggggaggagagcatggagaagtcattttggggtctacaggaggtgttgagaggttcagaaagcggggagggaaggatcctccaacggagaacggtctcagggatggagattttaaaggtttaagagctgagttccagaatctggggactgagcagtgggtgtgaaaggaccagggctaatatttgaaaccacgggagcaggaattgcgaggctgactcaagtcataaggcacctgacggttaacagggtggggtccttaaatccggaaccggatctgtggtaccggttgggttacctcgggagtcttaggtggagagttagtaggagttaactcattctttggggctggatgtggaaactcatgagtgagtttgggatatgaaggctcagatctagagtgaggtgccttaaggatgcgacttagggacccagggctaaagattcggagaacttaggttcagtaccccctcacatcccaggcccgagttcggaacctttgagctgacctttgagtcagaggtcaagaggtcaaaaaggacacctggcagggaaaatggcctagttgtggagaaggtcctggaaccagagcaacaaaaaacgtctgtgggttggagaagactcagagatcagaggccggtgggcgccgcgataaccactggaaaaaggaaaggagtcaggaagtaaagtgcacctcccactcccggaaaatggcggcccccgcacactgcctttcccatatcacgtggtattacacgcaacagttcccgcccattttgcgatcacgtgacagaaaacgcagctctggcgggggtaagaggcgggactccaaaaaggattgcctccggaagacaccgcagcgcgagacgcgtacagactcgtgaccttcactgattggtccgtagacccgggcgccacggaaggaggtgggctttcagggagtggggcggggtttttctacctaggcgggaacccaaatatcgttttgattggcaacagctgagcccagaaacgagacttgctctgattggtcaagctactgcgtttccgcgcggcgattggctggcagaaaggcagaggcggggccaggagagaaagctttgtggtttggtctcagggaagtagcaggcgccggttgagagaactacggccctgtcggaaggtaacctccggtgcaaacgaccatcggcggcaggcgagcggtacgcttggcgtccgggccttcctgggcccgtctgaggaaacttgctgctcgaggccaggctgcctaggacctgtcccttttttctatactggctcccacatccgggttttttctccgggacggcccttcggatgcttgggccaatgggaatcgccatttagggtgctccgcccaccgggtcgcgtagagcatcctggaagtcgtagtaaatctctcgagagttctctccgcacgcgggctggagaagcgggtcctacgcacgctttgttgtcgcgctttgcctccgtccttgcccctactcccgccttacctgacttccttttcggaggaagatccttgagcagccgacgttgggacaaaggatttggagaaacccagggctaaagtcacgtttttcctcctttaagacttacctcaacacttcactccatggcagttcccgagacccgccctaaccacactatttatatcaacaacctcaatgagaagatcaagaaggatggtgagttctcgggatagtccggagtccagactgtcccgcacgggctggcccctcttccgtcccctgcacccgcctctctttctaagtgtttgtccagccaaacttcgagttaactccttggcctttacacaaactacttcctgtcttcaacactccattagttcatcttacactctgccctttaacgtggtcactgctgctcatcttacaaggtttgaggtcacaggacccttcctccaggaagccttgccttgtcccttcacgtggctgccgctgacttgccgtacgctgagaccatctcccatcaagccctgattcctctgagctgtcgtggggctctctctcctcccagtggcctttgaactccgtgagggcaaggactggggctttcttggtcaccggctttttcagtgatcagcccacaatgaacatgtaccataatggtggctaacgctctgtatcatgggctggtctgtgtgctttcatataaatcttgataacatttaattctcacaacaatcttgtaggaagaaggctattgttattcccattcgtcaactaagaaactggggccgggcgcggtggctcacccctgtaatcaatcccagcactttgggaggccgaggcgggcggatcacctgaggtcgggagttcgagaccagcctgaccgacatggagaaaccctttctctactgaaaatacaaaattagccgggcatggtggcgcatgcctataatcccagctactcgggaggctgaggcaggagaattgcttgaacccaggagacggaggttgcagtgagccgagattgcgccattgaactacagcctgggcaaca

SEQ ID NO: 67611 - DNA, 1493 bp, Homo sapiens
ggtgttgatttcctgacctcgtgatctgcccaccttggcctccaaaagtgctgggattacaggcgtcagccccagcgcccggcgttttttttttttttttgagatgagacggagtgtcgctctgttgcccaggctggaatgcagtggtgcgatctcagctcactgcaacctccgcctcccgaattcaagtgattctctgcctcagcctcctgagtagctgggattccaagcacctgctaccacgcttggctaatttttgtatttttagtagagacggggtttcaccatcttggctatgctggtctcgaactcctgaactgtgatccacccgcctcggcctcccaaagtgctgggattacaggtgtgaaccaccgcacccggccagaaccctggttctttaggacagtgacagcccagagtagtcagggccatcaggcaggaagcttaggcagagtgttgagggctgggattgggaacttagaaagacagagagatccattcagcttccaggaaaaggagacattttggagagcctgccaggtacagtaagcagtatttatgttacactgagggagaagagcattcttaacttggtccagcttgttcagatgtttagggtcaaaagagcctggcgtattctgagtattacaagtagttttgaggcttgtaaatcatggggaaacttccagtgagctgtgcactggtggctcatggctgtgaggtgttggactttgccctgagggtgttggggagccagactgcttccctgtcctggctgcctccctggtggaatatcctcccagctgtggagggtaaatgcgaatgggcgaggggaggctggagagtagagagaggcccagagtcccgtggaatgagtgaagtctgagcaagattcatggggatggagtacggagaggaaaaccagaaatgtcaccaccaggagaatttttgactaattgcttaaaaacaaccttgactgctgtccctgcccccacccagcctacacattttcttgcttctttcctagcctggtatctattttacaagtggcttctgcttcagcttagcttttttttttgagatggagtttcgatttgtcacccaggctggagtgcagtggcgcaatctctgctcactgtaacttttgcctctctggttcaagctattctcatgcctcagcctccccagtagctgggattacaagcgccctccaccacgcctagctaattttttttcttttcttttttttttttttttttttttttggcatttttagtcaagacggggtttcaccgtcttggccaggctggtcttgaactcctgacctcacgtgatctgcctcagcctcccaaagtgctggaattataggcatgagccaccatgcctggccagtttttatgaaggttggagtccagtggtgaggtcatggctcactgcaacctctgcctcccaggctagagtgatcctcccacttcagcctcccaagtagctat

SEQ ID NO: 67612 - DNA, 1247 bp, Homo sapiens
ggcagagtttcactgatgaaagccctgtgcagtaggagcgctcctaagcttaggtttcggacacaagcaaaggaaaacctaagcagcccaactaggggattgtagtgtcctctctagaccagtgggagggagccaatcggactacgcggaggatataaatcgcacagtaaaggttttcttggaagattatctggaaagggaggtgggaagtaacctgcgcctatctgcccagttttcctccttttcgcctttgagaacagtaatcgctcccgccagctcaagatcagctcctcttccagcctctttctgtcaatcctgcccgtgcccccttctttgcatttgtatcccctcccccaagtccgctccgatccaatccggagactcgactctgccccccgtactccagactaaatccgttcctcggctcagctaagcagctctgcacgtcccttcccacttgctcagccaatcgctgggctcggccccgcccctttgggcttggtccttctcacgccaccaatccgcgcctcttgtcccgccccctgcccgcgagtccgccaatcccgcccttcggaaagcgtcgcctggtatccagctgccggagcgggtcgcgccggaggggggcggaggcggaagtggcggtgccgggcccggggagtaggaaggagccggggctgtagccggagtggagcggctgccagccgaggagcaggcgcggccgcggcgccatattgcggccctcagcggccgcgaccgagtcatggctgagacctacggtgagggtggtggacgaagctggggtcctgggtctgggcccagggaggatgcggcctgtgggaatgggcggggctttgtagatcagggggcggggtctggtgtgatggaggcaggacctaagtggatgctgggaggggtttagtgggtctgaggctgagcttaatcgatttaggtggagcctgagggtctggtgcgtgggttaaatagatctggggcgggatttgagggagctggtcctgaggggttcagggaggccctgagggaagaggtgggccttaatggatctgggcggagcctgagtgaaggggcggggctgactgcatgaatggcaggagtcgggcttatgggctagagggaacactgaatggaagctcgggaccctggggctgatctggctggagagagctctggaatgggtttggggatgggctgtccttgagttaggggcaggacttagtggcaaagggtgg

SEQ ID NO: 67613 - DNA, 2701 bp, Homo sapiens
ggagactatagcctgggcaacacagagagaccctatctacaaaaataaaaaacagaaaaagttagccaggtgtcgtggtacacacctgaagtcccagctattccggaggctgaggtgtgaggatcactttagttgggaggttgggcctgcagtgaactatgatcatgccacagcacttcagcctgggcaaaagggtaagaccccatctcaaaaacaaaactaaactagaaacacccttgtgtggccatgaaccctgtgtgtgccctgaggactgcgggcttttgtgcaatcctcacgcatgtgtggataccagtatgcatgcccttgtgctcacgcgaaccgccctacgccctcaggtggcctgcaggggactggtgcagccccgaggacactcccagttgctcgtcgccctcccatctccacgtcggccttcaccgacccggcgggagccttgagtcccagctctccagagcaatggtggagcgggcagggcattcaaaatgaccttatctccttagtctcctaaagtgttcccagctggccatgcaaatgtcttctctgtgtagcgttccgtggatttttttttgtttcattttttaattttgtgtaaagataaggtctcactccgttgcccagactttccctggttctttattctgattcccacaatcgtcccgagggggcaggccggagcgggtcttgaaaatacacatttgcacatcccttctagtccgcgttcccttttctcaagggcaacccgcacttttttgcctccgttataaaagatacttatgtaaattactgacgtgcgaatttacatacatttctcaactaactgcgtagccatttctccgtctctcacctccgttcctggacggcgagaaggaggaggagctgaccatgtaaatgaagtcacgcgcaccgcgctgccgaactcggtgccccgcgctgggcggggggcgggtaggcctgtccatgtaaatcacatcatttgcgtgccccgccccgccgacgccacttgattccaacatgcaagaaacgccccctcccagacccggcccctcacactgcgttccccctcccgcgcaaagggggcggggcggaggatgcaaatgaacctcgtgtaggccacggaccgctgtttcctttctccttggtaggggggttgtcccgaacttcctcgccccgctccgccccgccccgcgcggctcgggcctgcgcaggcgccgtcccctccgcggggcgcggtcacgtgcccaccgggcgaggcggggcggggcgtcgcgcgcggtgggggcggggtatggcgcgctgtgcggcgcagggcggctggcacaaacggcggcgccggggccggaggaaaaagctcggtgaggaggtcgcggggcgagaagggagcgggaggagactaagccggagccggggcgccggcgcgaaccgggcggggtgtgggggcgcgcgccggggcctgccggggcgaccccgggaagggggatgtgggtgcggcgcgggggaggggacgcgcgccggttacgttgggtgccggccgttgtgggggttggggtgggggcggggagcgcgcgccgggcggaggccgagtggagggggaggggagggggtccgagcggcccttaggccctgcccctgtcgcctactgcgctcagaaggggcctcagggcctgccccgggttgggggcgttggggtgccctggatgggggcacctttatctctcgtcctgtctccgggtgcgtgcaccctcctccgtcctttcctctgtcgccgcggaccctctccccgagggcccctcccgtcggtcagtctcgggacctcccttccgtctgggcgtgtgtccgcccccggccggcttcctcccgtcgggctcgggtcgaccccaccgtcccgctccgccccgggtcctccctcccagcttccctccggtctatttttctgtctctgggcccctcgttctctttgtttttggactccccagtttcctctgtcttttgacccccccgcccccaccctgactctccctggaacccccacgtttctcgttgtctttctggaacgccgaggcaggtccctcctattttccaaaccccctcctttcccactcctccacaccacccttttctactccagccctccttcttctgtctttggttaccgcgtcccacaacctgcaccacagtcctctgtcttagggtcatctacccagcccctggcctccagcctctccctatcactgcctcttatctgtcagcggactcccgcacctccagattctcagggtcctctccccgacttggcctcaggttttggggggcctctatagtcaagtctgtcctggtcgtcttccccactcctgcccataccatcccggctttcccctgcctgcctgtctctagtttctctcacatccctttttttttttcctttctctagccaccctgaagggtcccttcccaagcccttagggaccgcagaggacttggggaccagcaagcaacccccagggcacgagaagagctcttgctgtctgccctgcctcaccctgccccacgccaggcccggtggcccccagctgcatcaagtggaggcggaggaggaggcggaggagggtggcaccatgggcccgggcggtgccctccatgcccgggggatgaagacactgctgccatggacagcccgtgccagccg

SEQ ID NO: 67614 - DNA, 1578 bp, Homo sapiens
cggttgagataagaggaaggcctccatcccttgcatgtccctggtaatggaatgtctcagtgtaaaacccgatcatacattccttctgttctgagataggagaaaaccaccctgtggctggaggtgagctatgctggtggcaatgctgctctgttactctttgctacactgagatatttgggtggagagaagcataaatctggcctacctacacatctgggcacagtaccttcccttggacttatttgtaacctggattcctttgctcacatgttttcctgctgaccttctccccactatcaccctgttctcctgccgcattcccctagccgagatagtgaaaatagtaatcaataaatactgagggaactcagagactggggctagtgcagttcctccgtatgctgagcactggtcccctgggcccgctgttctttctctatactttgtctctgtgccttatttcttttctcagtctcttgtcccacctgatgagaaatacccacaggtgtgaaggggctggcccccttcagagaccagcctgggcaacatggtgaaactccatctctaaaacaaaatagaaaaattagctgggcatggtggcgcacacctatggtcccagctactcaggaggctgaggcaggagaattgcttgaacctgggaggcggtggttgcagtgagccgggattgggccactgcactccagcctgggtgacagagcgagactccatctcaaaaaaaaaaaaaaggaaaaaaaaaaaagagttagccagggcctgggaggaagtgggtcagtgagggcgaaaggttggcttgtgcaagggcctgggcgttgggttgtgtgggtggggcttcagggagggaggcctggaatccaggacctgatgggatttcaggagcagtttcgggaccctacttgctggacggtggatcgagtgggtggactgtgtgggagggctggagatcagaggcagagcaggggttatacccagaggtggagcttggggaggtggagtagcagacagagctccgtgtgtgggccaggctgtgtgggaaaggtagggttccctggcaagtgggtggctggggctctggggcagagttctgggaggactgttagctgggctctgaagccagcatgcagtggtggacacggtgggcacaaagcaagactaagcaggtggaggcgggagcggtggctcacacctgtaaccccagcactttgggaggccgaggtgagaggattgcttgagcccaggagttggagaccagccagggcaacacagcaaggctctgtctgtacaaaaaataaaaaattagctgagtgtattgagtgtggtggtgcacgtctgtactctcagctattgataaggcggaggtgggaagatcgcttgagcccgaggtcggggctgcagtgagctgtgattgtgccactgtacgcctgggcgacagagtgactctgtctcaaaaacaaacaaaaaactaagcagagctgggtgcagtggctcacgcctgtaatcccagcactttgggaggccgaggtgggtggatcacttgaggccaggagtttgagacca

SEQ ID NO: 67615 - DNA, 1232 bp, Homo sapiens
tcaaatgaatgcatcataatttgtttaaccaatatcttggtgcatatgttggtttcctatttttcattatgtaaacagttctttgatgaatctaggtgattttgcacactttcttgtacatcataggagacattactagaagtggagttaactgaatctgagagtatgttcttttgtaatttagagaaaagcattcacattactctcctctgaagctgtaccaatttatagttccacaaaccgtaactgagagtaaggattgctctgggaggctgaggtggtagtggatactagcctgggccctatagcgagacaccatctatacaaaaacattaaaaaaagttctactactagggtgtgggagaatgcacctgtggtcccagctgcttgggaggctgaggtgggaggattgcctgagccagggggttaaggctgcagtgaattatgattgtgacactgcattccagcctgggtgacagagcaagacactgtctcaaaaagacaaaaaaacccaccccaaacaaccaacaaaattggaggccatgatttcacacccagtgatcctaatagctcaaattttgaattagagactgtggttttaacatctgctaaattccttatgttgaggaatcactgagtcaaaggtttcagcctctttccaagggggagagcacgtggacaattacatctcatgcaggcatttggttttatggactcacgtgcttgttacaaaaccagacacagctttagggcttcttattaccttcccccacccgtccttggtagaagagtcaacaaatgacatctaagctgccaacacatattggaaaatgtttgaaacttgagatctgtggtttattatgaaacaggcagtgccctggagtttgaattttttcccagttggtcttagtaccctgtctgcagattgaggggaaagggcaggaaggggagtaaatgtagttaagagcatagcctcagctgggtgtggtggctcacgcctgtaatcccagcacactgggaggccaaggagggtggatcgcttgaggtcacaagttcaagaccagcttggtcaacatggtgaaacccccatctctactaaaaaatacaaaagttagccaggtgtggtggtaggtgcctataatcctagctactcgggaggttgaggcaggagagtcacttgaacccgggaggcagaggtttcagtgagccgagattgtgccactgcattccag

SEQ ID NO: 67616 - DNA, 538 bp, Homo sapiens
gtagcgcaaacctgtaatcccagctacttgggggactgaggcatgagaatcgtttgatcccaggaggcaaaggttgcagtgagccaagattgcactactgcactccagcctggggtacagagaaagactccgtctcaaaaaaaaaaaaaaaaaaaagaaaagaaaatcaaatatttattggatgcttctatgtgccaagcactgtcctagttccttgccttgcataccagactttatgtaatgtttacaactctatgaccttgtccaaacagcacactcattttgaagatgatgaaacaagttcagaaggtgaagtcactcatccctaaagtgcagaggagtaactccagcagtggtgatcttaatcagtcacataaccgcttgtcatttgtgtcaatcctgtcctagtcacctagcatgcctctttcccattctttaaaaaacccatgtatgagagccaagctgggaccatggctttttggttcttttaagtaaagaccaaatgtcctggcagcgttcaagactccaagctgcctgt

SEQ ID NO: 67617 - DNA, 2122 bp, Homo sapiens
caacatcatacttaaaggtgaaagacttgatgctttccctctaagattgggagcaagtaaagaatggcggttcttaccactctgattcaaaatcgcgctggaggttctatctattattccactctctaggtccatgtgtacacattgtgtagcacccacttacgaatgagaacatgtgatactttctgtgcctggcttatttcacttaagataatcacctccagttgtatccatgtggctataaaagacaagactttattcctttttatggctaaatagtattcaatggtgtatatataccacattttatttaaccattcatctgttgattccctatctttgctattgtaaataggatttggaccacatttcaagtacttaattagtggccacatgcagcaagttactaccatattggacaatgtagcctcaacccactatatgaccttgggtaagacttgcaaactgtcactgcttcaatctctccatctataaaatggggatggcaacaatacctccctaaaagggtaaagactgagtcactgtgtgtaaagcacttcatgcctccccactggtgcttcaccctggggctggaatgagcacccaatcttagcgtcagatgacacagcacagcaggaccctggtccttgggtcagaaaagtccatgctggcacctctccagtgtcaggaaagtacagcttccacctcataaaaatcaggattgtttatcttatcctcctgggtcaaagtaacttctgggctcagggtaaacactgagtcactgtgtgtaaagcacttcacgcctccccactggtgcttcaccctggggctggaatgaggacccgatcttagtgtcagatgacacagcacagcaagacccaggtcgttgggtcagaaaagtccatgctgcctcctctccccggtcaggaaagtacagcttccacctcttaaaagtcaggattgtttgcttctcctgggtcaaagtaacttctgggctcagggtaaacactgagtcactgtgtgtaaagcacttcacgcctccccatcggtgcttcacgctggggctggaatgaggactcaatcttagtgtcagatgacacagcacagcaagacccaggtccttgggttggacaggtctgtgctggcacctctccagggtcaggaaagcacagcttccacctcttaaaaatcaggactgtttgtcttctcctgctgggtcaaagtaacttcagggtcaggatcctggatccagcaaagagtttggttaacattgcaagaaagatgttgcctcatggtcaaaagtcaggcctaggatgagacaggcagacacggacacattcacatccaaattgtgcaaatatggactgaccctgtcagaggctgtgtgggtgcaggctcacagtgaagatagagacatatgggagtccagtagacatcaatcaaactggacccagtttccacacacatggagctcaagagtctccagggggaaaacagagacataaagttagagagagatagagccagagaaatttcctgcaccaggaagatagttgggaagaaccccctcagcgctagttagagtgatcagaaaccaaggggacccgatcactgcacctgccagtctcagtttctgtctccctccaactgaccacctcttcctctgagactcactggttctgcatttcttgcccctccttctgtttctcccatcacttccacctatggctgtcacagaaggactgataaaggaggggacactggagatagaccctgagcattgaaggcggccagcccccccacacctgtgggtatttctcatcaggttggacgagagactgagaaaagaaataagacacagagacaaagtatagagaaagaacagtgggcccaggggactagcgctcagcatacggaggacctgcactgacgccggcctctgagttcactcagtatttattgatcattatttttactatcttagtgaggggagtgtagcagggcaacaggttgggagaaggtcagcacagaaacatgtgagcaaaggaatctgtatcatgaataagttcaaggaaacgtactgtgcccagatgtgcacacaggctagatttatgtttctctt

SEQ ID NO: 67618 - DNA, 1391 bp, Homo sapiens
tgctttgtccacagagtttatgtccttctcaagaagggtgtgagagagatacacagagaaatgtctagggatacagggctcttttattgctagttttttttttttttttttttttttaagatggagtctcactctgttgcccaggctggggtgttgtccaggctggagtggagtactttagctgtggcagcccatcagtagctcccccagcccatgtttagctccctggacctgtctctagctccctccacctctctatgaatgtctatatctctccctgtgccaattacacattcctcaaacacttacagtgtgtcctccccatggcatattgagtctcatttccatcctcacaatgactctatagggtaggtgtattagttcattctcatgctgccaatgaacacatacttgacactgggtaatttataaagaaaaagaggtttaatggactcacagttccacatggctggggaagcctaacaatcatgacagaaggcaaaggaggagcaaagacacatcttacatggaggcaggcaagagacagagtgtgtgcagggaaaactgccctttgtaaaaccatcagatctcgtgagacttattcactatcacgaaacagcatgggaaaattcactcccatgattcaattacttcccactgggtccctcccatgacatgtggggattacgggaattacatttcaaaatgagatttgggtggggacacagccaaaccatatcattccaccccgacccctcctaaatctcatgtcctcacatttcaaaataaatcatgccttcccaacactccctcaaggccttaactcatttcagcattaactcagaagtccacagttcaaagtctcatctggtacaaggcaagtcgcttatgcctataaacctgtaaaattaaaaacaagttaattatttcctagatacaatggaggtactgccactgggtaaatacacccattccaaaaagagaaattggccaaaatgaaggggctataggccccatgcaggtccaaagtccagcagggcagtcaaatcttaaagctccaaaatgatctcctttgacaccatgtcttacatgcgggtcacactgttgcaagaggtgtgttcccatgacgtcaggcagctctgcccctgtggcttgcagagtacagccccgctcctggctgccctcacgggctggcattttgtgtctgtggcttttccaggtgcacagtgcaagttgttggatctactattctggggtctggacgacggtggccctcttcccacagctccactaagcagtgccccagcagaggctctgtgtgggggctccaaccccacatttcctttcttcacttctctagcaaagttctccatgaggactctgctccctta

SEQ ID NO: 67619 - DNA, 683 bp, Homo sapiens
ctctgtctccacattctgctgagagaggcatcatggggtagtgattaaaacagtaggctgtagaaccaaactttctgggtttgacaactgattctacctttagcctgctgcgtgacattgggagaagtctcaacccctctgtgtttcactttctccatccacaaaatgggggtgaaaacaattactacatcaaagggtgacaactaagtgaattactctattgaaagcacttcatgcctccttatcagtgctccccaagggtggaatgaggacccagagtacccgtattaggccatacttgtgttgctataaagactgtgccagattgcacaacacagcaggagacaggtcctggggtcaggaaagtccatggtggcatctttcctaggtcaggaaagtgtgggttgtactttgttggtcctctcctcgtgggttggggaagtatggggtgcagctgctcctggcagctttgactttcagcctcagataatgcattgcctgtgtctaatccacatggatgtggggtgactcagccacctccattccctgaatcagcatcttcagtggcggcaagtggtttgtttagctatgcaagcaagatgcagatttcccattttaaatgagaaaaaaagcagcaggcagagacagcagatgtggacacattcattcacatgttgggtgat

SEQ ID NO: 67620 - DNA, 1166 bp, Homo sapiens
gccacatgcagcaagtgactatcacattggacaatgtagccccaacccactgtatgaccttgggtaagacttgcaaactgtcattgcttcaatatctccatctataaaatggggatggcaacaatacctcactaagagtgtaaagactgagttactgtgtgtaaagcacttcacgcctccccatcggtgcttcaccctggggctgcaatgagcacccaatcttagtgtcagatgacacagcacagcaagaccgaggcccttggttcaggaaagtccatgctgccacctcttcagggtcaggaaagtacagtttccacctcttacaaataggactgtttgtctgctcctcctgggtcaaagtaacttcgggttcaggtcctggatccagcaaagggtttgcttaacattgcaagaaagatgttgcctcatggtcaaaagtcaggcgtaggatgagacaggcagacacgcacacattcacacccacgttttgcaaagatggactgaccctgtcagaggatgtgtgggtgaaggtgcacagtgaggatagagacatatgggagtccagtagacatcaatcaaactggactcagtttgcacacacctggagctcaagagtctccagggggaaaacagagacacaaagtcagacagagagagagccagagaaatttcctgcaccgtgaagatagtcagaggcagggaagaaactccttagcactagttagagtgatcagaaaccaagaggacctgatcgctgtacctgccaggtctcagtttctgtctccttccaactgaccacctcttcctctgagactcaccagttctgcatctcttgctcctccttctgtttctccgaccacttccacctgtggctgtcacagaagggcggatgaaggaggggacactggagatagactcagcatctgcaggcttccaaagagaggggctaggagatccaccaacacaccagcacaaatacaccagcacacacagatacacacaattggttcatgtattgctaggttacagtttgctatgctacaaaggcagtaggccaaatttgattgaattgaataattccttattttcatcagcttctcctttttttttttttttttttttttttgagatggagtattgctgtgtcacccaggctggagtgcagt

SEQ ID NO: 67621 - DNA, 2030 bp, Homo sapiens
cttggctcactgcagcctccacctcccaggttcaagtgattctcttgcctcagcctcccgagtagctgggattaaaagtacccaccatcacgcccggttaatttttgtgtttttagtacagatggggttttgccatgtgggccaggatggtctcgaactcttgacctcaattgatctgcccccctcagcttcccaacgtgctgggattacaggtgtgagccaccgcacccagccagcctctcagttttgaacatgcactaccaccacctccacaacacacaaatgtaaatgcactttcgtatataaaactgtataaatacaaggaagctcatacacatgcaaggatacacacataagcacccccagattcaaccacagaaatatacgccagtacatttgcataaattcaaacacccctttacatgtaaaaatcatataagcacatacagggatgcaagcaggcatggacaaatgcatgcaagcacagacaaacagacaaagctaagtaaaaaagtgcaagctcacctatgcttacaaaaatagacatacatatacccacaaacccacacacccacacattcacttgctcacctggactttgatatctctaccactgtatccctgccaatatctacagagtgggtaaagggataggcatcaggtcactgggttgcccaagcaggaagtctgggttccctaacaactttttctaagctaatgctcctggatgatgatgaaaaaggaggtggggaatggatgaaattttataacagggtgcagaggcagggtcaggataaaaggcccagttggaggctgcagcagggtgcagggcagtcagaccaggaccatggaactcagcgtcctcctcttccttgcactcctcacaggactcttgctactcctggttcagcgccaccctaacacccatgaccgcctcccaccagggccccgccctctgccccttttgggaaaccttctgcagatggatagaagaggcctactcaaatcctttctgagggtaagacacagacgaatggggtctgagggtgagctgcttcttgccttggtacttggggaagcttcaccaaacagaatgaggcagacttccagagtcaggggtggcacgggcatggttggtgagtacggagcatggtgaagcatgatgggtggtattattaggagaaaagcatcaaattaaatttagcagagtttatttgagcaaagaagtgactcatgagttggacagctccctaaaccaggaaagacaccacacggcagtatggtcaagtggtatttacaggcagaaaaaggaggtgacatacagaaacagcctgattggccacagatcacagcttgccttacttggtcacaatctgagcagtttgcagcctgtgtggactgaaagcccagctgctctgattagccaacacttggctacttgtcacaagaatatattcatttgggccaggtgcagtggctcatgcctgtaatcccagtgcttttggaggccgaggtggtggatcacctgaggtcaggagttcgagaccagcctggccaacatggtgaaaccttgtctctactaaaaatacaaatattagctgggcatagtgatgcgtgcctgtaatctcagctacccaggaggctgaggaaggagaatcacttgaatccaggaggcagaggttgcagtgagccaaaatcttaccactgcactccatcctgggtgacagagtgagactccttctcaaaaaaaaaaaaaaaaaaaagaatatactcccaagttaggttgcagttcactctacagagagagctttaggtcaaatttaatttaattaaacaattctccccttttggtcagcctcaaaattttgagattgaccaaaaccttgggcatcaacattacttctgtcaccatcataatggacttgtctgctctcagtatggaattcacaatggacaatgtcaacgtagttgagtgattctttaccttttcttcatgtttttgttgttcccactgtaatgagcccactgga

SEQ ID NO: 67622 - DNA, 1445 bp, Homo sapiens
ttacttatttatttgtttttaatagagttggggtcgtgctatgttgaactcttggcctcaagcaatcctcccatctcaatctcccaaagtgctgggattacaagcatgagccaccatgcctggccactttacatatttaatccagtaacattacacacgcaattgcccacacccccataggtagtccccaggtcttgcatacgggatgcctggaagcaaaatatgccttttgcagccattattcagatacatttcctatatttagtagtgattatgttattagctagttaatagtatgttattacgtactgttattatattaactaactaataacataatcactactaaatatttccagtgagtgcaaaaaagcaagtggcaatgatgtctagaatatcaagatatagctttccactcctcctttggggtttctgggtgattctcattgggaacatgaagaggcattggcaccagtgaaattatttcctgattttggggcgttggttcagaaactcaacaactccttgttttttttgtttgtttgcttgttttgctagagtataagcctttgctaaagccattcacagattatagtcctatggattttcttgtaaggaaagggaaagggttaggacagcaagaaatggggaagaaaggataaaagataatgctttcatgatggaagagaaatcttgatccacaatcttggaaaagctgtccgcatataagatgccaactgcttctggggaaaaacttccctggtcagctttgccttaaggtctccaacagacatacagttctaggagtctagaagggtcctttccaatggagagatgtggatccaagatccgagaccctgacattttgctacagagaagaacttggcattgtccttcccaatggagtacaaggaacagtcttagaagaacttggtacggtctcttccaatggagttcaaggacagtttgtctggtgtcatttccaaagggcccaacctctaaattctagatcatgaaaggtctggttgtcatcaaccgatgtgtcatcaatgactcattttacctggtgaaaacatgctttggcataaagtattatagccttgcattattgagtcatatcagagtttataagagtgggagatacatgagattctattattaggggcataggccctctattactattttacaagagatctatctatgtctttccagtaggagtggatctgattgccatcaatcaataatacctgagaccaagggactccaatcaattcagcatgctttgcctaatgatatttgtttgtaatactgttgcgggacaatcaaagactggagagaccaaaaaaggttcaggagagtttattaaattaaggtgatcaccggttcagccagacatacatccagaaagtctgagccccgaacaaaggcttttcctactttta

SEQ ID NO: 67623 - DNA, 650 bp, Homo sapiens
cttgagaagacttcctgacccccaggtccccatcatatgctctcatacaccagctgcccctccttactgagcctatgtccttgatagtgctgcatttacctgtgatcctgtggctgagctctccctcacacttccagacaaggaaggcctgtgaggtatcagcacagtgctgaacatagtacctggtacacaataggcatttagtaaatatgtgaacaggaacaaatgaaggagtcagtgagtgaaagctccaagcctgactcagcggaactggcagtcggccagggcctacaaagtgctgcctggccctcagtagggggtggcagatctggggatccctcttcaccaaatagagttgcatcatacaggtaaaggtcccaagtgcctattgttttcttttcatcattttccatgtgtgacaagagtatcacgcaatcatgtgaatcaatggacttagttttctcactagactaatgtgtctaggaattatctgtgttgtcatggggattttccaggtgtcatttacaactacctgtggacaagatgaggtgctaccctcatcttagaattagggatggtggctgggcatggcagcccatgcctataatctcagcactttgggaggctgaagcaggtggatcaactgaggt

SEQ ID NO: 67624 - DNA, 460 bp, Homo sapiens
aaccgaggctcagagatgctaagccattttcccaaagtcaccagcaagtagaatgcccaaggtgtggcttgaatccaagactgttgtctctctccaaagtccacctcagagcagtggaagggaccacctcacctaccctgacacttgaagatgaaagaagtgtggaccacagaaggaaagacctcatgcaagatccacagcaaaccatggccaagggaactgggatggcaatggggaagaagtagagctcttgcatcagagccctgtatctgagccaagggtggtggctcatgcctgtaatcccagcactttggaaggctgaggcgggcggatcacgaggtcaggtatttgagaccagcctggccaacatggtgaaaccctgtctctactaaaaatacaaaaattagctgggcatgatggtgtgtgcctgtaatcccagctactcaggaggctgaggcag

SEQ ID NO: 67625 - DNA, 631 bp, Homo sapiens
gctctcgacctgtgagcaggaagccagttgttgagacaggtacactttcatcccgtttaatgactgtgtcttcctcatctcatggcagtgtgaggcacgggcacacaggcctagggaaggcagacaagccctgtccctgcactcgccccactttgggctaggagaggaaaccagctcagacaaataatctcagatgcccgctgtttcaagatcctctggctgcagaggggagggtggaggggagcggaacctggaggcctggggctctgagaggagaatgggtggggcctagatgggaggggaaagagccagaatagaatgtgtggagggcagaagcgggcagatcaaagccaaatgctagaggcagaagaaaacagaaccccatgactcaggcgtttgaaatgaggaaattctcaacccagatagatgcagaactgattctaagaggaaaagattagaaacaacctagagatctgatcagatgggaaattaaatggatggagaggtgtgccaaagccttctctgaaacacctcccaggcattaaaattagtgatccagagccagctgtatggatatgaatgaatcttaaaagctgaaggacaaaagccagttgcagaagaagggatgtgg

SEQ ID NO: 67626 - DNA, 2504 bp, Homo sapiens
gatgtgtctctgtgtcaatctatgtgtccatggcagtgtctccatccttgtgtgtctgcatcaggcctgcgcatctacgaaactgtgtttttttgttttttggggtttttgttttgagacggagtctcactctgtcacccaagctggagtgcagtggcacgatcttggcttactgtaacttccgcctccggggttcaagggattctcctgcctcagcctcctgaggagctgcgattacaggcacgcctggcttatttttgtatttttagtaaagacagggtttcatgacaggtttgtcatgttggccaggctggtctcaaactcctgacctcaagtgatccaccggcctcggcctcccaaagtactgggattacaggcgtgagccaccgcacccagcgcaaatgtgtttttgtatcagtctgtgtctgggtgaacatgaaacctgggcgcatccagctccatcttatggcgtagatggaggcttggctgtgaggtgtacgcgtcggtgtgtctgtgtctgagcaggtcaaaatgacccttcattgtgtcctggtgtgtatctatctgtccacctcaactccatgtacgctgttacgtggtgtgtgtctctgaatatacagggacatttaagtttctgtgtgtgttggcatcagcctagatgtacattgcgtcgctaggtgtttgtaatcaatgtgtacatgtgtgactgtgtgtttatgtgtttgtcccacgttggcttgtatgcatacatgtctctttatgaatgtacatcagtgtcagcccgcgtgtatatgtgtgagtcacggtgtttttgtgtcactgtgtttgtgacatcagcccttgcatatctgtgtgccgttaacttaccaagcgctgcgtcttctgtgctaataacagcccctgtgtgtttaagtgtgattcattgtgagtgtgtgtgtgggggggtttgctgtgtgaaggaatttcgtccgtttgtgtgcgtctgtccctctatctgactcagggcgtgcccctcctccttccatccctctcattctctggaaaagctggggcggagagcaggggttgtggggggatggtcaggacatctggaaagcacatctggaatcggcctgctcctgtcgtcttgcggtaaagcaagaaccttctggaggggaaggggtcccagttcctcctgtccccttcactcaaggtgcggccgttggggcctgggaagggggatcccggctctggctccgcgcccccgaagccggccggaagcgctggggtggggaggtgcccccggtgactcacgcgggggcaggaatgctgcggtcggaacgggacccggctccagaacccacctccagccccagggcttctccggccggcggcgccagctcccgcgcgctgaccctggcggggccccacgtgccaggtggctggacccgacccaggctccccgcccccactcgggccgcccgcccgggactgtactgtttctcctccgggcggcgcgggggctgcgggcgcggggccttcagggcgcggaggctgcgggagcgggcacctgaccttgtctgggaacggccacctaggaagccgcgactgaggagctcccctaccctcccctttccggcctctgcagactttgcaccattccactccctccgctgacggagaaaaggaaactttgtgtctgcggatggagagcctcccttgccaacgcggtgggaacagaggcgtacacgcacggagcaaacacgagagacacgtacacagatactcaacacatgcacgtacacaccatccacagatacacgcagggtcacaaacataccagctcagaaacacaaacacagatgcacaagcacacgcgtaaacaacacgcagaactgcagtcgcacttacaagacttggtcccagggccgggcaccgagtggctctgcctgcgatccagcactttgggaggccgaggcgggaggatcgcttggggccagaagtttgagagcagcctgggcaacgtggtgagactctcctcttctctacaaaaaaaaattgaaaagttagccaagtgtggtggccgcctgtagtcccagctgcttgggaggatgagacaggaggatcgcttgagccctggaggtcaaggcagcagtgagccgtgattgtgccactgtactgcagcctgggagatagagcaagaacctgtctcaaaaaacaaaacgaaaaacttggtccttcttacatcctagcgcagacattgtgtgtgtgtgctgggggaggggggtgtctatgtttctacgtgtatctgtgttgggggattccccttattcaccaggatacgttctctaagagcccccacaaaagcctgaaacaatgaataatactaaaccctgtatatactacacataactttctttttccttcacaatttcgcagatagattgttttcttactatagatcttagcaacctcagtacatatatatatgattatctttttctaagtggagaattttcaccttt

SEQ ID NO: 67627 - DNA, 4935 bp, Homo sapiens
atgttggacacctttaggttctttgctgcattctgcctctctaggaccatggttaagagtccaagaatccacatttctaaaatcttatagttctaggcactgtagttctaagactcaaatgttctaagtttctaagattctaaaggtccacaggtctagactattaggtgcaatttcaaggttctaaccctatactgtagtattctttggggtgcccctctccttcttagctatcattgcttcctcctccccaactgtgggggtgtgcccccttcaagcctgtgcaatgcattagggatgcctcctttcccgcaggggatggacgatctcccacctttcgggccatgttgcccccgtgagccaatccctcaccttctgagtacagagtgtggactctggtgcctccagaggggctcaggtcacataaaactttgtatatcaacgagcttctgtctcctcttgtctccttttagctgtgatgtggccccattccctggcaattcagttcccccatcagaaaaaagaagggcttggtagggtcttggaattctgtcctcactagagagggtagaaatgaacacacagatagacaaaaagacatacaagcaaagagatgcaggttctcagaaacccccagtgaggaactggcatacagatccaggatcacagacacacacacacacacacacacctgttccgccgcaaactaacagacacatgaattaatggacacacccaggaggacctggtcacaaatacagagactgaaactcagacgcatagagtaacacagacacacagaattacacagacacaagcatatttacaaacatgctcaggcagatacccgccacgaataggaagagacacagacctagagtcaagtgacacaaatactcaagagacatgtagagtacaacaggtactcacaaccccgaacgttcagactgacatagaaacacaggcacagaacacctccgatcatcacggacccacaaagggcctccagcgaagaccagcccaccgtgtctggcacgcactcgcgagcgggcgttcgcgggtgtggccggcagcaaatggagaaacccttggcagcgcccggacgccctccagtggcggctcctgagaaccggggacagttcaatccgggccacaaacttttttagaacaaatcattgtgggaagctgggaggagagagagagagaggaagtcggacgtgggcgaggggcggggtgtctggactggaacctctgggcccacgtgagtgtctgtcccgctgctgagtgggtgctgtgtgtttgggttgctgtagtgttcgcttgtagtgcaactatcctgtgttatctttattattcgatgccgcctgcctctgcggaccgtagtgggcacatctacactgcagcggggtgccttacccaaagcagatcggaattggggccgggcgcggtggctcacgcctgtaatcccagcactttgggaggccgaggcgggcggatcacttgaggtcaggagttcgagaccagcctggccaacatggtgaaaccccgtctctactaaaaatacaaaaattagtcgggcatggtggcggggacctgtaatcccagctactcggaaggctgaggcaggagaatcgcttgaacacgggaggcggaggttgcggtgagctgagatagaggccctgcactccagccagggtaacaagagcgagactccgtctcaaaaaaaaaaaaaaaaaaaaaagaacaacaaaaaaaagaactggatgcgtctgatctgacgcacgcctgtttgtttacgactgcggggtgtgcctttgtctgagtagagatagtgtgtggcttttgcgggcttaacgtgtggctcaggaggcagtgggagtctgcatcatgtatcccgattgcgtcttactcgagttttgttttgagttagaggcgacaggtggtgcagcgttagacactgggaagctctgtggcttttgtattcctgagcgcgaaggttaatgacggatccgtggggttgagcttgtcggtacagacgccagacagcccgatttacgggaacagccgattagaggattcgggagagcggtcggtgaacttctggatgtctttcgggaggggaaggctctatggtcgcgtgcagagcgcccgttccacgtcaggtacccgaccatagagcaaggcggccgcggactacccaagggaaggggaggccgtgtcctttacaacttgcctcccgttgttagtctagtttctatagccaaaccttcgggactctctcaactcaaaattttgcttttcctaaaggcaactgggttccttccagattacgaactgtgtatccacttaatctctatttcgtatacctcctcctacagcgaaatttgtgaggcagtcctctgaagcacggccaatctggtgaacttttcctaaaatgagccatcgctaccagctttagtgagctaagacaataactgcgattggtgggcagattgttttgaaaccgccctaacggcaaggggcgggctcctggtgaattcatctctttccggtttcttaaaggcaacaggaaggaggggtttctgccgaccctccatttgattggttctagtggttttacccgctcggactcctcaaggggcgggagatgtacaccaatcggaatgtgtgttacagagacacttagtttgatgaaaggactgcgcaggaaaggccgtgggacactcattctgagatcttaccgttgattggaccaaattgttactcccttattttcattggaccttacggcagccggcgcgcgagagttacccaatcagcaagcgctccgcctcctgccttttcccgccctccgctccggcctcggcttcgacgtaggccaacgcttcctccccagtagctcctaggccttctcgtggccgttgttttgaaaacggcgctctgattggctaggtttccgggcccgcgcccgttgccccacgcactgaccaattggcactcatgtaacatcggacgaggcacgagtgaggggggaggcggtggcggcggccattttgagccgctgccgccattggagtgggccccccccctttcccccttcgcctcctgacaggaaaggtttaagggggacagagccctgggaggccgggccgggctcgggggccaccccgggggcccgggccatggatgtgcgccgtctgaaggtgaacgaacttcgcgaggagctgcagcgccgcggcctggacactcgaggcctcaaggccgagcttgctgagcggctgcaggcggcgttggaggccgaggagcctgacgacgagcgggagctcgacgccgacgacgaaccggggcgacccgggcacatcaacgaggaggtcgagaccgaggggggctccgagctggaggggaccgcgcagccaccgccgcccgggctgcagccgcacgcggagcccggcggctactcggggccggacggacattgtgagagtgcgcggggcgggggccggggagcccggagcctgggccgaggaaagggctgtgggacgcgggagtccagcgcctgaggtcggggagacgacctgaggatcgggggatcccgctacccgccgccgaaaaggatctggggaccagggccccagcacgaccggagggtggatcctgacactcagtgcaggggggacactgggggaggggcctctgggtttcggaggtgagggacgggggtggcggggaggattccgtaccgtagggatcggagaccggaaactgctttctggagccgaagagagtcggaagaacaagaggttttccgtttgggttggggagggtctcgaaaatggggatcctagggtacggagctccgtgggcttggcggtcgtgctagcccagcgtgtgggctggggggtggggagccgtgtttccagggtggggaaggaatgtccaggtgtgcggggctgcgagagttctgaggaaggaggatcctggaatatgccgctggatgcgatcctgggcgttctcctatttgggtacgggggtgggtgggagaggtggaggcgctggtgtctgtggctggggagggtcctaatggactcagtgctttggagtttggctagtgagcatttaggggctgcgggagattgaactagggggcacccccatctctcttccggggctggaaggccacccttgaagcaggcacagcctggacattaggtgctgggagatctggggactttctggttggcttctagaagaggtatagggagccctggtgtccagaggctggcgggggagaggatgctttcctggacaaaggatctgggggtctagagctaagaaaactgagggcaaataactcttgaggctgctgctgactggtctggagctaactgtggggtttttggagaacagagggtagctgggggtgggatgggggcagatgagttggtaacattccaagtggatgaaatatgtggcgggagacagaggatcctgtgtccagcacaggagtacgtatctggcttagcgaatatggggaggggggaggccgtagggagcaaagagaaagaaacctgttgacttcactggaggcctcagagtggagtgtggggaatgtttctggacctgagcgtctccaggagaaatctcgacggttcccagaagcagttatttgtgtacccagggagtgggggccctcggggagcagcacggaactcttcatcagccaggagctgtgactctgggaatgggttcgggtagacctgcggttgtctgaggagaggaaaacctgatatgggacggcgtgaatcttcagttagaaaaaaagcagctttcgggccgagtgcagtggctcacgcctgttattccagcactttgggaggccgaggcgggcggatcacgaggtcaggagttcaagaccagtctggccagcatagtgaa

SEQ ID NO: 67628 - DNA, 671 bp, Homo sapiens
gcagggagggcttcctggaggagtgagccagggtaaaagactccagattgcatccccatggcccatcttccccttccttagcaaccttatgtcttcgttccctcatacatgctgtgttcctggctccttgtgagagacaatgctgggccacaggagaagccaattcagccccaatcttccctggtgggagctcagagccttgtgaaggggagatgggcaacaaaaacaagggagggaaactgactagtctcagaatctcgggtagggcatcagaacgtgagaaggaaccaaggttggtggctaaaagggaccctagaatgcgccagagaggaggtggcagggcctttagtctggaaagtccccttcccttcatgtccatatgctgggctacagcgccctctgctggcctctcctggtaatgcctaggaatctgggttggtaaatagggacctccttggctttcttccacaactccagacctcaagggaatgcaaatggggaagctcttcctctgttctcagccagtttttctcacacgtctcatctccagtcccttgatgcccactcccttcagaataaaggaggtcaagccacttactatggcttatgaggccctgcatggcctagcacctggtaacatcgctggcgccctctctttctgctcccccttt

SEQ ID NO: 67629 - DNA, 1923 bp, Homo sapiens
gagggtaccctcccagaaagaaggcttccttgaccctccagcctggggtggacagctccctcagccctctggatccatcaaagccctggccactgagtgacatgtctgtctactctgctggtaacacctaaatagagccccacccatcccatagggaaataaggaccagagttgtcttgtttcacacctgtagatttcctccaggtcctgggaacacaaaatgggaagttctatctcactatccatctcatgccagccagagacagggtatgatgacggaagtaagccaggctggtggctcacgcgcgtaatcccagcattttgagaggctgaagcgggaggattgcttgaggccaggagttggggactagcctgggcaacaaagtgggacccctggctctacaaaaaaattttaaaaattagccgggcgcggttgtgcgcgcctgtagtcccaagtactccaaaggctgaggcaggaggatcacttgagcacaggaatgtgaggttacttgaactgtgatcgcgccactgcattcgtctaggcgacaaagcgagaccctgtctcaaaaaaaaaaaaaaaaaaaagagtcaaggcttagtaatattcctgaattcctgaaggagttaagaaaggaaaaggacaagcgggggtctaaacgagagcacgaaccctcagcgtatgacggctccaggctccgggggaaagtcctttagccatccatcccaaaattaagcacgctgggagctggagtcacagcagtgataaaacgaacaatgattctggttcctactgactgacaggagaggtttaagggtctctcactctccggggagcccctttccttcctggctgcggagggcggagcccgagagaggcacgcatgcgcaatgcaacgtctgccttaggcccggaacttcggtgcctgggcgcagcggtgcacccggacccggaacattctcaggcgaaagtgtctcttgcgtgcgtgggccggaggttagtgtgcggggcccgccgggcggttgaaaagtccgagagaatcaggatggaggccgtggcgacggcgacggcggcgaaggaacccgataagggtgagatcttggtcacgcgcaggcggcgggtgggtgcggttgcggtgtctctaggaaatgattcccccaggaacgcgaagtaggactcgttttagggggacacccacccccctcagctttaccggtcctcttcactactttgcccagattattccctcccttgtcgcgggctgaccttcttttcctccattccttccccccgaaattaacctcttcccagttccagaccaatcctttccatgtccctaattcatttccttaccaggctaactctcaaattaacagaaacctctctaccccggcctaattcctgcattgcctcagaccagcccttctcaaattacctccttccctgtaccaagctgagccttcccttgctctctagacgaatcctcctacctttccaggctaaacttctacctgcctcatgcaaacttatcccaatctaacgattccttcatttcattgtaactcccgtttcccccaaagtccgaaatccagccaggctcctttcaaagtccttactcaatttctgtgctttcccacaaccttcaaagtaatccgacgtcgggtgaggtgtgattggaagcgtggctccaacaccactggccaagaattggtaattgtggaagccagatggagatgattggtatatggaggtagggggagaattgtcgttgtactttctacttttgtgtatgtttgaaattttctaaaaataaaaaatttaacctaaaaaaagtcttaaggccgggtgcagtggctcccgcttgtaatcccaacactttgggaggccaaggcaggagagttgcttgagcccaagagtttgagacc

SEQ ID NO: 67630 - DNA, 722 bp, Homo sapiens
cctcttctcccgaccagctcgtccctcctcccgctcctcctccccctcctccccgcagtggcgggggcggcggcggctcgtctcagactctggggcctcaggctgctcctcggcgactccttcctccgctccgggccgaggccggccccgcgggcggctcagagccgggggggtgccccggacggggcgtcccccctgcccccggccggggccctcgctgtctggctgctccgcggagggaggtgggagggagatggcccagggcgcgaagggcggcggcggcggggaccggctgggtcggcagggggttttgaagccgcccccggccccacccaggaagcgcacggggcgggagcgggggcggcccccagggggagggcatgggggggctgggccaccgtcctcatctcgcgtgggcgggctccgaggggggtcccttcagccctgggggaaagggggcgggcaccccggctccgccccgcaaacagggtgctgcctcctggcggccaagcgccaccaaagcgggtgatccagatgcgctgtggctttgcgggcggtgtgggtcaccagagaaagaggaccaggcggagaaggcttaatccgggggatgagacacaggggagccgaccagaggagggggacccagaacggaaggagagtcaggctgggaaacaaggtaggagaagagggtctgtcaacatgggggcctccggagggtgtca

SEQ ID NO: 67631 - DNA, 1435 bp, Homo sapiens
gaggtaagtgtattatctccatttgacgggggggaaactgaggcccagcaagtaaagggtagtactaggattccaagctagcttcgtcacacccctgaggctgaggtcttgaccacagatcctaattgccaacccatgaaagcctggaaaaaatggggggacccttgtctggggaaccagcatttaactctgggaagtccaaaataaccttttcgggttcaggtcggcggaaagccccgcccgaaggggctatggctccgcccacgagcgcaaaagacccgccttccgcgtcacgccagccaccccgcttccctcccccagcaagctccataaggcgcatgcgttatgagttcaggtccgacttaaccccgcctctaagcgcagcgcatgcgtcattcctaccttagcgcacttaacggttaggagaggagaaagcggcaaccggggttgtagttcatgggcttgactgcttcttttctccgcgggcgccgaccaggcctggctcgcgcctctcccaggacccgcctggctgcgagatatgtaagccgcgatacttccgcgaccgcgctcgtcttggtttccgtggttgttgctggggcaacagcaggctcctcccctagctttgtactcgctctgcgcgctactaattggtgctagccgtctgcggggggcggggtgaagctgtgatggacattttcctcctccgctccattttgggaaaatagcgtctctccagctacggcaaagggttccgccattttgggcgtggctaggaagctgccatgttgagtgtggctgaggaagtttgagtgcagtttctcccagataccttctttaccaaaaaagcaaatccctaactgctccgtgctgcgcctaccccaccgaagagctctctgtggtccgggatcacaaatcagagattgaaccaggaccaagggggaattccttccaggacctcgtgtacatccccggccttgtaactggaaaacaaagcaaaaaaatcactcctcattcagagagtggagaagttggggagtgggttctgcttccgttttagagttcccctaggtttctcaaggacaaggaaggaaggaagttggataagtccaacttccttctcggagctactaccaagttcactgttactgcttgattctgagcaaggagcggttggggtagcgaagagaaatgaggaactaagattcccttatttgcagaaaatcctctttcctattgattgatttatcaatcaagaaatggagatgttgtccctggatgccatcctagatgccatcatttcccacatcaagccagtcatcaggtcccatcaaggctccttaaaagggtctcactctgtcacccaggctggagtacggtggctcgatcacagctcattgcagcctcttaactcctgggttcaagggatcctcctacc

SEQ ID NO: 67632 - DNA, 2325 bp, Homo sapiens
agcggtggggatgtatttctcaacccagcgcaatgacattatcttcaatttgaggagtatttacgtgggtgaaagatccgccacagtccacagtatgcaaatagacaggtttgcttcagtccgggatgcaaggacctagagggtgtgtgtgtggggggtgggggtgggagggtggaggaggaatcgagttaagggggatatttaccctggcgaggtgattttccctattctgaaatatcaattcttgggcggacagtctgcccctcctctcattctcagagatagttacaaagatggaactatcttctcctttctagtcgtgagggagagatgtgtgtatccctgcgtatttagtagtattcaatcggacaagaaatcatgcatcaacgcaggagtgacatttaccagctggtatcgtgaggaggtgggcactcggttgcacagtacacggtagtccctctccaaaagaaagacctgggtgaagttcttaccttgcaggaaggaagcagagccatctggccgcgacagcaggttctgttcgcaggcaaagtgccggaggctgcagccaggaccccgagggctggaccctgttccattttcagcacggattttggcgtcagtatgcgtctcctcctccatcgcgccgagcccacgtgcggctgcagttgtcacttccgcctggcagcgcgcgccgcaaacaggctgcgtaaccagtgcgcacgcgccgggctgggccatcctcctgggcgtccgcacgtggcttagcgtttaccaacaatctggctccgcccagtcccacctcctaactctggcaacgccattggacatttgggaacagaaggcaggccttggcattgatccgctttactctgggcccccgggccctaaatccctgaggccctggtcaggttgccctcttctttgcctgttacaggagtaactacaatgaggcgattggagaaaattttgggtagatagatttttttttctccaaatctctgtgcattctatctaccacagaacgggaagaagatggttttcttgtcagatggtgctggagtttgcgtcaggcacataaagaggcagccccgaatctagcctacgtgagtgccggaccgctgagtggttgttagccaagatggcggtagcgatcgctgcagcgagggtctggcggctaaaccgtggtttgagccaggctgccctcctgctgctgcggcagcctggggctcggggactggctagatctgtgagtacctgggccccaggcggttttcccaaaggggattagggatgtaaaggctatcttcagagtgtggggtccctgaaggatatgaaggaagggctgtcacaaaagggaaaaagagtgggagactccttggagaagacaccgaagggaagatctgccacttccttaggagacgaaaagaacttccacttctttaggagaggaaaaaacccgtttgcaacttctttgtgggccctgagggagacgacttgaagagagagatgggggttccttattagctgccactggtattcaggggaggctccttggaggaacaggggaagaccgcaagaccttctccctcagggtttggagaatgaaactgactttgtaagggagggactttcttctgggcaaagatccctcttcaagaagaagaaagaagagaacaggtccctgtcacaggctgcatagggccttgtatttctttgctcctttgccacaattctgattttaaaatgaattgtgtaaaaaatttgtttgattcctgtgtctcttgatcgaatatcaagacagagaattcgtgtgttctggacactgtacagaggagacgattaatatttgttgaattaatgaggggaaaaaaggagggagagaggtacagacagggcactttgcccacatttcttagaaacacttgagaaggctttgtttcttgtcaaaagggtcacaatcccttcaggtggatgctgctaagggcaagattacactgcaaaaaacctaggtggaagcctatctttagacggggagaggcaatgggttgcagaagagctttgaactacagttgacagataggagagtagtggttacatgggtggatgcatgtccttgctctgccgctttccacttgtgtagccttggccaacggactgcacttctctggatctatggagctaattttcctctctaaaatattaacagtggccacctcatagggctgtgaaaaatcaatatgtaaaatgctaaggactggacctggcacatcctaagggcaataggaatgttgatagtgagggtggagggaagggacagaaactaac

SEQ ID NO: 67633 - DNA, 1536 bp, Homo sapiens
tgttggccaggctggtctcagcctcccgaagtgttgggattacaggcataagccactgtgcctggccactttttgtcttttgcatgttctatacaccttgccgagaatgtgctttccctgcctcctggttatccctcaggtttcagctctaacatcacttccccagggaagccttaccctcgctttcttctgctataggataatatgaaccaccatcattgttacttgtttagtgtctgccctccctgctaggcagcaaggacagatatcttgcctgtcttaggtccccagaacccagcacagggcttggaacatgtcaggtgctcaaatatttgttgaatgagtcagtctgggctcgcagagggagctgggaccagagtagagtggacactgaagcgtatgtagcagtttgccaggcgatagggaaagagaccttcttgtaaagcaagcagagatgagagggagaaatgagaattgctaagattgttttgagcatttgttaggtggcttacagatgctttgctgaacattttattcatgtgatcttgtttaagcctctcatttccatgaggggttctccatttttatagacaaggaaggggacacgtggagaggggaagttactttgccatatcaccctctaagggatttttttttttttttttttttttgagatggagtctcactgtcaccaggctagagtgctatggcgcaatctcggctcactgcaacccccacctcccgggttcaagtgattctcttgcctcagcctcctgagtagctgggactacaggcatgtgccaccacatccggctaatttttctatttttagtgggtacagggtttcgccatgttggccacattgatctcgaactcctgacctcaagtgagattcgcctgcctctgcctcctaaaggcagtaagggaattgaacctaggcagtctgactcttaagagctcaaagacttaagctctgtcctgagtagcttcgctggtgtatggtatagggatcagaagagagctggtctgtatgcctagagggcatcctgcagtgggcatgtgtgtctgtggtcacagtgggagagagagaggagggggcatctgtggccagaatggggaggcctcgaatgccaggatgaagagtttgggcctatggtaatgagaatagtaatagctaccagttattgacttgccagccacttgattgagtcatttaacctcacaacagtcctatgggataggtgttaactgttttcatcccagtttttcagatggggaaactgagacacagaagttgtagtcagttatccaaagtgtcgcagtgagaaagtgctggagttggggctcagaccctgtgagtcaggccccagagttcactggggccacatgctcaaccaccatgccgcctgcctgccgccggggctgagccagcggaaacctgggtgctgcttctgatgcaggtggtctcctctgctctcttccccagcacccccccaggcagcagcagcagttttcatctctggatgacaagcccca

SEQ ID NO: 67634 - DNA, 885 bp, Homo sapiens
atatctcaaattctcctcttaatttcacccagatcatgcccttagaacctccaaattgacctcttggttcccccacccatcatgcttttgagttttctgtaaaaattcgtcaatctcccactaactttccttacattcatccttcggtcttctaagaccaaatcccacatcctcgaacaatcccttccaagctctcttatcctacaggccccacccttgcctgtccattagctccttgtgtcatccctccctctgattggttagtcgcgtcgctcttcggcagccactccctcatccccattggatactctcagccaagtccctgcctcctctcgctcgctaaagcgtctcctccgcctgcgaccctcacagatccttcctggcccccactagccacaggtttgcactcccagtacggggcttgccaggcttagcctgctgcctcacggctttctgctctcgtggccgccaacagaggccctgaatgcggaggctgtagagcggacttcaaatttggggctctaggaactccggtcacttaccgcccagggagccgccatcttgctaaggtttcgtaaccggaaggggccggtcttatcccacgctcctggttcagcgcgaacttattctcctgtggccacgccccgcgttttctaaccgtcctcttaaaggtgcacgcactttttactcttaaagggtttagggattgctcacagcgccctctccctgagcttcaaaacgagacacaggtcgggctcacgcacctgtgaacccagcactttgtggaggccgaggcgaaagcatcgcttgaagccaggagttcgagaccagcctgggcaacataggggagcctttatctccacaaagaaatagggcaaccttata

SEQ ID NO: 67635 - DNA, 2327 bp, Homo sapiens
tccaaataatatttacctgtgcctggcacagagcaggcactcaaaaaatattttttagagcatgtgacgcgccatgaaccagaggagccactttaaatggacaaacggggatctcatttttttttttttttttaatggtgagacaagccctgagaaggcaaatggactgcctaaagctacacaggtcagcggggcaggtaaatctaaattggcaaagtaagggctgagcgaacagactccgacactagaaggcagagctgaactaacttctgctaaggtcccgcctctgccgctttgtcccgcccttatcttctcccctcctccagcgcctcattcccttttcgctcgccccggccgtgctgaagcaacttccgccctgagaagggtggggcttccgtctcccgctctcgcgactcctggcggtgaaggacggaagatgatagccacatttcttcctcgcccttcccctaggttccctgtcacagttccgcccttactactcccacttccggccagggaacagccacttccacccggaaaaggggttgttccgccgtggggcgccagctgtggcccacccatcctgccccgtactttcgccatcatagtattctccaccactgttccttccagccacgaacgacgcaaacgaagccaagttcccccagctccgaacaggagctctctatcctctctctattacactccgggagaaggaaacgcgggaggaaacccaggcctccacgcgcgaccccttggccctcccctttacctctccacccctcactagacaccctcccctctaggcggggacgaactttcgccctgagagaggcggagcctcagcgtctaccctcgctctcgcgagctttcggaactctcgcgagaccctacgcccgacttgtgcgcccgggaaaccccgtcgttccctttcccctggctggcagcgcggaggccgcacggtaagcgggggctccgagctggaccgggcgcgaggtggcagggccggacgccgaagcctcagagcgcgtgcctgagggccccgaggcgcccggcgcgggcccgtcccgccccctagagccgcggccacgtgcgagcggcaggcccggacatgcccggtcagcgccgtccgggaaccgagcgtgggccccggggggcagcggcggggtgcgtggggcgtccggagtcccggggctggggagtggggtcgcgcaggatcctcacacgcaggggccgggctctgttagtgcgatccagagaggccgtgggcgtcggtgagctccttcagacccgcaggagccggagcccggcgttgaaggggccgtgggaagtaacggggggtaccacggtttaggatgcgctggagcgaaaggattggggtggggtccgtgctcttggcagtcgtctctgccaggcctgtgttcacatgcttgactttctccctcagatgcctggagttactgtaaaagacgtgaaccagcaggagttcgtcagagctctggcagccttcctcaaaaagtgagtttggggactgaggttcaaaacgggtggaggctgtcgccttggcctgcccatctgagccccagtgtttgccggtcctggcaggggaggcttgtttggggcctccgtggctcctttcagcgtgaggcctggcttgtgttccggttccagcctctctttgtactctgggcacagcatagttgtgttgaggggagggcatttgggatatggggtagtttgtggagatgactgaatcgtgcttttcccactgttttggtcttaggtccgggaagctgaaagtccccgaatgggtggataccgtcaagctggccaagcacaaagagcttgctccctacgatgagaactggttctacacgcgagctggtgaggaacttaggtctttggctggagagtggggagctgggtgacccctggcacaaaccatacttccctgtctcctctgagctctttcccgccccaagagggagagaaacccttggttgtgtcaccacttgctttgtgtgatgtgacattcgataacttggtactccaagtttttatgacattctaagagctttgtgagaggaggacctgtggctttgagcctcaggggaaaccagagacagatgaatgttcatattttgcttacaggtggtttaatcctttctatatacacggaggcagactccctgggtttggatccatcttttacatctggctgtgtgtcctctggcaagttggttaacctgcctgtgcactctctcatccccaaaatgggactaattattgtaccagtactagagtattgcaaggattgaatgaattta

SEQ ID NO: 67636 - DNA, 2701 bp, Homo sapiens
ggacagagagagagcgagaaggaaaggaagagacagaagggagaaggggcaaccgaaaatgggcacgaagaggcccaggcacagcaacagctggggaaatgacagagactgagacggagatgcagaaagatacagagagagctggagagggtagagaagggctttcggggagaaagtgatggagggacagagaggagaggtggaggccaaggagggaaagaccccagtagagaaagacagagggacagagaaggggatgcagacgcaggcgggagcacacccacagaggcgaaggaagggcgcaagaccatgagaaccacagacgcggaaagccggggaggtcgtggctcggtctagggcgcacggggagcagggcttgccccccagcacctccggggaggtgaccccagccgggagatgcgagtcccgcggagcccgcgcccggcggacggaccgatggacaaagccggggagagctcgggcgcggccggggcgggggccggtgcccgcagggacccgggcgcagcggggaaaggaggggcgggcaagcggcgagaaggggaaggaagcggaggtgccgggcgggcgcggggcgcgggcaggaagcggggaggggcggcggggcgggggcctccggaaaaacgccccgacttcctgccccgccagagccaggaagcgggagccgggacccagggcccgggatcgccgagcccgacctcgggcgccccgccggtcacctccgcgcggacaccaggtactcggtccccggccccgcccggcctcctcccctcggctgttgggggaagtggggaggaggagggaggggctggggcgctgccggcagcggaggggcccccttcggaccccacggaaccagcggccgcccctccttgggcctcagttttcccatctgtcaaagggagcaaagaggggagaactcacacttgacgagtgccccataggtggggacgaacggtgcgaggccggggccaaggcctcccacctgctcagtggagaacggacgatcactaccattgtacgggtggggaaaccgaggcccggggagccaaaccgactcgtcccagggaacgcacatcgtgagaaagtgtggagttgggatttgaactcgcacgtgctttccgcaaagcgccatcctccaacccccgcatgctttagggccacctaaaaatgaaaaacaacgataacaacaacgacgagggtcgctgtgaagctgaaagttgcagagtgcatttgaaagagttttcggaaagctcttttctaggtcattaattataccgtgagagacaggtgtagggagagagctggaggccttctcccattgtacggatgggaagactgaggtctacagagaagtcattactttttgcagattacactgcatgtcagagggaaagttgtgctggaactcaagactattgcttttccggttccaaaggaaggggctgggggtgggagacggaggggattgatgtacgaggattggaaattcagcgggtcccctaagtggggagactaataggacggggagccccagtccgccgtccgagtgctcagcgctggggtgactaggagatctccgatcgaactcgggaggagttggacccatctgcacctccgggcgcggggcggggcccggggagtgacgggggcagtcgagatacggaaacgctggccctccaagacaggccagagcggccctatctggcctgcgtggcgcagtacagcgctagagcggccggcgggaggagtagagtcgtcggggccggagcccggcaggagccgggctagagcggctggcaggaggagtggagctgggcgcaaaggtggactcagggcggctagagcgacgcggcggcaggggtggggagagtgcggagcccgagcgcggaggcttcggttccggtggcggcgatggcttctctttccacctggagcaggtgagggacgcggtccccagcgggtgtcagaccctgactctgcacgtcctccccggcatccctggccgtgcacactgccacgtcccccgtaggatttagggcccgcgtaagacccgccacgtccatgtaagatttgggtctcgtgtagacccgcctcattccgtataaagtcttacagaccctccaggttcctgccagccccccatggagaactggcttcttatagacgtggggtcctcatagaccagtggcatcccctagaatccggggctctatagaccatgggtctcgggacccaccacgcacccctatggaattctgagtcccttttaagtctccagaggttccacagactggcagctgtccctatagaatcatgatcctgtatgatccctggatcctttagacccactgtgtgtcaaatagaatctggggagttacacattccaacgactcttttaggttctttaaggctccagaagttcttggagaccctgagtcacctgctcaacacattatagaccctgagacctccatagaactcaacacccatgtggccccccaacccatggaccttctaaaccagccctaaccccccagcgccccatgcacgcagtgttccctctgctggaccccccaggccttgtcagttgcctatagatccatctattctctgacagcttcacctgtaattctccagcctttgtgggactcccccatacccctcctcctaaacaggcgac

SEQ ID NO: 67637 - DNA, 1398 bp, Homo sapiens
ccagggtgatggtggggtaggggacctggccctttggtgacaaggtagtctagcagagccaatccttgggggcggggcctgggcggtgagaagagggccctgggcggtgagaggagggaccgggcggtgaagggcggggcctgagcggcgagaggaggggtccagccggtcggggctagtgcgggtgcggggcccgggaggcactcacacacagtacaggatgaggcccaggaacacgaacacatagttgctctggtagtactccacgttgcgtacgaggcgctggcacagctctcccaggttgcggggccgtgagaagcgctgctggtccacgaaggtgctccagggccggatggtcgcgcggcgccgctccagccactcccggcctgcaccggagggaatcagcttcggcagcagggtcctgcggggggtggggccgggtcagtggtggaccgggatggagccccagacccccgcaaaagaaggggactaagggtgcctggactccctcccgggaccccagattcctgtacagcaggcagggaggggactaggggcccagactccagggtcccattagaggagaccggggccaacacttctgcggctcggggctgggactccaggctctcgagggaggagggaggagggggccgggggcccggactcccgggtctctggtccgagggcctagagccagctcgctcacgtgccgctcagcccttccgcctcggcatctttctgctggtccttctgcgctgccatgtctgcgtcgtgaggggtagagctgctgtaaccagcccggtaccctgaagaccccgccggccccgcccgacgccggccccacccagcggagtcgacgtggcgcagccccggagcagctggggactgtagttctgccgccgagtattgtgggagttgtagtcctgacggtgactaagaggatgggcgctatgatggcggtctgactcgcaaaacaccttgggagatataatcccagaaagtgacggcgcgcgcctctgggtattataggagttgtagtttcaggagggtgcatgtgggctgtcaggagcgagggcgttatgggaactctaacggcagaagcgggcgttgtgtactctcccagggaaggcacaatggggaccgtgcagagctgtccttctgactctagagggcataaaaaaacacctggagggcttgctaaaacagattcctgggccctagcccagatgttttcattcagcaagtctggggtggagcccataatttccatttctgagttcccaggtgatgctgatgcccctggtccatggactacattttgagtagaaagatttagataatttgtgggaattgattccttcctcaagagattgaggctagtgagggggccatggt

SEQ ID NO: 67638 - DNA, 2261 bp, Homo sapiens
attctgagagtcagtttcctcatccgataagttgaaattcctctgtgtttgggttcaaggagtaggtctggaaatgtttcttttcttctttcagatggagtctcgctctgtcgcccaggcgggagtgcagtggcgtgatctcggctcactgcaacctcggcctcctgggtgcaatcaaatctcgagcctcagcctcccgagttgctggggttacaggcacgagccaccacgcccagctaatgttttgtatttttagtaaagatggtagtttcaccaggttggccaggtgggtctcgaatgcctgacttcaagtgaacccgcctcagcgtcccaaaatgttgggattgcaggcgtgagccaccacgcccagcctggaaacgtttctaacagtactggggcaactccctcccaaggccctgaggggcgcaggaacgaggtgagtaggaatggccagagccccttggacacatggggccccaatctcgaggtgtaagggtcagagtcaccccggaaggaggtggagtggagtccgcccgttaccggctcacttccttcaggctctcaccccgattgtccttcaggtcctctacccaccacactccctatttcttccaatgaaattgtccctgcttctttttctccatatcctcgctctccttgcttcccctatgacatttctcctctctccacctcccaaaagtcccctcggtcttttctctgtttcttcctgttgccttcattcccctccttttaataaagtgagtctggaaccttggtttcccttttctctctccatgtgactggtgctgcatgcagtttgccctctccccatcgcgctaagtggtttcactttctccctctgaccctcggggaaaccacaaaggttcccgtgcctccattcccccgctccagccctcaaggtgccgcgtgcctcaatttcccaggctcttttcctccctctccctgtccccaacgctgactccctcacggcgtccccaaaatggcgcccgcggccgcgctccgccgcctaacgtcatcgcgccgccctccgctcagagttcccctctggagccgtcggaggcggagtcgaggaggaggaggagcatcctctaaggaggattaaaggggcgggcactatccacccgagggctgaccggtgagggaacgacgctaaaggattggttgggcgctgcggggaatctcgacgctcctcactattggcccaagcctcagagacatgaacgtcgattggccgaacggcagggcccgagcgggcaatgattggttgcgtccggccgtccgtgcggcggccgaggaggaaggtgggaggggcgttgctgagggtagctgggggcgagagcgaggctacggagcaggcgagaggcgacggcgagagctagagcgggcgcagcgttagggtggccgtgcaaggggagccgtggcccgggcccggggcgtgcgagacggcggaagcaggtgagcgcgagcgggcgcgcagaggccggccgggctgcgctccctgccgccgcggcctcctcttgccaggtcgcctgcgcactgagggcctgagggggtgcgcgccgggcagttagggcggagcggcaccaacggccgacccggcgcgcgggcagccgggcgggggccgggctggagcggcgggtggggaaggggcctggagtcgcgtgcggggctgagtgaggaggggcggggctcgggctgaggctttggtggggcacctgggcgggaaggggaggcctcagagctgtcccaagagggctccgcggctccccagggtttggggtaaaggacttggtggtgtggcaagtccaggacgaaggggctgggccggttagacggcacgtgggtgcccagttaggggcttagggcgtgagaaagataattaagttaatgcaggggaaaaatatctagttcttcctggaaagaattggggcggtgagaggggttttggtgtgaagacattaggaaatcgatatccccaagggaacggtttagagctaaggaggggtccagttgtaatggatggggttaaattaatgtgaagaggccttaaaccaatgtgtcaggaggttgggtacccttggaatgcgtggaaaggagtctttgtacaaagaaggattaagtgtattttaaaagggtgtctgggtgtccctagaatgagctggggaaggtagtcttttttaagtacaggtaattaggccaaggtgaagatgggatttggttattggaaggggaggaagtag

SEQ ID NO: 67639 - DNA, 2498 bp, Homo sapiens
tgctcattgatattgtgggaagagagagtagcagaatgggacataagctgcctgatatggcactgtccgtatcagggcaccagggaggcccagcgggagccaggccctttcctcccaggaagtgtgacaccctcccattcaaccgtacctggccggcgccgcttgcgcgccaggtgcggcagcaggtcgtggcgggccagcacgcgcaggagttgccccagcagccgcaggttgctctcgtcgcactgcccgcggcgctccagctccagcaggagctctaggccgctgcgggcccgggctaagcctccggcggcgccaggagcctcatccagcagaaaggccaggagctccagctcgcactcggtcagttgcccgcccaccacctcgaacatacggtgaagcgacagcatcccgtagtagtccaggcactcatcctcctcccagcacggggccggggtcgacccggatagcgccattcccgggggagggaggcggaacaagctcagaacccggcctagaacccacacagcggggagggggcagtggtcagcgacgcggaggcccgaaccccacaccgccagcgcgtctcccccgcccaatcgcgccgggcagggccgctcccgcacccccaaccgcctcggcctccccctcccccgggagggaatggtcccgcccgaggtcccctaagaacaggtcgggacgccggagcccgctcggcttctgcccccaccaccgtgctacgttcggagctcgcctccggacctgaccaaacgatgcggcccaaacaagcctcggggcccaccccggggctccctgctgactgcccctgactctgggtaggactgcccagacgagccccttttctccgtccagcggtaccgtctgatgagtcccccggctctacgcaagtggtacctcccgaaagtgaccctctgccccctacacagaggagcgacccaggcagcccctttgctccacacaggtggtaccgtccgaacccgaccccctcgccctgcaagggcggccccgcccgctccccagagcccaggtggtcctgtctacccgccaccagtcaccattaggcctctctggatcctcaccagattctggcgtccgatgactcctgggcgacggccgcagccacttgttttggatctttctggcaccttctctattattacgcctgcgtcacctcgcccctcctccttcccccaactcgcgcaggtgcgaccgccacgccccttcggcgcatgcgcagaacgaggcctccaagccccgcccttcctgggccgcttgacctgcccccaaccgaagcatcttggttcgcgagtgctgcgcttgcgcagagcgagagcacgccgcctcttgggctgtatctggtacccggttccaggtccctacttcctgcccgtgactcaagccaccggggccatgtagcgccacgtcacgagtagttgtaactactcatctcataaactacagccccctcctgatcacgagctagacgcccacatcaccactgcccctagttgcccgtggcaaagtaacacaatcactactttcccgtctcccagtaaactcccaggccttatatgatctggtcctgggcactcctccattagattgtccctcacttctagtgacaaccagggatctacatctcaactgtgctctctcgtgatcccaaatggaaatcccgcccccccaccaccacccccgcagtctataagttccttcccctgatcaaaaccagaattccctcatctcacgttcaggacggatacctccttccaagcggcaacagaaccctccattccgactgtgtacatctcgatggcgtccatcacgacccccatcacagtcagatgtctccacccagagccaaaacggcccctccgtaaccccttccaatctctgccctccagggtcgcccagatacccgctccctaacttgcaacaactagagagggtctgtcagggagtctaggctgtggtgtatgcgtgtccccttaccgcggggccttgggtgtgacggtcgccacgccccccacttaggtgactcaaggtcaggacctgcatgtacttgagacaagtcccctccctggacctcttcccacccccgcaattaactcctcttgggagtcgggagatctgggtcctgcctagcactggcccagtactggctctgcctgagctgtagcagtgaattcaaaagaatcggctgcgcgcggtagctcacgtctgtaatcccagcactttgagaagccgaggtgggcggatcacacgaggccaggagttcgagaccagcctggccaacatgatgaaaccctgtctgttcttagccggatgtggtggcacgcgcctgaaatcccaactacttgggaggctgagacaagagaatctcttgaaccagggagcagtaagcagagatagtgccactgcactccagcctgggccacagggcgagactttgtctcaagaaacaaacaaacgccagg

SEQ ID NO: 67640 - DNA, 1264 bp, Homo sapiens
actatcattaaatcaaacgaagagtagggagaataggaaagcaatttaacaaactgtgaaggattctgtcttgctaagtgggttgtagtgggcgcctacagtgtatgagcgctgtgcatgtgtgatatcatccaatcccctaaacaatctttgaggtggctgtgactcaagctcacttcacaccagtaaaacagaggcccggagaggagaataactccaagtgtgtcgggctctaaagctgtactctcagaaatgctccgtctcttcagctttgaaatgacatctctgtcaaggtctcccgccgcccagttcactccatgggcccaacgctcaccaaaggttgcccgagtttctctacagaacttgccgacgcttagcccgggagcgacccagagaaatgcgcaggcgcatctcctcgccctgagccccgcccacagggcgaagatgtgtgcgtggataactcccagagccccgcctgtgtggcaacacgcaggcgcaaggtcgcgtgccctgcgctgcaggctctgattggtcgccacgggtaagggcaccgcccaatgggaggtgtggatagtgaggggtcccacacgcctggagccgagggtctgtgtcaagagcggcaggggctgcaggagataagagaaacgggtgagggcgccgcgcggggctggactgggaagagaacgctgggcggacggagggggcggaaggaaaactaaggggtctgcagggatcgaagagccttggggcctgcgctagggcgggagcggcgcgggctggaaggagagcactccttcctgtgtgccctggggctcctttagtgtgcgggagcctacgctggaactcgcccaccacccactgctgcgagctctcaccctgccgaggagctcagtctggtaggagacaagcgttgtaaagcgggaaagttgaatttccagggccctagtgggttccttcctggaaagacttactgatatactgtgtgaaaaacccccattctttccctaagtagttcacaattcaagagtgggagaaagaatcgtagacgaggaaagggcaaatttcaagtctcccgggccacctcgtagacatttattgggtacctgctttgtgcaagctttgcagcaggcactgggcctcgccctaggggagttctctgttggaaatggggctgtaatcaaggaaaaatggaactctcgggcccctggttgcctacttccaggaaggtcctttgtggaatggctgttgtgtgcaggggcctggc

SEQ ID NO: 67641 - DNA, 3827 bp, Homo sapiens
ttttttcagagccaatgacaccataccttagaacaattattaaaaaagtataaccttagatccatattctgtaggaaactgtgacctaccctgctccattccatttttgttaaaggagacacaccaagccatgtattttaaaacatggactatggacttggtttgaaggatatgctgactcccaatgtctttatatctaaaaggcagtaactattaattctcaccattggcagtacagctcaacaagatttagggtgggtaatgatgccaggtcttggttttaatagggaagatgatctgagtaccaggtttggaaagcctggccctattctttggggacaaaacacagtaacctcaaagccctgcttctaagtgatattcgctccaaatccccatcttctgaaggacagggaatgcagatccctctttttcggggttggtcttattcttgttctcttaggagacaataaccctagatccccatttgcaagcgactgtgacctctgatccaatattataatgaatagcaacatcagatacctgttcttaaggctcaaggacccaagacctcaataatggaagaacagagacttgtaacccgtttctttaagtgttagtaattctgatccacgagtaattctgatctccaagagatggtaaccccaagactccttttcctgggaggaagagggctcggatccccggtatggggaggcacagtgacctcgagctcctatctaagcacatgaaagaatctgatggatgtctgaggagctttgggaaccctaatcaccaccctacacgggcgccactagtactcacggcccagcttcaccccgggcggcgggaagctagtgcctgcgccggggcctccgctgcctcctccgccgctgccgccgggtccacccccggagctcgaggccccgacgcccccacccatggccccgacagatgcctttccgccgccggtgccgcctgggccggaggccgagcctccggggccgccgccgcctcctccgcctccgccgccgggctccgcgaacgagctagtccgcgccctgcccgagcccccagggccgcctcccgaaggcccgccgccgctcatggcgccgagcacaggcccaggctgcggggctcgggctgcccgggctgccccagccgccgccgctgccgccgcctcccccgggccctggcctcttccaggccgcgccgctctggcttgggctccggctccggcccagcgcccgccgcggggcacgccgggagatgcagtccggctgtcgtccgcgccgccgtcaccgccctcggcccgcacagagagccgcgtggcacgccgggaaatgaagtccacaaaagcctcagagtagaccgcgggaatgatgggcgggaatgacgggtcacgctgtacgtcgggaaatggagtccagggtaatctgtcagccgactgtacgacggggagccctgaagcactttaggaagcagagagcctgatgcacgctgggaaacggagtccactcactcagtctattagctgtgtatgcctcccagagctcggtgcgctctgggaaattgagtcggcccgcgtgaacctgcgggtctcgggccgtgaggcaagccgggaaatggagtcgtcgccacgccctcaccgcattgcaggtgtaaagcgatttttaaagcacgccgggaaatggagtctcaggtggtttttaagccccaggtggatactgcagttccggagatgggcgaggaaatggagtaggtttacgcgctcctctttccaggtacgctgggccgcagtccctgccgggaagtgtagtcagcaccaaggcctcagtgcagttgccacagcgagccctggtgtgttctgggaaatggagttcgacgtatcctccccattgactgagggggcgggatcgcccatgagctccaagcatgctggggaatagtccagacctgaccctctgtgaggccagtctgcggaggcttgccgggaagcgaagtccaatggccaccatcaggggcgtgtgaacgaaaggttagagactgcggcagttccctggagagacttaaaagtgtttcagcgcctccttcctcgcccccaggtccttctttaagaaagagccgaggtcgatcaaggactgctggaaaatggatccaagcacctttaagttccaggtgaccatagatcaggaaagaaaaaatgtcccctctctaaccgcaactctgcaaagattcgggaaacaaagttcccggcggtttctcagaacactaactagtcttcggatacagtctagcttttcctagcaatgtggttcgcaccaggaagctgaatggagcattaaaaagacggaaatgtcatttctgggcctggcgctgtggctcaggctgggcgccagtagctcacgcctgtaatcctagcactttgggaggccgaggctggcggatcatccgaggtcaggagttcgagaccagcctggccaacatagcgaaacccccgtctctactaaaagtacaaaaattagccgggtgtggtggcgggcgcctgtaataccagctactcaggaggctgaagcaggagaatcgcttgaacccgggaggcataggttgcagtgagccgagatcgcgccactgcactccagtctgggcgaaaagagtgagactccgtctcaaaaaaaaaaaaatcctgtcttgaaccaccattcagttttcagtttttggtttgttttgagacagggtctcgctctgccgcccaggctggcgggcagtggcgcaatcacaggtcactgcagcctctaactcccaggctcaagcaatccccccacctaagcctcccatgtaggtgggactacaggcgtgcaccatcacgcccagctaatttggtttggtttgttttttggggtggtggggggtagcggggtgggcttcgccatgttgcccaggctggtctccaattcctgggctcaagcgattctacctcagcctccaacgtgctggtatttcaggcttgagccacggcaccgggcctcccactcttgtgttttgcatcctccgcttcctaaattacaagatcccggaaagccaaaaataaggaagccagctgcctcaggttttgtgtactcagtgagtcgtcctatttatcgattaatacccgaaggagagtagcccccaaaaggcgctgggaaacagagttcctgtgtctgtatgtgtctcttcctcccccggaaatacttagaagtagaatgaaagcgttctcagcccctcccgcatcctggaatggtgggaaatggagtctctggacttcacgttaatccgagcttgtgcttatactaactgtcctgtcctttctgaaaccagaagaaagtcctgtccactcagtttgttcctgactgcaattccccgcggacacaactgcgggggtcggtagcgccaaagcctgttgagactacattacccagaaggcaaagtgcggaacacttccgctcccttcacaaagcaggtggccgcaccacgcgcggctaggcgcgggcgtttctgggagttgcagtttcccagccaaatggtacctgctgccctctgatggcagctctgagtcaaaaagtaaaaatttcagtcgagccccttggcctagggattccaacgcgggaccaagacggctcaaaagggcggcgacatggggcaggatagcgagggttatttaaccgccagaacccgtggggcatgcgccgctgcgtgtgggcaaccgccacgaggggattggggtccgtgggagtttgaaggtgacggtctgcaatctatcaggatgtttgtagaggatgagaatgttcata

SEQ ID NO: 67642 - DNA, 4037 bp, Homo sapiens
gctcccagcccctctcagggaaccaagctccatgttacttccacctcagccccaatctggctctagacctagaaggggggccaaagcccctgagacatcaatctgggggtgggggatgtactgacttccaccctccccccaaaattaaagccacccttcccagcccacccgccccagcctccgtgtcccggtaaccaggcaacgtgtgtgcagcgacagtcctgggagcgggggagcaggaggctaaaaataaactttgcagaagagagggagtgagagagactacatgcaacacaaagggaactcggaaaggaggtgggggggctctggaaaggcctcaagccgcattctgggagctgtcccaggcccccttgttaaaccccttccctgagcaacccctcctccagggcctggaccctggctcccacttctggcagggacccttccccactcccaagcccaccacaacggcggctttcctcatcggacacagcatacatgaaggcctgttcccggctttgggggggggagaatgaagagggggtgacgtcagggtgtctcaatggggctctgttccccaggccttggagccaggagccaggcacgggcaaggggagcatgtgtgagtgtgctgtgtatgcgtccacgtgcttaaaacagggaaacaccagacctgcacggaggaagcttgggggtgcgggacctcgggaacatgggggccagtgaggcagggagagagcaggcacatggagagaggggttcaggagactgcgagacagagtgcagaagtggcagcagtcagacagcaagggctgggatggcgaggtcccagaagcacacctgggtcccacagaggcggggtagggattctcccagacagactatgcaagcctggggggacaaaactcctgggcaccccccaacctcacgtgacggcccaaactttttttaagggactatgagggtcggaagggaggagtggtggcagaggaagaacacgccggcctcctggggggccccaccacctcccccactccaggcggccctctatggcgccagagccgggaagaaaacaggaagtgggaaacagccacggcagagagagggaccgggatggagaactggatggaggggtgcggagcggcaggccaggaggcagacgggaaagatgcaccgatcggaggccattccaggcctccttcccctcccctcccccagccggaaaacccacacactgtcccgccccccgacagggttggggaagcgacccgcggatcctatcaggccaaggccggtagcagggagagaagatgaagcgaggttgtctgggtgcctcggcctcctccttgggcgagggtaggctcctgctgcccccagggcccagccacccgggagcgagtggaagccgggggagtgtgtaggacgcacgtgactgaccctaccgcactccgcaccccggccccacccccagggcccctcctcggtccgggtcccaatcccctggcgccggatcccagctcggagccctttaagattaagccgcccccacccgccgagcagggggatggggatgggaatggggtgggaatggggtggggatggggtggggtgggtgggccggtcggggcacacacccgcacacaggagcccgagccgccgccgccgccgccgccgccgccgggggaaggaaacaagtttgaacagcggcgcccggcccccttccccctcccccgtccccgccccgggccggattccgacggggtagacgggcagggggcggctgggacccctccccctgcgcgctcgggcgcaaagtccagcccgcgcgagcccgggggcggcgggggaggggagggggaaaagtccgagtgggagggggagttaatcccgctgccccccgcccgccgaccgagggggaggggaaccttggccccttaaggaggagcaagttggcggggaagagaggggcggagggaagagacggcccgctgaaagagaagaggtggatccgggagggggggcgaggggggagcctctgcgtctccccccaccttccccaccctcctcaaccccgggccaccggtggcgcgggaggagggtacccaggtctccccggagccaccttaaagccgcgcgttctaaggtcggaaacaaaaagttcctttttcgaacgttcgggctgcgctttggaactttgcgactcggcgagggcgggggagcgaggagccgacagaggcgggcgggggaggggcggcgcagccaggaccccgagtcccgggctccccactcacgccctcctcctagaggccatcccgtatcccccgctaacctggtgcagggcacgcgccgccgtgaaggtcaccagcaggaccgcgcagcgcagaaccagggatagcgggcccggtggacgagcccccccgccccgcacacgtcccggcccccagagtgcaacgtgacaagagcggaggggaaggaccccgccacccccgtgatcccgggagtgggggagagcccggcctgcggggtcccggtagggatacaggaccaagacccgcagcacccacaccactccgcccggagccaggaatcgggggtcccaggcagcaaccccgctcgcgccacgagaagcaacaggtctccagtgcttgaggggtcccccagaactggggatcactcgggctcccccggaccccttcagcccccccaaagtttctccgttcggtttcccggggcaacaagtctcccccacacgtgctgcccccgcccccacctgtgtccgccggggtcttcatgctggggggcccggggcgaagcgccccgattccgggccgcggctcccggcgccctcgctgccccgtcccgtcccgcgcccgtcgggccgccctcgccgcctcacccggcctcgcctctcagagcctctcccctccccgccgccgcctcccgggttaatatcgcactccggggccgggacgcccacgccccccggccggcgacgtcaccgccgcgtcgccatggagacactgcgcccgccccctccccgcgcactcacacacacgctcgtcggcgcgcagccactgaggaccggccggctctgggcttaaaggggccgcgcggcgggggagggaggaaggagggggtgggggtgggatggggtcccgcgggtcatgaccctagtcagaggctccgagtctgcagctaacttaagtcttcggcactcgctacctgctgcccctcctcctctcctgcccactgcgggctccagagtttcttttgggagcctgtatgggaaaacggggggcccttccgaggaagcgggggtcagaaacttttgtggggagggggcagaatcttctctgcagaggggcggggtcaggaccttagaagatgatgaagaccacagcatttcccagcttggttttacccaaccccccaaccctgagcctgaatgggggcagctgtccaggggtggggtggaatgggtgggatgcatttcccagcatcggaaatggggaggcggctgtgccctccgctcctgtggggatggggtcttggcttccctgataacccccgtccagctggggaggaagtgaccagagagaatgcatttggaagcccccaccaccaccgtccccaggctgcagctgtcccggggatagggctggcgccggaggtccccccacgtccactactaggaccgggggttccggaggcggggccgggatacgagggggcgaccaaagtctgaacaaatgtgctcccaaggggcactgagggtcgccaggagagaggaagacagggcttaagatcgaaagccagagcgtagagaagtgttaagtctccgttctctgcctcagccgggagggaaggatgaagcctgaggctctgggaaacaggaaatcacagcgcagatctgatggagcccaggagccggcagcagggtagaggccaaatagaagcaatattcacaggcatagcctggaaacagagtctcaaaaaagactctgaggttccgaaggaggggcgtatgggtggcgggc

SEQ ID NO: 67643 - DNA, 4015 bp, Homo sapiens
ccgtatctgggcagcaggcatctactacaaacagggcatctccctgtcctcctccactccagtgtgataccctcctacccctgggatctttaaaaatctgcctctgtcaggggcgtacacccacaaagtgtagctctccacgtaatgcagtgcgaagccccaagaagcgctgcatttcgtcatctcggccccctgccccaatgcctagtgggctgtcaaactgcgctgtcctaaatgtcaaactcttggaggaggtgacctgtcccccgggccccaggccgcgcgcgttgcctatactgcagcgcgcgacaccccacaagcgcgcgttctctcccctcccggtggcaacagggctttccgcggggccgcgccagacttttcgagaccgtcaattggtcgtagtcccggccacccggcagccaatcaacaaggggaaaggtgacatcactggttctcctcccctcccccaatccaaacttccctactccgtctaccggcagcaacaaccacgtgggggaggggtaagagagtagaaccggtgaggtcattgcaccgccccggccgctgctgattggctgcggggctcgcgggtggcggttggctgctccttgcacctccccctcgtgccgctaccgctgccactgagaggagccaccggcgacgccagagccaggaatacgggtgagtcggggccctgggtctaagatactcctggcgtccagtgagactcacgacgaactgcccttttcgactttttctcctcgccgggtttctttggtgctccaagcactctgtcacatgggagttgtagtctgccttgtactgtcggctatgggccgaagacgtgagaagactacggttcccagcaggaactgcgactagccggtcaacaaacgttcgggccacgccttctacctccgttcattggacaacccgtcccttagcccctcctcctttcatttcattggctactgtccctcacagaggctgggttccggcctaggctgcatggcgactgggtactgtatttgtcatttggaactaagacggcctgcaattggacacgactggtgtccttcacttgttgtagggtagggccctaggcagatcaggcagtcgtaggctcaggttggtgtcggtcccggagggaggccggtcttggactttggccccgccccctagcgctgcccgatgggcccaattggtcgccgcgagcgtcgctcgtcgtcgagaggcggagccgaccagtctgcggatatctattggtctaggctggcgccggtcagtggggttgtgatcgctgattggctggctgctccagctgttgcaggtccattcaccattttgtgtgttggagtaaaaaaaaaagggagaatcgagagggagagccggagggggggcggggagggaccggaccggaccgagccggggccacggccccccgccccgaaaccccgccgagcccaaggtgaggggcggggccagggctgacacaggaaaggggggtccggggggctgggggccgagaggggacaggtggcagggacggggagggggtacagggggaaaggggtgggcggaatggtgggaagggaggagggagtggaggaagtggtgggggtttgacagaaaaagggtaactgggggagggggtggtgggcaaagaagggtaacaggaatggaggggtgacaggactagatcagggtgacagggagagggaggggacagagttggagagtgtgacaaggagaggtgatggggagagaaggtgacaggtccggagatggctgacaggacagtgactgggaggaataggtgacagagataaatgggggtgacaaggagggggtgacaggagggggcctagggcattttaaccgagaggtagagatagaggtagtgacaggatgagagagagagtgtcagagaagctggtgccaggagggctaatgggaacagagggtatgagaccccaaagagccagggcctgggctggcctgggctccgggagttactactcagatctgaggaaggtgagggcccccggggcttgggtgggagttattcagacagggtggacaggaagagagtaggccctaggggaaagaaagcagctctggggcgaagagaggctgggccaggcagcaaggtctaggggtccaggcggcatagttgtaggccctgggtggggtatgcaaaggtttgtgcttggaaaaaactggagccagatctcagtccccaacatggtagtctagtgggtcagcgggtattaggtggtgatggctgcccaacttctgggcatttgggtgccagccccgggacgccctccaggctctgcctgtgaggaccccaggattggcccaagaaagggcaggcctgggactccagggtccacaggaggagcaggcccctagtgagagagcatgaggtcaagggtcccccagtagctggaagactgagtcggggttgcctctcattgtgtttggcttatggttctgggtcccccaaccctcctagaggcctctgttttggcctctcaggttctcttagtcacttcagagtaaagttttttccccttttcttttctcagggcagctcgaaagggggcgggcagtaatgactgttcaggaagtgggtgaggttggcctgttgggcttgtcctgctttctttgaccttatcccacctatccccacttggagttggagggcatatttgggggcctgcggggggctagccgactcagccaccctgccagagccagcccagccagggcggggatgcatgcaggcaagaagaggggggctgggcttgcgggtatcacgctgggtgctgtggggggaggagcaggctcccatccagtgggacagagaaaccctggggtgtagctctgtgtcccactgtgtgatgacgtgtgcgtgcttctgtgcgtgtgtgtgtgtttgtgcgcgtgcgtgtgctcatgcacggccccgtggcagtgctgggtatgagctcttgccccagacatgcccctgcctgctccctgccaggatctggggagatggctgtacctggcagccctagggtgcagagcagagtgggcagccgtccctcgggactctcagctgcccacttcttcccacagtgcctggccatgccaggctgcccagaggggcagagggagggtgggggggtggagaaaggctcatatcacagcccagtcaccaccctttttgtgacttggtacttgtgcatgtgtgtgtgtgtctgagtgcatgtactctctgcatggtgacagtgcgagtaaatgtgccctctggatcatgtgacaggcagcacactgaaatggtcaggagcacggactctggagccagagagcctgggttcagaccctagcactgctgtttcccacctggatgatcttggacaagttgtctcatctttttgtggctcagtttcctcaggtgtgaaatgaggccgatagtagcacctgcttttagggctgttgtgaggatgaaacaggttaataaaggcaagcttagcatggagttcaggacacagggagtgctccataggtgtgaactgttagtgcttttgatgtccccttggggcattcagagcatgtgctctgtgtcctttgcagagccagcaggtgtctgttccccaaggagccagagtgtgtatactcaggggactcaggtgctcacctgtgcctggtgctgactgaggtatcacatgagttgacagcagccagagaggaggccttggggatggtgggatggagacagtagactcagcaagtgggaaatcttagggtacactggctctggagaggttcctgagttgctccgcgtaatcctccgctctcccaccctgcaggtggacaaaaatgaagccaatgaagaaggcatgcactggcctttcaggtcctggcagtggcagcaagtcccccccagccaccagggccaaggctctgaggcggcgaggggctggggagggtgacaagccagaggaggaggatgacgaggcacagc

SEQ ID NO: 67644 - DNA, 1116 bp, Homo sapiens
taggtgtcagagacccctggagaccgccctggaaaggcaggagttgggaagaagatggcttggggaagaggaggagaggaggaagagcttgtgaaggtgcaggagtgagtcttggtaactgtagaagagaccccagctcccccagcttagcagcccccagcaccaggagctgcgaggcgtcaggctgcctcctggcggcaggcggcggcgggacagcaggcgcgcgcatgcgcggcagagggggttggggggtacgtcccggagcccccggtgcccgggtattaatggctccattagtggccgggagggaggcgcattagcggcggcgacggcgtctggctcccattaccaccggcggcagcggctgcaccgcaggcggctggaccctagcccgccgcgccgcctcctccacccccaccctatcccctgttcccgctccccacgagggcccgggcagggaactcccgtccccctatttcagcggaaaagctgattgtgaagccagatagatttgggttcaaatcccggccgtgccacctcgcggctgcaagatgctatcccccctctgagcctgtttcttgcgaagtagtcggggaaaccgggtgctccgggggctgtgtagaagcggactggcacccagcgagggccgcgcccagcccccgctggcacctaggggtgtgggttcccgcgcgcccctgggtgcagacctcctgtgtcgggcctccgtccttctcattggctgccgtctcgcccgctgaccgctgattggccgagacctgcttctccgcccctgagcgattaacccctgcgctgccgcgtcctcgggctgggtggggtaccctccctcccaccgcagacagctcgggtgccagctggccggcgccccgccgcggcccgcgtgggtgtcaggccggccgggcacccgtccgccctccctgcacaaagcggctttgtggagcctgccgggggttggctgggggccaggcggcgagtggaaaatctcgtgagcgcggggaggggaggggaacgcagggcggcgccccctcctctgctcgggccttggcgcctccctcagcccgcgccgaccaaccctcccagcccaagcgcctgtacacc

SEQ ID NO: 67645 - DNA, 1014 bp, Homo sapiens
cccgaaccgcccccctggctcggtgcctttactgcagtgcgccctccctgccaccctcctaccgcggccccgcccccggccggctcggggccaaccggagcccgccccgccctgcccttatttgcatatgactgacgttcccccggggcggccaatgggggcgggcgcggcggggcctgacccgcgcgcggcggcggcagccaatgggctcacgcgcggggggccgggcttgcgcggaaggccgcgggggaagcggggaaggggcggggggaggcgcggcggggggaggggagcgcgtagtagtggcggggcggggaggcggtggtggttcggcgcggggctcgctcggagcgcacggacgcacgcacgctggtccgtctgcccgcccggggccggaggtcgacccggcgctgagcctcgggcccggggcccggaaaggcggggcggcggcgccggcagccgggacgcgcggggccagagccgttacccgccggagctgcgagggagggagggaacgagcgagccagcgagcggggaagggagggggccgcccccgcgcacgcgcgtcgcgccccgccccgcctgccccgcctgccccgcccgccggactccgcgagggaggagggagagggagggggcggtgccgatggcccccgtgccgcgcgccccgtgacggcccccgcgcgcgccggggggcggggcggggccggtgcgcgctgacctcccccgccccccgggcggcgggaggcaggcggcgctgtgcgcaggcgcgcccggcagagacccccgcgtggggcggccggaggggggcggcgggggggggggcatgcggcgacggcctcccgctccccccgggcccaagcggcgacggccgaggagcgggctgcgggcggagcggcgtcggccgctgaggaggtgcgagcccctgccgggtcccccctgcgccggaccatgtattcggcccacaggcccctgatgcccgcgtccagcgcggcctcccgtggcctcggcatg

SEQ ID NO: 67646 - DNA, 594 bp, Homo sapiens
gaggtgggggcaacaattccagtaccactgcccccaacttcagaggaaccccataggccaggtccctgacttgctgtggaccagatggcccctctccagtttaggagcctgtgcgctccgggagcctcaatgcctgctggccctgttctcagccattggactgcgtgagtttggggaaggcctgaggcaagatgccactggatggtttaccctcactggctctggggtcattcgtactcaggaaacaggtcccaagaggtcctagcccagaggtggcagtgggtgggagggagcctagtctacctggaatacccttggtcctcagtgtgacccctgctgcccccatgtggcctgggcctgcactgcaactgggcttgaaggaacctcccctgggtgacacccctcctgctcagcatgtggacacagtgcccacctgaggtgacaagatacctacaccctgtgtggagggatgacaactaggagtgggagggtcaggacacctccacagaagtggcatctaagctagagatggagcaccaggaagttccagccagggcaaccgcatatgcactgggtcactatgttcccagaatt

SEQ ID NO: 67647 - DNA, 1564 bp, Homo sapiens
ccattccgggggccttccctcgggtccctggcagaaagacattttaccccttcttgccaaaataaaaaaggattcgtttttatctataacatggcttcttttgcatcttgatggtgttcagcggcggggctgagccagaactatgtcaggctcgggacctcagtgtgtccatctgtgaaatgggaatttggaaccggaggcaggggcctgtataacctgatctttatgttgccccagaatgtgggaacattgaagatgatcaaacatctagcagggtcttgcaccgctcctttatttttgccttcctttcctcactcagaggtagaggcgccctccagtggcccatgctttgctgaaccacaggcacccagagtttgggttacgatcttagcactgcgcatatgtgtatttctctccctccaggaggacgctgctgcgcatgcggttgggaacaaatgggcggggatttccccggaagtctccctttatggagggttggggttgggcgctccgcagtcctcccagggccgctctgaccggccgctctgtaacttctcgcctcctcttcgccgtccctcccacagcggctgctcggctcccgccccctcgccctcccacagcgggtcttcccgcggccgctctggcccaagcgtcccctcgtctctctgatctggcccatccggcttcggagggaggcgagggtgggtgagcaaagggattgggtctgtggggtccaggcccgaacccctgaagacgggctccgcccccggcacccgctcgcgccccgcccccggctggaggagtctctcctggaccatccgaacctagcctgtcccggcccgcagcctctatggaggctcctgccgggccgtagagcccttcgccccctggggacccacccgtctataaggtccgtttggcctgcagcagcctgagtccgtaatgctgggcactgttcatgggatcggccccctatggagccctgtgtctataggggactcctacggtccctagggttcggccccgtccataatgactccatatacagggccttccatcgctctatagggctcagccctcggcttccagagcctgtcagcagtggccgtacccttcgccgggactgccgggtctccgggacctcttcgatctacaaggtcatgttatgcctatagaggtcgcatttgcagggcctcaccccgggtagagggtcctctccaggtttttacggcctgtccccgctctaagggtcagtgcaggaggcggcgatggccctgggcaaggttctggccatggcactggttttggccttggccgtgctggggtcgctgtcccctggggcccgggcgggggactgcaaggggcagcggcaggtgctgcgggaggcgccaggcttcgtgacggatggtgcgggcaactacagcgtcaatggcaactgcgagtggctcatcgagggtgagtggggccgcgtgggtcactcactaattcgctggtagttcattcatgtgtgcattcatccactcaccacattcccagagctcggttctggtccaggccttttgct

SEQ ID NO: 67648 - DNA, 765 bp, Homo sapiens
ctcctgaggcgccaccccgcacctgagccacctccttggactcctgtcctctaccccttgaggacctccctcccttctaccctagctgtcttcttgaacttgggactctcctttcccaagacttccatcactagctcctggagggactggactttgcatcttcccttcgcgtggagcctcagtgtgagaggccctagccaatgcgtgcatgtcagaggtggtggggaccacatcagaagaagaggggggtgatgaaattaacaaataaaaagtatggggaaaacccaggtgtctgagcgcgtctgcacatgtcccagcagggctaggtctcaactctgacccagccccgcatgctggataacttggataattgcccttatgatggtgccacttccaagctggggtggctttgttcctggctgcccctcttaaagggggaagggggaagggggaagggtatgccccaacagaagcataataaataccaataaacagctcttgtttcccagaagggacgcgctgagggcagacgtgggcagtggaatttgacccttccctagatcttcctcagggaaaccccagtttggctcaggagggaaaacaggctgccttggtcccagctacggctttttgttgttgttttgttttgctttttgaggggacagagtctcactgttgcccaggctagtgtgcagtggtgtgatcttggctcactgcaacctctatatcccgggttcaagtgatttgcatgtctcagcctcccaa

SEQ ID NO: 67649 - DNA, 656 bp, Homo sapiens
gggacaaaatggatgtaggcggagttggttttcaggtttttattgtgggtgtatttctggcagcgggacaggggtggtgaggcagtccctcccaggagtggccagagaaggccagaggcgagactggtggaaaaggacggggaagacagggaacttccttactctcggatcttcagttcccgcgccatctggcagagggcgcagggcagacaaaaggtgagggccgcccagtcgtgcccgacggagccctagagggtaggagagagcggtcaggagccccgcggtgggtcccaggaggccagtccccagctccctgctcccgcgggtccccagcccggcgcgcacctggatgtggtagcgctcccgcatgccggtgcggatggagtgcaggcctccgggcaggtagggcgcgcagcagcactcgccaaagtcgtcggagatgcggcaggcaaggcacagaggagcaaaagtgccgcacagacctgggcggggcgcaggcgctcaggggcggggccagccggggcctcccgacggctccgccccggggggggcgcggttgattcgccgcggaggggcattgagggtcccagccaaggagaggtcccagagggaattagaggtccgaggagaggatggcttagcgattggaaggcagg

SEQ ID NO: 67650 - DNA, 723 bp, Homo sapiens
ctggccaacatggtgaaaccccatctctactaaacaaaatacaaaaaaaaaaaaaaaaaaaaatacaatggggacacaggattagaggaaatggagccataggaggccaaggcaagggattggcgggttcttctgttcactctgtactggccaagttcctactgcatgctagacactgggctggagcagtgaccaagacaggggaggcctctgccctcccggggacggacattttaaaggggagactgccctgcaccaaggcagagctgggccctgcccctggctgtgcgcccagtaggccagagggcacctgatgcctggctattgtggctgggatgctggtttgggcagccccgggatctctttctcatgactctagggtcacggctgggacacagggaggagctggctggcccagctgggctgatcaatacttgtgggttcagccctggtgaggggaggtttccaggaatgcctgggctgggttgctgaggataggctagcctgaagggaagcctggagatgtggggtgggagggggaggctgaggtgcggggaggcccagagagggccagaatgactatagggtcacatggctccagatccctccctgaggggtctcaaactcaagtgacttcaggggccagacaggtaacaaagagtgaatacatctcttgcatgtaggacaatagagagtagtggatatcctggtgaaaaaagctct

SEQ ID NO: 67651 - DNA, 1272 bp, Homo sapiens
ttcacattgcccttgaaatgatcacaggggcactgcttctttggcagcccagacactgtcatgaattttcttctcggggctctcaggaaccaatctggaacaacagcattgctgcttagatgggagagttaatacatttgataggagggagtaggacagagctttaatcgccatcttctgtgccttgcatttccactgcaatggggtgggaaaaggggtcaacagagaacagtgtccatccagctatttgaatgccagtatttctgagttgtttttcctgacaactttgggcaaggtttgggcaagggtttgggcaagggtttggtggcaggtttggagggtgcatcagaatatcattactccaaagaatgaggagtaaggcttgggtgtctgcttttcagtggctactttcccttggggaagccattttgcctctctgctttcagtcttgcctgtgagtaaaataaggctgagaataggattcaggaagcttttggaaggccaggaaaaaataaaaaggcttttggacggtagctctgggttcttcaggaaaaggataaggggcagggcgcagcctgacatttggctggctttcccctagaccttggagaagtccagttcttgcctgagagtcaggaagaaagtgggcacaggtgctgcatgtggcaggctgtggagaggggaatgggtgaggtcagctgagataacatctgcattggtctcagaggggcccaagggagagagctggggtcatggtgatgccatcgctgttgttgttgctgaattactgacctttgcactcacattcttggccgccttcctggagccatctcctagaagcctggcctcggtccctgtggcctctggcgacccctgtcggaaggaaacaggtcacatccagacactggaaagggcacagaaatgatcctcccagcattgttctacctaggtcagcacagttccatttttccatttttacttcaagaatctaggttacttcaagagatgaatattttatttttatttatatttttgagatggggtcttgctgtgttgcctaggctggtcttgaactcttgggctccagtggtcctcctgccttggcctcccaaagtgctaggattataggcgtgagccactgtgcccagctgaggggtattttaatcgataagggattgaggtttaaaatctggcctatacataagcatattcaaaaatttaatgattaaaaaaatctggcctagagaaaagcttagctgaaggtaggtggag

SEQ ID NO: 67652 - DNA, 1122 bp, Homo sapiens
cagattcttaacaagaacgggttgtccagctagggtgtcttcatatggctgggaatctggagtaggcaagagaagattagcagcctggggaatttcctgtctagcctgctggaggcctggaagatagttgcctagagggccggtgtctgggacaaggttggggccgagcaagaaagtgtgtccatgtaaaagttcaaatggactgtaccctgtagcatctcgaggacaggctctaattctgagaagggcaagaggtaaaagtactgtccagtcctttttaagttggagactgagcttggtgaggtatgtctttaaaagaccattagtccgttctacctttcctgaagattgagggcggtaaggggtatgaagtttgacttatttcagcctacagagagtaggatgagaattggtgagtgtgtatcagacacattttggctcaggatggaaaagaactgtcacagtaaagtaagtttccttgggaaattacaagtttactggtggagttcaggcctgagctgggtgtctgaaaatacctgttagagtgatttctaaggttacaagggcagagcttggcttgaaactaggtttcccactgataccacatattaggtattatacaaactgtcttttgcaatgagacacggccctatgatgcaggctgagctctctgacagttacttcctgtctttgtgggcgattgtgattttatctcctttgtgacctggactttacctcctaccctttgctcttgccagccctcccacttcctttactggtgacaaggtttaagtgcatttactgatgatggtcacaaggtggcagcactgcctcactggtgtttcctaagacctctgcttggacgtgggccagtctaaggtgctgttaggattaagggcatgaatgaggctaaaggtaaactttattttcctttttttatcctgtgaagtaacagaatttgaggtgagtgtgaagtaattgcatttgagaactggaagtgccatgtgtggtggctcatgcctgtaatcccaacactttgggaggctgaagcaggaggatggtttgagcccaggagttccagaccagcctgggcaacatggtgagacctcatctctacaaaaa

SEQ ID NO: 67653 - DNA, 758 bp, Homo sapiens
ctcagcactttaatagctcagtggttcccagaaagtttgtgggtggtgtgaaggctcttatcaaaatttcctaaagagccttttaaaaatatttgcacctggtcatcactaagatgacagatgctctttaatggaactgaatgcttgggactttaagaaatgcaactgagatttttttttttcccccttggaacacaactgagtaaataagtgacctaagggcagaggaatgtaacccaaaagagggagaaggaggaactgggtttttaagtaggaaaaagctgtgatgccttccacacccactctgttgctgtcagtgagacagcagtgaggaagtaccactccctagtacaactccttaaaccatgagtcctgaacagcccttcactaatccattccctgtccagatgatgtgtacctggatgagtcagatccccatgagtcaatcattcttctccgtcttcagctcctccatcctcaccactcagtgctatgtgctatggtctggccccacttcccaggccattagtattggcctaagaaagcaagactgggaggggcaactgagaaggaagtcagaggccactaggcatggaaagaggcaggtggggctgtcattgctcaaaggccacacactctgggtgtgttttatgactgttcctggatttgaaatcttttcccctttgtgatcattccagagactcaccctcctcctgcttccttctcatcacactatctgttcctagtgcatccctttt

SEQ ID NO: 67654 - DNA, 635 bp, Homo sapiens
aggtttttttaataaacatagaaattgaccttccctagtcttagaactctaaacttgtatctgtctcatctgagttccttccttaggaaacctaccctcaggcaaggaactgaaacccatcagatcctcacacccagacaacgagataccagactcctcatccatcgtgactgcttccctacccctccctaatttctgttttcccaccttccctgctatataaactccccagtttcagtctgtcagagattgatctgagactttatctcctgttgaccttcactgcagcaccagattcaagccctccttcctggaaatacttgttgactcagtgactggcattctgtgcagcaaaccgcaggactaggctgaatgcttggtatttcagtaataatttcctgtgagaaggaaggaagtagttagaagaaagagcatgatcgtaataggaaactaaaaactgtgcatctatttcaatatttcaatatttaaatatatttaagcctgtcttatattaaaaaatcccctttttgaactctacttctcttactggcttctaccgtatcactctcttctttttttagaagcaaacatttatttatttatgcttattatttttttttgagacagtatctcgc

SEQ ID NO: 67655 - DNA, 869 bp, Homo sapiens
gaagaaaagagaagtttccccaaaatggggtctgtgtcacccctgtttttcccaaggagtcccagctgtcagaaattatcttaggtcctcttatgtgggcatgaaggtggcaagaataaaaactggagaaagagaattcagtcgtctgagaagaaaaagtttttgttttttccagaaaagtaagatccaagaaaaaaaccataaaggcctttaaaacgtatgcatcgcttggacatctgctttaaattaagccagcttttaaccaaatctcttattactagattctagttaagacaaacagccaatatttctggcttttggactttaccaaaggtaacttcccagatgaaaccaataagttttaactaaggttatgacttaactgtgggtgtaccgggtatttccaaagagttggtaagcagtttttacaagatatagaatctctaaaggtagcacagagaaaggaaaatttgagaagggaagccagaagttgttcatggatgggggcacatgttctcaggatctcctgagggttatgtcatgggcaaaaacaaacaaacaaaaagtaataaaaataaaaaataaaaaagaagttgttcatggagaggaaaggaattaataaatggtaaaggtcacacaaataaaccagaaaggacttattccccaggctggaaattgaacccaggccaccattgtgaaaagatgaaatcttagctactgagctacaacattgggcagtttctgttattcttcccagaaggagcctagagcagccaattttgaacttgctaaggcttttaactgctcaagataatttttagggctgtgacatgagcccccaaattcctgccctccagatggcagagacc

SEQ ID NO: 67656 - DNA, 1551 bp, Homo sapiens
tccttctcctctggacgaaacagggctggctgatggaattaaccaggaaggcttcaaatggggaaattggctcatttaaactcctgctagtattaaactgttcctcagtcctatgtaagttaagacaaaaaagttatgaaactcatgtgagttataggtataggattctgttaacaagtatatcatatccagataaatatgggcaccttaaaagtagttgtcctgggaataaatacacatctattcaaaaaattctgtcatcattactcaaaatattttggtcaacttgccatgtagagttactttcaaaaccagtctgaggcctacaagaaaatcagtttcacttccttataatcacacttaggatttcagatacttgctagtctgtttatgtttattggccttttttaaatagttacccctttttatttctctagccccaagcaaggaaagctctgggttcacatagtgctccaagtacaggacaaggctcacatcatacagagcctaagcaatgaagaaagattggcatgcttcacaagactttgacctttaaacaaagcatggtcagtctgttttctccagtgtcctgtttctgctttgtgatcccctcccccactctttttgtattaaagaacccttaaacctgaggctggggacatggccttgaattgtcctctcagaggaaactgggagaatgggtagagcgaggtacttcagaggtctctttttccttctgctcgtgggtagttagttaatgatctaccagcagtccccactcttggggagactgggatcatgttccagccgcacatcacagcttagggcagagggcactttgtacacagagggagctgcatctgactttcctacttcatctgtagagtcagtagccatctgtagtcttgcatgttctcagttttcaggctccggatatgaaaatggatctttcaattttctttctctctgactctgctctgagggaaaatgaggacgtttactagcagaggaaaaagaaatactgaagtttgcaaaaattgatagaaagctgggctccctgctcatcatgcctccttcctccctagcagtttctaaaccctcagaacattacagtgagattttagctgatggtacaaacatgtctacaggatttcctcaagctggggctacattagaaggctttatactttggccatctgacctgcttttctcttttccagagtattctacttttcacaaataggtatgatctaggagttcagcctccctcacccttcactaattgcagaataagcaatgcagaggctgttcagagagtatcttatctgtggggagagggagaggaagcactggaacacttgccaggggagggaccagagggcataattataaatgaacaaccctggagcagaataggggatgagttagacacaggaaggaagctaaaggaagccagagaatttcaggaattgagggtatcacatggagaaataaagagcgagttagacagaggctgttggtggtccctaccctgacacctgaaagaactcc

SEQ ID NO: 67657 - DNA, 2030 bp, Homo sapiens
gggatttgtgtgatgttggttgcaccccagtgcctgggataggctgcagactcctgtggatgagttagtgagcattcccagggctcttcatgtcctggggtttatttgccaatatctgaggttggtggctcagggctctgtttaatgccccttttaaaatgttttccttaattgtcacgctgacttaaattgtgattattgtcagcagtttttgaaatttattgctcattgatgattcagttggaaaaggtaaaaaatgggagattgtttattcactaacagtttcagatcactgagactttccttttatgatctctatccctttcatgtcctctctcctatttggctccaagagaagccctctgtcccctcttagagctccatcctccccagaggaccctagccattctctgtgcgccctctttccgccccttcccagggtgtcctcccctcacctgtgagcagaagcccctgccagggtacacgcactctgtgaagtggggctgagaggtgccccatggtgtctcctgctggccctgtcttcacctgtggaggagagcttgggctccaggaacgcttcgagcacggctgctctgtcacctctgctgttttccactctctgtgctgagcctcctccctggggcccagagctttgtctgatcatgtgtgctggggcggggtttgtccaggaagctctgtttcctctcctctcattcctacctttgtccttactttctctttcctttctgtctacattttggtttcccagaccacactttgagaatcaaggctgatgagacctctgtccccatcaggggaggaggatcccccctctccagcactgacctctattgtgtcctggctatgggtctgtcagcagcacacagagaaccctggcatatccaaatgtggtaattattttctttgcaacacagtgagctgccaggtctccccatgctcttcagtgtgctgggaaggtaggaagacacccagcaggaaggtgacagaggtggctctgggggatggaaaggggctcactgggggatgactggggagggaccagccctctgtctctagtgtcaccagcctggcctctaacccagggacagagacccaagtccaggggtctcaggtggagctgcagctcccggatatggagggggaggtgtcctgtgtgtcctgggaagagaggactgtgatagagggaggtgggtggctctgggctctactgtccttggggaagacttcagggggaccctccctcccttgagctgaggctcaaggcctgtccatgttctccctgaccatcctgggtggtctctgtcctctgcgaggctgattgtcctgtggtcaccgcaccttccccacaggtggtgccaggagggaatggggagctgcacagggacccctcacagaacagggtcctcagaggacccaggaagggacagagcaggtacatgggagggcctggaagggtgttttggagcaagggatggaaagtgggctctaccttcacctccttagcaaagccaggttcatgaccaggggaatgtttcctgagtgttgtctgtgtgcaatgtctccccctggagggcaagacaaggcctgcagccttgtcaagggctgccccagggatgctgaccagggtctacatgatgtgagctggccctgacccctgggcagatgtgggctctgacctccaggcttcaaggtcaagtcaccccaggtcctgttcactgcgggtccccaggctgcccagctccatgcggtgcaggatgagcccagggagaggacgtgagttgtccagaggacttctgtcaagattggagagaactgtccaccagggggatgggctgccttagaaggagccatctgtcccagaggtttgaaaaacaaaagcaaaaacaaaacaaaacaaaaaaacaaaggcccagtgaggtgcctttgggggcttgagaatgaaatcctgtcacatgtggcaacatgaatggaagtgggctaggaacagaaagttaaacatcacatgttct

SEQ ID NO: 67658 - DNA, 2203 bp, Homo sapiens
gaagagtctaagtgagatgccaatggctcgtgtgtctgcccacgtgaagaaatccaacttatgaaaatggcatcatcatgaggaaacagttgtatgtggcacaggcagtaaaaccatcagatagcacccacctggtcacctccaactggtccgcaacaccaccagtattcccattatgtgtatgttacagcctttgtagttgtcccacaactacaaaatttaaaaattgctattgtcaaaaaaaatattaaatatgaaggcgaatatgttgttccacttttttttccccaccctttttgaactttcctgtttcagttttggaagtttctattgacacatcctcaagctgggggttccttcctcagctgtgtgcagtctaccagtaagcatcaaaagcattcttcatttctctaacagcattttttttctgagacagagtctcgctctgttgcccaggctggagtgcagtggcatgatctcagctcactgcaagctccacctcctgggttcatgccattctcctgcctcagcctcccaagtagctgggactacaggcatccgccaccaagcccggctaattttttgtatttttagtagagacggggtttcaccatgttagccaggatggtctccatctcctgaccttgtgcctgcctcggcctcccaaagtcctgggattataggcgtgagccactgagcacagccttctctgagggattttaatgagttgttgactttttacttagtgttagaacggagtcacaaattttaagcttgttatatgcctgacaggaagccagaagtctctaggaagtgacaggagaatgtgagctgcatagcaggttgaggatggagtcccaagtgatacaggagaaatgagtccatgtgctttggggactgcaggcctgtccagcctctgacaccctggtgagtcagtgcaaagattacagcagtgacagcaaactagcatgtctgagtccatctggcatctagtctcaggctggctgtcctcactcgttcctgggcataggccaggctaaccttgggaggaatttagtttatggtttgactttgaagcaggaatgataatagttcctccataaaactaacacccttactttgcccagggacggcctttgtcaaactagtgaaagaccatgagattaagattataggagggaaccgaattctgctaaaatgtaggcacagtttatgtaatccctgactgctccagtgtcatttggcaagagtttacaaaatttgtaactaattgctcctatagataacatcactattgtagaacgcgagactggtcttttgagatgtttctcattcttttgcattctggcaaccggctgacctcattcatacctatgactaatggctcagccagtcatgtggtccctacctagaggcagattcaagcacaaacagatcatttccctccgcccgcatgattccatcaccaaacaatcaccaaaaaatgagcagtactcaatttttagtcctgtgaccctgaaactgtccttgaaaatctctaacccctgctccactggggaggctgatttgagtactaatcaacctccagcctcctgtttggcagacttggagtcgttaaaatctttcttgactagaaaccaacatttcaataattttgtgtgtgtgtgtgtgtgtgtgcagaaggccagaagaacttgtctggcaattatgagtggatggaggaactgcctatccctgtcccattgtcttgtccacaggtcagcctcacaaagggaaagagcccttgaagggaatacagtagaagctcattctcttagtgacctggggacattggctcgagatgaagcctggcaggagtggcaactccaggtgatttctgcacctttcctatttcctgggaggtgggccaggccacagtgttagcgggaaaggaactgaacagccagactagtcagagggagtgtctggggaaggcctaggggtgggggaagaagctgtgcaggacagggcttgccagtcagaatgaagtgggaggaagatgagggacacagagaagaagagagaggcagagacaccatggcagtgagcagtgagggttacactgacttcagagaccccagggaccaggtgccccagttccacagtccaggaccaaggagcccagagaaccctctggtggccaaagagcttcagagttacatga

SEQ ID NO: 67659 - DNA, 1188 bp, Homo sapiens
cctgtcctccaagtgggaacacagccagttggaaagatcagggcagtaaaatccagagactgtgggaacccagaatgaagaacaatgtcagccagaggttgaggctgcagtgattgcactactgcactccagcctgggcgacagtgagaccctgtctcaaaatcaaaacaaaacaaaacaatcagggagcatttggatctgggaaaataaaaggagctagaagagcattttgggcagaggaagcggcttggcacaaatgcatgaaagttgaaaagtacaagaagtctgggggacaaactccagccagggtggaagaggatgtggtggtgggaagaacgtggtgggagaggacagtgggaaggccagctcgtccagctcacggggggtttggtcaacctggggatatggggagcctcagaaggactgaaaggatggggtaggagctaggaatcatccctctgggagatgggttacaggggtggagagcagctgcctcgggagtcctccaagcaatgagggtgagacctaagctggggcctgggcggtggggctgaaaaatagatggactagacagagaggatcaggaagcagaaaggataggacatggtggttgacgggcttggaggtgagagacagggaagtgtacagggcaaagtccaggactctggcctggtgaccaaagggacagcaagacaaacagtgtggagaagggagttgctgaggtcagccagactcctgggtcagagggaggaggggctggggcctggattcctggatctaaggaaggaggatctgggggtctggacttctgggtttgagggaggaggagctgggggtctggactcctgggacagagggagaaggggctgcgaccgagatttctggatctgggtgagaagggagtatgaagtagccagtaccctaggaagaagagcacatttctgtctcaggagagagggcctgggagaaatatgtgatctttgaggataaatgagggcctaggacccagcctcataaaattccaacatacacgacacttgcaaagaaaaaaactgacaaaatcacaagtcaccattttccaacctataatggtaactgacccaagcaatgaccactgatggatgttacaatcttcagataaaagattcttttttttgagatggagttctgctcccgttgcccaggctg

SEQ ID NO: 67660 - DNA, 2289 bp, Homo sapiens
atctttcttcctcggagtatgtccctctctcgaggtttttgtctatttgtttctctgagcatctctgccatttatttctgggtttccctctgtctcgattcccctctctctgactctagtctcactgtgtctctgtctttttggggtctttgtctctcagtctccatgtctctgggtctctgtctggcttcttgatctctctgcatctcttactcgtttggttctctctgttctgtagtctctcctgtctgtctatctggtctctctctctctctctctctctctctctctctctcatttttagagataggttctgctttgtcccaggctggggtgcagtggcgcagtcatagttcaccgcagcctacaactcctgggctcaagcgatcctcctgcctcagcctcccgagtagctgggattacaggcacgcggcactgcgcttggacaatttttgtattttttttttctctagagacagggatttgctatgttgcccagacttgtctcgaactcctgggcttaagcaatcctcccctcggcctccccaagtgctgggattacaggcgtgagccacctatctggttcctctatactagtctctctgtctctgtcgcccgtttgggtctatctccgttcttggggcctccccgtggctctatctggtttctgtctctgtatctggtttctgtctgtctgtgcctctgcctctctggctccgtgtcctggtgtatctctctctcagtagtctctgctatcactcggtctctctccctgtctccgggtctctgtctttctggtttccctctacctgtctacctgtctggccacctgtttgggtccccgtcggtccaagccccccgcgctgtcgccctcgggcccctcaccgcgtcgcggctgctctcagtgctgctgccttctcccacttcttcttcctctgcctgctgctcagctcccccgcggctcgaaggttccgccaggacttcggatgcctcctgttcccgggactcctcgggatggccctggggctggacctccacgtcgcattccgggaccagcggcggcggggtcccctcctcggggctgcttcgcgtccccatggccgctgggactcctgcggggtgggcgggaccagaagctccgggggcggggcctaggacggctgagcgccgctcgcgtctgctccggggcgcggagacccccccccaaggaggcggggcctaagagttcaaaggatggaactgagcgttacggaggcgtgtcctgaagtttccagaggcggggcttgatggctccaaggcgacacgccaccggagacgggaccggaatttgagtccgggtcgtagcacgccccctactgacctcttcgaccccgcctcccctccctcatctctaggtgtcaggccttgtaccctcccagcagccccctacaatctcttggattcgcttagagcgacccatcttctccctccgagactcagcagttcggctcccgccccatccttcccggagccccgtagtcttagtcccgaccccactgtgcagggcaaccgtgcccacgccgcctcacccagggatccaggagtcggggctctccttctctgaacaagccaggagtcggagtccttgagattccgaagtccaactgccacctccccacagcctcggccccctcacgagctcaggcttcggcgcgctccgctctgcgcgctgggcacggccgcttctgcctatgagacaggtggcaggggaagagggaggagagaggccgcccggtccccctccccagcagcccggaagtggaggggggacaacaggtccaacagctcccgagggaggagggagccacgggcttgccccacccgtggcctcggcatccggccatcccggccccaccggccccggcccggccccaccctcgtggaactcagcatcgcgacctcccagtctccctcgagcccctcattcctgcccccctggaggagtcttggccacctctgtatgggagcctctctaatgtccagaccttgggagttcagaaaggaaggcaggaatggagatggggacgtctcccctctaatgagcccttcagaagggccctgaccggtttggggagctggacaaggggaaggggtgccctgaactgagtcagacacctgcccagagactgagggaagtgtaccgccacccccccacaactttgctatggggtggagggcagaggttaaaggtctcagccagaccctttcctctctgggcgaaaacaggaaaatgaaaacaggaaaataact

SEQ ID NO: 67661 - DNA, 2724 bp, Homo sapiens
ggctgactgcactccagcctaggtgacagagacccagtctcaaataaaaaaaaaaaagaaagaaagaaagaaagaaaaaaaaaaaacactgaagctaaatctaccatagctaaacccttcgttcatttcaagacatgtttgttagcacctattatgtacaatgtacatacatgtacaatgcatttttgcctgcttccagagaaaggcttgaaataaagcttctgtaaccattgtagctgaactctcttcccacacacagccctcatttcctctaaacactctgactcaaatgaactgtccctatttggcaaaactctctaacctggaggctgtcttctgtcacctgacattctgtccccaaagtcagccaaactttattatacatctttagcaattgatcagaagaatgccctgccagctgtttccctctctctgagggcaactcccctggccctccctccttcggcctggttgcaattctggccggaaacccgctggtgcctgtggcaaataaagtgaggaaggcaggaacctttagacttcccagtgtgaggcaacggcagggctaggactagggtgaggctgttggtgcaagatttaaggaggcgctcactcacaggtgcggaccctgcacttacaggaccctgagagcgagtgcctccttaaatgttgcactccagggtcctcaccgtccttttcctagtcctgggctccgggttctaagcacccagatgctccttcctcaaacggaggtttccgcaagacaggactgggtctctttccttctcagccctgccctcagaattccagcccctaatcaacttttatggagatgcatgccaggccaaagggctgcccctaagctttaggaaggaaactccttaaatgctgttgacttaggagttccgccagtgccccacctgcccagagcctcttgccccagtgccccacctgggtttatggtgcccccctcccagaaatatgagctcaggggtcagaaacccaggtcctgaggtccctcctccccaaggactcaggatcccaggcccccagtcccctcttcccttaagtttaagaagtccaggccaccaccctcttggggacccagcacccaactcacgaagcgcccgaagcggatggagtctccatcctcaatgtgtaagtcagcctgggccccactaaggcgggagatgacagactggcagccagggaggagggaacggagcagccccgagcctgtaatgtggtccgcgtggcagtgggtattcactgggagagagaggagggacaggtccggagggtacagaaaggacctgggagtcccagcccagatccttctccctcagactcaggagttctgggccccagcttcccattccactgacgctgcagcccagccccgctgggatccatgagtttggtccccggactgaccagcatagagcagccgcagccccagctccttgatcagctgggcatcccgaggcgctgtttccaggactgggtcgatcagaacggcctcccgggactctctgtcacccagcaggtacgtgaaggtgcagctcacaggctcgaacatctgggaacgggggacccaggtgagggcgcagaaccggacttccacccactggaggccaagtagtccagactgaccctatcctcttcctaagatccagaagcagaaaccccagcccactctttccccgggagtcgggagtccggagccccactaccttcccctatcagaacaaaagagttccaacttcctaacatcccaaaatcagggtccccagcacgttctttcatagaggacccaggggtctggccccaagcccagaggcccccagaccactcacctttaaaggacccaagagtccagccctaaacctccaccccgctttccgcaagatgcaggcgtgggtccccccggatctctccctattaagagaccccggagttccgtccttgctgccgcctagtgcccagcagtcccctcctaggtccagccacccgcacctgccgcaggaggatgggggctccagacccgccgcgctggctcagctgccgccgggcgaccctcagtacagcctccgccatcgcgcccactgcggggtcaggaatgagcggaggccgagcgcctgcaggagccgggcgctacggcactgaccccgggaagggcggggcgggggcggagcacgccttaaaggggccacggacgcctggggcagagggcgggggaccgccgagcgggactggggcgagggcgagaccgaggaaagccagagtgcaatgcctggacgctttgagacccagaaaaaacagagaacagggagacactcaaagtgcgagggacagacgctcagagacacacagacatactcatgtaggaacagagatagggagagaagtagaaacccagggagaggccccagtacactcatagcctcggggccgttttttttcctttttcttttgttttattttgagacagagtctcgctctgtcacgcaggcttgagtgcagtgactcgatctcagcttactacagccttaaactcccgggttcaagcgatcctccaacctcagcctcccgagtagctgggactatggcacgttgccaccacacccgacattttatatatatatatttatatctatatatatatttatatacatatatatatatacacacacacacacacatacatgtatataaaatttgttt

SEQ ID NO: 67662 - DNA, 1305 bp, Homo sapiens
ttcaccatgttggccaggctggtctcgaactcctgacgtcaggtgatccgtccacctccgcctcccaaagtgctgggattacaggcgtgagccaccgtgcctagcccccgtctagtttggaaatcctgggctcaagtgattcgcccgcctctgcctcccagagtgctgggattacaggcatgagacagggagcccggcctaggcactttctagtctaaacactttccattgattatcatatttaatcctaaaaacgctccattttatagatgaggaaacaggcctagaaagagagctagaaagggtcacacggctagaaagtggcacagccgtattccaaaccagttacccaggcaatctggctccagagtccaaataaccccgccaaactcccagggatcgccagaccttgcgggttatcggactgagacccacccatgcagaggacttttatgggcatttcctggtcctttctgcaccaggcaggaaggtgcaccgccactgctcgggaagaatgctaagctgcatgccaccccaggcctggcaccaagagcatgggccagggcacctcgggaccacccaggcttccgagggggaaggtagatgggtgcgtggctgagaatcttgaatcacccaatagcgaggtgtgccaaggcgctgtgcaaataacgtgccttttattgggcactggctctctttgagcccggagtcccgcccccgccctctctcgaagaactggccagactttttgcaaacgccttgaagggtagaattagcagcgagctcttgaaactgcctctggagatggaactcagcggaattctcgaaaagaagagggacattaaaaagacgggtgcatgcactgatttccaagcgcagtttgtccatgttagtcttgtacatgcttgactccagtcagccaccgtaggccccgccaccggcggtgcactttctgtcgatacggtagcttcgcgcttgctcacgaacttgcctgcctggctggcgcacccagcccctccttccattccttcttccccctctctgcagcctctgccagcccgcactgcgcatgctttctgacgccccctttggtccagcgtgggaggaggggatggaaatgaggttgggctaagcagcttgcgcgcgctcccttgcctgccctcccccgacgccggacgcgcgccgggcggggcagctccgctggtccgagggcagtgcagcagcggcgacagcggctgcggccgtggccgtggcgggaggagccggaagccccgcccccggggaggggccgtcctgcaggtgagg

SEQ ID NO: 67663 - DNA, 2989 bp, Homo sapiens
gctgaggcgggagtattgcttaaggccaggagttcaaattcaacctagccaacatagcgagaccctgtctctcaggaaaaaaaaaaaaataataataatagagctaagccttgccccaaactcactgggggagggatctcatggacctccatggtcgcacctaggtgcctagggtctcgactaacggacccagccagaaagccggcactcacctccgcagcgcttctgcctggctctgcagcgccgcccggaggcgctctagctcctcgcagccgtcgctgctgccgcagttcgccggtagcacaaacagatccgcagctcctaaccccgcgctgttcagcagagctgctgtctgatcacgggcctgggcggcagtctgtgaatccccaggacggaggttccgcacagccagtagcggggtccctcgggccagggcggccagcgctgcctctcccagggctggagccaacggttccccgttcccctcgggtccgggcagcaccagtaccagcacgttggcttccgccgcccagggccccggcgctgcgggtgggcagctcagctcgcccagaaaaaggcctgggcccgcagctcttaggctgggaaccccggagtccggccgtccctcgggggcctcgagcgtctccacatccttgtcgcacagcgctgcgatcagcgcggacttccccaagcccggaggccccaggaacaaggcggtcacgtcaccctgcggcggaggcatggctggaaagcaacgggtagagaagacctgggtcagggagcacctagccttttcctttcctagccgccccactcggaacccaggcctcagtccttcaccctgtccccttcggttcttgagtgtcactctccaggacctaaaaaatccagagcccagaccctattcccccagaatcccaggcgtcctgtctgtccgccctccctctagatggaaacgtttccctttctgcttcaaaaactctgaaatcaggcgcggtggctcatgcctgtaatcccagtgctttgggaggccgaggccggaggatcgcttgaggccaggaattcgagaccagcctggccaacatgtggggggactctctggtagagtctccgtctcgataaaaaataaaatttagccgggcatggtggtgtgcgcctgtagccccagctactcggaaggctgcggcgggaggatcgcttgagcccaggacttggaggctgcagtgggccgtgatcacaccaccgcactccagcccaggcgacagagcaagaccctctctgaaaaataaataaaaataaaacctcagaaatctggcttccagtccctcctccctcggacacattgttattttcatctttccccttcccccttccaaatcaccaaccgagcaaaaagccgacccacgggagagagcgcagtcggtggcagtaggtcagcagctgagaagcccggcccctgggccgcggcggacggaggccgaagaggccagggagcggtgatttagagatgccgggacccgtcccggtagctttaacctgacgtcactccctctcccaagggggtgtgtcttggaaggccgacagcagagacccagcccttcgccgcgcctgcgcagaacggccgaagtgtgcacgcccctctttggcggcctcagggcctagaacaatgaatgagtcaacgcgcctgcgcgccacgagagcctacccacgcatgcgcaaaaggcttagctagctaagccgcgggaggctgaacgtcatcaaacgcgccatagggcagagaaggacccctcccgttattttgaggaccgggctggtgcgactatactactgccggatggcaaatccgggatctcggctccgagaggctcatctggcaaaagggcgcggaaaccacgggggccctgagactgagtggtccctatcccacttctctctggggcggcgctgtagccagcggctgacaggcgcagcgaaaggcagccctctgctgtaaggaggaaaactgaggcctgggagcaggaacctgtaggcagcgcttgagggtagcgggatagcagctgcaagcgcgcgtgggaggcgggggctctgggcggaacaaaaatcacaggatgtcagaggatgtttcccgggaagaactgggataaagggtgggtatcactacctgccccaagacacttgagattgggatgacgctggtgtcaaagatcaaggcttccacgctgagttcagggagttagtttgatgcagcaggtcataggtcacaccagtgagaagactctaggggagtcccaaacccaggaaatccagtcctttgggaggtttgaagcttcttttagcaagaactccatcaattagagttcaaggagatagtatgtcgtaggggtcaaaggcaggcaaggagagcctctggcgatgtcaaaggtcatagacttagggtgccctctaagactggtaacagatgaacagcttcacttatgcacgctcctctcctgactagaagggtcccagcaccatggaggacccgaaccctgaagagaacatgaagcagcaggattcacccaaggagagaagtccccagagcccaggaggcaacatctgtgagtacacatggctggcgggctagaggagggtggggtgcaggagctgatgctaagatctctgtggcacttcggtgtccaaggcgccacagagttttgcctgttgagaaggggctgtaatggtccctgagctgctctagcaggaagtgcatctcctcacaccagcttatgtggccagagtactcaccctcctctggccacataagcaggattgcaatgcttatgcattcagagggatagggtggcttccaggagaggcttgggttggagatgtggctgggaatggttctattgggagagaaaccccaagattctggtcccaactctgccctagactttcagtgtaacttgggccttggtttccttgactgtcaaaagagggtggtacttcc

SEQ ID NO: 67664 - DNA, 1991 bp, Homo sapiens
tgtaggaaaggggcttccaggccttaactcatgtactcccccataaccaggttgggaggttagctcactgtaacctcaaactcctgtgctcaaggtaccctactagcccctaggagagcagctgggactacaggtatgcgccaccatgccaggcttaatttttactttttttttttttttttttttttgtagagacgggggtctcactatattgcccaggctggtcttgaactcctggtctcaagcgatcctcctgccttagcctcccaaagtattggtatcactgcaactagcccaaagaattaatatagctatgttccatgtgatatttgggacatacttttctaaaaggttgtatcttttggatataattgtttatctgaaattcaaatttaactagacattgtatattttatacggcaaccacacacctgggacaatcaagacattccctgaagttaccaggagacaatgcccatcagcctacacttttccaagcccacgtcacacaaggccccttccagagtattccagacgtcaggtagggccatcccttggttcacaagtcccactcctaccacgcctatggcagccaaactgaaaggcaaacacagtgctggagaccccacaatgccctgggcctatagcagtcaattcccaagatgccccgcgtgaacacaataggcacccgttccaatgctcgagcaaagagaccagggcaaaaccttccactacgggacaataacggccagttcccacaattcgttgtggcagttcttcccaggatgccttaggcctatagcgaccaccttcccagactccccgtgtggaagcgctccaagcctccaggacggtcagcggcaggtgtgggataaaaggaaccggtctcgacaaggatctgggacactctttcccaggatgcaccaggcctacgactagcggaccgactcccacagcgcttcaaggcggagcgctcggttctcccaggatgccccagggcggcacaaacgcgtagggggagaaaaagaagccctcgggtcaccacggccccagaccgccggctccccggtgacgggagtcgtcgctcccatcatgcagcggggccgtagcgcccgcttcccggcatgcctcgcgcacccctgcccgggacactcaccggcgccggcggcccccgctccggctctgcggcggcggctgcacgcccagcctctgcgcctgcgtcgcaagtagggtaggacagcgcgcagggggcgtgaagagcctagggcgcttgcgcggcgagacggactagtcctgtagcgctgtgggaagaggggctatgcgcgtcgggccgtcgacgagacccgcgcggggggcgccgtgctttgcccctcgctgcctgggtttacttggtacagcccgcggcccaaaggaacaagaagctgaagggttcgcgcgtgcgtgtgcggggcaggaacgcgccttacaaaactgggatgcgctgggggtggagggcgctagttcggactggatcctgggcccgaggcctgcttatttgcataatcctagcgcgggacaatgaaaggcctcccgcactggaaggagtgatttgcatattccccggaggggccttactccagagcgcagtgattagcatatggcgggggcaacctgagcaaagcgcatgcgcgcagggactgcagactgacgcgaagtgggtagccttgtcttcgtaggggatcagtttgcatcctgagagagggcacgagggccaggacccctcccaaccaggataaaggtttattgatctcctaggtgtcaggccccatgctggcggattctgtggtttctgcagtgaaccatactcctgtactcacggcaccccagtcgaaggagatacgcacctaattagacaactactacccagaaggtcagacctggagtgaggaacacagggggctgtgggagcctaagaggcgcttgccccggcctctggttctagaaagacttcc

SEQ ID NO: 67665 - DNA, 2063 bp, Homo sapiens
ttccttggaacttaaaagcccacctaaaccaggtgtggaggatacagtgagccgagatcgtgccactgcactccagcctgggcgacagagcgagactcttgtctcaaagaaaaaaaaaaaaaaccccacccacatgcaagctggggacttccaatgctgtttccgggctcctttggggattacccccaaacttaggaaagctggtctatttaagtgtctgctgatggacttctagggtgacttcccgaaaattaacaaatcgaatttacatatttttggggagtgtctcctcagtatttaggcatcgcttcacacactcccttcggggatctcccagaacctcactatttgcaaatatttggggagactctcccgattcctgagtatgtaagcccacttcgtggggcactccccagcccagaactgtagtcgatttgcacattttcctaaggactccctaggatttaaacttctctctacggggttctagaagggagcctcccccggatttaggcattgctttacaaagcttccctcggggaacccaactcaagtttctcgttacacgttattggggcggcctccccagtacttgacgggcagtttgcaggctgtacttggatctcgcagagcataagtttctcatttacacgttatttccgtcccccgcccccattcctgccaacccagtatcgaattgacggtcgccggccccctactcagtgccgcacccccgccggacgtcccagcgacctttcaatggccaaggcgggggcggggcctgccggagcgccccgcccgccgccggtgcgctagcctcgcgcgggctcgcggcccccttacctaacgcggctgctgattggttctcggggcgcggtgtgcgctctcccgtgacgggagtcgggtgggggcggggaggctgacccaagccacccgcctgcaaatggcgtctgggggccaggaacgtgggaaggagagaaaatgggcactccccactccgaaaccggcctcggcgtccgggttgcagcccctaaggaaagctgggccgaaggaagaagaggaggaggatgtaacgcgggcccgagctgagatcagttccctcaggcgactcgtcctgcgcatgcgctgagggctggagctcgagaactgaatgcgctcgccgggctgagcgtgcgtggatggaggcggtcggcttcagcacgcatgcgggttccggagcgggaggcgggaggacgccgcggctctgactcaatgcgcgtgcgcgcggttggggggttgagggtggggagatgagtagggaaatggatacgccgaggagccggcaggagggagagcggcccggatctggggttcgagttgtgcctcttcggtgatgttggcgggatgcagtggggtgggacgacagggaggaatttcactgttctgggctgagtgccaagaacacatgaatgaatcagacttggcgtgcgccctggaagacaccccggcctgtggagagactgccagggcctcaaatcacttaggaaagggcgcgggtccggttggaccttgaaggacaggcaggcgagggtactccagggaacagctaagcaaaggcggcgaagaccccgggggaagaggtctagactggcttggattcagggtccacctgggtgggaggtgaggcagcagaatgggcaggtcagaccctgaagggtctccagtgtcagttttatccttaaggcctgggagatgcagaatagtctgagacagaactatgtttaaaaccctcgaaggccgcgttggagaagggaatccgctccagggtcgaaaatttaaacacacgtgggcggagtcttgcgcgcgccaaagaggaacattgggcgacgggcgcggcctggagagcgcatgcgcattcggaagggtcggcagttccccagtgggcagagtgggtggatgggaaggttctagctttttatttgaaattttatttatttttattttatttatttatttagagacggagtctcgccctgtcacccaggctggcgtgcagtggcgagatctcggatcactgccgtctc

SEQ ID NO: 67666 - DNA, 919 bp, Homo sapiens
agtcccatcttcgcctgttctagactccagaatgcgttccttagcgaaagctgagaaccttttaattcgctctcagtcaacaccaaagaccctcaagcaaaagcaagagctcccgggcgtcttcgaaaaaagcgcctttgacaggtgaagccaagttgcatgctgggagcatccctgctgtccaggtttcaacttccggagactctgccgctgtggactacatttcccagaagtctccggggcacaggccttttaggggcggggcgagcttgcctgccagaagctcctctcccagcctgcgagcatttccaggctcttgtttcccatcagcctctgggtccaaactaaccacaggtctctgggtccttttccggtgtccttaaggttcttggactctgcatggtgagttggtcgtgtctgtagaagtaatcagcccgggtgaagctgggagggctcggctggctttactggggcccgactggaaccggcagtgagggtgggggtggcatcgggggtgctggaggtggggagggctgggtcacggacagagcgtgtcgtgtccggatcctcaagcctgtgtgcacgcgagcagccgagggacagtgtgtctcagacggcgtggcagggacggggcgtgtccccacggaggtgggtgcagttgtgaatgtgtgacgggctgacagggtgcgtggccgtatttgtaaatgtgatttgctttgaccaaatgctctaggttccctttagcctgtcttcgggcctgccacaattaaatgaccgcaagaaagaagtctatgctaagccccataatgaacgtttcaagcaagaaggatgagaattttagatctggaagtgtccgcgggacaggatcttgtcaagacctgatggggaagttctagaggtgggattcctagaagagggg

SEQ ID NO: 67667 - DNA, 1214 bp, Homo sapiens
ggaggctgggagattgcacgatcttgtctgagatcctggaaaatccacagaggataactccagacgccacctgttgagtgatgcactctttcttaaaaaacgggtcaggcatagtccaagaacagcctcctttcctgcaggaatcagaaagaagagccaggcgcttgctgaaaaatgaatattttttattatgatagttttaatattaacggccgacatgttgccacattcctgtactattccatacacattttacttgtactatattactaattgtcaaaacaaatatataaggttaatatttccttttgcagaagaggaaactaagaccagaaactaagcaccgaaagattaagttctcacccaacgttacaccgctaggaagctacagagctgtgggaggtgggggaaggcgggtcgggccgctgagagcccaggagatcctcagacgcctccccattcaggtccacttccaaccaggggactcccgaaccgccccgaacgcagcagctccggatacagtaaggcaatcagctgcccagccattcaactccgccctccgctgctcgccgcagcgtcttttcctgctgaccgaagtgcgagccctgctgatcctacgaccaaaccataaaagttaaaacaggtcgcggggtcccaggactcactcacttccacgagaggaatgaaggccgcgctctcaacctcttgccgcggaagtgcccgggagagcagggagctctggaactacatttcccagcatccccgggaggaacggaagccgctgccccgccccctgggcggaagtgcgggcttcgactcccacggccgaatcttatttctcagaatccccaaggggagcgggcttcgtgttctcgtcctcaaatagtcgaagtaccaccgaacccactgagcactggggtataggttcctatttccccaggggagcaaataacaaagccgcgctttcccagagctgaagtgcccccaaaagtctggaccacacgtcccagaatcctctgtagggctgagcttcccgccagcctgcaattttccttttgaattagcggggggagtctaagtcattgcttgtagagctcagcctgctttttccttttgccattgttcccttttatacgtgacagaagttgcgaatatgaaaaaaaaaaaggaaaatacaaaggaatgctatgtgtgagctaaaaacagaggtaata

SEQ ID NO: 67668 - DNA, 931 bp, Homo sapiens
agcctcacatcatcaggttatactaaacattttcctcttttcagttctctactgatcctcaagcagtaatttcttgtcagttccttgaagattttatctccacctttgttcactctccagtaatacttctgtaataattggggatatttcaatcaggaaatcattgtttatgtaatatttttgcttgaagactcaagagaaaggtaaggacgacactcagtgcaggagtccatattaccacataggcgtttcggatgggggattcccttctccggggacttggaagaagtgtggtcaagaagctatgtgtagttgcaacacttccccctggagggtaaaactgtgaacgtttactccttgggcattctgggaagtgtcccaacggtcggtggggttgcgggcacttccggtcaggcaggcggatccggggaattctgggaaatgtagtccagacgctctgtggagtcgcgggagctacggctgcgggagttaccctttattctgtgatattttgagctgttctgcgtctcgcaggcccttctgaatttcctggacctactctcggaaccctcaacgagctagcgatagatttagaggaaaggaagcaccgtcggaaagcaaaggtttggaagggtgagggcggcggtttgcgatccccgcggcagagccttcttgcgtttagggctgtcctagcatcccgagggactcggtcctgtcacgtttcgccctatttgggggtttctggggctctcagctcgcccaatccgcatccctccactactggcgcggggccgattcccccggtacaacgttggggtgttacttaatctccctgggactctttttgcttttctttaaatgggggatattaagaccttcctaatagaattgtcttgggaattgaaagaggtaatataaaagagtcttaaaa

SEQ ID NO: 67669 - DNA, 1087 bp, Homo sapiens
attttcagagaagtgttcctcatactgtggttggcacagtcactttatctaaagaaaaccatgaaaagtattcttttttagtttagaaaaattgatatagaacatgagactccatttttttaaaataaaaatataggttgataggccagaattcacaggtccacctgcctgagccaaaattctcacgcctccacagagcaaatggactccatttcccaagataccagcgaaacgcctgcgggagtctaattgcccggtcgatgcgcaggaaatttggctcccgcaggcgtttcgcgagtagcttgggaggcgtgggaattttggcccaggcaggaggacctgtgaattctgggaagtggagtccatttgctctgtggagtcgtgggaactttggctcaggcaggcggattcgggggattctgggaagtgtagtccagacgcctgtggcatcatcgacacttccggtctccgagcaggacactgctacttaacaaggtggtttgagccaagtatgtgtcttgcgggtctttgcgaaagtgaaccagttattaggggcgcctaacgacctggggggtcaactaagggggtaagaagccctggagaagacctgaggtttggagatgcgaggggtgggagggaagtttcgttgccgtcgatggagccttctggcgttgggggctgtactcaggtccaccggaggagtcgtcgggggttcggggggggcggggaagaactctgtctagtcttgtgtgcctgtttagagggttttccaggtgtttgacctcgttcagtccgcctccctccactcttaagtgtgcgacctctttctcgcgatataacgtggggtgttacttaatctccctgtacctcccattgccgttttttaaatgaggatttcaggaccatcctgatagaattgttttaggagttgaaagttgtggtataaaacaaagacttaacagctcctgtcacttggtgtcctgttaatttcccgcgaagtggtcaggtgcccgggtggggtcagagctccagctgctccggcccttctcttggagcccggcagggctctggatgatcccggacgcct

SEQ ID NO: 67670 - DNA, 1987 bp, Homo sapiens
caggccaccatgcctggccagttaaaaaaaaatttttatagagacgaagtctccctgtatttccctgtctggtctccaattcctgagctcaagggaacgtcctgccctggcctcccaaagggttggcattacaggtttgagccactgcgcttggccaggaagaaaactctttataagacatgctccttcacctatagaatcctcccgttttactgcatttacaatctcaatgtaagattgataccaatgcctagctcttcatcagtcattattgctctgaggtactgagcaattcactacattcgctgaaatttgatgtttctacatctaaggagaaatatgaataccatgaaaagtttatgggaagatagctattccatgacgacaccgcttctccactagtagctgtgatcttaaatgggggtggcttttcctgccaaaccagtggtcccacagcttctggagtaggggctggtgtcttcctgctcctcattgcccctgccaaaccattccacctggctcatcctttaaaccgttagttttaacctcccatcgtcagattatcctaatccttgaagattttatctcctcgtttgttctcttcccaataacactcctgtcatcgtgggaggcgtttagacttcaggaattcctgtctatacactattttcgctcaaagactcaggaagagagacggacgactcacagggtcacagtccacattccccaccaggcgctcagagatatggaatacgttcccggtgggcactgcggtgtgtgtagtcaaggaccaccgcggagtccaacgcttcccgctgaagagtgagattatagacattttcctttggcattggaggaagcggagtccagacacactctgagtcgcgggcaagttggctcaggcgggtggacgagtgaattctgggaactgtagtccatcaacttcatggaatggcggaccctttggctcaagcagttgaaccggggaattctgggaagtggagtccagacgctctgtggagacgcgagcacttccggtgtgtgagcctgcggttgctacataaccgcgtagtttgagccatttctgcgtctggcgggtccttctgaacttgtcaccttcgcttggggtcgcaacgacccgatgatcgatgatccaagcaagggaaaagaagccttggcggagagcggaggtttggtgggggcggggaatggggtttttttcccgtccacggaagctttctgggatgggggtgctgtgctcgcatcccgggggttggaattggcggggtcctctgtgccctgctgtgagcgtttccaggactttgacctcgctcagcctgcctctctccaccctacctgtgcgaccgctttctcgcagtgtgacgtggagtgttactcaatgtccttatactttccattgctgtttttggtaatggggacattagaaccatcctagtagaatcgtttttgggaactgaaagagataacgcaaatgagaaccttaaagcagtccctgtcacttggtgactggtggtctcttgttaacttcccgaagaggtcaggtccccgggtggagtcatagcttcagctgcaggggccctggtccttctccctaatccctgcaggacgctggatgatcccgggaggccttctgacctctttttaggaaagcgagttgcgtccgcttccacgaagggcggggagcatttaacttttatgggggaccgcgatgcagtcagggtatttcacaactttcgccttccccagcctgacctttctaaaagagctgcagggaggggacttcttggctactgagggcaaatctctatgtgattggtccttggcttttttcctttatagagatgttcacccaaccgagagtgtgtcctcgggaatgggtgttgataatcattaagccgtaattggtaacttcattctaagtgctttatacaaataaatttaggccacactgtggctctgtgaagta

SEQ ID NO: 67671 - DNA, 1065 bp, Homo sapiens
gtcaacagggtgtgtcccgaataagcagtgggtaaaggacatttactgaaatgctatctccaactccacttcaggaaagcttgctgcagagttagagtgatatagtccaaatgctctgtttgagtcgcgggccctttgtctcacacgggcgagtccggggaattctgggaagtggagtccacacgctctgtggaggctcgagcacttccggtccccaactgtgacgttgctatttcatttaccacagtagtttgagtcatttccacatcttgcgagtccttccgaacgagtctcctttccttggggctcgcaaccacccaatgatcgattcaggagaaaagaagcctgggcggagagcagaggtttggaggggcgcgggcggggattgccgttccagtcagctgagccttctggcgtcggggggctctgctagggtctcagggagtgggattggcgcggcccggtgtgccctactttgacctcgcttagtccgcctccctcctccctacgtgtgcagcccctttcagtgtggtgtggagtgtcacttaatgtccgtttatcttccattgctggttcgtttgtttgtttgttttgtaacgggacttttcggaccatcctaatggattcattttgggacctgaaagaggtaacacaaatgagagccttaaaagcagtccctgtcactcggtgtctggtggtctcttgttaatttcccacgaagcctgtcaggtcctctggtggggtcagagctccagctgcaggggcgccggcccttctgcctgatccctgcaggacgctggatgatccctgacgccttctgacctctttttaggaaagtgaggggagcatttaacttttatgggggacggcaaaacggtcagggtgtttcacagctttctttttccccagcccgacctttctaaaagagctgcaggaagggacttcttggctactgatggcaaagctctacgtgagtgatccttggctttttttctttgacagagatgcttacctcaaccgagagtgtgtaggatttgtccctcgggcatgggtgtcgataatgat

SEQ ID NO: 67672 - DNA, 1361 bp, Homo sapiens
ggagctcaggccataatgctccctcacctgccgctcacttcctgctgtgccgcccggttcctaacagtcagtggaccggtacaggtctgtggccctggagttggatatccttgctttaaaccctgagcctcctttcagccatctgacggctcaacagtcactctatctagctccttgaatattgtatctcctcgcttgttccctgtccaagaacactcctgtcaatcatgggagacatttagacttcataaattctttctattcaatattttcgctcgaggactctgggaaggacaactgtcagggtaacagtctgcattccccaccaggaacctggggctatgaaattcgttccccgtgggtgttgcgggaagtgtaatcgaggagcaccatgtagtcgcaacacttgagcctaaagggtgaggtgatggacattttccttttgcatctgaggctctgcagtccagacaccttgcgggattcctgatacttcagctcaggtaggcgtttccggagaattctgggaagagtagtccattttacgggaagtgtagtccactggctcgtggaacactgggtattttggctctggcaggtgaaccgttgaattctgggaacgatagtccagacactctgcggagtcccgggccctttggctcaggggggcgggtccggggaattctggggagtggagtccagacactctggcgcagagaggacacttccggtctcctagtctgaggttcctgctttaatgaccggggtagtttgagccatttctgcgtcttgcaggacattttgaacgaaccccctttgcttgaggctcgcaaccacccgatgatcgatgatcgtctcaggggaaaagaagccttggcgaagagcagaggtttagaggtgcgagggcggggagggtgtttattgttcccgtcagcggagccttctggcgtcggggggctttgctcgcctcccggggggtgggattggggtggccttgtgtgccctgctctgagggtttccaggactttgacctcgctcagtccgcctccctacgtatgcagtgtgtacactctttctcgcagtgtgatgtggaatgttaatgtctctgtacttcccattgctgttctttaaaatggtgcttatagggtcatcctaatagaattgttttgcgaattgaaagagataatacaaatgaaagccttaaagttgtccctgtcacttggtgagtggtctcttgttgcctgatattttaaaacgtttgatatcatttcaaagctatagaaaaattgcaaaaacagtataagaaattctcatataccctttacccaaatttgccaagtgtttacatttttcctgtttgcttt

SEQ ID NO: 67673 - DNA, 1056 bp, Homo sapiens
ctggacaatttacaaaaaatgtaataatgacacctgaaaatatgcaagaatatgccatctttacaagagttataaattaaaactacatgccatttcttaccactggcaaaacttatttgaagagtgtatcatctcgcttgttccctttccagtaacactcctgtcctcactagaggggtttagacttcaggaattcctttctatacggtattttctcttaggcacccagggagagggaaggacgactctcagggtagaagtccacatttcccaacaggcgctcgggggtacgagattcgttccccgtgggaagagtggtcaagggcttcccagtagtcgtcaacacttccctttgagtgtaatgctgcaggagtacagtccagaccctcagtggaatcgcggtcggtttagctccggcagttgggtcccagggaattctgggaagtgtagtccagacgctcagtggagtcgcggtcagtttggctccggctggcgggtcccggggaattctgggaagtggagtccaaacattcggtggagtcgcggacacttccgctcggggactgaggttgctgcagtttttccgcgatagtttggggcagttccgcgcgttgcaggcccttctgaatttcctggacctacgcattggatcctcaaagaactggtgatcgaattaggggaaaaggggcctcgtcggagagtagaggtttggaggggcaagggccgctgtttgcgttctcgtccgtggcaccttcttgggcttgggtctgtcctcgcttcccgggggcattggtacttggttgggtcgcgtctcacctggtttcagggtttccggggctctgagctcgcccactccgccccctgcaccccacgcgcgtggccacttcttctcgatataacgttggggtgttaatctccttgggtttcccgttactgttctttaaaatggggactttagggccatcctaatggaatcgttttgggaactggaagaggtaacacaaatgagagccttaaagcagtccctgtcacttggtgactggtggtctcttgtta

SEQ ID NO: 67674 - DNA, 1626 bp, Homo sapiens
gtatgtaaataatacttaacggaggggaaaaaactaaacactcaatagaaatgtgggcaaactatttgaccaattcacaaagactataatagtggcaacggaaaatatgcacggatgttccactttatttacaaaagaacaaatacaaattaaaactacatttagaaaccatttcttaccattagattagcaaaacttaactcctcgaagactgtgtcttctcgcttgttccctttccaataacactcctgttatcattggaggcgtttagacttcagaaattcctgtctattcagtattttctgtcctggaccagggagagagaaggacgactctcaggataacagttcacattccccactaggcaggcgctcgtggctttgggattcgttcccagtgggcacctcggagtggcaacgcttccccctgaagaatgagattttgagcgtttttccttcagcattcggaggagtgtaatccaaatgctctgtggagtcgtacacactggctccagaaggaggatacaagcaattctgggaatggtagtccagacgctcagtggagtagcggtcagcttggctccggcaggcgaatcaggggatttctgggaaatgtagtccagacgctcagtggagtctcggtcaatttgactccggcaggtggatcccagggaattctgggaagtgtagtccagacgctcggggtcgtcgcggtcagtttgtctcaggaattctgggaagtggagtccagacactcagtggagtagcgggccacttccgctccgttactgtgaggttgctgcagttttgtccctggtagtttgggtcagttccgcgagacccttctgaatttcctggacctacgcattggatccttaacgaactggtgatcgaattaggggaaaagaaacctcgtcggagagcagaggtttggcggagcggggccgctgttttcgttctcgtcagtggagccttcttgggcttggggctctcctcgcgtccccggggtgtttgggacttggtcgggtcgcgtctcgcctggttttagggtctccggggctctgagctcgcccactcggcctccctgcaccccacgcgcgtggccacttcctcgcgataaaacgctgggatgttacttaatctccttgggtctcccgttacagttctttaagatggggagtttaggaccatcctaatagaatcgttttgggaactgaaagcggtaacacaaatgagagccttaaagcagcccctgtcacttggtgactggtggtctcttgttaatttcccacgaagcctgtcaggtccccgggtggggtgaaactccagctgcaggggcaccggcccttctccctgattcctgcaagacgctgggtgatcccggacgccttctgacctctcttttaggaaggcgagggttgcatccacttccaggaggggagaggagcatttaacttttatggggcacggcgaccacggtcagagtgtttcacagccttctccttacccagcccgacctttccaaaagagctgcagggagggacttcttggcttctgagggcaaagctctacgtgagtgatccttggcttttttctttgacagagatgctcaccccaaccgagagtg

SEQ ID NO: 67675 - DNA, 1598 bp, Homo sapiens
cagtagacataataccatgaaaagtgtaaacgaaagaagatagcttttccatgaggacagggcttccccactggccctctcaaatgatgattgtttttcctgccaaaccagtggtaccacagcgtctggagtaggggctggcaccttctttgttcttcattgcctctcccaaaccattgtacttgctcactcttccaacttttagttttggcctcatattatcagtttatagtaatcaatcatcaatcatctactgacccctaaaaagtcattccccatttagtccttgaagattgtatctcctcgcttgttctctttccaataatcctccgtagtcctgggaggcgtttagacttcaggaattgctgtctattcaatattttcgctcaaggactcaggcagagggaaggacgactctcagggtcacagtccacattccctaccaagcgctcagcgatataggattcgttccccatgggcagtgcgggaatcgtaggcaaggagcaccgcggagtcccatcgcttttccctgaagggtgagattctgaacgtttttccctcagcattctgagtgtaatccaaacgctcagtggagtcgtggtccatttgacccacgcagggggatccggggaattctgggaaatgtagtcccgccaatcagtggagtcgcgggcacttccgctccagggaagagggggcgattgtcacggcacattccacggtagtttcttccagttccgcgactcgcgggcccctcctaatgtcagggacttaagattggggctcgctgggacctggtggtccggttatgggaaaagaagcctcgtgggagagcagaggtttggtggggcgagggcggcggcttttgttgtgtcagcggagccttcttgggctggggctcccctcgtgtcccgcggcgggaggcggggggcattgggacttggttgggtcgcgtctcgcctggtttgagggtttccggggctctgagctcgcccactccgcctccctgcactccaggcgcgcagtcacttttttacagtgcaaggttggcgtgttaatctccctgggcctctccttgctgttctttaaaatggggacgttaggaccatctttgtagaatcgttttggtaactggaataggttacacaacacaaacagtccctgtcacttggtgagtggtggtttcttgttactttcccacgaaacctgttaggtcccccggtggggtcagagctccagcagcaggggcctcagcccttatctctgatccctgcaggacgctggacgatcccggacgccttctgacctctttttaggcaggcgagggttgcgtccacttccacgaagggaggggagcatttaacttttctcagggacagcgacccagtcaggatgtttcacagctttctccttccccagcctgaaaaaggactgcgcggactgacttcttggctactgaaagcaaagctccacgtgagtgtgacttgtcatttttcttttacagagactgtatctttgtagcatgtgtaatagggcatgggcatttataataattaagccttaattgctaacttcaattctaggggatttatacaatt

SEQ ID NO: 67676 - DNA, 1436 bp, Homo sapiens
aatgctgctatgaacttttttagaacaagtttttgtgtggatatctttcagttctcctgggtatttacttaggagtgaaattgctggcacataagccccagatcgggtgccagcagattcagtgtctggtgaggtcccgctttctaagtcatacatggtccttctggctgtgtcctcacataactaaagaggcaaaggagctccctcaggccacttataagagagcattaatcctattcatgagggcattgccctcttgatctgatcacgtcccataggttccacctcctaatatcttcttgggagttaggatttaaacatacgaatttggtgggggccataaacactcagaccataataatacctaaagagaagtgagggattctgggaaatgaaaaccaggagctcaaggtagttggacacttccacatcagaaggcttggacattccggaagtgtagtccaggagggcggtactgttctgtttttcccccaactccagcattctgtgatatgtagtccggagttccgtgtagtcgcgcatagctcagctgcagtaaggctgtaaatgtttcccctgcggaatcctgggaactgtaggtccaatcgttctaggtagttgtaggcacttccggctcgaggaaggcagtgctgtggaattctgggaagcgtagtccaggtcctcctgatactcgcaggcacttccgcccaggaagacgacgtagcagccatcttttccctggctttggtgattcaggtcagcttctcaggaacctttcaaacttccccgaaatgcacttgtggtcagcagctagcggtcttttgtttggggaaaaaaaggagtagcggctaagagcggaggtttgaggggccaggatgctgttttgcgtttccctgggcggagcttgttagaattgggggcgtactggcttcgggcggctggggtgatgcttcgtcgggtttgaaggtctctcgggctgttcgctccctcattgtgactcccccacctaatgagccagccctaccacttcatacagtatcacattgagcgagttagttaatccccgtgccttcgtttgctgttctgaaggaaaataaaagcaaaaacttcctaatagaatgttttgagagaaaacgaggtaatacaaaaagtgtaaaactgcctggcacgtgaattaccaatactactgtaattttcctagaaactcccgttctgtggcgaaattctgtgagtccatgaagctggattgtccctgacctcttttgaggaaggagagggttgcttctaactggtcctgggagatgccactgtgatgtatccgggatgaagacacaatcctggttacttcatagcctgtttttcttccccagccctgacttctcaaaaagcactgcacagaggaggaggcagcagaaccccatgtgagtaagacttgt

SEQ ID NO: 67677 - DNA, 1377 bp, Homo sapiens
tgtttttctccttatgagtctgtcaatcaatttttctttataaagtttgctttacattatgtaaggctgttatagttgatagaaaattttcattactatgaagtgtttctttgtatatcttaaaatgttcttttcttcaaggactattgtactttgtccaatattaatatattttaaaattagagaaagaatatgaggcctaggacgatagtctctttctccattagaatatttttgtttatgtcaggtacctgcaaacactaacagaaaaggtttactttaatctattttcaggtacgaatgtgatttcaagttttgcttcagtcccctagtgaagatgatctatttgccctttatctttactcctgtagtgcagctctttgggttttactaggtacccttctcccgatccccaacttcttccccaaggcccttgaacaacagaatcggtaggtaccaccaagacagacacttccactctaaaattgcaaatcttggctaagatttgctctggctttctaggatacccggaagctcaggttactcggaagtatttccgctccaaggagcggaactatggccggtttcccctggggcattctgggaagtgtagtcaggggcccgcgtagcctggggcacttccgcttttggatggcggagctagggaattgtgggaagtgatccggggtttctctttagttgctgggaagttttttcgctctaggagggcgaaaacaagtgtttggatccgctgggaccctccaagttttctcagcctcgtcagggagcaagcggggccctggccctcgtctggaggaaggctagagaagctgtggccagctgggaggctggagttgggagcagtttgtgttctttcctctcggctgagcctcacgtttggagcagttcttgcgtccccgggttgggagcgtcctggatcggttgtcgcttggttagagggtctcctggcgttccgcagccagcctctcccacctacttgccagctctgccacttactagtgttataacgttttgtgagttaatcttaatctttctctatcccattctcctcattcctgaagtagagtcattagtaggaggtccttgtacttttatacgaattattcattaaatgtccaaaataccgttatgtggtaggtaccacttatgttctaacagagagacgaagataatagacctctccacacaatgtagaaaagaaagctgtcttattactgaataaggacaaccactgtatagtattgtaggcaatctaaagaaaaatattattaaaaaattccgccctatgtgtacagtcaagcagttttaaactttttatacaattctacttttgaccactatgtacatcagttctca

SEQ ID NO: 67678 - DNA, 1120 bp, Homo sapiens
gcctcggcctcccaaagtgctgggagtctttttttattttagggctccaattcttcacatatttgctgttactttttgttaataagaaaaacctaaattccactgacatcagagaactgcttcagcctggctaaacagcaataagccgtgaagaggattctggatgttgtagtccgggagctccgagaattttgtcacactctccgtaaccctctctcactcgctcgctccgtttttttttttgtttttttttttttcaagcgcgaagagggcggcacctggatggtttttccttctggaagttctgggaaacgtattccagaactctgtccggaaacaattgggccgcaggagcgcgggccttctgggaagggtagttcaggagctctgggcaggcagagccacttccgccccggaaagcgaggccgccaccatcttttgggtccgggaggtgagtcagccctgcacccccacgacccctcttgaaccttttcagcctgtgcttgggaataggcgctccccagccatcagtcttgggatggagaggtcgcggccgcggcggaggccgagaggccgagggcgggaagtttgctctcctcccgcacttggcaagcagcgccgctagttctgtgggtataataaacagcgagttacctatgatccgcgctcctgtttcctcatctttaaaatagcaataaagatagtcgttactgtgtagggttgtaattagaattaaacaagataatacgggtcaaaccttagaacagtggtggcacctgatactgggttggctcctgctattgatacagtgattccctcacaagcgccctttttactggaagctccagtgaagagagaagaaaagtcagggctttatgccatggcctttctgtcgtatccttcaggagaccgagctcttcccgaacttttacagatcttttttttttttaagaaggattgagtcatcgggctccaatgcgtggggatgtttaccgccgtttatccgggatagagactccatcgtgctgacagcatccttttattcaccgcctccgaatttgcaaagaggaggaaggagggacttcttggcttctcccagcatagccccaggtacctgctc

SEQ ID NO: 67679 - DNA, 1009 bp, Homo sapiens
tttccacatgcatgaaagcaatgactaataaaaacctaaaactctctaagaaatggtgttacacttaagttaaccacacgggattattggttataaccacattatactgaacatttattagggcctcaggacacctctggcactctgcaaatccgtaatgacgatcgcttatctgagataaaacacacaggacattccccaggctccgctggaactaattcctgtctcctaaacaagaggctagaaaagtccaagaatccaggaacggccccacatcaggcaaggattagagaagggacagcggctccgtagctggatctcctagactcagaggagtttccaaacaacaggcgtctttttcagtattataacagaattaacggtggcatccaacattttcctatgcactggttttaagcttatttctataaaacctcatttaattctcacaagaacatcactgggaacgcactaaccctttacaggcacgaggaaactgagacaaggagagattaagtaacttgcccaatattttactgcgaggagcaggcaggactggctggtaggtgcgtgaggacggctagggcagcagaccctcaacctcgaaggacgacgcgagcccgcctcccacgcaagaggttctgccgaggggacgcaaactcccgcagcctcccaaccccgccctccagcgctggccgcggcttctcttccccaagccaaggacgggttcattgctggccccacgcctaggcaaagagggctcggagaagtcttggagacccggagctgactcacctccctgggagatatctcagatccgacctcgccttcctggagcggaagtgcctccgagtgcccacggttcgtggactccacttcccagaattcctaagcggaagcgtctcagagttctctcactcctggactacagttcccagaatgctccaagggcagcgcttcccaccagctgggctttgttttgactcaagccggttgggtttgagccact

SEQ ID NO: 67680 - DNA, 1223 bp, Homo sapiens
caatgcatgtgccctgtgttccagcaacctgggcatcctcaggccccagacaagagcaccacctgaccaagcacccgcgcatgcacgcagaggacagtcgcggaatatacagctgtatcagtaactccatcaaccccggtgacccgaggctaaagcgccacccgcacagataccaggtctccccgctacactcaccaccgcttccagcttcccgcgtagaccctgcgcatgcgcgcatcggacaccaagcgctgccccacgcccctaccaacctgggcgtccgctggcccgcagcccaggctgggcctgtcaccgcctcagtgcctagcacggctctgcggcaggacgaactcgggttaggcaaccccctgccccgattctgcaacacggccgactcgggttaagctagttcggtcccctctcctagtcagcatccgcaaggccgctgggggttaagtctgaagggccgagctgctcggcgacagcaagcgtccgcgcgcgggacaatggctgctcttgtggccgaacccggaagtgcacttgggctcggagagccagaactacaattcccagaagcctccgcggcgcggacggtcagtaggcggggttccggcttctccaaggaagtggggcgggggaccgggccagaagctaagagggcgtcctcgtccggggcccgggggggcgccacacctgtgcatgtgcaggtctagggggagcactaagaccagccgcggcgccgggaggccgaggccagtgcagcgacgcatggggagtcgctctggcgtgacgtcagaatccaatagaaatggcggggaccctttctgggtgccccctgcctgtcagacgctgcgcgcgaccccttgtctcctctagtcctaggggaaacctgtgagacagttgcgacatccccattttacagtggagggagcgtctaccgaacccttcaggaatctatgtttttacatttaataatactaaaatataatcattttatttttaaattttgagttctttctctgcctataaggcctgaaggatctgttccccccacctctccccttttctctgtttttgttttgttttgttttgttgttttgagacggaatttcgctcttgtcgcccaggctggagggcaatagcgcgatctcggctcactgcaacctccacctcccggattcaagcgattctcctgcctcagcctcctgaatagctgggattac

SEQ ID NO: 67681 - DNA, 2487 bp, Homo sapiens
aaggagggaaggaaggagagagagaaagaaagaaagaaaagaaagaaagagaaagaagaaagagaaagaaagagagaaaaggaataaaagaatggctactctataggcagagcaatggcatgggctgctcaactgagtacacttacagttacttcttgattatatgccaaacaaagggtggattattcatgaattttcctggaaaggggtgggcaattcctggaactgagggttcctcccctttttagaccatataaggtaagtgctagatgttgccatggcatttctaaactgtcatggtgcttgtgggcatatcttttagcatgctaatgtattataattagcacataaggagcaatgagcatgaccagaggtcacttttgtcgccatcttggttttggtgggtttggctggcttctttaccacatcctgtttcatcagcaaagtctttatgacctgtatcttggtggcacattttttaagtgctgaaaggaaaacaactgtcaacccagaattctgaatcaagtgaaagcattctttaggtttaggagtgaaggtgaacattgaggttagctcggtttcaccttgaatatgtcttaaatcccctatgcatgcagtgaatgtggttttatacataaaatgttgtacagcagtagctgtatgcatacttacagtgtgtacagagatgctcagtacccaacaggacaaatctgcaaaatacagcttcaccattgagccatagatggagctgctgcctcaaattagagctgtatttccacctgtttctatagttaaaatttcataaattaaatgtgtgtatgatgcaagtctactgcaattcctttactagagagaagttgcaagaaccaatgatccctgtttctttatattcatgccctcatctaattccttccccctgagtgtgggctgtacctagtgactcatttctaatgaatgaagtacagcagaaagtgatggctgtcacttctcagattgggttacaaaatggctgttgcttctattttcaacttctctctcactctgtcttgaatcactttctgaggggaaagctacctgccagtagcaaacaccatctgagtgagcttgggagcagaacaatcaccccataccctcatcccaagttgagcttttgaatgacactgcagcccccgtccagtagcttgatcgcatcagagggaaaagacctggctaagctgagcccagattcttgactcaaagagactatgagataacaaatgttttattgtcttaagccactacattttggagtaattagtcatacatcaataaataactaatgcaggtggccttctgggacacagaggaggatggagaaggttgaatatcagagagcagatcttggggacaaaaacacagagtcctcatcacaggttatcatgcgagcccagaaaacaagcatctaacatctcatcaataatatgttcccacacaccaccaatacttttaccaaaaaaagtactaatagctaatatttcagtttgtattttctaaaattgactccatatggctttcctttggtggaaaaggaaaaagaaaatttgtctctgtcattaacttaatgtgatgtgtcaaattttattttattttattttatttattttttggagcagggtctcactctgtcacccaggctggagtgcagtggtgcaatctcagctcactgcaacttctgcctcctgggttcaagcaattctcatgcctcaccctcctgagtagctgagattacaggcacacaccaccatgcccaggtcattttttttgtattttcagtagagacagggttttaccatgttggccaggctcgtctcaaactcctgacctcaaatgatccacccacctcagcctcccaaagtgctgggattacaggcatgagccaccacgcctggccaatgtgtcaaattttagatgaggacacagagaacaggacagaggacctgaactttaataatcattctcatatcaaatatggaaaccacgttgttacggtttaaatgcttgtctccttcaaaattcatgttgaaacttaataggcaatgtggcagtatagaaaggtgggacctttagggggcgattgggtcatgcaggttctgctctgatgaatggattaatccattcatgggttaatgggttaatgaattaataggttattatgagagtggcattagtagcctataagaagaggaagagagacctgagctagcatggccccttgtcatgtgatgccctgcactctatagactgcagagagtccacaccagcaagaaggctctcacgagatgtggccccttaaccttggacttctcagcttccatgactgtaagaaataagttccttttctttataaattacacagtttcagatattatgttataagcaacaattagaaaatctttaaatccacctgggacctggaagccccctctgcggcttcaagatgtcctgcct

SEQ ID NO: 67682 - DNA, 1246 bp, Homo sapiens
aaccggccattttcacttattttgtggttcttcagttgccttaggccatctggatgtatacatgcaggcttgggctcagaggcctgatgtgcacatgtatcccagaacttaaagtaaaataaaaataaaaatagattctaaaaaagaaagaaaagggctacctgcggggcaggcatgtccaccatgaaagctcaatcttcccttttttgttagcaagtatacagtaagaaagaaatggataacattgtgcagctcaggctgaaaacccacctgcataataagactggggtgggggctgccagaaattcatgccctgtgcaaatggaacacctggtcctaaccagtttcttacaccctatgtagagcaggtactgcctccccaccagctcatctataaaaacccctgcatttcaccatggaccagcaacctatttttctgggaccccctctctgtaacagacagctattctctctcttttgcctattaaacttctgctgtcaacctcactcttttctttccccccaggggaaagtgtaaacgcagtcacccactaccacaaattatgcagtaacctcactctttgtgtgtccgtgtcccagttctccatggccgtgagacaacaaacctcaggtgtcacctcagaaatgaggccatttcacaacttcatcttgtacaggagctgggtaaaatagggctgacacttcctgggctgcattcccaagaggttaggcattcatagtcacaggatgagataggaggccagcacgagataggaggccagcacaagataggaggcaagcacaggtcacaaacaccttgctgataaaatgaaatgtggtaaagaagccagccaaaaccgagatggtgacaggactgacctctggtagtcctcactactctaattataacacattattagcatgctaaaagacactcccaccagcatcattacagtttacaaatgccatgacaatgtccacaagttatcctatgtggtctaaaaaggggaagaaccctcagttccaggaaatccctgcccctttcctgaaatactcatgaatgacccacaccttgcttagcatataatcaaagagtaactgtaaatgtactcagccgagtagcccatgccactgctgtgcctatggagtagctactctttattcctttacgttcttaaaaaacttgctttcactttattctatgaaaaaaataggctgggtgcagtggctcatgcctgtaatccca

SEQ ID NO: 67683 - DNA, 817 bp, Homo sapiens
ccatttatgacctgtaacccctctgccccacttcaagttgtcccacctttctgggctgaatcagcgtataccttacgtgtactgactgatgtctgcctgtaacttctgtccccctaaaatgtacaaaatcaagctgtaatccaaccatctggggcacacattctcaggatttcctgaagctgtgtcataggtcatggtcctcacatttggctaagaataaatattttcaaatattttagagtttagcttttttcatcaacaaatgacatccttagtcctggccagaagtcagaaccaactgagagagagagacagatcagcatgtcatcagtatttcctaagcaatacgcaatatcagggaatgtggccaagctgtgtagcccaatgggtttgtcatcacctcctttgcttcctgtcgcctccaatctaaatatcaacataggatgtaagtttggatgctggtgatagattaaaaatagcaatggcttaaattccatagaaatgaatttctctctcctgtaacagtcctagctggtatgcagttctgctttgtgagggtatcatgagtctgtgctcttccatcttgttctctgctatccctatgatgctgagcttgtaaaccaaaaatacaactcaaagccgccacctaccacacacctaaaccatctgaacggactccctccttggccaggccactccaaatttaacctgaaagactggttcagcccatgacgggtgggatgggggttggggttggatgtgctgaagcagggttgttcgtcttgggtaatacccgaaattcgttgcctcaagccaa

SEQ ID NO: 67684 - DNA, 11221 bp, Homo sapiens
acaaaaacatgtattgagcacctgttatatgcaaggcactgttctagtcactagggacatagccacaagccagacaacatccctgccctcctggatctgatattcaagtcggagaggtgggactaaggagggagagacagataatacaagtggacaaataaataaatcatctaaaatagcggtaaatgatgtaaagaaaacaaaacagtgtggcttgctagcaaagaggtggggaactgagttgcagcaggcattaagaaaggcctttttgatagagtgatgtgtgtgaattaagccaaaataataagatacagtcagctttgagattacatgagtaaggttctaaggagagggaacggctcatgcaaagcccctgagctggtgcctccaaaaactggcagaaagcccctgtgaacggttgtgtgatggtaggtgagttacttagcccctgtgcaccacgagaaaatggggatgctcatatctacccctcgaggttgctatgaggattcaaattaggcaaccctgttacaaggttaatgctgtgtccggcatatagtaggtgttcaataaacaccagctattagtttgagtaatataattattaatttgaggaggaaagaatggacctggggagtgagaagggtgaggaaaaagtagctagtgtagcttatccttctagaatctaaaattcaggatatagtctgagcaagctcctgataacgggattctaaacatgcctccaggacatcctagacaccaaattataattagcattgacttcatagtgactgccattcgttgagcgcctactacgtgaccaggcactactccaagcaccttgtgtccacggccctgtctgactctggggcaggcactattattaacgcctccattttacagaggagaaaagctgtggttcagagtccaaagccccgtcacctcctaccaggttgacctttggccattccttgcctttgatgtgagtgataggagcgggcgattctgcttctccctccatctcccggcggggattgtacggtgagagaatgagagcaaaacctcagagcccccttcccaggaaccctgtcccagcctggtccccacccaccaccaccactgacccgatgctagagaaggatgcggctggaggtgacttcccagccaacttggtgtaagtcatgtggggaagtggccagggtagggcatggtcatcgtgagcagggtcctgcagggtgaggccggggctgcagacgcgactgtacaggtctatgaagaccccatgtgtgatgaggagaccttctctgcacagtccctggacagaacacgagatgaggggtcctctggacgtcagctccagccacacccctacctggaggaagctgcttttaacaggtgcgttggagacagcggcttcaccacgggccagggacaaggaggagagtgtctccttacgagtccaagtcacccccactcagagctttgaccctgtcagtttgaggcccatgcagctcaggcacccaactcatgagaactcttgaaggccactccgccacaagagatgaccctattggcttcttttaggaagaagggaagtgaggcgcaaagaggagaacaggtcacctacccaagatcacagggctggcaaggggcaggatcagaatttgggaccccagcccagcccccttccaccagaatgccctgtctcacccctgcaatccgcaacttagtaataatacatataaataataacaatcataaaataataacagccgtaatagaaggtcactgtaactgaatagatctatataccagcctgtttggggtttttgtttttttgttttgttttgttttgagacaaggtcttgctctgttgtccaggctacagtgcagtggcccgataatgactcattgcagcttcaacctgctgggctgaagccgttctcctgcctcagcgtcctgcgtagctgggaccataggtatgcgccaccaaacccagctaattttttatttttagtagagatgaggtcttactatgttgcccaggctagtctcgaactcctgggctcaagcgatcctcctgcctcggcctccccaagtgccaggattacaggcgtgagccactgcgcccagcctgtcagcccgttctaagtgctttcctatagtaacatttacctcttatcacaactctttgagatcagagctgtacgatccctatttcacagaaggggaaactgaggttcagagaggtcatgtgccctctccaggtcacacacttggaagtggcagactgaagatttgaagccagatgggctggcttcccagaccacactttccagagaccacacacatctgcctctcagatagtgaatgaattgcttccttatccaggtcttaaaagttcacttctgagttgggcgcggtgactcacacctgtaatcccagcactttgggaggccgaggcaggcggatcacgaggtcaggagatcgagaccatcctggctaacacggtgaaaccccgtctctactaaaaatacaaaaaattagccaggcctggtggcgggcgcctgtagtcccagctactcagaaggctgaggcaggagaatggcgtgaacccgggaggcggagcttgcagtgagccaagatcgtgccactgcactccagcctgggcgacagagcacgactccgtctcaaaaataaataaataaagttcagttctgagccgggtgcagtggctcacgggtgcagtggctgggattacaaagtgctgtaatcccagcactttgggaggccaaggcgggcggatcatctgaggtcaggaattcaagaccagcctgaccaacatggagaaaccccgtctctactaaaaacagaaaattagctgggcgtggtggtgcatgcctgtaatcccagctacttgggaggctgaggcaggagaattgcttgaacccaggaggcggaggttgcggttagctgagatggtgccattgcactccagcctgagcaacaagagcgaaactccatctttaaaaaaaaaaaaaaaaagttcagttccatgtaattttaaaacctcaaagtccacctagttcaaagctttgctctgtccccagctcaggcaggtgtcacactggaaggaggaaagggacgtggtgggcctcttccctattttgtcagagctgttgtctgaggcctctctcagggcggagggcagaggggaggaaggaaagaaaaggagattggaaagtttctcctaggctgctgtagttttgtgatggaaacacggcatgctgtgtgttgctggatcttcctgggggcgggagggtggggtactttggaaattggctgtgccactggataaaacagcaaccagtttttagaaagtggtttacaacatgtttgcaaagtgagctgggggagcttacaaaacattgtccaaaggaaaacaaagccacagtgcaacgaacttcaactctgtaaatacaaaatgttctcttgataacagcaggtacctcgagagtgtgaccaggacaagcgtaggggtggaggtcaaagggatatttggctttatatgggtctacttttttttcctaaggagaagctcttgagtgattaaaaattaattttaaaaattatgaaaaaccttcaaagaaaatatactccccaaagtggttatctgagtattaggcttaaggatttgttttactgctttttactttactttccaaattattctataatgaggagcagacattgttttttctgatgccttgtaagaattgctgaacataattctactttttgtttaaaagaaatagaaacagccaggcgtggtggctcacacctgtaatcccagcactttgggaggcccaggcaggcggatcacaaggtcaggagattgagaccatcctggccgacatggtgaaaccctgtctctactaaaatacaaaaaaattagctgggcgtggtggcgcacgcctgtagtcccaactactcgggaggctgaggcaggggaatcacttgaacccgggaggtggagcttgcagtgagccgagattgcaccactgcactccagcctggcgacagagcgagactccatctcaaaaaaaaaaaaaaaaagaagaaggaaatagaaacaataacaagcataaagcttgaaaaaaaaaaacagtaaaagtttccaaaacatagtgtttatttctaggagtctaagttttctgctataaaaatggaaataaataaatatatatatatgagtatatatgagtaataccatatatgtagagagagagagggagagagagaaaaagagagagagagagagggagaaaggtcttgctctgtcacccaggctgcagtgcagtggcaggatcatagctcactgaaacctcaaactcctggacttgaggaatcttcccacctcagcctcctgagtagctgggactacaggcgcgtgccaccatgcccagcgaattttttatttttgtagagacagggcctcactcagttgcccaggctagtcttgaacttctggctcaagtaatcttccagccttgccccacccctccccccgcccccgcaaagtgcaggattacaggtatgagccaacacaccggcctactcttatattaaaaaaaaaaaaaaaatgcctatcaggagtgaaaggattaggtgtggtgcccaagagacgcagggattctttttgggatgacgaaaatgtccttaaattgcttgaggtgatggttgcccaattctgtgagtatactaaaagctcttgaattgtacgctttaaatgagtaaattattggctaagaaagtagattttatgtgttctcaccacaaaaaaaataagtacatgaggtaatgcatatgttaattagctcaatttagccattccacaatgtatatgtattttaaaacatcacattgtacaccataaatatacacaatttgtatttgttaattttaaaaagaaaaaatagtggcaaggttataacttaatcagtgtccagaacaaacattatgtcaccctttaaaaatgtaccattcacattgatttataaccctttattatttctaaataaggtggtgagaaaatgttgggtgaggggttgggtaggagtaaatggagcgaagcagatcccagaaccagaagacattagtagtatatggagagagacactcaacaggagctgtgggctggaacagaaggacccagccaactgtaggactaatcccttcaagcttactcccccgctgccctctcctcttctgccaacgtgcccactgacagaaaccaaccagcagcaaaaggtaaggggaccccaacaacacagctcagagaagtcagcctttcaggcagcagagtggagcagagaagggtagaaaaccaatttttgcaacatccagtataatatacgtgcgtgcttcaaggggtcaaggagaggaatcaatgattcctcctccttccctgctcttccaaggcgccctgctcacatcctgcacctgctctgccttctcggagctgcccttctcggcacagctgaacaccttgaccgaaggagccagtgtccatcttcctgtccccggaaggcttgaaggcattctcaccacgtcttggttctgagggtatgacgcccagccagcagccatgatattctccccgaagggcctcccaggacctgctcacactggccgggagatgctgggaacccaaggcagcctggtcattagaaaatgacggctcaggactcgggcagctacaccgtcgtgctggaaaccagcaggggacacaggagtgtgacggagcagatccatgtcaagagtgagtggggccccgcagtgggaggggctgacttctcagaaagcagacccactggacctcagaagagcccaccaggacactttgcatgctggttatccattgctccccaataaaccaccccaaaacttaaaacatcaatcacttatctagctggacagttgttgtgttcagctgttggggtgtctgggtgttggctggtccagaatgacctccttcatgtgcctggccatggaccagctggtggctggagtgatggggatgagtgggccacatagcctcccaacctccagcaggctatcccaggcttgttcactcagcaatggaagaggaacaagaggtaaagctgcaaaactccttcaggcccaggctcaaaactgaccaccatcacttctgccaccttctattggtcaaagcaagtcacatggccagcccagcttcaacaggaaggaaaaaggccccacctcttaaggagaggagttgcaatgtgttgtggctattttttgtcgttgtgttagattgttcttccattgctataaagacatacctgagactgggttatttatttaaaaaaaaaaaaaaagaagaagacgtttgattggctcatggttccacaggtggaagtgtaatgccagcatctgctcagcttctaaggagccctcagggagcttttaatcatagcgaaggcaaaggaggagcaggtgtctcccgtgagaacaggagcaagagaaagagagagtcagagaggaagtgccacattttacaacaatcagatctcatgagaactcactaccatgaggacagcgtcaagccataagggatccgcccctgtggcccaaacacctttactgaggccccaccaccaacactggggatcgcatttcaacatgagattttggcagggataaatatccacattataacagccaagacttgcaacagacattcatgagatacgcattcatcatcacttgggaaaggtagagaaggtctggtagcagccttcaacctcatctatatttttatcacctggactcaaactttcatatctgaattaggaaaacaaagccctgagagtaaccagacccatcctccttttagaagatagtccagagactgtcctagtcggctcgggcaaaatactctaggcttaatcaacagaaacttattccctcacagttctgaaggatggattgcaagatgaagctgctggcaggtttcatctcctctgaggcctctcttttttgacttgcggaagggtgccttctcattctgtccttgcatggtctttcttctgtgtgtgcacatccctggtgtctctctgtgtgtccaaacttcctcttcttataagggcaccagtcaggttggattaggacccaccctaacaacttcattctaacttaatcacctcgttaaagaccttatctccaaatacggtcacattctgaggtactgggggttagggtttcaacatatatgtttggtgggggactcaattcagttcataacagagatcaacttagttagggttcagattctgatgctctaacaaagactcaaaaagttccagtgtcggccgggcgcagtggctcacgcctgtaatcccagcattttgggaggccaaggcgggcagatcacgagttcaggagttcaagaccagcctgaccaacatggtgaaaccccgtatttattaaaaatacaaaaattagccgggcatagtggcaggcgcctgtaatcctagctattcaggagactgaggaagtagaatcgcttgaacctgggagtcggaggttgcaatgagccaagaccatgccactgcacacttagaaccccacttctgcacagaggggtttttactcccctcccagagaatttatggaccgctgaggttcatccatctgtatttctgtgatttgatgactaattttgtgtgtgtgtgtgtgtgtgtgtgtgtgtgtgagatggagcctcgctctgtcgcccaggctggagtgaagtggtgcgatctcggctcactacaacctccaccacccgggttcaagcgagtctcctgcctcagcctcctgagtagctgggatcacaggcgcccgccaccacgcccggctaatttttatatttttagtagagacagggtttcaccatgttggccaggctggtctcaaattcctgacctcaggttatccacctgccttggcctcccaaagtgctgggattacaggcgtgagccaccgggcccggcctgaaggctaattcttctaaaggcctggctccacaccttcgcctatgccattctcagtccgaagggccctttctaaagagagaggttgcaggaactcacgctcggtggtgcaggctgtgtggccagaactccctggatcaaatccctctggcatctgttatgcccctgagtccctgcaaaaaagtaactttctgttttgcacttcagtttccccatctgtgcaatgaggtcatagtggaacctacctcatagggtgactgtgaggagtaagtgagttaatcagtgctaaatgcctacaacaatgcctgacaaagagcaagtaaatgttagccctggccaggtgctatggctcacacctgtaatcccagcagtttgggaggccgaggtgagaggattgcttgagctcagaagttcgagaccagcctgggcaacatgatgagacgcccatctcaacaaagaatttaaaaattagccaagcctggtgatgtgcgcccatagtcccagctactcaggaggctgagatggaaggatcccttgagcccgggaggttgaggctgcagtgagctgtaaccttgccactgcactccagcctgggggacacagcaagaccctgtctcaaaaaaaaaaaaaaaaaatagccctgtttgtttcaaaggacttgacttctttgagccttccttttctcatcaaaatgggaataaggccggcacagtggcttacacctttaaccccagcactttgggaggacaaggtgggtggatcacttgagcccgggagttcaagaccagcctgggcaacatggtgagaccccatctctacaaaaaatagctggatgtagtggcgcacgcctgtaatcccaactactctggaggagactttgagcccgggaggtggaggttgcagtaagctatgattgcaccactacactccagcctgagtgacagaacaagaccctgtctcaaaaaaaaaaaggaataataataattacttcataggattgttgtgaggattaaatgaataaatccagtggctttcatgagaaatgcttttcacatcatgtccagtatatcccacaactaaccaaaaggcaagtgtagtaacagttattactatgagtaatgctctctgatgttttctataatatttcttttcatgttttgaatgttgatcacagtctactaatgatttagacacctgggcatgggtctcgcatgcagtataacaagccatggattaacacgtgtgcttggctcatagtaagagcccaatccatggccgggtatggtggttcatgcttgtaatcccagcactttgggaggccgaggcgggtggatcacctgaggtcaggagtttgagaccagcctggccaacatggtgaaaccccatctccactaaaaatactaaaattagccggatgtggtggcgggtgcctataatccagctatagagaggcagaggcaggagaattgcttgaacccagggggcagaggttgcagtgagccaagctccagcctggatgaaaaagcaaaactccgtttcaagaaaaaaaaaaaaaaaagagcccaatccaggtggctgttatattgcctcttgtttgtacacctagtgggctctttctcctccttcaaggcttaactcagacacctcctccaggaagcctttcatgaggtctctggttgtgctaaagttcttttcacttataacattgcattgaaatcagaaatcagctctaagtggaagttcccagcacagtctgggagttcaaatcccagatgtgtccctactagaccacgaagcctggccctaatgagccccaaacctcagagcctttcacctgaaaaatgcagacaagaagtggggacctcttgggtcacctcctcgctgggctgtttccactcctccaaacttaaagtcaagttctcacatgatagccagagtgagcctgttcaaacctaagccagctcacgtccctcctctgggcagtcctcccatgggtcctactgcactcagagtcaaaatcagagtcctcaccctggcccaggaaaccccagcatgatctgctcccattatctctctgacttcttctcccagccctctctccctttccctcctctctatgcccaccttggctcacacccatctcagggccttttacttggtgttccctctgtctggaacatttttttcttaggaatccacatggcttattcctctgcttcttcaggactctgctcaaacataacctccccaaagaggtcctccttgacccaccttacctgaaacgggtttaccccacccccagtccaaccccacagccctgtgcagttttcctcacagcccttaccaccactatatatacttgtcagtttgttgaccctctcctcactcagtcgtaagtttcatgagggcagcaacagcgtctgtttaatcactgctgagcccccgagtcctagagccttagagtcctagatttggttcacccagatccagaggcgaggattcaaggacagatagtctgtttgggaggtgcaaggaactcgagagtggggaagttaggcagagaaggcaggaaataataaaagctgtgttcccaagctggttaccatgggcaactggagcacagtcccattggggaactcaggccctggtgtggaatgactctgcagagttatcccacatagcagagagggagctggggaatttatataccaacgtgtcctggcattgtggagggctgctccctgatgtgctcattccccagcacttccagcctgctgcctccatgggcagagtaggctttggccaccagtgaaagtcctcaggcaacgggatgcaggtgctggccgttggaagtgggaagggcaaggggttggactgggggcactgggcacagaccaggctcttcaaacacattcatgggtgaattaatgaatgaatgaacacatgaaagaatggatgtctctatggtgggcagaagaaatgcccagcttttctgagtggactccactcttgtggccttgttccctgtttacacagacagcctccaactaatgccactgaagacattcccagctgctatccggggagtcatccagagtgagctcaactattctgtgatcctgcagtgggtggtgacaatggaccctgagcctgtgctgagctggacc

SEQ ID NO: 67685 - DNA, 3295 bp, Homo sapiens
ctttgcctctctgagtctcagcacatacctacaaaaaatgcagatcaaaatctaaggagtgggccaggtgcagtggctcacacctgtaaccccagcactttgggaggctgaggcaggaggatcacttgagcccaggagttagagaccaacctggacaacatagtgagaccctgtctctaccaaaaaaaaaaaaaaaaaaaaaaactaaaaatttaatcaggcatggtaatgccacctgtagtcccagctgcaatgggaggatcacttgagcccaggagtttaaggctacagtgagctgtaatcgcaccactgcacaccagcctgagtgacagaggatgactgtctcaaaaaaaaaatcaccattgtcatcatctaaggagtggttcaaagcaatggctttggaatttgaatccctggctgtgtgactctgagccagtgccttgacttctctgtgcctcagtttcctcatctataacactgggaagataatagtgcctaccccagtgtgtagttgtgagcattcaatgagataagccggtgaatagcttaaaacaataatgtctagcactatcgaacactaatgagtgctcaataaccgtgagccaataacactgttgcaattagcattgtcattattaattgtagctattaccatatacagtcggtatatggagccctaggtggcaatcaaaatgacagcaagttgttgagatcagagaagtggtttgggacctggtcaaaactcagttcagtccctgttcccgtgccttcctggctgggtaacttagcgcaagtgacttcccctctctgagccccagtttcctcatgtgtataatggaggtaatcctatatacctcttcagggttgttataaggaacgaaaacaaggggtgactgagtttggcagaacaactgtcaggcagcaggtgccttgaatagcagctgttatggtgaatattgtttttagtgtgttattcatggagggacacatggtgatatggtttggctgtgtccccacccaaatctcatcctgaattgtagctctcataatccccatgtgtcatgagagggacccggtaggaggtaactgaatcatggggtcaagtttttcccatgctgttctcgtgatagtcaataagtctcacgagttctgatggttttacaaaaggcagttcccctgcacacattctcttgcctgccgccatgtaagacatgccttgctcctccttcaccttctgccatgattgtgaggcctccccagccatgtggaactgggagtccattaaacctccttttttttaataaagtacccagtctcaggtatttcttcatagcagtatgaaaatggactaccatggcttggagtgaactagaggtatgcagaggaactggccaggagagaagagagggagggtatttggggtaggaaagaatgcatgagtcaaggttcagagctgggacatggaaatggaatgcgtgatgggaatctcagcttggctgggtcccagagaaccacctcacctccctggccagggtccagtgggagcttcagggctgatgcactgggggaaaaaatgtaaatcttatatcacctagtgaccctgatattcagtgagaaggacaatacttccaagacctcctttgctcattcatcaactgcccaggaaatgtttatgagcacttgctgtgtggccagcccacacagctgggaacactctggtgaccaagacagctgcagccctgccttcacaagacttacagtccagtgtccacagacagtgatcaccagagtgggcagggctgggatgggggagcccagagagctatgagactcagcctaggagttaaggagggcttcctggaagaagggacacctgagctgagaattatgcttagctggccaggtacagtggctcattcctgtaatctcagcactttgggaggttgaggcgggtgggtcacttgaggctaggagtttgagaccacgctggccaacatggtgaagtagatggtgaagaagatggtgaaaccccatctctactaaaaatacaaaatttagctgggaatggtggcatgtgcctgtaatcccagctaccagggaggctgagacacaagaattactggaacccaggaggtggaggttgtagtgagctaagattgtgccactgcactccagcctggtgacagagggagactctgtctcaaaaaaaaaaaaaaaaggaattatgcaagccaagagagagagatggcattccagagagacagtgcagcatggacaggcctggaggcaagagagaaagaaagggatgagcttggaaaattgagtggagtccagggttgcatggctataaaggcagggcaatgagagagatgaggctggccaggtggcagggcctcgaaggctaaggtgagaaactgacttctgccccagggtgctgggaagccacagcagggttctgagcaggggaggaacagggtcaggtgtgagctttagaaagatcctcctggcttccatgtggtaggaaggtggatgggcgctggactagggcaggagagcagggaggagagggggccagagacctggaggatggaagagaaggatggattgaagagacacttgggagggggaatggcaggagggaggggtgcacagggagggcgggcagatggctcctccaatctcacccctccttggtccccagaacccatcatgcagcccacagaagcagagcccatggagccagaccccactctgtccctgtcaggaggctctgccatcgggctccttgcggctgggatcctgggagccggggcactgattgcaggcatgtgtttcatcatcatccagagcctaaggtacctctatccctcacccccgtccactgggcaacatccactcagcccccatggggcacagagctggctcaacaaggaaacagagatgaaaccaacacccccatcagggagggtgatagcgactcctgaggagcccatctgactcactggtttccaaaatgggatcacagcaacaaagagatagaagaggacactagagctgggctgtctggcttcaagtcccagctctgtaacttactagcagtgaggctgtgggcaagccactccccttctctgtgcctcagtttgcccatctgcaaaatggggatgataataatagcatctgactctctgggttgttgggttgggttgttgtgagtgaatttttctttttcttttttttttttttttgagatggagtcttgttctgttgcccaggccggagtgcagtggtgcgatct

SEQ ID NO: 67686 - DNA, 1301 bp, Homo sapiens
agggaactcagagaccagtgccggtgcaggtcctcacttgctgagcaccggtcccctgggcccacttttcttcctctatactttgtctctgtgtcttatttcttttctcagtctctcgtctccaccttgtgagaaatactcagaggtgtggaggggcaggcccccttcaaaatgatccacccacctcagcctcccaaagtgctgggattacaggcatgagccaccatgcccagccacatataacttatttctaaataacttatttaactaacaccacatgattttatgaccccctattttatggatgagaaaaaagaggcaagagaagcgataccagttgcttaggattcccagctaccaattagtggaagcagaatttgaaccaagggagtctctggagccctcgttcccaatctccttttcttcctctccatgtctttctttctccccctgctcccaggcctcctacatcacacccttctggacaaagcttcacatctgacattttcttttttggggtggacagagtcttactctgtcaccgaggctggagggccgtggcgcaatcatggctcatggcagcctcaaactcctgggcttgagggatcctccagcctcagcctcccaagtagctgggactatgggcatgtgccaccacacctggctaattttttaattttttgtagaaatacagggggtgggggcatatctgaaaattttaaaccttccctgactgccgtgagcatttctgggtagaagccactccacgaccttactttgctggcatgagtgctggacagcaatttggcaacatcctctagaccacaaatgtgcatggcctttggcccagcaaatcagcttctgggaataaatatgacagatactgttacatacatgggaaatgccatggacatgatgacccagggaagcacagtttgcaagtacaaaagggctggaaacacccaaaaagcccatcccctgaagacagtttcaaaaatgacggtgcattcatgtaatggaatagtacacatttgtgaatgaatgaatgaggtagctcaatatatctgcctatgggaaaatcaccaagatatgttgctaagtgaaaaacagaaagatacagaataatgctaccattttattttttaatgggagagggaagaataaggaaatggattcatatttgcttaattacacaagcttcctgatgatccttttggatccagaagtttgaaaaccacagcatcaagaggatgcccattgggcatggtggctcacgcctgtaatcccagcactttgggagg

SEQ ID NO: 67687 - DNA, 3900 bp, Homo sapiens
acatggtgaaaccccatctctactaaaaacacaaaaaaattagctgggtatggtggtgcaggcctgtaattccagctacttgggaggctgaggcgcaagaatcacttaagcctgggaggcggaggctgccgtgagccgagatcacgccattgcactccagcttgggagacagagcaagactgtctcaaaacaaacaaacacacacaaaaaataagatgcccattggagatctccattcactattttatcagatgatatttcagcacttgagtgaagaaaatgtctacaactggtccaaacactcaaggaatttagactcttgacagagaaacacacagaagcaagcagatatgccccgaaccaaacttgctttttcttctaagcctgcttcttcggagcagcctctgaccctccagggccctgagaggagtccctggagccacaggagcttgggagcccagagaagtgggggaatcccagatggtgacagcatcatccagaggaggaacataacgatggccacagattcccaatttggaaataactcagcaaaacaacactgacagaaaattcagagatttccaagagactagcctccctgtttccatttagaaattcacctacatacatccagggtgagagaccccaagcatcagatgtgtcatacacaagcatcagatccaagttagagagggcacccggggacagaaacctccaagccagccaaaagccaaaggaaggattttacagaaagatacaggaatgtggggccaggcacagtggctcatgcctgcaatcctagcactttgggaggccgaggtgggaggatcgcttgcggccaggaattcaaggccagcctgagcaacatagcgagatcctatctctacaacaaatttaaaaactagctgggtgtgatcacatatgcctgtggtcccaactacccaggaggctgaggcaggagttgagcccaggaggtggaggctgcaatgagcaatgatggcgccacttcactccagcctcagtgaaatagtgagaccctgtctaaaaataataataaaaataaaaaacatataaagatgtcagagcacagggaccagagctgttagtcggcctcatggagaccctggccaggacagccacctctggggaccaggaagtctctcagtttctgtctctgagggtttggctctctgagtctctctgtcacctctcatttctctctcatctccctctgtctatgctgtgtctctatctctttcaatctctctgtctctgtctcccagcccttatctctgagtgtgtctgtttctctctcatttctctctctctctctctctctttctctctctctctttctctctctctctttctctctcccccctccctcctcccctctccctactgcaggctggtccataacccttatcttccccagacctgatggagttctggtattaatctgtttatggtctgtttccctccactagaacacggtcttcattaaaggcagagatttttgtctgtcttattttctgctgtatacccagtgcctgggatactggctggatcaataaatatatgctgaatgaagaatgaatgaatgaccattctcatgaacattattatttgatgccaactgtaaagcaacaataataataattgtcactgccactgctgctattgttggtatatcagctttttatttagtacaaactatatccccgaaattgagctaggcagtttcttgtttaagttttacagaccacgctgtgaggtaagtactgttagtatgcccttttttctttctttttgagacagagtctcactctgtcgcccaggctggagtgcagaggcccgatcttggctcactgcaacctctgcctcccgggtacaagtgattttcctgtcttagcctccccagtagctgggattacaggcatgtgccaccatgccggctaatttttgtatttttagtaaagatgggtttttgccatgttggccaggctggtcttgaactcctggacctctggtgatcctcctgcctcggcctcccaaagtgctgggattacaggcgtcagccactgcgcttgctcccccagcccccaaacttttttttttttttttgagacaggtctggctctgccacccaagctgtagtgtagtggcgcaatggtagctcactgaagcctctaactcctgggttcacacagtcctcctgcctcagcctcccaaaatgctggaattcaggcctgagccaccgcgccctactatgcccatttttcagataaagaatctgagggccctcgaggagaaaccacttgcccaacatgagccctggtcttgtctgaccccaaagcccatgggaagtttaggctgcgtggaaggacagcctggtgggctcaggatctgtcccatcacgagttggaacctcagctctgccactcggcaaccgcgagccgttagtaagttgctgaatctctccgtgtgcctccgtttcctcacctggaatgtgggcgacctcacacaggaagccgcctcttctagtgggcaccgacggagcgagcgcgcgtctgcagcgggactgagcgccgggagagacctgcgcaggcgcaggcgcgcgggaagggccagcctgggtggcccaccccgcgcctggcgggactggccgccaactcccctccgctccagtcacttgtctggagcttgaagaagtgggtattccccttcccaccccaggcactggaggagcggccccccggggattccaggacctgagctccgggagctggactcgcagcgaccgcggcagagcgagcgggcgccgggaagcgaggagacgcccgcgggaggcccagctgctcggagcaactggcatggcccgagccatggccgccgcgtggccgctgctgctggtggcgctactggtgctgtcctggccacccccaggaaccggtgagtgacccccgcgcagtccggtggcccctgtctggctcccgctccgcatccaggccgggtacttgcccccttgggttcccgaagatgacggccccgccgcggcgccacccaccccccatctctgccccggggttggaaggaacacggtgcgagggtgcgagggcaggaccctcctcttggccacccggagagcggtcggagttgggtacagaaattcctcgaaattggcagcaacacgggtcgggcacaagaccctcctctgggcccctcggaaaggggatggagttgggtgaggaaatttcccaaaaaggcaagtgaatcccggaaaatcagcagatggtgacgcatgccggattaccttacccaggttcctgctcagcatacccaggccataacccagcagcgtgctggcaggctgggtctggacggaggggatggttgatgttggggaggaggacagtgggtgacacttgacaccattacccctctgacccccaatgtctgactccaggggcctggccattcattcattctttcattctttttttttttttttttgagacagtctcactccattcacccaggctggagtgcagtgtcctgctctcggctcactgcagcctcctcctcccgagttcaagcgattctcctgcttcagcctcccgagtagctcggattacagacatgtgccactatgcctggctaatatttttgtatttttagtagatacaggatttcaccatgttggccaggctggtctcaaactcctgataaatatatatattatatattattattatatattacatattatagtaatatataataaaaatatataatatatattatagtaatatataatatataataaaatatataatatatattatatattatagtaatatataatatataataaaatatataatatatattatagtaata

SEQ ID NO: 67688 - DNA, 1025 bp, Homo sapiens
ctgtgcctcagtttcctcatctgtgggatagggatcaccatgaggattcaaaaaaactgaccctttttttttttttgagatagtttagttctgtcgcccaggctggagtgcagtggtgtgatcatagtaggtcctcactgcagcctggaactcctgggctcaagggatgttcctaccctccctgtagctggaattacaggaatgtgccaccatgcccaacttgttttctgttttgttttgttttgttttgttttcttttctttttaagcttatgtgccaagaactattccaagcctgtgcatgagaaactcatgaaatgtcaagggcttggaactgtgcctagcacacaacacccaaccaaaggcagctgttgtcactccagcaagcctgggattctgggtatcatggtttaggatgagggtaaaacagaaacagtgagtcaagttaaggagaaatcttcggtaaataatataggtaatgatggggaaggaagttccaggtttgggaatcaccaggatgatgattaagagatggtcaaggtggttttggagtcagacagactttatgtgaaagcccagctctgctgcttacagctgtgtgaccatgggcaagtcacttcccttctcaacttcagggctcaggcttcctctcctccactgagccccagaccaggataaccccctttgggtttcccctttccagccctgccctctccgagtcatcactgcctaggaaagagtccgtctgcccccttggactgtgtacccatgagggcagaaccagggctattttggtcactgctgggctccagcactttccaccaaacaatatttattgagcgcttattatataccattctaagagctttacctgcatattctcattgcctgtgatcccatcactatcccctgtcaacagacaaggaaactgaggcacagacttgcccaagaccacacagctgctcagggacacagctgggatttaaaccatgccattctgtatcttttttttttttttttttttga

SEQ ID NO: 67689 - DNA, 571 bp, Homo sapiens
ctgggagcctggacccctgggtctgaggcaggacagactggggcctggactcctggtctaagagaggagggagattcagaaaagagaaaaagaggaggttgacttcgggcccccagtggggggcatctctgttttgacatctctgttttgcggttgaggcgtttagcaggtggttgaatcctggctggtggatgcacctgctttttggggtgtgcctgctctgtgcccggtacttcccccgaatcccatgtgaccccatgctgtgcacagtcagcagctgttgccctgcccaggttaaagaccagccacgagagggcagaagcggcccttgaatcagcgctcggctccaaagctggtcctccgcctcttggccaagcttgtctaacctgcaggccacatcatttgtaaactttcttaaaacattatgagactttttttttgcgaatttttttagctcattagctattgttagtgttagtgtattttatgtatggcccaggacagttcttcttcttccaatgtggcccggggaagccaaaagattggacacccccactctagactgtaacca

SEQ ID NO: 67690 - DNA, 435 bp, Homo sapiens
tgtgcagccccagagactgggctagatccaactccgtttaatcaagtggattgagagtgtagaccggctctccaaaggaaaacaaaactggttgctattgtcaaagaaggggagtgggcagcagcaggcacagctatcagatgctacctacttgtatggagagagagagagagagagagagaggagagagaggagagagagacagtcctgtttcccccagggagagtctattcgtgaaaaattcctttcttatgacatcagcgtcttcagaactttgtctcttgaaattgattctgaactgattgtagataagatgtctaatttttctgccactcaccagttcccagaatatgaaagcagcaattttgtctcctttctcaactcttccttatgtgccatggattctgttttcttcttcttcttttttttttttga

SEQ ID NO: 67691 - DNA, 1425 bp, Homo sapiens
aaaaaaagaaagagagaaagcaagcggggaggaaaagagggagcgagggagtggggagagaaagcaggcgggtttgagaggtcagtactgagtcggcaggaggggatagctggagaccggggtcggggtgtgtgagtggggacagtgaacataagtgcatcttgtagcacctgattcattgtcactccagaaatgtcaccttctttcactgtttggggtttgtgcttattgggtcgtcactattgccagacttgctgcaagagagggtcagccctgagccagcagggggcagcagagcaccacacagatcatgcacaagcgctgcagctaccttgagcccccccatgcgcccaccccgtctctgcccctttctttacccctctgggaacccagagagtctatccagctctccaaccccaaacctggacacctccctccccactctcacggcaggcaccaggccctgccctccaggcctcttgaacttggccttccccagtacctgcagcccagccctgggccaggcagcttctctcccctccctgccccagcctcccgcctggactcctccccactcccattctcctaccacagagcagcccaagggatctttctaaagcccaaactcaacctagccccttcctgctcaaaaccatccatggctccccagtgccttagagtccaagctcctcaccactgcctccaacgcctgcaaagtccaggggacgctcagtctcatctctcagcacccaccgccctctcaccttcacccctggtctacagtcccccagatttaacttctttctgtttccccacacactgtgttccatctcacttccaggcccttgcacacccccaggcacacagctccactcttcctgcccaccccattcaccctccaagtctcaactcatacacctcctcctccaggaagccctccttgacctccaagctgggtcagatctctcctgtgagctcacctaccccagccccgcccagtctgggccatcactgcctggggatgggtctgtcccgctgaactatgagccctataagcacaattgctatctccatcactgaggggctcccagcactgaccagcacaaggcagaggcccaaggagtgtggatgctcattatacacatccttccctttcccaacctagcagtccccattcattcattgacaaacgtctgttgagcaactactatcaccaaactctgttacatgaacttgactggcatgagagaggtgaagataaaccagcccagctcctactctcagggagcttgaggtctagtaggggagatgacctggaactcaatgtaataataataattaataataaacattaccgagcacttattatacgccatgcactatgctaagggctttacatttattcactgatatcctcacaacggt

SEQ ID NO: 67692 - DNA, 2380 bp, Homo sapiens
gcaaaagccacaattacttttgcaccaacctagtactgtgattatccccattttacagatgaggaaactgaggttaagtaagtgaagctgaccaggcaaagtggcttatgcttttaatcccaggactttaggaggcaaaggcagaaggaccgcttgagctcagaagtccaagatgagcctgggtaacagcgagacccagtctgcacacacaaaaaaatttatttatttactttcatttatttatttatttatttattttgagatggagcctctccctgtcacccaggctggagtgcggtggcacgatctcggctcactgcaacctttgcctcctgggttcaagcgatttctggcttatttttgtatttttagtagagacgggggttttaccacgttggccacgctggtcttgaactcctgacctcaagtgatccacccacctcggcctctcaaagtgctgggattactggcgtgaattaccgcactgggccaaaaatatttaaaaattagccaggcgtggtggtgtgtgcctgtggtcccagctacctgggagactggggtggaaggactgcttaaccccaagaggtcaaggctgcggtgagctgtgattgtgccaccacactccagcctgggcgacagagcgagactctgtctcaaaaaaaaaaaaaaaggtgaggtcacccagggtatcagtggacaagctgagaacaaaaccaaagtttctaacaccgaaaatttgtcttctgctcatcccagcctgaaaggaaggtgaaccaagatgcaatccatgcccattcaagtggggtctgtgtgtccaggcagaggtgtctgccctctacaaagggcacaggggagagagtgatgcttaacccaaaggaggtctcgctgatggtggaatttcaggcaccgtgtttatgtttggcctaattagcttgagaccagtgtccttgacgggaactaagacgccccccacgcccatccccggctcccaggctctctccacccaagttctgcccaccagggcacactgcttccctctgccacctcctcttcccacgagccctggtacaccctagattctcagggctgtggctccttgctttacaaatgagtaagttggtggcagggaaggaagtgggctgggccatgaccaagagtcactatgattcacggggaaaaccctgccctcccgattcaactctgtgtgcaaaaaggttttgtgcgggttcctagggtctcagggtcaatggatgtagatagaccactagaggtatacacagccactgtccaccaactctcccaccccccgggtctgcctacagccctggatggggatcctgtaccgggggggcggttggggggttggacaggtgtgggttgaggtgttgtttacatgttgaacacactggggttccaggtaagtttccgtcagaagaaagcacttcactgctgaggcagaaatttcaaaatattgaaccacttttcgatcctggcagaagggaattttcccagggtgataaaagtgttttaaaattagatttgagtgatggctgcccaaaaggaattatgatattattcaagaaatcatggctttgctgaacaacagaaaactcgaacactgagcatttgaagatattaaggaattgttgatttttatgttcactgtttaggtgaaatgatagcattgtgagtgtgttatttttaaatgagtccttatcttttaaagatacaggcagaaatagctataaaatgatctgatggctgggatttgctttcaaataatacaggagagggccgtgggtgaggagagggaaccagattgcctatgagctgagtgatgggtatgtggttgcgagggcagacaccattcttctctctgctttcgatgggtgcgtagaatttcccataataaaaagtggtttttaaattgttttgaccattggcctcgcgcggtggctcacgcctataatcccagcactttgggaggcagaggcaggcagatcacttgagggcaggagttcgagaccagcctgggcaacctggtgaaaccccatctctattgaaaacacataaaaattacccgagtatagtggcatgcgcctgtaatcccagccactcgagaagctgaggcaggagaatcgcttgaacccgggaggcagaggttgcagtgagctgaggtcgtgccactgcactccagcctgggcaacagagcgagactccatctcaaaaaagaaaaaaaaaattgttttaaccattctaaaggaatgagaaaagaattctacaacttttgtttttttgtttttttttttgagacagagtctcactctgtcccccaggctggagtgcagtagcgtgatcacaacttactgcagcttccatc

SEQ ID NO: 67693 - DNA, 2403 bp, Homo sapiens
gcgccaccatgcccagctaattttgtatttttagtagagacggggtttctccatgttggtcaggctggtctcgaactcccgacctcagatgatctgcccgcctcagcctcccaaagtgctgggattataggtgtgagccactgtgcccagcctttctttttattttatttttagtagagatgggactcactatgttgccctggctggtctgaaactcctgggctcaagcaatcctcacacctcagcctcccaaaatgctggggttacaggagtgaggcaccatgcccaacccaggcctaaccataattctaaatccaagtccaaccccttcccactttcctgaagggaaaaatgaggtgcagagagaggaaggaacccctaaccaggtccctttagggtcccaagagaaccctggcactctctgctggcctccatccccctaactctgcccttcacttcctcccctccagcaccttccagaaaagctctaggtggctagtccccctctgaccaccttctcccactttcccctgcccctcactcagctccagtcacaccaggctccctgctgtccttatgctcatcaaagcccctcctgccccagggccttgaattcacttgttgtaccttctaccaaaaacactctcctcccacacacccacaggctccctcctctgtcgcctccttcaggccagaaaaagcgccaccaccaccacctcccaaactaaaacagcaacccctgctcctctctatccacttgccctattttatttaattttatttattttgagacacaatctcacactgttgcccaggctggaatgcagtggtgcaatctcagttcactgcaatctccacctcttaggctcaagcaattctcccaccttagcctcccaagtagctggaattactggtgcacaccaccaccacgcctggctaattattgtacttttttgtagagataggatctcactgtggtgcccaggctggtctcaaacgcctggcctaagcgatccacccaccttggcctcccaaagtgctgggattacaggcgtgagcccctgcacctgacctattttactttttatagcttttatctctgcctgacattaaatgccatatcaggttttttttattattattattgcccatctccctccaataggatttagcccaacaaaggaaaggatgtctctgtgcaaacagcctggtacatagtccatgcttgacaaatatttgttaaatgattgaatggcttggaaaaacccagatgaatgaggtgaggagggtggggacgggtatccaagcacagggaacagcctatggaaaggtctggagcttctccgatccacctgcctcctctcctgcatggaagcctaggtgctttttttttctgagacagagtctcactctgtcacccaggctggagtgcagtggtgtgatctcggctcacagcaacctctgacttccgggcttaagtgattctcctgcctcagcctcctaagtgtctgggattacaggtgcccaccaccacaccgggctaattttgtattttttttagtagaggtggggtttctccatgtcggtcaggctggtctcgaactcccgacctcaggtgatccacccgcctcggcctcccaaagtgctgggattataggcgtgagccaccacgcctggccacctgggtgttctttctagggtcaggaattaaggggacatttggtcctttctccccaagaacaacctctccaggcccagccagagccaactccaggccttgacaggccggcacaggaagccacaccctgagcaaatatgacggccccctctgcctcgcccaagataaggggaggttgaaaggggtttggaaacctgcttcagcctaagacattagctccagccaaaccctcagtctcaaggcctccccacccctgcccagagaggacaggacaaggattctgccacggaggcccaagtctgacgtttacatctaatatatattgatgatgtcagtggtgggcagggtcttgaagagcagataaaggagttcccagcctccctcccgctcccaagggaactaagtgactggtgagacaagagggctgggcgggcaaggggtgaccctgaccaaacaaggtcatagacccgtgtccccagatggctgtgcagagaagataagactcatctgctccaatcttatgaggcaatggcccggggcctcagtttacttgtctgcaaaatgggttttcttgggggtgggcagcggggagatggataacaggaaaagctgaagctgtcaaaaagaataatgggccaggcacggtggctcacacctgtaatcccagcactttgagaggccaaggcaggtggatcacttgaggttaggagtttgagaccagcctg

SEQ ID NO: 67694 - DNA, 1612 bp, Homo sapiens
ggattttgaggctgtagtgagctgtgatggtgccattgcactccagcctatgagacagaacaagaccctgtctcaaaaattaaaataaaataaaataagttatatatcccaggcttctgcctgggcccagaaaacctgtctctccagggtggggacttgaaagaattttctttcttttttttttcttttttttttttttttgagacagagtcttgctctgtcatccaggctggagtgcagtggcatgatctcagctcacttcaacttctgcctcccgggttcaagctattctcgtgcctcagcctcccgagtagctgagattataggcgcctgccaccacgcccggaaagcagaatttttaacaaagggtctagggaatttttgttagctgggaaattgggggactcagatgcagagactgtttgacaaaaaaaaaaaaaaaaggaaagtgagacaccacaaagaagaggaggtgacttgcccaaagttactcagccagaaaggagcagggccaggatttggcccagagaggagcaggaactagtccagggtcacggagcaggtttcagatgagggctgagactggcgcccttcactgtcccgagcaggtccgcagtggctcctcgcctcccccattaagccacgaagctctggtggcgccgggggccctcaggttccaccagccgtgggtggggaggcagactatacccctctcagccccaatcccttccccctcacccaagctgccttttctcaaataaccacactggggagggcagggagtcggggtgaccttgaggccagaatacacaatggcccagtccctctctggagccctgccagggagaggaaggaagcctgccctgtttttttccatggactggaatgttgattcaggatggagagcagggaggagggaagggggaggtgggagagagagaaaaaaaaaaaaggaggaaagagaagggagtaggaggagggtggaggagggagaaaaggggaacagggcaaaaagggagaagaaggaggtggaggaggtggaggaggaggagggatggggaggaagaggagaagaaagaggaaggagacagaagaggagcatggaggagggggtgccaaggccagactttgggaaccaaggaatgagccccatcagcttcagcccatcctgacacacagtgtggagaatgcagagtccagagagggcaccccaaatctgcaaggttgcacaggaccagtgcagccaaagggcctcacctgtgcggctgcctcctgcctgtggaggcaggagctccctgagtcctcacagagaccttcagacgcaggtgtcatgttgcatgtttctcagaagaggagactgaggcgcccagaggtaaagccacatttcctggagcatctccccttcggatcggactccagggtccttacaatggtctgcaggcctgcccgcccgtcattcccttcatcatctcctctccttcactcactgcagccacctggcctcctggctattgtttgaacaaatcaagcaactccttcctcggggcctttgcactggctgttcccgctgccaggaatttccttccctcagacacctgcatcactccagtca

SEQ ID NO: 67695 - DNA, 4933 bp, Homo sapiens
tctggccatgaggtggaaagagactgttgggggcagaattgtaaagcgagggacaagaagagtcaggggtctccaagctttgagcctgagccactgcaaggatgaagctgccatttctgaggccagaaggctgcaggcagggctgggttggagattggaatgaagataggtcttgtttgaggccaatgaggagggagcctcacccgaggcacacaggctccaggcgggaagttggcgacaagttgtggactgtggttttcacccacctcatggggccccctcatcctctcccccaacttcccctcacgccgtggtggagccagctttgtttgtttcccccccatcatccgtttcatgatggggaagactggttttcccctaacccaacagacacctcttccctcagcctgtccctgaccctcccacctcgggaagccccgagcgggcctcccagaatgtcccggcaggaaggggctgctgctaccgttcatccagccagatgaaccccaaaaggggaagtgggtcacccgtagtcacccggctcatggtcagctcgggacttcaggatctcgtctcttcactgcacccaccacagccctgggaggttttccatgcacgcttctcattctccccacatttcacacgagaaaacaggggctccaagagaggcccacactcacctaaggagctcgaaagataggggcatctggatttgaacccaggtcctagcagatgttgttagctcagaggagaaggcagagagggtgaacagaacccagcctgccctcccagatccagtgggaaggcagacttgtccccaggtaataatagcccagcagtgttcacagcctgggatggaggagcccaggaggctgcaggagctcagagcgcatgcctgacccagcctggggtcaaggagggcttcctggaggaagggacagctcatctgatacctagaggatgagtgggagttactaggtgtaaatagtgcagggagagggaagagtatgtgcaaaagcctagggttgagaggaaacctaggggctccagcaaggcgcagtggctcatgcctgtattcccagcactctgggaggccgaggcgggcggatcatctgaggtcaggagttcaagaccagcctggccaacatggtgaaaccctgtctctattaaaatacaaaaattagccaggcgtggtggcgtgcacccataatcctagctacctggcaggctgaggcacgagaattgcctgaacttgggaggtagagattgcagtgagccaagatcacgccactgcactggcgacgaagtcagattccatccctctctctcaaaaaaaaaaaaagctggggggagcctaggggcttctaaatccgatcgtgtcctggccctgattaaactctcctacagctgccctggcaaactctttagcttggcattcattcattcattcattcattcactcattcattccataaacattccctggagtgcattgtcagtgtcaggccccaggggaacacagcagtgaccacgacagccccaccagaccatgaccctgaccagggggctcacgagggcggagacatctactccaagacctgaaggaggagtaggagagatgctggggaagaggcagggaagggtgttcctggcagagggaacagcctgtgcgaaggcctgaaggtaagttttgcatatgacacctttgagaaactacttattgttcaactgaagcatagggttgttcagaagaagccagccttgtggccgggtgtggacttcctcccagggcaccagggagccactgcagagttgtgagcaagggacagacagaggtaggcttgtacttccaagagactcccccagctgccacatgcagggtgaatggaatgatgcacagaatccagtttcaggggtagtttggtacttggacccaggtcccagggagagagtccaaggagcccttctctggtcttccaaggagctgctctccccaagctccggatggaaggcgtgcccatggcaaccgctaggtggtgcccgtacaccaccagccaggtctttttttgccaaaagtagatcaggcccagagctgggcagaactgcccctgggtcaggagagcaaatcgtctctgtcttttggtcctggctccctggccaggcatcctggggccatttgactcccaggctcaggaaggagctggctgagctgcagtgagtatgttcttcgtctctttcctcaccttggaatctcagacgggagcaccctggctcccacttcagacaggaagattcttacctccctcatcagactagcaggctctttgtctccccaccagtttgaggggctccccatttctatcattcatttggaagctcatcagctctcccagaaggcatgggagcccttcaacacccccatcagactaggactacccatctcccccatcaaattagaactgcattgtctcacacatcaaagtatcactcctggccaggtgcagtggctcccgcctgtaatccaagcactttgggaggccgaggcaggaggatcacctgaggtcagaaattcaagacaaacctggccaacacggtgaaacccggtctctactaaaaataacaaattagccaggcgtggtggtgtgcgtctgtaatcccagctactcaggaggctgaggcaggagaatcgcttgaacccaggaggcacaggttgcagtgagccaagatcacaccactgcactccagcctgggcgacagagcgagactctgactcacaaaaataaatacattgtcttacacatcagaatgttgctccttacctcccctggcagactggaaatatagactggacactcgttcttgctgcacaggactggagcttcttatcttcttcattggatttggacagtcctgtctccctcatgggatttggtgagagctccttagtttccttatttttcccactgtgttgggccaccttgtccccaccatcagattggggaacaccttgtctcccagtcagaccagaggggcggactcctctgcccttgcaaaggttcctaggtccttcttacatccataggaggaaccatgcctattttaccaagagggaaactgaggcacagagaaacaaagcaccacttctctgtccagctgcagatgcctccacctccccctccgcccgctcctctgcccctgccctcccccgcccccgcccctgacctgggtaactcccctggcaccgggagtaggggaattttgccctgctggcctctgcaccaaccacctccccttatcggcagcgtcgccaccagtggcggcccagggttaaagtccggagagagctccgggcgcgaagcggatagggagggaggagtggcgcccaacccagaacggggactccccggaggtcgagccctcacgctgctgggaggagaggggatgggcagggccgtgtcccatggtaaggtgtgggttcaatccttcctttctagttcccggctgtgtggtcttgaacctggaacttcaccccaactgggagcctcagcttctccagctttaaggagtcaggggcgtgaaaatgtccaagctctggagtcagactccaggagtttgaatgctggctcctataacctgctgtgtgagatctggggccagcgagtgtgtctctctcagcctcagtttccccagctgtgcaatgaggatacctagtgggtggtggtgaacgctccatgagtttacgcacaagaaaaccttgggacagtggctgatagtggcgccagcaagccagcatgcaccccaccctttccttccaagaaaattgcctcctaaatctatgattggtaaccttcacccctccctctttgacccacctcctaacccaggccacctggtgtcttgctgcacagctggtctccctgcccgcaccacacccagaggcgtccttggaaacccaaccctgacccctggtcagaatctgccatggctccccagtgcccccaggagaaagccaagtgctgtgccacagccacagcctgaccactcactgcttgtatttttttttctttttctttcttttcttttctttttcttttttttttttttttttaagacagggtcttgctctggccccaggctggaatgcagtggtgccatcatagctcactgcagcctcaacctcctgggctcaagcaatcctcccacctcagtctcctgagtagctgagactacaggcacatgccaccacacctgggtaaatttttaaattttttttttagcgatagggtctcactcattgcccaggctggtcttaaactcctgggctcaagcgatcctcccgcctcagcctcccaaaatgcttggactacaggtatgcaccaccgcgcccagcctcctttctggttttctaataaagccttttgttcacctccttcaaacacttccccatgctcttcaggtctcagctcaaacaggccaggcccggtcccctgggtcctctctgtcctccgtctcctggttccctgtacctctccaaaagcccccacgaccaaaagaagtaaagatgtagggccgggcgcggtggcctacacctgtatttcccagcactctgggaggctgaggtaagtggatcacctgaggtcacgagaaccgattgaaccccagaggcagaggttgcagtgagccgagattgcgccactgtactccagcctgggcgacacagagagactcaacctcaaaaaaaaaaaaaaaaatggtggctgggcaaggtggcttatgcctgtaatcccagcactctgagaggccaaggcaggcagatcacttgagcccaggagttcgagaccagcctgggcaacatggtgaaaacccgtctctacaaaaaatacaaaacttagctgggtgtggtggcatgcgcctgtaatcccagctactcagg

SEQ ID NO: 67696 - DNA, 7610 bp, Homo sapiens
actttgagaggctgagccaggcggatcacctgaggtcaggagttcgagaccagcctgaccaacatggtgaaaccccgtctctgctaaaaatacaaaattagccgggcgtggtggcgcatgcctgtagtcccagctactcaggaggttgaggcaggaaaatcgcttgaacccaggaggcggaggttgcagtgagccgagatcgcaccattgcaccccagcctgggcgacaataggaaaactctgtctcaaaaaaaaaaaaattagctaagcatggtagcaatgcacctggggtcccagctagtcgggaggctgaggccagaagattggctgaggccaggagttcaaggctccagagagctatggtcacacccactgcactccagcctggatgacaaagcgagaccccatctaaaaaaaaaaaaagatttcctttattaaaaattcaaaatcgtagtagtcgtaggtagcaaaaatataaagaaaagcaagaaaattataccataaaagacaaaatacaggtcacctttccaggagggagggagctgtgaggcatgaagaggcatgaaggagcttctgaggaactagcaacactatttctctttttttctcttttttttttttttgagacagagtcttactctgtcacccaggctcgcgtgcattggcgcaatagcaatattgctcactgcaacctccgcctcctcggttcagctattctcccagcctccagagtgtctgggaccacaaggcgtgcaccaccatgccccactaatttttgtatttttagtagagatggggttttgccatgttgcccaggctgctctcgaactcctaacctcaggtgatccgccccctcggccttccagtgctaggattacaggcatgagccaccgcgcctggcccagcaacactttcttaacctaactgtttcctttacaaaagtctctgaaacagaacaatatattttaattgtacgcaattctccccatgttatatttcataattttcagggatttttttttaatcccacgattccaaatctctgttcctcaaatgacgtggctctccagggggcggtgggcaaaagttctgagccctggcatggagccctggcacagagacctggtgcacggtgcaccaggaacccacaggagaatttgggatctgaaacagcaaatacaatttgattttcccagaagtgagcaaatgtgctgtgactctgtgtgaccacagtgggctgaagtgacaagttcaagggtaggtgatgttcagagtagaggccacaagccagcgcctccccgcccccaccccacctcctgcagagcgtgacgccagtaagagtggtcatctatttctcttcccaccagccaccccagagcctggctctccctgggaggagatgcaacctcaacaatcctgggccagtcccattctttttggatgtggaaattgagcctgcccaggattgcttggctgagaggctgccgtgttgggatttgctcctgacttgcaaccacctgactccacagggatgaggcagtagagacagccctgccccatcctcagtatcctgggaatgtgttggagggtatgggtggccccgactgggacactgggatgacggttggaaacaagggaggtgagtgtgccatgtcccggctcaaatgaggaagggcccagtgtgacctcggctttcccaggagcctgagggacttttgcatctgtatttttaaatgctggtggccacagggcaggttgtggccttgagtaggggaggcaccgacttccagggaaaaggctggagtttcaggaaagggactgtccctcctggataggcaccatgctccaccctgccagggtgggcttgagaagaggggcttctaattcaatgggagggctcctacttagggagtggctaggctgataggggtggcatgatttcccccaactcaagtcaagaaggaaccactaatctgatggaggaggcacataccagctccctcctggggaaatttatatttcctagtctaatttgatggacaaaacttaattttactcggacagcactcctagtcccaagaaggattcaagatttacagcgtagtgagctctagtctgatggaggaggcaggacccaaacccacccacagggaggtttcctatgagggtggaggcatacctgttatcttcaggaagctctagtctagtctgacattcatccaaatgtcttctggggaggaggggcaaaattgctcccctcaattgagaatctagacagaggagggagtcatgctgccccaccccatttttttttccttttagatctagtcctgaacccagatgccccatgcatcttcacggaaccgatgggagaagcaaaatccacttttagagatatctaatctgtgaagaagtcacactttcattctcagggagattctgatctgatggaggaggaagaatgcaattcaaaccctcaaggaactcttacactgatgggaaacatgtccccaccttgggggcctccaagtctgatggcagaggtcttcctcccatccttgggaagctctagtccaatgagggaggcactcccccaccatgtcagtgccttccttcccgtaccttctccctgccctctggctgcccaaatgagcagggcagggggcttcccctccccacctccctggtgaatcctagaatcagggaacttctgcaggaggacaccacggttccccagccctgggacttccctttctccgtcagcccaaacccagggcctcactgggggggccagacatgcctgccctgctgatcatggctcacctatcaccccagcccccatgacatcacctggttattgcatgtccacagcatcccaggctccgcggggactttccatgcttgacctcgccagtgccctaccctgagagggaggagtctgtccccactttacaaacaaagcttagagggcatggcactcttgccagagaccacacagccagaaactggcagagtggggaacagaccaagtgggtctgactccagagccccagctccttaggaatgaggatgaggatgatgtacgtatacagtcctcattttctgccaggcaatcctgccaagggctatattgctgactcactagctcttctcggccatggtgttattattctcattgtcattattctgtaactcagacagggaaactgaggcccaaagagatagatgagtatgtagcagagccaatactcagtcaggttgtctgactccagtgccatcatcacagctcagctcccccagaagacagatgattatacggaattgggcatgcgaaagatttatggaccagcctgggaaacgtagcaaaatcccatttctgcagaaattttcgaaattagccaggcatggcttggtgcggtggctcacgcctgtaatcccagcactttgggaggctgaggctggcagatcacctgaggtcaggagtttgagaccagcctgaccaacatcgagaaaccccgtctctactaaaaatacaaaattagccaggcgtggtggcacatgcctgtaatcccagctactcgggaggctgaggcaggagaatcgcttgaacccaggaagcagaggttgcggtgagctgagatcccgccattgcactccagcctgggcaacaagagcgaaactccgtctcaaaaaacaaaaagaaaaagaaattagccaggcatgatgacacacacttatagtcccagctactcaggaggccgaggtgggaggatcacgcctgtggtcctagctactcaggaggctgaggtgggagaatcgcttgagcccaggaggctaagactgcaatgagctatgatcgcaccactgcacctcagcctcagcctgggcaacagagtgagaccctgtctcttacatacatatatatctcttaaatacacacacacacacacacacacacacacatatcttaaatatatatatgtgtgtatatatatacatacgtgtgtgtgtatatatatacacacacatatacatatatatacacatatatacgtatatgtgtgtgtatatatatgtgtgtgtgtatatatatgtgtgtgtgtgttgtgtgtgtgtgtatctatctatatatatatatatgcagggcacagcacctcagaaaggaaaggaggaagcaagaggagtgagcaagggggactgtcaagttgtaatgccccccctacaggaaggctcttgcattagagaagtcccaccctggtcagaaatggctagcacctctgaaccccacctgtcattggctggagactgcccaggagaccatgccccagccggtaagctgaagcagacctcaaaggagtcaactgccaatgtcagaggctgtctgctctctctgcatgcctggcagcaagatcaaaagtccgttttttttgtttgttttgttttgtttttttaaatttctgagacagggtctcactctgttacccagggtggagtgcagtggcatgatcatagctcactgcagcctcagccccccaggctcaggcaatcctcccgcctcagcctcccaagtagctgggaccacaggctcaccaccaccatgccaggctaatttttatatttttttgtagaggccaggcatggtggcttatgcctgtaataccagcactttggggggctgaggcaggaggatcacttaaggtcaggagtttgagaccagcctggccaacatggcgaaaccccatctctactaaaaatacaaaaattatccaggattggtggcatatgcctgtagtcccagccacttgggaggctgaggcaggagaaccacttgaacccaggaggcaggggttgctgcaccactgcactccagcctgggtaacaaagtgaaactttgtctcaaaaaaaaaaaatttgctgggcatggtagtatgtgcctgtagtcccagctacttgggaggctgagccaggagaatctcttgagtctgggaggcggaggttgcagtgagccgagatcacaccactgcactccagcctgggcaacagaacaagactctgtctcaaaaaaaaaaaaaatgtacttttttgtagagacggggtcttgttctgttgcccaggctggtctcgaactcctgggcccaggtgattctcccatcctggcctcccaaagcactgggattagagggatgtgccgccacacccagccaacaggttttttcttgaagggggatgtgagctgcctgtctctgtggctgccactcccatacctatatgaataataacaatcattttaaaataatatcttccatttactgagactttcctctgtgccaggcctgtgctgacgtgtgtgaattcatttgactctcacaacaccgccggaagacatgcactgtttttaccctcattttatagatgaggaaactggggctcagagagggtaaataaatcacctgcccagggtcacacagctggtaagtgacagaactgggattggaacccaaacaattagacagggccccattcacagatgaggacactagcccactagtacctggttgtctactgtcacctcgctgagaccactgtgaccttccttcctatgccccgccttcccagacccccatccacccacccagggcagatgctgatctccacactccccccaccgaatcacccctctctgatcaaggcagctggcaggggcggcggagggggtggggggacgagggtgtccagtctccctggcctgccaagagaggatgtcgcaatcctctgactcagcgtcgtgcgtgcagacccagcaagaggcagaaaggggaagattaagtcttggcttaggccccagatgggctgattctgctcaatgccaggagctcccagagctgccaaggctccagggtggggaggaaccaggaggtgcaggccatgctccaggaagctggcccgcattcacccgtgggggtggggcagagcagcctcagggagcggagccgtgtggacttccagcccagggcccagactggaggcagcctgaccttgggcatgtcccttcccatccaggcccagagtctctgtatccttctgtctgcggaattcacttgctctccctgaacctctctggaggctctagtggttgttcctcctcaagggactcttaagtctaactctatttttttttcttttttgtttgagacagggtcttgctctgccacccaggctggagcgcagtggcacgatctcagcccactgcaacctcggcctcctgggttcaagcgattctcctgcctcagcctcccgtgtagctggcattacaggcgcccaccaccacgcccggctaagttttgtatttttagtagagacggggtttcgccttgttggccaggctggtcttgaattcctgacctcagatgaccctccagtctcagcctctcaaagtgctgggattacaggcgtgagtcaccatgcccggccccttaagtctaactctattccctcctgctgcaatgccatcctctctccacgcacggaccctccccataccaggaggcagcagagaagagttccagggtgcgaatctccatgggtgtcctcggacatatgactttccctctccatgcctcagtttccccatctaaaccatttcttcccagggagaaggggcctagaatcaagctggaagggcacacctgcagtctccgagactcatggccacttctcccaggtcagaagcgtgctggggtcacagggacctggcttgaaatctcagctctccccagttcctcaccgtgtgacccgggcagtgagttcacttctctgtgcctgtttcctcctctataaaattgggtttttagctgaattttccttacaaggtgttaagaggattaagtgggccaattcttagttgcaactcagcccggagtgaatgtttctgtcttgtctcctctgtgagtagaaaagggtgagaaggaggccctggtctgctggatagggtaagggttaaggccagcagcgtggagacagaaatgaacattattcattcatttattccacacacttttcttatttaatctgctcagtaagcctgtgaaacaggatctgttatcatcctgttattattattattaccattattttgagacagagtctcactctgtcacccaggctggagttcagtggcatgatcatagctcactgcagccttacacctaaagcaatcctcccaccttaccctcccaagtagctaggactacaggtgcctcctgagcccagctaatttttaaaaattttgtgtaagcctggtgtggtggctcacacctgtaatcccagcactttgggaggccgaggcaggcggatcacaaagccaggagttcgagaccagtccagccaatatggtgaaacctcgtctctactaaaaatacaaaaattagctgggcatggtggcacgggcctgtagtcccagctactcaggaagctaaggcagaagaatcgcttgaacccaggaggtggaggttgcagtgagccgagattgcgccattgcactccagctgggtcaacaagacggaaactctgtctcaaaaaaaaaaaaatctgtagagacagggtgtcccctt

SEQ ID NO: 67697 - DNA, 7585 bp, Homo sapiens
cagctacttgggaagctgaggcaggagaattgcttgaaccagggattggagattgcagtgagccgagatcatggcactgcactccagcctgagcgacagagcgagactccatctcaaaaaataaaaattaaaaaataataaagtcacaaggaaggcacagagagggaaagccacctgcctaaggtcacataactagcacatggacgagccagggctcaaaactatgtctctaagcccagcatgttgaattctattttccccaatgaagcaggtcctgctattgaaaacacaggatatttgatgaggacaataataatatataatgttatattattattattattattattattattattattattataaaactaatagcagctaaattgcatcaagagccttctatacatcagaccccatgggacagagtcatattttcttgatgtgatccactctacagatgaggaagctgaggctccacgaggttaagtaactgcccggaagtcacaaagctaacgatcaggagacaggacttggacccaggcctcaattcaaaacaaagtaggacaaggaagccagatgcggtggctcacgcctgtaatcccagcactttgggagaccgaggagggaggttcgcttgagcccaggagttcgagaacaccctgggcaacacagtgagaccccctgagtctacaaattgttttttttattagccagtcattgcggcacatgcctgtagtcccacctacttgggaggttgaggcaggaggatcatttgagtccaggagttcaaggctacagtgagctatgatctcaccactgcacttcagcctgggagacagagccagatcttgtctcaaaaaaaaagcaggacaagacccagtaattgagccagatgggaacttaggccctgaccagccctactctctcctcttagaaagggaaattgaggcccctgagagcaagaaagctgcctcaagcctacagacttccagatggaatttcgtttccctctcaggactttgagcaggtaaattcctggcctttcctcccccaggatgggttggggaaaaagaaacagcagctggggaggagatctgaacaggtacaaagggcggcctgcatgaggggaaagtggttagacaccaagcagaacttcctggcctcctctgggaagtttctaagactcatccaggggctgcccctgcgggtgggggccctccagaggccaaggcccagagaaaggagaccctagtcctttccgcctggggtgcaaggagccgggggagggtgggggtggccatcctggttccgcatcctccgttcccgacattggagggaggctgctgtgggagctgggactttcctgagagcagaagattctgggaaattagagacagctgcagggcggggctgcctcccagcctcccttcccttccctccccttggtccctgctggctccggaggcacgcctctccacccctccaccccaccagctcctcctcccctagtccatgccttccaccctcggaccctcagatcttttcccctgagcctctttcttctccctcagatctggcctctaccctcagactctctccaaatcttctttcctcagacccttctttcccctccaactctctcctcctccctcagagctgcgtcccctcacttagtgcttctcagacttcctcagactgtgccctctccctcagatactctcccctcccctcagaccctcacctcctcactcagaccctcacttcctccttcagaccctcacctcctccctcagacccttacctcctccttcaaaccctcacctattctctcaaaccctcacctccttcctcagatgcttatctcctccttcagaccctcacctcctccctcagacccccacctcctccttcagagcctcacctcctctcagaccctcacctcctccctccaaacctcacctccaccttcagacccttacctcctcctttagaccctcacctcctctctcaaaccctcacctccttcctcacatgcttatctcctccttcagactctcacctcctccctcagacccccacctccttcagaccctcgtctcctctctcagaccctcacctcctcccttagcccctcatctcctccccccgaacctcacctccaccttcagaccctcacctcctccttcagaccctcacctcctctctcaaaccctcgcctccttcctcagactcttatctcctccttcagacccttgtctcctccctcagaccttcacctcctccctccaaacctcgcctccaccctcagacccttatttcctccatcagacccttacctcctccaacagaccctgtcctcctccttcagatcctctccccctcctcccactaaaccatctacttctctctcagacctatcttccttcttcagatcctcctccttctgacccttttatccctcttccaacctcagagaaccatcagcaccctctcttccagcagcaccgtctctcccagcccttcgaagctcccaccggacccatcacatcttctcccctctacagtcctgctaggttggaaccactgcaccagctgccctgggatgccaggagtgggacaggcttgggtgtccttcccaccctacctctgagggtccccaccctaagcctcgcccctccaaacctcagctttcctttctgtgcattgggatagtgctccacacccctctcctgtgtctgagggtccccaggggtggggttggatgggcagggaacacagcccccagcctgtccaaccgaattcctcccctcttcccttgctgtggcccccacaacaccagcaggcaggggttgccattggtcccattttccagaagaacaaactgagtctcaaggcaggggatggcttgtctgaggtcccaccgggagcaaggggtggaggtggaattaacacaggtctgtgctcgggatgtttcgccatgaagggggataagggagatccagagagaggtcgaaaggaagggaaggggtgaggcctctccacacagccacttctcacatcctgggttaacgatccactcgggtggggcccgagtccggccaaagtcccttcccggggccccaatacccactttcaaggtcccaggggacacagagacagcaacagagatggggagacagagacagagggcggggcaggagacaaccagagggaggtcaggcaagtttcgaagacagaaggagaccgggggagagaaccagagagacgccgcgtgccccctgggcaagtccggggtgcagcccccatgccccgccccctgtgtccccaaagcctccctctccgcctcctgtgactcagtgacccggactcaaccccagcggctgccccgcccccagggaaatccgggaaagccccggaccttcggggccccaccccggggcggggagagggagaggaggggaggagacggggaagagtcccgcctccctcctccctccctcccatctccagcctgagtcatgcccccaacccgcctagcctgttccccacccatcaacccctcctcgaggtgggaggggaagtcggggggaagccaaactgctccccgctcctgcagcaccggcctcggtcgcgctgactctggcctggtgtccgtgtctcttgctatctctctttctctcaagatctctgcgcctgtctccatgtctctttctctctgtgcacctaggattttccgagcacccaccccggtgccccgcgggccccggctgggggcagggcccccaacgagtgcagagacacaatcagtggagcgctccccaccctcaccccacccccagcccctttagacccacagctgatgaggcacgtggagtggcagagatggaagaggggagggagaggaatcgttcctggccgcctgccgagtgccagtccctgccccgggtgcgtctcttcactcccactaaggaggaaacggctcagagaggggaagtgtttggccaaggtcacccagcgagtaagtgggaaccgagattccaaaccccgtcccagagatgccaaggcctcctgagagacagagaagcagacagcaactgagaggcagagagatggtgacagacacaaagagacaaaagagagagacagagacggaacagagcacacagagacaaacgcggggttgcggagagaaacacctactcagacaggagaaccagagagacagttacagactcagagatagagatgttgagagatagggccagaaagacaaaaacagaggcagagagagcggcccttggcagcaggggtggggacacccccccaccccccgaccccgcctcctctccccccacccctcctttcctctccctcccccgccgaggcctggctgccccaggcgccgcgggccgggagggggcaagcggggcgcggcgcgggcggggcgcagggcaggctgcacctcagagcggcgggagcagcggcgggtccaggaaacccctggggcgtacgggtggccccgggggggccgggggcggggaggcgggcggccggcaccgccccggccgacaaaagtcccttcagttcagccggctgcaggggaagtcccggcgcccggcgaaaccaccctcccgtgcagccgagcccagccgctctccggccgccgtccccggcggccccatgccccgatgccccgcgggggccatggacgaggggcccgtggacctgcgcacccggcccaaggccgccggactcccgggcgccgcgctgccgctccgcaagcgcccgctgcgcgcgccctccccggagcccgccgctccccgcggcgctgcgggccttgtcgtccccctggaccctctgcgcggcggctgcgacctgccggcggtccccgggcccccccacggcctggcccggccggaggcgctttactaccccggtgagtggcccccgagggtccgggccgggtgggatccacacagagcatagggtcaccagagccaggaggcagagcttgaggcacaaaccggtgtctctccagggacctgggggacaagaggatataagcccaggttccaaggatatagatatgagatcatcggggagccagtaagctgtgccttgggatctggggatttggggaccctggggggcaaagcccaggggctgagtgacgtgggggggggggggccagggacaatgcccagtggtacaaatatgggggtgtcagggaatcagggcacagagcctggtatcctaggggcaagaaagtacaagctcttaagccagatgtgtagcgttatgaggaagctgagctgggctggagaaactggggttccctgtatcctgatattattagaatcaaagggagtcagggtaacagagactggggttctaaggagacagatactgaggatctcaggatgtcacaatctcaggaaccaagatatctggagacatgggcattatgaaaacagagatggggttctgagcaccccaatatctgggatcacaaggatccaaggaaatgaaccagagctccagggacccagataccagggggtcttgaggacccaggagaacagagacccgggtttctgggtactcagttatgtggggccacaagtgatcagggtcctatttgaggtcaagatcaggtgggcagaagggatcaggggactgaggatcctaagattgggtaattctgagactttgggtaatttagaggcaggatgaaaatttcaggggtctccagacagaaagcctcaaggcctcaaggcctggtattggagatacgaggacctggaaacttgggagttcaagaacagagggcccacaaggatcagcagatgacgaagaccacacactcttctctccatcctatctccatccctgatctcaagaaggggtgtcctctaccacagctgtggccacgtcaccatccccaattgacccccaaagctgcagagagccgttctacagagccccaaaactttaggtagtttctgcaccctccaccccatcagcgtgacagctggagagcctcaagctatgtgcatcaggagttctgccacggcctcccagctttcctattccaagagtgagaaagcaggcctcagttttccccgtctgtgtgatgggttggtatggatttgcctgctgccatggtcccctcgcctttgtttgtttttgtttttgttttttgagacagagttttgttttgctctgtcgcccaggctggagtgcattggcgtgatctcggctcactgcaacctccgcctcccaagttcaggggattcttgtgcctcagcctcccgagtagctgggattacaggcatgcaccaccacacctggctaatttttgtatttttagtagagacagggtttcaccatgttgcccagactggtattgaactcctgacctcaggtgatccgcccgcctcggcctcccaaagtattggtattagaggcatgagccacagcgcccggcctgccgtggcccctttttaaacagtttgatctaaaattacccatgcgtggtggtcagcatctgtaatcccagctacctgggaggttgaggcaggagaatcgcttgaacctgggaggcagaggttgcagtggggcaagatcgtgccactgcactccagtctgggcaacagagcgagactacatctcaaaaacaatttgaacaggcttctggtaacacctcctctctgcctccactctccccaaacccactctacatttatcccacaccctgcacccagcaattcatcagccacaaaatcactctgcagacagtccctggggtcccctgctaggtgatgatgggtgcaccctctgttcttaagggaccctttgtctgattggagattgaggtcagaagataagtgacaatgagggtgaccagccctagagggagaggaagctgccagagcccagaggagggacgtggaagggggtttgttttaggccctgaggaccctgtatgggatgcaaaagggacccaggagaaagggcaggtgacaccacaggagcaaagttttagaagtggggggcgggttgagggtctgtgggtgtggcctcacccatgtcccttctctgtcctccattgtccaggagccttactgcctttgtaccccactcgggccatgggctccccgtttcctctggtgaacctgcctacacccctataccccatgatgtgccccatggaacaccccctttctgctgacatcgccatggccacccgtgcagatgaggacggagacacgtgagtgacagtcccctattaaggggaggggtggttgggaagaccagccgtccataacacagggccactcagctcccagtggacctgagtcagaactcggtctccaccacaggctgtgtgaccttgagtaaggcccttccctgctctgagcctcagtttcctcctctgaagaatgggcaccttgagagcatttacctcctaggccactatttttgtttggtttttgtttttgtttttttgagacagggtctcactctgtcgcccaggctggagtgcagtggcacgatctcagctcactgcaacctctgcccc

SEQ ID NO: 67698 - DNA, 3167 bp, Homo sapiens
ccaccgagcccagcttacagctttactttgccattttctattctagtcgacttcattgtttcatggtcacagcccactacattaatttgaagatcccctaaattgatttcacaacccccatggtttatcacctgcagtctgaagaacatgtttgtgaggctgctgagaagtcctgcacgggagggtttggtctgtgcctagcacatagtaagcactcactgcaattgatcatcatgattcttattattctattgacctgggttggaatctcagcgtggccacgttctactccctctgtgcctcagtttccctctctgtaaaaacaggaaccatcgcgtgtgagggtctctgggaggaagaaatgacatgatttatacaaagcacttctgtgagaattagtttggggcctggaaaccacaggtagagatgaacaggcctgtttctgcagagaagtagcagagggctgctccgccactggcccactgagtgatttcatgtccctgagtctcagtttccctatttggaaactgggtctcataatagcacctatcacaattaggattcagtgagatcttgtacacatgtattaatacagtgcacagaacagggctgggcaaacagtaagtgctcaatgcatggaaatgggtaatgtttgagcagagctcccagggtggttgcaggccatctccagagccctagcaggagaaagtggcctagattataaagagctaataaaacctagttccctccccttctgggtacctctggggggtcatctatgaaatgggcttaatcagacagtctctgcccccagtggtgagctgtccatgctgttgaaaagcagggtgcttgccagaggccacccggcccaccagtctccagccccaggccctccccacaccctccctctccgactctcccccaaggcaaacacttctgcctcagctgcctgctgggggaaatcccttcccgcagaacttgaccgcaacccagctgctctgcctcccccacgtcagcacccgtcactcactcgcagcctcccccctcctggcgcttcctccaaccttaaccccttccgctggggctgagactttaccggaacgggcagcggcccggccccagcctgcgccaccggctcctcttcacacccgcgggggagggcagtgggggcgaggagggcgggggacgctaagtctgggtccccgcagaagccaaaaggttgggaggctgggcttccatctcctcacaggcgggtacgagccttggggcatttggacccccaagaggttagggactgggcagccagaaacctggggagggggcaggaaggcgggggcggggggggggggtgatgttctgattctcagaaggcagaagttggggaactgtattccttaatctccgaggggatgaggagcagcttggcagcttggggacctggcactcagaggggctttacgggcaggaccagatacagaaatttgcagagtcccttgttcaaaacttaagaatttcacgacagcggcagcaggacgttgggctggtgaaactggtcacgccaaggggcctgaaagtctgtgttcccaaagggccagggtttgaggcgctgtatttctgggtctctgaggggacaaggactggcaaggtagtttgggatcctggagctctgaaggacgggggaagtccttattcttaaagaagagttagggctatttctggctcccaagagatgttgggggtggatgccgggataaggaggacttgcagccagctggagcctgagctctgcggggtggagttccagagggtcccccaggcgggaggactcgggattatgcgccccccctacacacacacacctcaagggagctaggtcttcttgggctgggcactcccttcccccgccccattcgaggatggaagttggggtgccaggggtggccagggtagatccccggcgggacaggcttccctcccccgggagcaggaagcagagccccgcccagcagacctgttactggaagtccgagggctgggtcgcccctcccgtccccacttcctccagccccgccccaccccctgcggcccgcgcgtttatgggaactcaggcctggacggtttctctgaaatcattcgctgcgtctgccctcacttaaccctggccgccccgagagggacccaggccaggcgtcctgggagatgcagagaaggggggacccttcccagggaccccggcccctccctcaacattttatttttaaatttggctttcacggattaggagtcaggttcagcgattcacctgcgtgatctcaccctggcatgtggacgctgtactttacataagagaaaactgaggctccgaaaggcccccatggctttgccctagcacgcggctacgctaggaggggttgtggcccaatttgcaactctggccccgggatttctgcactccatcagaaccacctgggaggctagtttaaactggattctagagacacattccacaagagaaacgggtgctggtgagaaaggaattacttagtaaactttaaataaagatcctgccacccactgtgtacacgcagtcctccttgggtcctccactctgtcccccaccccatgcaaacagcacaggcgtgcacaagcacgcacgcatgcacacacaccagtctctgaatagctgttctaggttggggtctctggaaactgagcaggaagtttattggaaatgctctccatcaacacctgtgggatgaaggaagcccatctgggcagagggagaagttgagctgctgtgtcgcctccacacggcctcagctgtcccacagggaatattgaagctggaatggccttcagcattggggtcaggaggctaggccttctatgctggcattaaccagtgactggatgccattgaagggcagctgcccttgattcacatggggcgtgaccttggacaagcagctctcttgagttgagggtaattcccaaatggtctgaaagctgacaatcttcccagaagctgagggagtgagtccttcagtctagaagggggttctggactgtaccgcctccagaacaatggccccatcccagtttgtcctcacctcccttttagtcaaaacttttgttccagactgggcgtggtggctcacgcctgtaat

SEQ ID NO: 67699 - DNA, 1572 bp, Homo sapiens
atttttagtagagacagggtttcaccatgttggtcaggctggtctcaaactcccgaccccaggagatcctcctggctcagcctcccagagtgctgggattacaggcatgagccaccgcacccagccaatatttatgtttaatccttagagcaacttgcaggtttgctccaaggtttaaacatgaacactagtcaagctaattgtgctcctctcctcctatgcagtggcggcaaacagcagtgccctcagtagtatacgcagcctgctgcgtgtagcggtggccttaagagaccttggagatagccctttccgatgcatgttcatgtttctgatcttgacctcaccccagtctagactccagacaggtatgcgaggcgcctttggaaagccccagggtgtggtggccagggttcacattggctaaggcatcacgtccatccgcaccaagctgcagaacatggaacacgtgattgaggccctacccagggccaagttcaagctccctggccaccagaagacccacatctcaaggcggtgggactttaccaagtttagtgcagatgaatgtgaagacacggtggctgagaagtagctcatcctggatggctgtggcatcagatacatccccaatcataggcccctggaatagtggcgagccctgcttactcacacccaccaataaatcctccttcctgtccaaaccgaaaaaaaaaaaatatgaacgggacacagtggctcacgcctgtaatcctagcactttgggagctggaggtgggcagatcgattgagcccaggagttcaagacaagcctgggcaatatggtgaaaccctgtctctccaaaaaaaaaacaaaaattagccggtatggtggtgcacgcctgtagtcccacccactggggaggccgaggtggcaggatcacttgagcctaagaggtcaaggccgcagtgaatcaagattgcgccactgcattccagcctgggtgacagagagagaccttgtctcaaaaaaggaaaaaggtggggggaagtaaattttgtgcaatacttattacaggccatggtgctgagtaagagcttcataaatgggaattgctgttgccatcatctaagaatttttgacagttttgaggtcagaggaaacacagtagagacgatgagacctattctttgtcctggtagaaaaatggaacaatgaggtcatagcctagatgtgtgttttagctacattttttttattccacggttgtaattaaattaaataatatagctgggcatggtggcacacacctgtagtcatagctactcgggagggaggctgaggcatgaggatcacttgagcccaggagtttgagaccagcctgggcaatgtagtgagaccccatctcttgaaagagtgaagtgactcgcatctgtaattccagcacttttggaggccaaggcaggagaattgcttgagcccaggagtttgagatcagcctgggccacatagcaagatcctctctctacaataaaaaaaaaaaaattatattaggtgcctgtggtcctagctattcaaaggctgaggcagggtgc

SEQ ID NO: 67700 - DNA, 5482 bp, Homo sapiens
tatgacagtcatcgtagtgggtgtgaagcagcattcactgtggttttgatgttcatttccttagtggatcacattgtggagcatcttttcatgtcattcacttcatttgtatccactttgagtcaaatctggaaaaagagttattatagttgcaaagtggatacaaaaaaacctgtcaaatctaggaaaagagttcatatagttgcagattttttttcttttttagacaagatctcactgggtcatccaggctggagtacagcaacacaatcatagctcactgaagcctcaaactcctgggctccagcaatcctcccacctcagcctcccgagtagctgggaccacaggcagcatcccagcatgcccagtttttttttgttgttgttgttctttgtttttgtctttttcagacggagtctcgcgctgtcgcccaggctggagtgcagtggcatgatcttggctcactgcagcctccgactcctgggttcaagcgattctcctgcctcagcttcctgagtagctacgattacaggtgcgtgccaccatacccagctaagttttgtatttttcatagagatggggtttcaccatgttggtcaggctggtctcgaactcctgagctcatgatccgcctgccttggcctcccaaagtgctgggattacatgcgtgagccactgcacccaaccatttttggttttttggttttgctttgttttgtttttgtttttgtttgtagagacagggccttgctatgttgccaggttggtctcaaactcctggcttcaaccgatcctcccacatcagcctcccaaagtgacaggattacaggcgtgagcaccacccctcttccagcttgtggtgttcactggtaatctttggtgttgtttggcttatagatgcatcactccaatctctctgccgccatcgtcatatgttgtgtgtgtgtgtgtgtgtgtgtgtgtgtgtgtgtgcacctgtaactgtatccaaatttccttttcataaggatatcagtcagatttaggacccaccctaatccagtagaaacttatcctgatctgattacatttgcaaagaccttatttccatatagggtcacattcataaattccagtgaacatgaacttggtggggaggggaatgattcaacccaggccactcattattatgtgtttatgacacacactgttggtatttgtgtccagttcattcaccttaattgctgcgcaagagtttattgtgagagtacaccacaatttatgtcaggctgctggtggtgaacacccaccttgttgccaatttcctccacttccaacaagaatgcaattaacatccctgaacatgtctcttggagtttcttagggcagtatctttcaaacggccaaacaagatccattagtgggttgtgaaatcaatttagtgggttataaacaatttttcctttaatgaaatggaattaaatagaagctattagagtgcatgctcatagtcggagtgagagctcttctgtgaaacttttgcttcaggtgtctatagctgtattaatgtccagcaaaagtgtttacaagccacagctctgaaagaggtaactggacaaatgacctgtccatttgtccaaaggtctcgtggatgctgccaaattgctctgcaatgtagtttgtccatttgcactcagagcagctccttgccaatacttgccagtcaacactttgaactttttcaggctaatgggttttcatcctgttttgttttttgttttgttttgttttgttttgttttgttttttgagacagtctcgctctgtcgcccaggctgtagtgcagcagcatgatctcagctcactgcaacctcttccccccgccgggttcaagcgattctcctacctctgcctcacaagtaactgggattacaggcacaccactatgcccagctaatttttgtattattttaattatttatttatttatttttatttatttatttttgagatggagtctcactctgtcacccaggctggagtgcagtgctgcagtgttggctcactgcaacctctgcctcctggattcaagcgattctcccgcctcagcctcctgagtagctgggactgcaggcacgcaacaccatgcccagctaatttttgtattttgagaaagggggttttgccatgttggccaggctagtctccaacttctaacctcaagtgatccacccacctcagcctccaaaagtgctgggattacaggcatgagcaactgtgcccagcctaatttttgtatttttagcagagatagggtttcaccatgttggccaggctggtctcaaactcctgaactcaagtgatccacccgccttggcctcctaaagtgctgggattacaggctacaggcatgagccaccacacccggcccaatctatttatttattttatttttttatttattttctttttggtcgttttttaatttaaagaaaaattttaagattttcaattcctacgagatgggggtggggctaaggaggggctcagggtgcattgggaggttcggctctcatcctatgccccctacccgccgacctcaaaggacttttgagaattcagtgtgccaatgtttgcaaagcattacacacagggcctgatagacagcaagcattcaataaatgctagctatggccgggtgtagtggctcatgcctgtaatcccagcattgtgggaggcccaggctggaggattgcctgagctcagaagttcaagaccagcctgtgtaacacagtgagacatcatctctactaaaaactaaaaaaaaaaaaaaaaaatagccaacgtggcagtgcatgcctgtagtcctagttactagggaggctgagacaggaggaccacttgagccccagaggtcaaggctgcaatgagtggtgatccaacaaccactgcactccagcctaggagacagagcaagaccctgtctcaaaaaaataaaataaaataaaataaaagttagttattactattattctctgattcaaagttctctagatatgtgcacatttgcgatcagaacttggcctggtctgaccaggcatggtggctcacgcctgtaatcccacctctttaggaggccgagcaggcaggattgattgagcccaggagatccaggctgcagtgagctatgatcaggccactgcactccagcctaagcaacagagcaagaccaagcaagaccctgtatcacaggaaaaaaaaaaaaaaaaaaagaacttggcttggcctaggatggggcgcggccagaatgccttgcttaggggcgaggcccacagcgccccgatggctgcccagcgagcaactgagcaaccaggctgatgttacaggttctacaggttgggtgaaagccacgcccggccacccctacacaaatgagttgctccccgcccccacagtcttgaacgccatcctcccgcctggcttcttcgggactcaggagtatcttaactctggcctgatttctcccatgccacaccattaggggcacccagaaatcttgttgccaaattcctgccccctcagacacccactttcaaacccttgcttctagggaacccaagggcctggtggctctgtgcctccttcctcggagacagagagagagcaatgcctccctgaccggttcctccttgaaatctcagttatctgacctttaatcccatgccacgaccaaagacccataccttcgacaaggcgctgtgtccaagtcccacctctcggtagctcccagcccttcccctcccctctccaagaagagtcccgtggcagggcaaaatggctcacgcctgtaatcccagcactttaggaggccgaggcggatgcatcgcttgagctcagaagttcaagaccagcctgggcaacatggtgagaccccgtctctactaaaaatacaaaaaataaaataaaataaaatagccaggactgctgatgcgcgcctgtgaccccagctactcaggagggtgaggtgggaggatcacttgagcctgggagacagaggttgcagtgagctaagatctcaccactgcactccagcctgggtgaaaaagcaagaccctgtctcaaaaaaaaaaagtcccaggcctcccctagccccttgcccctctctgaagggacccagatatcctacctgcacttcccacccacacactgagaagccccctcctaccgctacccaccaaagccaccccaccctgctcctttttgagaatcaaactcaaaccgcaccagctaatttttttttcttttttgtatttttagtagagacacggtttcaccatgttggccaggctggtctcgaactcctgacctcaggtgatccgcctgcctcggcctcctaaagtgctgggattacagttgtgagtcatcgcgcccagccacattttattttatttttaaaaattttttagagatagggcctcactatgttgcccaggctggttttgaactcctgggctcaggtgatccttccacctcggccacccaaagtgctgggattacaagcatgagccaccgctcccggcctccaaatcccacctcttgaagacccacgtgccaggtcctccagcccccgccccctttggagacactggtacctgcaggcccctccccggttctctaggacccgccctctcctttcactctgggcgaggccgcccctatcccagccgcaccggtccttcccggcacacgcgaggctcccatggctctggcggtggccccgtgggggcgacagtgggaagaggcccgcgccctgggccgggcagtcaggatgctgcagcgcctagaagagcaatgcgtcgacccccggctgtccgtgagtcccccttcgctgcgggacctgctgccccgcacagcgcagctgcttcgagaggtggcccattctcggcgggcggccggcggaggcggccccgggggtcccggcggctctggggactttctactcatctacctggccaatctggaggccaagagcaggcaggtggccgcgctgctgcctccccggggccgaaggagtgccaacgacgagctcttccgggcgggctccagactcaggtgagccttcgccccagaacaaagtcctctggggtgaggcccaggtcttgctcccagcccctcctcccccagacccaggaacttaggcccccaccccctcctccctcagacccaggaactcaggcccccaccacctcctccctcagactcagggctccagcccccagcccctcctccctcagacccaggggtccaggccccagcccctcctccctcagacccaggaactcaggcccccaccccctcctccctcagactcagggctccagcccccagcccctcctccctcagacccaggggtccaggccccagcccctcctccctcagacccaggaactcaggcccccaccccctcctccctcagactcagggctccagcccccagcccctc

SEQ ID NO: 67701 - DNA, 587 bp, Homo sapiens
ccatgttggtcaggctggtctcgaactcccaacctcaggtgatccgcctgcctcggcctcccaaagtgctgggattacaggggtgagccaccgcgcccggcctacttattttttaataagccctgtcctggctttcttttctccctacgctgccaccccaggatttttgggaccctggattgctggggagaagcagatctcttagtatctccggctgagtacacacaggcttcgatcaatactgagctgtcttcaaacaaacagctcaggaagtccgggaacattattcgaccacagcaaacaagagagccagcaggaagcggggcggtgggggggagggtggcggtgaaaccagccagggaagctaaaaacagatccaacctgccgccaaaagcaaatggaaacattaggaggcactcagccggctcccagaggacagtgatgggggacacagccaggacagcaggctgacagggacctcgggcctgatggtgacacctttgcctaggccataccctccgcctcccccaccctttcctcctctccccaaaccctgcctgattaaaattccagtccactcccaccta

SEQ ID NO: 67702 - DNA, 539 bp, Homo sapiens
tcttgagggaggtggaagtgggcgatggctgctgagagggcatgtaccagggtccagcccaaacagaaggtgcacaggctggggacagaagagctagggtatgggtgtcggtgctcacagtgtgtgagcttgacagcacctgggactgtcttggagtgccgccgcattccccatgagtgagtttgtattgtatatcctgggatgctccagtctggatggaatctgcacgtgagtttgtgtgccttgcaaacaaaccttccctgagcacctgcactgtgtctggtcttgtgctgggcggggtgcccaggggaggagcccttagctcaccacagtgatcaagacatccctggccctgccctcacaggctcacagtccactgagggagacagacctatccccagccagggacccccagagtgtgccgggctcaggtgggggagcccagagggggaacctgacccagccagggaaggcagaggggacttcctggaggaggggatggtacagttaatcctaaaaggtctttcccaatgtaacag

SEQ ID NO: 67703 - DNA, 918 bp, Homo sapiens
agcgagaccctgtcaaaaacaaaacaaacaaacaaaaaaaacgttggtctcctgtatgaccaatggataaagtaaccttgaccagtctaataactcccaggctgacctgtaatccaagccttctctgtatgtctgagcaggcaaagcccagctccagggctacctcaacccccaggctgatcagaagcttgggtaacctctcccagtgtggccagcgaccccccaccctcccacgttctgaccactgtcctgggcaactagtgacatctagtgggggattttgtcccagtctgacctggcctgtaggggccttgggcagtcggacctgtgacccacgcttcctagcagtggctggactcctcccccttcccgcaggtgccctggcctcttcccctgccctcctcacctgctctggccagtctgactcctcccttccccacaaggttgggagggaatgaaggagagagcgggaaggaggaagggagggtggcattcctgggattccctggatagggggaagagtgggagggccttccatgggtgagcaagcagagagggcaccccgtaccccacccccagccccatcatcgaagcggcctaggaggacctggatttgaagaccattgaaaataagagattaaaccggttgattccaggctactggtcagacgaggaaagcagcccagagcactgaccacaggggaaaacatctccgggcatactgggagcagctgctgggggccactggtcaggctgcgggggtcactggttggactgggagaggccagtgcaggccactcggacggcacgcttggggccattagttacactgggagaggccatcgcaggccacaggttgcagtggggtcctctggttaaaatcgacgatgccagcccaggctgctggtcacagtgggg

SEQ ID NO: 67704 - DNA, 4106 bp, Homo sapiens
atcaggaggtcaggagtttgagaccagcctgaccaacatggtgaaaccccgtctctactaaaaatacaaaaattagccgggcgtggtggcgcgcgcctgtaatcccagctactcaggaggctgactcaggagaatcgcttgaacccaggaggcagaggttgcagtgagccgagatcgcgccactgccctccagcctgggcgacagagcgagactccgtctcaaagaaaaaaaaaaaaaaaggatcataactaagactcgaatgcggagggataacagcctctgctacttgaaacctagtccttctggggaggaaagcccaggtgtgtggcaggtggaagggagggcgagcctaggtggtcctcttgctagggcaagaagcccccaagcacctgcccccagctgagcagctccgcgcctcctggccctggacgaacttgggcccagactggcgctccgtggcaccccctcccccggcctcccgcttcgcgccctcatcccgccccccggcgcggcctcaccagctccccctgggcagcccaaagaatgcgaagaggtaggtgggggtagggaggagggcgagccgctgggagagacaaagggcccgagtctgagcgagagacacaaagacgcgaggaggctggggagataggggaagtgggacaaggacgcggggagtgaccaggtccggaggccggactggagcccagccccacccagcccggccgggccagcgcagcgcgggggccggtctctgctgccccctggcgggtggctgcggtgagaaggcggcgcggagcaggtgttgggaggggaggaccagggcgcgcagggaggtagggagggaaggaagcagagaacagagcagggacagagagacagcgagagagactcgcacgcagagacaagagacgccgagagggagacacagagaaagagacagggacagagagacacagatagagacagagagagacacacggagagacagagacagagaagcacagagatagagaggcacagagatagagacagagaaacacagagacagagaggcacacagagacagagaggcacagagacaggccgatagagacagagatacacagaaatagagacagagacagagaggcacacagatagagacagagagacacagagacagagtcaaaggatggaaagagacatggggaccaagtgacccagaaacagtgacagacaggccgggcttggtggctcacgcctgtaatcccagcatcttgggaggccgagccgggaggatcgcttgaggccagcctcagcaacatagtgagaccccgccgcccccccgccccgtctcttttattgaaataaagaaacagtgactgacaaaggaagaccagaaacagagcgacaccgaagcatgaggacggaaagacccagagaggcagaaatacagggacagagaggaagacccaaagagagtgagagagacacaaagacacgtaagagagacagagaaatccagaaagaaacgagtgcagcgacacctagagttcggggcagagattagaaacgcacgagggtacgagaaacaggctcagggcgatgggctcgacctgcggggaggtcgcacaaccgggacgtgctgggggcagaaccgtaaagccccacgtgcctcaggcaactgtgatgagaggacccgggcaggcaggaaagggcaggattcgaactgtgggtgggacagaggccaggacggactgagctaagagaccgagagaactccggctagggcgaggggcggggctggtggaggcggggctggtgggggcggagtcggccggaagggccgaaaggggcgtggcaagaccttggcgaggcggccggtaggcagggggcggggcgtgggaactactcgggagcagagggggcgtggctagaccttagggggcgtggtttaacgccgggagcgaaggagacagaattctttggcaggggcgaccttagaatcctggggaggagcgagaatggaatcccggggaggaacaggggtggaatccggggggcggggtcagaacgccaggagggggcggggccggagccagggtcggcttgactcgggggagcagcgggtggatcctgtgacgtcagcgggttcgaaccgccggagctgagcgagaggccgggggtgccgagccgggcggggagagctgggccgggagagcagaacagggaggctagagcgcagcgggaaccggcccggagccggagccggagccccacaggcacctactaaaccgcccagccgatcggcccccacagagtggcccgcgggcctccggccgggcccagtcccctcccgggccctccatggcccgggccgctgccctcctgccgtcgagatcgccgccgacgccgctgctgtggccgctgctgctgctgctgctcctggaaaccggtgagacgagcggacggccccctgccctcgcgcggaccccctccaaccttaccttccgagctggggaagccgagcaccttccccgcccacccccggctccccgagccccctctcgcgtgcccccttcctggctggccccacagactccgaccccctacacgtccgattctctcgaggagactctgacccctcctttctgcatctctctcaccaccacccccatccttcttaatccaattgcccatcctacgcctgcttgtctgtccccctccccatttctcggattcccgcgccgaaagggttaaatcccaggaaggcctggtgccccctccccaccccgcgccgagtagttcacccggatctgggtctctgtctcctctacccctctcaggaatgtggggaatgttccccccacctaccgcagtaaggtctcgaggaagaggcgagaccacctccctcccctatttttccttcttcccggcttgggcgtctgaggcccggagagaactgaggacaagcggacctgattcgggtcccttggagggctaaggataagagttctggcgacttagggggaagggcctgagctcggagctccaaccccgaacctcagggagttgggggttctgactccgtggactccagaaaaattaggggccgggggctccgtcttcagggtccctggtagaatggaggctaggcgctaagtctaactgggatctaggtaaaactgggggcgagagaggatcaaacttgtagcttctggatttaattgtgggcagggggcttcgttttcagggttcccggcagaaccgggggacaggagactcgatctcgtgggcttcagacttaattgtaggcagaggaacgtcttctgagatccaaacagaagtgcgagcagcgggccccgtctcttgggctccagatatgatcaagggtcgaaggctctgtcttgaggctggagtctcagtcgcctgagtcccagatagaacgggaggccccgagtcccagaggctgggagactcctccctttccctatgaatggtcgggggcgacggagacgtcgccggggaagttttcctggtttcactctcgccgagccagggaggggcggggcgggcgctcctggctccgggttccggactccccggtttcgggaccttatctatcctctggtagcgcctttgtcctcagagccatagcaggaggtggacgagtggagccgccgcccttatcccccgtccctcccattgctatgccttggaccccctggcgtccttccatccaccccactaggggaggagagcggcccccctggggagggaggggctgggagggaacccttgaaagaggcgctggccccgccccttgcaggtgacccggttgtgtattcccagcgacaaactctgggatgctagagtttcccgagggtttgcgcagaagagagctcagggggatcttgggggaaccccggccacctctctggcctcatttcccccaggatggctctcactggcctcccagctttgacccagagctgggaactccgcttccatcccctgcctctcccttcaggcagaaataggcagatgagatcagaactggcacctctgggtgaattctccgaacccaccagaccctgagcctactgttagcttggtgcatgatctc

SEQ ID NO: 67705 - DNA, 2335 bp, Homo sapiens
actctggaggctgaggtaggaggatcgattgaggccagaagttcaaggctgcagtaagctatgatggcgccactgcactccagcctgagtgacagagtccaaccttgtctttaaaaaaataaaaattaaaaaagcagtaacgaaagtataagaggctcaagtttaatgaataaacggcaagtaaaagtagactaaaggcaaaatcatgaataatgttgtaataggagcccaaggcatgacggataataaacctgaatgaatgggccagaggcagagtgatgaataatggaaaaatagggaccgggggcaagggaggtaacggacaggagttcatggatccaaaacatgatggctaattagagaagggccggaagaacgacgaaagtgagcaggcaggctggagctaaaagtagtctgggcaatgaagctcaaatgaatggggcagaggcatgatgggtaatgggagaggaatgaatgggccaaagatagaagccgcagtgacgcgaggaacaagaggcatgatgggtaacgaaaggggtgggtctaaggcaactgtttcgctaagaggtgatgagggcattgtgggtaacgaggagcagcgcagggttcgcagaacagattagaattctcccgaggcactctgggaagggccagcacttccggttttaggtcggctactccgaaccagaggtggggtgggggcccggctgccgcggtgcctggtgggacgcgaggcctgaccttgctgcctagccgcctctgccgcgcaacccacctttacctgtccttcgaccctggaacgttagccaatgagagtaccaagctgatacgccaccaaggtcgaccccgtacacgctggagccaatcaaaatgctgcaagggtcaaagccgaccaattatcacagcaacctcgccgcggggcggaatcaaaagagggcctcctccaggagagaggcggggcgatgcctcagcgggcgtggcaaaatgctcagcacagaccaatggcgggttagcaccggaacccgcggcgacgcgagccaataggcgcaggcgctgcgagccaatgggaagggtgggaggggcgccgtggctaccctgcgagtgagaaccaatacaaaaggacatttcagggaaagtgggcgggactttatgcacaagtccaatgggaagaccgagtcttgacgctggtgggcgggcctcagggcacactaaaccaatgggctaggtggggcggggcgacggtggtggcggcggcggcagcgggttcggttgcgcgtggcgcacggggtgggagcggagcccaggccgggagcaggcgccgccgccagtgagaaccggggccggagccgggtgcggatttgctggggctgagtcgggggcgcgcgggccctgacctctgccctctgacctctcccctagcaggcgaccatggggaacgtgttggctgccagctcgccgcccgcagggccgccaccgccgcctgcgccggccctcgtggggctgccgccacctccgccctcgccgccgggcttcacgctgccgccgctgggaggcagcctgggcgccggcaccagtacgagtcgaagttcggaacggacccccggggctgcaaccgccagcgcctcaggggccgccgaggatggggcctgcggctgcctgcccaacccgggcacattcgaggagtgccaccggaagtgcaagggtgaggggcgaggggcccccgctgggctgcgatggcctggatctcgggggaagggggaggacactggggactctgggatttggcgcgcaccattggaattatttaacagcactaggaggtgatgttgggatcgaatggtggaacgttggacttggggcttagaatgatggaatcaaatgctggaaacgggatggaatgtcatagcagtagagaaaagcctttagggacctgaggagccccgggatcagccaagccagacttctcttgtgatcgggaaggcaactgaggcccaaggtcacggtgtcagcaaggtgtcagcgaggttccttgggtatgggacccaaagcctccggatcccagcctggagcaattagagtagtagtagtggtggagatttatggagttctgttctggtgttcattatacgttaactcattagatccttgggacaattctgtgtggtgagggtcccatctttcagatgatgagtttgacctaaagttgctcagcttggtggcagtgagatttgagcaagcaaaggccctggccctgtctaactaggctgtactgcctctttacaggtggaatcctttgtgagatgttctgctgtgggtctctggagagagctggggg

SEQ ID NO: 67706 - DNA, 1626 bp, Homo sapiens
gcctgggcccgccccgagggggcagcgagaggagcttccccatccccggtcagtccaccctgccccgtccactttcccatctcctcggtataaatcatgtttataagttatggaagaaccgggacattttacagaaaaaaaacaaaaaacaacaaaaaatatacgtgggaaaaaaaacgatgggaggcctccgttttctcaagtgtgtctggcctgttttgagcatttcatccggagtctggccgccctgaccttcccccagccgcctgcagggggcgccagagggccggagcacggaaagcagcggatccttgatgctgccttaagtccggctcagaggggcgcagcgtggcctggggtcgctatcttcccatccggaacatctgccctgctgggggacactacgggccttcccttgcctgagggtagggtctcaaggtcacttgcccccagcttgacctggccggagtggctatagaggactttgtccctgcagactgcagcagcagagatgacactgtctctgagtgcagagatgggggcagggagctgggagagggttcaagctactggaacagcttcagaacaactagggtactaggaactgctgtgtcagggagaaggggctcaaggactcgcaggcctgggaggaggggcctaggccagccatgggagttgggtcacctgtgtctgaggacttggtgctgtctggattttgccaacctagggctggggtcagctgatgcccaccacgactcccgagcctccaggaactgaaaccctgtctgcccccagggtctggggaaggaggctgctgagtagaaccaaccccaggttaccaaccccacctcagccaccccttgccagccaaagcaaacaggcccggcccggcactgggggttccttctcgaaccaggagttcagcctcccctgacccgcagaatcttctgatcccacccgctccaggagccaggaatgagtcccagtctctcccagttctcactgtgtggttttgccattcgtcttgctgctgaaccacgggtttctcctctgaaacatctgggatttataacagggcttaggaaagtgacagcgtctgagcgttcactgtggcctgtccattgctagccctaacataggaccgctgtgtgccagggctgtcctccatgctcaatacacgttagcttgtcaccaaacatacccgtgccgctgctttcccagtctgatgagcaaaggaacttgatgctcagagaggacaagtcatttgcccaaggtcacacagctggcaactggcagagccaggattcacgccctggcaatttgactccagaatcctaaccttaacccagaagcacggcttcaagcccctggaaaccacaatacctgtggcagccagggggaggtgctggaatctcatttcacatgtggggagggggctcccctgtgctcaaggtcacaaccaaagaggaagctgtgattaaaacccaggtcccatttgcaaagcctcgacttttagcaggtgcatcatactgttcccacccctcccatcccacttctgtccagccgcctagccccactttcttttttttctttttttgagacagtctccctcttgctgaggctgga

SEQ ID NO: 67707 - DNA, 1638 bp, Homo sapiens
ctcccgggttcaagcgattctcctgcctcagcctcccaagtagctaggattacaggcgcccgccaccacgcctggctaacttttgtatttttagtagagatggggtttcaccatgttggccaggctggtctcaaactcctgaccttaagtgattcgcccactgtggcctcccaaagtgctgggattacaggcgtgagctaccgcccccagcccctcccatcccacttctgtccagccccctagccctactttctttctgggatccaggagtccagatccccagccccctctccagattacattcatccaggcacaggaaaggacagggtcaggaaaggaggactctgggcggcagcctccacattccccttccacgcttggcccccagaatggaggagggtgtctgtattactgggcgaggtgtcctcccttcctggggactgtggggggtggtcaaaagacctctatgccccacctccttcctccctctgccctgctgtgcctggggcagggggagaacagcccacctcgtgactgggggctggcccagcccgccctatccctgggggagggggcgggacagggggagccctataattggacaagtctgggatccttgagtcctactcagccccagcggaggtgaaggacgtccttccccaggagccggtgagaagcgcagtcgggggcacggggatgagctcaggggcctctagaaagagctgggaccctgggaacccctggcctccaggtagtctcaggagagctactcggggtcgggcttggggagaggaggagcgggggtgaggcaagcagcaggggactggacctgggaagggctgggcagcagagacgacccgacccgctagaaggtggggtggggagagcagctggactgggatgtaagccatagcaggactccacgagttgtcactatcatttatcgagcacctactgggtgtccccagtgtcctcagatctccataactggggagccaggggcagcgacacggtagctagccgtcgattggagaactttaaaatgaggactgaattagctcataaatggaacacggcgcttaactgtgaggttggagcttagaatgtgaagggagaatgaggaatgcgagactgggactgagatggaaccggcggtggggagggggtggggggatggaatttgaaccccgggagaggaagatggaattttctatggaggccgacctggggatggggagataagagaagaccaggagggagttaaatagggaatgggttgggggcggcttggtaaatgtgctgggattaggctgttgcagataatgcaacaaggcttggaaggctaacctggggtgaggccgggttggggccgggctgggggtgggaggagtcctcactggcggttgattgacagtttctccttccccagactggccaatcacaggcaggaagatgaaggttctgtgggctgcgttgctggtcacattcctggcaggtatgggggcggggcttgctcggttccccccgctcctccccctctcatcctcacctcaacctcctggccccattcaggcagaccctgggccccctcttctgaggcttctgtgctgcttcctggctctgaacagcgatttgacg

SEQ ID NO: 67708 - DNA, 708 bp, Homo sapiens
ggccaggctgatgtggaattcctgggctcaagcgatactcccaccttggcctcctgagtagctgagactactggctagcaccaccacacccagctttttattattatttgtagagacaaggtctcaatatgttgcccaggctagtctcaaacccctgggctcaagagatcctccgccatcggcctcccaaagtgctgggattccaggcatggggctccgagcccggcctgcccaacttaataatacttgttcctcagagttgcaactccaaatgacctgagattggtgcctttattctaagctattttcattttttttctgctgtcattattctcccccttctctcctccagtcttatctgatatctgcctccttcccacccaccctgcaccccatcccacccctctgtctctccctgttctcctcaggagactctggcttcctgttttcctccacttctatcttttatctctccctcctacggtttcttttctttctccccggcctgcttgtttctcccccaacccccttcatctggatttcttcttctgccattcagtttggtttgagctctctgcttctccggttccctctgagctagctgtcccttcacccactgtgaactgggtttccctgcccaaccctcattctctttctttctttctttttttttttttttttttttttttttttttgagacagagtctt

SEQ ID NO: 67709 - DNA, 797 bp, Homo sapiens
actaatttttgtatttttggtagagacaaggcttcggcattgttggccaggcaggtctcgaactcctgacctcaagtaatctgcctgcctcaccctcccaaagtgctgggattacaggcatgagccacctcacccggaccatccctcattctccatcctttcctccagttgtgatgtctacccctcatgtttcccaacaagcctactgggtgctgaatccaggctgggaagagaagggagcggctcttctgtcggagtctgcaccaggcccatgctgagacgagagctggcgctcagagaggggaagcttggatggaagcccaggagccgccggcactctcttctcctcccaccccctcagttctcagagacggggaggagggttcccaccaacgggggacaggctgagacttgagcttgtatctcctgggccagctgcaacatctgcttgtccctctgcccatcttggctcctgcacaccctgaacttggtgctttccctggcactgctctgatcacccacgtggaggcagcacccctcccctggagatgactcaccagggctgagtgaggaggggaagggtcagtgtgctcacaggcagggggcctggtctgctgggcctgctgctgattcaccgtatgtccaggagctggagcagcaccctctcagagcctcagtttccccagatgtcaatgagagaatcagcatcagccacatctcccacctgaagaatcgaaccttgagttctcacctttaagaatttttttttttttttgagacagtgccttgctcagtcg

SEQ ID NO: 67710 - DNA, 2517 bp, Homo sapiens
ggggaggtagccagccaaagggggtgaggcccggtggaagggaagaagggacatacacgcagagctttgcagctgagggttttaattttttgagatggggtctctgtcccaccaggctggagtgcagtggcacaatcacagctcactgcagcctcgaactcctgggctcaagcaatcttcctacctcagcctcttgagtagctgggactacaggcatgcgccaccacgctcggctaatttttgaacttttttgtagagatgaggtctccctatattgcccaggctggtctcgaactcccaggctcaagtgatcctccctcttcagcttcccaaagtgctgggattacaggcatgagccaccatgcctggctaatgcaggtgaggtttttgcagtgtcatccagctaaggcgacccgttcccctcccaaaaaagggagactgagaaccatgaagttaagagcccagagaatatcacggtggtctggggtgcttcaagggctggtctggaataaattggaggtggcacgcagggtaggagcgccgggccaactgggagacccagcaacataaaggaaaagttgttggggctgaggaggcttgctgagagaggggaagtgagggaaagaggtgatctagggacacggtgtgaatgagggggggatgagatcacagggttattactgggagacccctgagggaagatggccacagggacaggacaaggctgtcttcttaagggaggagaccacccctcatattgtcttatgcccaatttctgcctccaaagaaagaaaaagtaaaaactaaaaggcagaaatgaaatccacaagcagacagcccgcgccacaccctgggcctggtggttaaagattgacccctgacctaatccgttaggttatctatagattacagacattgtatagaaaagcactgtgaaaatccctattctgttttgttccgatctaattaccggtgcatgcagcccccagtcacgcatcccctgcttgttcaatcgatcacgaccctctcacgtgcacccacttagagttgtgagcccttaaaaggaacagggattgctcactcggggagctcggctcttgagacaggaatcttgcccattccccgaacgaataaaccccttccttaactcagcgtctgaggaattttgtctgcggctcctcctgctacattctgagtggggaaagggactaaggtggtctgaggaccccacagagtcaggaagattgagaggtgagagtgctgaacggggaggggctttggggctaagggaagtgcccgggaccccacctgaccccaacgctcacgggacaggggcagaggagaaaaacgtgggtggacagagggaggcaggcggtcaggggaaggctcaggaggagggagatcaacatcaacctgccccgccccctccccagcctgataaaggtcctgcgggcaggacaggacctcccaaccaagccctccagcaaggattcaggttggtgctgagtgcctgggagggacacccgcctacactctgcaagaaactcaaaaagggagatgaggggatcgtgggagggaggtagggagggaggagggtgccactgatcccctgaacccctgcctctgcctccagagtgcccctccggcctcgccatgaggctcttcctgtcgctcccggtcctggtggtggttctgtcgatcgtcttggaaggtaaaagtgggatgggagaattgcggagttggagatttggaagagtgaaggtggctacaggcctggggtcccggcttagaggacctctgagagctccggggccccttctgggtcgtggttgcctcatcgtggtcgggtgggtctccaggttctcccaggctcagtcccgcaggcgccaaatctgcgcaggagagcactagcaaccgatgacgtattgaggcccacacctctgggattggctgtcctgcttcgacagccttgaaagtgggtaagctgggtggggggctctgggagaggtcagtgctgagtaaggcaattcccagcagcttgagccccaccaggtcactccagtattcctccccattctttttttttttttttttttttctcttgagacggagtctcgctctgtcgccgaggctggagtgcagtggcgcgatctcggctcactgcaagctccgcctccctggttcacgccattctcctgcctcagcaggactacaggcgcccgccaccgcgcccggctaattttttgtattttcagtagagacagggtttcaccgtggtctcgatctcctgactttgtgatccgcctgcctcgacctcccaaagtgctgggattacaggcgtgagccaccgcgtccggccattcctccccattctaaccacatgatccccaaggatctctatccatcccggtatcccaacctaagggggttccaataacaaatttttggccgggcagggtggctcatgcctgtaatcccagcactttgggaggccgaggcgggcagatcacttgaggt

SEQ ID NO: 67711 - DNA, 1784 bp, Homo sapiens
acagtgagcctagattccaccaccgcactccagcctgggcaactgagtgagactccacctcaaaaaaataaataaaagggtaaattttatggaatgtgaatcataattcaatttttcaacatgcgttaggagggacatttcaaactcttttttaccctagactttcctaccatcacccagagtatccagccaggaggggaggggctagagacaccagaagtttagcagggaggagggcgtagggattcggggaatgaagggatgggattcagactagggccaggacccagggatggagagaaagagatgagagtggtttgggggcttggtgacttagagaacagagctgcaggctcagaggcacacaggagtttctgggctcaccctgcccccttccaacccctcagttcccatcctccagcagctgtttgtgtgctgcctctgaagtccacactgaacaaacttcagcctactcatgtccctaaaatgggcaaacattgcaagcagcaaacagcaaacacacagccctccctgcctgctgaccttggagctggggcagaggtcagagacctctctgggcccatgccacctccaacatccactcgaccccttggaatttcggtggagaggagcagaggttgtcctggcgtggtttaggtagtgtgagagggtccgggttcaaaaccacttgctgggtggggagtcgtcagtaagtggctatgccccgaccccgaagcctgtttccccatctgtacaatggaaatgataaagacgcccatctgatagggtttttgtggcaaataaacatttggtttttttgttttgttttgttttgttttttgagatggaggtttgctctgtcgcccaggctggagtgcagtgacacaatctcatctcaccacaaccttcccctgcctcagcctcccaagtagctgggattacaagcatgtgccaccacacctggctaattttctatttttagtagagacgggtttctccatgttggtcagcctcagcctcccaagtaactgggattacaggcctgtgccaccacacccggctaattttttctatttttgacagggacggggtttcaccatgttggtcaggctggtctagaactcctgacctcaaatgatccacccacctaggcctcccaaagtgcacagattacaggcgtgggccaccgcacctggccaaatttttaatttttttctagagatagggtcttactgtgttgcccaggctggtgtcaaactcctgggctcaagcagatcctcctgcctcagcttcccaaagtggtgggattataggtgtgagccactgcgcccagtcagtagccccctctttgcccctcactgagccctactggatgttcttggttgtgtgacagtttccccatctattaaacagaaacccctatagcagaggggaggatgaggttggaaaatcaggagcattgttattctattcttgtgggatcggggaagcagacatctgggtggatgtttggggaatgctgggctcagttgaggaagtaggggggcccctggggcttacagggactggaagctctgagctggccagagggatgttgcaatcctgccagggtcttgtctatgctgtccctttcacaaccatccccctaccgccaggctgacacgtggttgtgggggcacaaggccagccgaactagagtctgaggctgggctgaggacaccctccccatcagctgccagggtcactggcggtcaaaggcagctggtggggaaggaattggactc

SEQ ID NO: 67712 - DNA, 854 bp, Homo sapiens
gaaagattgtttggaggccaggtgcagtggctcatgcctgtaatcccagcactttggcaggctgaggcgggcagatcacctgaggtcaggagtttgagaccagcctgaccaacaaggagaaaccctgtctcttctaaaaaaaaaatacaaaaaattagccaggcatggtggtgcatgcctgtaatcccagctactcaggatgatgaggcaggagaattgcttgaacctgggagctggaggttgcggtgagctgagatcgcgccattgcactccagcctgggcaacaagggcataactccgtctcaaaaaaagaaagaaagaaagaaagattgattgtttggagggagaggcaaaggtccaaagtcaagaaggtcgatcaataagcaagagcgggtggcatcccaggcaggggaacagcctgggcatacgcagggaggctggaaagtacctttgaatgagtaggggaacagatagggcaagggcaggctggaagaaagagtgggtagcaagagatggcaggccttgaaagccaggccagagtgaagttttcttttcttttcttttcttttgagacggagtcacgctctgttgcctaggctggaacacggtggtgtgatctcagctcattgcactctccacctcccaggttcaagcaattctcctgcctcagcctcctgagtagctgggattacaggcgtgcaccaccacgggtggctaatttttgtaatttagtaaagacggggttttgccatgttggccaggctggtctcgaactcctgacctccagtgatctgcctgcctcggcttcccaaagtgttgggattacaggcgtgagccaaatgcccagccaaggg

SEQ ID NO: 67713 - DNA, 880 bp, Homo sapiens
ccagcctgggcaacagagtgagactccatctcaaaaaaaaaaaaaaaaaaaaagaaaaagaaaaaagggtaaattttatggaatgtgaattataactcaatttttcaacatgcattaggagggacatttcaaacccttttttaccccagccttccctgcaatcacccagagtatccagccaggaggggagtggctagagacaccagaagattagcagggaggagggtgcagggtttcgggggatgaggggatgggattcagaccagggtaaggatccaggggtagagagaaagatttgagagtggttttggggcttggtgacttagagaacagagttgcaggctctgtttttgggcccgccctgcccccttccgacctcttagttcctatcctccagcagctgtttgtgtgctgcctctgaagtccaccctgaatgaccttcagcctgttcccgtccctgatatgggcaaacattgcaagcagcaaacagcaaacacatagccctccctgcgtgctgaccttggagctgcggcagaggtcagagacctctcagggcccataccacttccaacatccccttgatctcttggattttggtggagaggggcagaggttgtcctggcctggttaggtagtgtgagagggtcccggttcaaaaccaccacttgctggttgaggagtcgtcagtaagtggctgcgcccccaccctgaggcttgtttctccatctgtacaatggaaatgatgaagatgcccacctgatagggtttttgtggcaaataagtaagtagtttttttgtttttctttttctttttttttttttttttttgagatggagtctcactctgtcaccaggctggagcgcagtggcgtgatctcgg

SEQ ID NO: 67714 - DNA, 790 bp, Homo sapiens
tctactaaaaatacaaaaaattagctgggcatggtggcaggcgcttataattccagctactaaggaggctgaggccggagaatcgcttgaacccgggaggcggaggttgcagtgagtcaagatcgcaccattgcactccagcctgggcaacaagagcgaaactatgtctcaaatacatacatacatacaaaaaattagccgggtgtggttgccgcacacctgtaatcccagctacgcgggaggctgaagcaggagaatcgctggaacccgggaggcagaggttgcagtgagccaagatcacaccattgcactctatcctgggtgacggagtgagactctgcctcaaaaaaaaaaaaaaaaaaaaaaaaacttaaccattgcagccatttttaggtgtacagttcagtggcattaagtacattcacactgttgtgcaaccatccccactatttgcaggatgtcttcgtcatcccaaacagaaactctgggtgttttcaatctgctgatgattgctacagaggaattccaggggacatctgttgcgcacctactgtgctcacgctggggcctctgggatggacaggattctgccaaggcagacatctgggtcaagacagtcctgcacagttgttcaggttgtggccaaggttgcgtttgcagatttgccatgtaaaaatacaggatgctcagttacatttgaatttcagattaatagcaaaaaaaactttttggtataattctgaaatatttcatgggacatatttatactaaaacgtcatgcactgttgat

SEQ ID NO: 67715 - DNA, 891 bp, Homo sapiens
tggcctcatatgatctgcccacctcggcctcccaaagtgctgggattacaggcgtgagccactgcgcctttctttgtatttgttcaagtaatatactgaaatatgtactgtgcctcccactttatggaggaggaaactgaggccagcaaatgaggctgtcatgggaggtggagacaggatttgaacctgcctcagtgcaggaggctcaagagcctctgtcttctctcagggcactgtgtgggagggtgagaaggagggaggcccacagaggcatgacctctgattgccactgtcacctgggccctgctctctgaagtctctgccaagcggggaggtggccgggggagggccctgctctgtgcagcctcccctcccccggcccgcagagttgagcacagagggacagaggcacggaacccccagaaatgtccctcctcagaaacaggctccaggccctgcctgccctgtgcctctgcgtgctggtcctggcctgcattgggggtgagaagaagtgggtggagggatgtggggcccacacctggtgggtgtgagtgtggctgtgtgtcctgtggctctgtagccacgtgagacatgagtacggagtgtgtgcgtttcatggcgtgcgtatgcatgtgcgtgtcggggagtgtgtgtgtcggtggctgagagtgaagtgtgaatgtcacattggtacaaactgggatcatctgtgtgtgtgcacgtgcgtgcgtggaagtgggagtatgcagtcgtggtaaaaaagtgcatgtctgtgtgcatatgtgtatttgtgtgcacctgtctctctgtggggtatgtgtgtgcaaaatatttgagtgtgtggacatgtgtgagggggtgagtgtgtgctggtgtgtacgtctgtgtttt

SEQ ID NO: 67716 - DNA, 4731 bp, Homo sapiens
cttccaaagtgctaggattataggcgtgagccactgcgcctggccaatgcctggctaatttttttatatttttggtagagacagggttttgccatgttgcccaggctggtcttgaaatcctgacctcaggtgatccgcccgccttggcctcccaaagtgctgggattacaggcatgagccaccacgcccggccatgtactttatgttaaaatgggatcatattctagatcagcattatccagtagaaatttaaatttttaatacagggccaggcacggtggctcatgcctgtaatcccagcactttcggaggccgaggcgggtggatcgcaaggtcaggagatttgagatcatcctggctaacagatgggtaaaaacccatctctactaaaaatacaaaaaattagccatgcatggtggcatgcgcctgtagtcccagctactcgggaggctgaggccggagaatcacttgaacccgggaggcagaggttgcagtgagccgagatcgcgccactgcattccaacctgggtgacagagcgagactccgtctgaaaaaaaaaaaaaatttaacacgtatgtagacaatgtgcaaggcaccattccatgtgcatcgtatgtagtaactcttaattctcacgataaccctgaggtagatattattaccccgttctacaaaaggagaaacagtcctggggagacaggataagtcaccggccaaggcacacagctagctacatgtggcccccgcgtgacggctggtctctgtaggcgaggctttgtccagatgcgtgggtagaaggtctggcccggaaagaggaactgacagcaaggctaagccaatgtctgcccctgggggcagaaagtcacctcctgctctccctccactgtccacagaggtagctcagacagggtgggggtcacaggagaacgaagggagaagggggtagttcctgggcagcaaaatcaggtggtgaagggaggcatcagaggatggcaattagagaggccattagaggggaaccacaggcagacagggtgacaggagggactactgacacaaggtgaagagatggcccagccggacggggtggctcacatctgtaatcccagcattttgggagcccgaggtgggtggatcacttgaggtcaggagttcgaggccccaacatggcaaaaccccatctcttctaaaaatacaaaaattagccgggcatgatggcagatgcctgtaatccctgctactcgggaggctgaggcaggaaaattgcctgaatccaggaggtggaggttgcaatgagacgagatcatgacactgcactccaccctgggcaacagagcaagagactgactctgtctcataaaaaaaaagaaaaaagaaaaaaaaaaagagatggctgatggttaaagaggggttagcggtcaggggacacataagggtaaaggcaggaggcaagaggactggcagggggctgcccctgggccaccgggagcgacacaggatgagcatggagggaaagggagaaggggattctagggtcccagcctacccaagttgccctctggttccacctagcatgccagccagaggcccaggaaggaaccctgagccccccaccaaagctaaagatgagtcgctggagcctggtgaggggcaggatgaaggagctgctggagacagtggtgaacaggaccagagacgggtggcaatggttctggtgagggtgtgctgggctgggtggtgggaggggactcctgggtctgagggaggaggggctggggcctggacccctgagtctcagggaggaggaaagggtgggagtggggctgtgacccctaggtctgggaggagtggagggttagagctgagagcaggaactcctaggtcacagagaggagcggataaatggggcagagaacacctggggagagctggggcctccactgtgatgtcctctctcctgtaggagcccgagcaccttccggggcttcatgcagacctactatgacgaccacctgagggacctgggtccgctcaccaaggcctggttcctcgaatccaaagacagcctcttgaagaagacccacagcctgtgccccaggcttgtctgtggggacaaggaccagggttaaaatgttcataaaagccaggtgtggttgtggcgggtgcctgtagtcccagctactcaggaggctgaggtaggatgatggcttgagcccaggagttcgagaccagcctgggcaacacagcgagatctcttgggggtaaaacaaaaagaaaaaaaaaagttcatacttctccaataaataaagtctcacctgtgtccctgtctggatccttccccagtgtggccagaaaaaaacccaccccactgcctcccaggaatcaatgagtagaagaggtgacacctgatggggaaggaagagtagggaggtcgggaagggtatcaaggaataacaccctattgtgggcttgcggagaatgggggacttcaaggcgtgtcagtttcaggagggtgagggcaggagcgtgggtggagtcagcaggtccccatgatggccctcactgagagcttcgcccttgtctcctacaagctctgactccattcccagtgggcacccagcacctccaacccctccacagcccccaacccagcctctgtcggaggcgaattctcagagtgagggttccctgtcacttgagagaaggttccctgtgacgtgaccttgggggacgtcattgccctttctgtccccacccaccccctccgcagttctgttggccaggactttggcctagacaaaggatgggggttgtggctgtggagcggaagtgggtctcaaccactataaatcctctctgtgcccgtccggagctggtgaggacagcctgccagagtctggtaagaaagggactcagggtgcggggacaggggggcgtcagcagggagagggcaaagatcgataaagcaggaattttaagaggcacaatattagaagcccgtgttggaaccatgactgtgtgtgtgtgtgtgtgtgtgtgtgtgtgtgtgtgtgtgtgtgagagagagagagagggagatggagtctcgctatgtagcccaggctagactcaaactcctgggctcaagcaatcctcctgcctcagcctccccagtagctgggactacaggtgcaccaccacactccacaaatcacagaatttagaactgtagactatttgagcttctgcttagagttagggtggctgaggtggggaggatcccttgagcccaggagtttgaggatgcagtgagctgtgatcttgccaccgtgttccagcctgggtgacagagaaaccccatttctaaaaaagagaaagaaaaagggataggtacaatggctcatgcctgtaatcccagcactctgggaggccgaggcgggtggatcacttgaggtcaggagttcgacaccagccttaccagcatggtgaaaccgcatctatactaaaaatacaaaaattggccgggtgtggtagcatatgcctgtaatcccagctattccagaggctgagacaggagaattgcttgaacccaggaagcggaggttgcagtgagcccagatcgtgccactgtactctagcctgggtgacagagcaagactcagtcttggcggaaaaaaagaatgaaaaaatttaaaaaactaaaaaagaactgtaggctgggcgtggtggcttacacttgtaatccaaacgctttgggaggccaaggcaaacggatcacttgatgtcaggagttggagaccagcctggccaacatggtgaaaccccgtctctactaaaaatacaaaaattagacaggcatggtggtgcatgcttgtatttccagttactcaggaggctgaggcaggagaatcgctcgaacccggaagacagaggttgcggtgagccaaaattgcgccatcgcactccagcctgggcgagagaacaagaccttgtcttggaaaaaaaaaaagaattgtagaccatttgcttgtgttctttctccggggatcagatctcaccctctttctgccgtacttcctcatctcctacgtgtggatgatgatattgtgccctgtgcatgttcttcgtcaccaaaagtgcctctctcatagagcaggtgagaactcagtgaggagatgcagggacatgaggtctgacttagggcagagccctaaggtaacacatttgatctactgtaggtccttaatggtgtctgcagagcacctccctgcactgactcagccttagcaaagggcagaggctttgctgtgttccctgctgggcccagaactgtttaggtgctcaagaaagccttctaggctgggctcagtggctcacacctgtactcccagcaccctggggaggccgagatgggaggatcgcttgagcccaggagttccagaccagcctgggcaacaaaacaagtctcccatctctacaaaagaataaaaattagcagctgggcatggtggctcatgcctgtaattccagcactttgggaggccaaggcaggcaaatcacttgaggttaggagttcaagaccagcctggccaacatggtgaaaccccatctctactaaaaatacaaaaatcaggtggggcacagtggctcaagcctgtaatcctagcactttgggaggccaaggtgggcggatcacgaggtcagaagttcgagaccagcctggccagcatggtgaaaccccatctctacta

SEQ ID NO: 67717 - DNA, 2822 bp, Homo sapiens
ttgaatccgggaggcagaggttgcagtgagccgagatcgcgccactgcactccagcctgggtgacagagcgagactccgtctcaaaaaaaaaaaaaaaattagccaggagtggtggcgtgctcctgtaatcccagctactcgggaggccgaggatgcagtgagccgaggttgcagtgagccgagatcgcgccattgcactccagcctgggggagagtgaggctccgtctaaaaaagaaaaaaaaagagagagagagacgtcacttgtccaggatatcttatccagtcagtagcaccacaagggttagaaccctggccagacatccacccaatttcacgggtgaacagttaacagcctctgagagtcttgtcctctctgggcctccgtaacaccctctccaaactaagggtctctcagcagatggccgggtttagagctgtacgaagacacacagctaatgaaaaattgtggaattctcagagcccgtgaagcctagcccacggatgcgaggtttggaccactgagggaacgcgcatgcgtgctaggcagggcagtccgaaggcttgggggtgtatcatagggtctcatcggaggtttgttggccgtaagacccctggaattggaactctaaaaacacagaaaggatatgagctcaggagacttgaacgaaagagttgtcttaggaagaggggtcagaagacaagggtgctgggcaaaaggctagttcttcgaatcagaatacggtggccagaaaggttcctctgacgaaagaggggcgtggttcgaagccgtacagtggccggtaaagctcaagaaacatggaacgaaaaggacgcgaagaatcggcagggagaagcggacaggatgtcccgaaaggctcatataaccgaaaaggcgggttaatgtgaagggacggaagggacagaacttgcgggaggcacatgctggccgagaaagtcctggagttcggagcatacagtgtttttattaggtggaaacaaacgggctgggagaaagacgagtacggtggccaggttggtccttccatagccggaagtggccttcctgagaggcgtggctgcggcactcttgccggatagggtggcccggcggggctaggaaagcgtgaaatctcgcgcgattgcgctgcgaagtcggggacggggcggggctggcggcgggggcggggacccggagcgggaagatggcggcggcgcaggaggcggacggggcccgcagcgccgtggtggcggccgggggaggcagctccggtcaggtacggaggccgagaggggactgagggggttcttccccagccggggggcctcccacggggcgtgtcctacctcttgtcacggaatcccgtgcactgggggctccttggccagagggaccttgaatacccggcccaggcagggccggaccgcccgggaggccggacggtgccgggaacagggccctgttgcgggtcggttcccctgcacgctcgagccgggcggccaccaggctcattgctcgatccggggagacagtggctcggaggggcgcaggcttgtaccttggcgcgctgggttctcaactccgcgattccatgctctgaggccgttcctagagtggtctggcgttcaggtctcgttgtagtgtttgaggtgtgcgcagtgattaattgggagttttctagctgtggggaagtcagtattagcagggcacggccgacagacccattttacagacgggaattcaaggaacagtgagactaaggcgcttctagaaggtcatcctggttaggtttgtaactttatgtagaagttacaagacactgctgacacagggactggtatggttgtggttttaatgtaaaatagttctatgggttaattagtcctggtgcggatgacttctgccccactgctgtcttaacacactgcagagcataccatttcaggcagctaccgttcaggcatttggggaatagatggagagacatgaaggtgctgtcgacccacccactgggatgtcactgacatgtgggaggcagctcaggggaaaggagtgcgggttgagaggggagaatgaagctgactctctgtgtgaccttgggcaagttcctttccctctttaggcctttatctctcccgtgttaaatgcagaggttggacaggagggccagccatatccctgctgtcaggggacgaagagaggagactgacatgtaaacagttgtaatcctgaatgattaggttggtgacaaaagtctgtgtcagggactgggggagcccagagaaagagcaagtggtatcacttgggtaggacacatggatgaaatttgtgtgatagagcccactgtatctgctctgaatcttttcagcattctcagccagggcctggcttcagggacagcttaggaaatgtttgttgagttagtgctggaatgaaggctcagttcctgtcttcaagggtttcccagtcttgctgaaaggaggtcgtttcccctctgggtttctgttgattattgggttgatggtggcttgagagaccagggcccaggttgttctcattgccctgagcttccagatggcactctgatcttctcttgtaccaactctgcttaaaaacaatcaagagttacccctttgcctttaggacaaagtacaaattctttaataaatcacagtcttgcacgatccgacacttttcttcagactagactaggatttctcgagctcggcactatcaacattttgaattggataatgctttgtttggggggctgccctgtgcattttaggatgtttagcagcatccgtggcctctacgcacta

SEQ ID NO: 67718 - DNA, 1141 bp, Homo sapiens
atggatggcaggtgtagagccctgccaacctctcgatcctgaagctccccttccagcctgagaaacggcaggttcaagtcccactgggagaccaaagcggggagcggctcagtttgccggcttgctcaatgggtaaggcgtgatggctctaagcaggcctcagttgtctcgtccagagcaatgggcagcgacgcctgcccaacccctcctgagcgcccagcctccctttcccggccggccccgcccccgcgatcacgtgacgcgtgggggttttcccgttccccaggcgtgacgtcacggcggggtgcagaccaatgggcgcgcaggccggcggcgccggggaattccgccgccccgcccccgcccgccgcccgcccggcccggccccgcgccccgcgcagccccgggcgccgcgcgtcctgcccggcctgcggccccagcccttgcgccgctcgtccgacccgcgatcgtccaccagaccgtgcctcccggccgcccggccggcccgcgtgcatgcttcggtctgggccagcctctgggccgtccgtccccactggccgggccatgccgagtcgccgcgtcgccagaccgccggctgcgccggagctgggggccttaggtaagcggggctggggttcaggagaggggtctggggcggggctggagatgcggggattctggcggtcccggagtagtctgggggttcctatgggagtctaagggtttcgcgggggcagagtgagggttcctgagacactgtattagggcgtaggaagaaggcagagggtgatgagggggtacggcccgaggttcgagcgaggcgtcccgctgtagagtgagagggggcggggcctgaccctgaggcaaagaagggggcgtggcctgactcagagaaggcggagcgaaagctgctcttgggcggtatcggggcggggccgggcccagagagggagaagaggggcgggatccgacccggactatgagaagagggccgggcctgactcaaaaaaggaagcagggccctacgctgaggggtgagggggcggggcctggccgtgagggcaggaagggggcggggcctgagttggccgaaagaaggggaaggggcggggcctgactctggccgagtggaggggaaggg

SEQ ID NO: 67719 - DNA, 816 bp, Homo sapiens
actgccttctagcctgggagacaaagagagactccgtctcaaaaaaataaaattaaataaataaataaaataaaaaagataaaaagataaagcatccaagctcttcccttctccgctctcccacttcttcctcgggatcccgcccctctcgactctaggacccgcctctctcgtcggcggaagtgcgctgcgcggccctccaccatgctccgccccctccccctagcgcggcctttcatttccgcttccggtgcgggccgcgcgcgagcgcagcggtgggaggcggcgaccagccggtgagtgcaggctgcggctcgacctcccggttttcgggcaggcctcagcccagcttctccctttcctcaggctctccccatgctgctgtgggcttctgctgcgtcccggccccgaggatcgctcgtccctcaccccattaggcctgacgggcctcaggccgagcccgtgccccggctgtgggccagaagttgccgcgtcgaactcggccttcggcccagcagcttatcacaggccccgcccccttgtcaaaaaaaaaaacaacaaaaaaaaaacccagcccaaatcctcaggccgcgacgcgatccacaagccccgtccaaaccttcggtctccgccctttcccgcaagccctgcccccaagctcagcccacgccctcctgtcagccagctccgcctctctcaggctctacgctctttttctttggatgctctccccaccccgccatctagatcccatctttagacctcagcttcactctggtctccttgcaacactccctccccgtgttcccactccct

SEQ ID NO: 67720 - DNA, 1034 bp, Homo sapiens
gagaataagaccctgtctttaaaaaaaaagtttcgggatgttttcccgtaacatttccactcctcccctgctgaccaggaagtagtcttatgaacagccgtgaggaaggctaagaggtgtagactttattttgggtcgccctgaccagatatatttggagttctgttactgttgtagcaaagggaatagatgttggttgccaattaatggtttgccactaacagtggagacaagagcatgtccttcgatgttgttggagtgttggacacatggaccactgagagcagcctggccagcgtcgctatcgctcagtaaatattagctcttgttattgacattactgttgctgatagaactggagtttggatccaggtggagggatggtgcagaggaaggaaggctggagctgagactccaggccccctccctgttagcagggaagcttgctgcattgtattccccctcaggacagtggtgacgaccaacccctctcactggataatggggaagagctcaaagaaccaatgtctatgggtgctttgtggtgcaggcctgtacaagcggcctttgtccctgtatgtgaacgtgacctgcattccgatctgggctgccaagctgtggagtatggctgggccgtggctgatggctgctttgaggaggggactctcatctcagccttgggccgagagcagaggctgtggagcgagtgtcagtgaagctgcggtagattgtggcaggctgaatgagtatgtccagatgcagttggtttctgtcttcctgatttgtcgttggtgcctgctttctctccctgtcttcagtcccaagcagactccggttctgtcattgcttctgtccttgtcaactttcctttttaatcagtggtttggataaagaaacagaatcctctgttgatacggaaataagaagtaaacaggtcgcagctcaggcgtcgcctcctccaggaagctccagactgacccccaagtctgggtcaggtgttccccctgtgggcccccatctcagcgctgtccact

SEQ ID NO: 67721 - DNA, 1163 bp, Homo sapiens
ggggcctctgaagagctgacagcccagcttcttgtggtccatgaaggcagtgatggcctccaacgggaaggtctgcaggcagcggccgcaggtcaacagatctgggtgtttgtcggtccagggctggcggtctgcagggaggaagcgggtggtgagcgtggggtggggccaggatgggggctgagggtgctgaaggagaggggaaaccgaaggtcagaagggggcctgaggggcaggacggggcgaaggagataaggcagggcgaggggcccatgcccaaagggaagggtcccacccgagggtcaaaggtaagggaggctgggcccagggcccggggtgctcaccgggatagttcggggtcaacggcgtccacagggtccacgggttccgcgggccgagggcgaggagggcggccccggcgggcatggggccaggggagtggtggggttcgccgccgaaccgccccgccgaggacacctccttcggggagaagggccccagccttggggcctgttggggctgcgcgtctggctcgggcttgagttcgatgacgaggtcctgcatttccatctcgtcgtctgggttggcggcgggcgcgggctctactcggcggggcgcgctgccggccttgcggcgggacatgagtcgcgggccgggcgagcgagcgggcgggcaggcaggcaggcgggcgggcggaggacgcacgagcggaggacgcgcggaccgtgcgcgctcaggtgagtgactgcggcgacccgccgcgaactcttacacgtgctggccgggcccgtggctccgcctaccagggcggggctcatgggaggggaccgagccgccctgctggggccctgacggcggcctaactcaatctaggcagtgtcccgtgcgtttggcttagtgaccaaatttaatcacaccgagttcccacaaggcattgaaacagctatccctgatcccgttttagggcgggtgaaactgagacacggcatgcccacacgcacccccaagcgagaaaaatagtcggtcacgtttcttattaggtgcctgatagtaatctgggctatttcattaaatgcattacaataaaaattcattttgcaagcattcactgagtgcctcctgtgcgccaggctctgtttgaagccctgagaatacaggaggga

SEQ ID NO: 67722 - DNA, 2123 bp, Homo sapiens
tattctttatacatcactttgatcaaaccctgaaggatcttgtttacatatttgctcattttaccctattctgtcccttctacccccactagaacgtaggttctaggaggcaggatgggagtctgtcttgttcataaatacaacccctactcgttcatagttaagtcaacaaatatttattgcgcacctactatgtgtctgatgatattctttcaacagatatttgcagagcaccaaattgtgtacctggcactaggccttggtgatctagtggaaagcaaaggcccacaggatccctgcgtaaagaggaccccgcaaggagaaagtgaattctgactgggcctggaatagggaggttcatattccccattcaaggcctcagtttccccctttgtaaaatgggactgcagggagagctggaggacaaaatgaccgcctctgatccagcccagctactttcttagtatgcggcatctgaaaccatgatctccaggtttcctgtagaggagcgggggttcccactggaagcaaggggttaggagtgggtatgtgtagggggatggggatgcaaagaccgagctctgcccttaacccagcagggaggaagtcttcccctctctgaacctcagtttcttcctgcctaaaatgggcatcccagacgcccccaactcgcaggcaggaagatcggtcccaagtgccccgcaaagccgcgggccaggtggcgacccgggctgtgctggcttccaagcctgcgagccagcccgcgaccacgtggggcagtggcggcggcgcgggcggaacccaggctccgcggcttgcggcctgcccgggcctctgcagcgggggcgccggcggaagtggggacaccagtagccgcggacctcggtgagtacaaggtggtggggggtcgccagcaggttccctctccccggccccagctctggacgctcaccccagtgcaacgccctgagtgacggaaagaggtaggaccgcgcctgcagcgccggctggagggacgttctggtccccagacgctcctatcagggactgtttgatcccgatcgccggcagcgggaatgccccacgcgggtggggtgaggagaagggagaaggagaaaaacttcccctccggaaaataataaatggccacgataacagaagcatcggtggcagtcatcccgctttacctggagcggaatcgctcgctcagtctgagcctggaggtgggaagaaggtccagtccgaacgcccagggcggtgtggggagtggacgcctgggggccgggaggacctacttagtataagaaaaggagagcaatgggtggtcagggcggaattgaaaggaaactgaccggccccaggggagaaggggaggggagagattctgtgcttggggttctgaccctctcgggtggccccatttagctaatttgcatcaagattcagcagccgatgatgtctgtatgtgtgtgtgtgtctgtggacacgtcaacaccttggttaattaattaggtctggcggcttctctgttgacaactcagctggttccacaccctggcaattgtgaagagttggccaaatgtttgtccactgagctgatctcctctctggagcaccggggccaccaggagggaggtctgtgaaacccctgcccctgccattgacctaagtgttgggctcttgaatctaacagactagtttttcaagtcgtgggggatgggcttgggcatttttccctgaaaccttcggaaatccttgccttggagactgaaaggataaaggcctctggggccaggtcaccagggacaatggataacgcctgcctctaccctcctgggcacaccctgtgtgatctttcttaaaccagtttcttatcaggtcacaccttggctccacagtctgcctttctacatggggcacgggtgaggaccagagtttgctccctcttcctccaccctccagcttgcaccaaggaaatgatttttttttttttttttttgaaacagagtctcactctgtggcccaggctggggtgcagaggcgtgatctccgctcactgcaacctccgtctccctggttcaagggattctcctgcctcagcctcctgcgtagctgggattaca

SEQ ID NO: 67723 - DNA, 3179 bp, Homo sapiens
aggatttgatttcattttggggcgggcggtggctcgtgctgggtcacgtggtcgtgcccaagcgctcctcctgttgccccacctgtggttgctgtggactgcacacgacagcagattcgctgtcccctcgttggaggcgaatggtcggaccccgagtggcggcgcccctgataaaaggccgaggattcgcgatcagggtgcaacttcactccctcctcttttctctccagccttgcagcgtggccgttcacatcacgcgcttcactaagcctcctatcactagtaacctttcagcgcattgtttaaaaagaaagcagtttctgtccctttctgtagttcctttaagttcaggatgtaagcgaagccttccattaagtaaaggtgagtgtcgtttcgtctcagtcgcgaaagtgcggcggccgatgatgaaccgcgccaggagcagcctcagcggccatcagtccattcgcagcgccggctccgccgaggcccggacttagctctcgagttgccttggcgacgacgcagctcgctccgccccagttcccttttatggtttcagccccgcctcctctagttagccgggtgcgcttcggcaagcgtggcgaaagtgcggcggcgaatgtcaagcgttgggtctgagcctaggggtgtggcttgagctcacgctggttctttcttgcctcggtgatccaccagccttgtcacccaggatttaggttggcagattcgtctctcgcctttggaatttctaccttctcctaggttttgttttttaaaatcaggcctatgataccgctcatgggctcatatttattttagcattgtaatttaagttgtattttatgcaactctaccccgatacagagagctgttgatgtaactgcagcgagcaaatggaggactagagactagcgaaggggccgagacttcgtctccagagtatccctgtcagcatccatcaactgcactcatatattgaatgcagctcctatccgcctttcttttcgacttcttcatgccgttaccactcttcatcagttagtctagcctcaatgttttcatttatttcctttgttttttttgggggggggggaacggagtcttgctctgtcgcccaggctggagtgcagtggcacgatctcggctcactaaaagctccgcctcccgggttcacaccattctcgtgcctcaggctcccgagtagctgggactacaggcgcccgccaccacgcccggctaattttttgtatttttagtagagacggggtttcaccgtgttagccaggatggtctcgatctcctaacctcgtgatccgcccgtgtcggccttccaaagtgctgggattacaggcgtgagccaccgcgcccggcccatttctttcctttcgttgagacagggtctggctctgtctaccaggtcggagtgcaggggcgcgatcatagctcagtgcagcctcaacctaccgggctcaagcgatcttcccacctcccaagtagctggaactacaggctcctgtaaccagaccctgctaatttttaaattttttgtaaagacggggccttgctatgttgcccaggctggtctcgaactcctggactcaagcgatcttcccgcctcagccttccaaagtgctgggattataggcgtgtgccgccgcgccccgccaggtgttttcagttctatgcactccattccctgggctcttgacgaatgtgcgggagctgaatattcgttatttggactccggcaggaaggcgtgggctcagcttcgcgcttgcgcgctgctcttggagacggcgtctacttcgccccgcccctcatagtctgcagttccggctctgcagattcgctgctcacgtttcttttttccgtggcccttcctgccctttgtttctctcttcatgtcacccgcgggacaactctacgtgcaagtcgctgaaatcgattttctgcttcttatagtaagcggcgggctcgccagcctcgagcgaaagtgtgactgcgaacgggcaggcgcgcgcggggctcggcggaggcgcgcttgggctcccggcggcgacgactacgaccactaggagagcggacggaggcggcgcctgaagcggcggcggagcccatgccccgggacggcgggcggacccggagagacaaatccggggcccggggcatgtccccggggcccccgtgaggaggcggcggcggctatggagatcgcgccgcaggaggcgccgcccgtgccgggcgcggacggcgacattgaagaggccccagctgaggccgggtctcccagccccgcgtcgccccccgccgatgggcgcctcaaggctgcagccaagcgcgtcacattcccgtccgacgaggatatcgtgtctggagcagtggagcccaaagacccctggagacatggtagctaccgcgggtgaagcgggggcgggctcgagagggacccgggagtcgggagggatcggtgcagggcccggctcgaggtggcgttcaatagattgcacctaatggtgaataaggggacagtcgtcagtttagaaccgtagtctgttagaaagggggtggctatggagttgggaaggtgaaaagtatctggtttctgccgcaccccacccacccgagacaaagatggtgatcgttttagggtttaaaacgatgagcaattaaagaaagtttggtgttttgtcagatgtagagtgtggcagcctttgcgttcgtagttccaccagagaaggagagaaggagcagttgagaggaggagcgggtcaacactgggcctgaaagggcagttgaaagagtttgatgggtctatgggggtaaaaagaggttaagttgctggtctgcaagccttggggcaaggagtggtcgtgttggccactttcttggctggaaagagggagactataaacttggactgtggctatagaggacttggtaaaaaggagtcaagataaggtcccagaagaggagcagaggtggtggtcaatttgtggttgggtgagggagaaagaggcagtgtggtttttatgttttcttttttattgagacaaggtctcactacattgcccaggctggtctcggacttctgggttcaagctgtcctccctccttggcctcccagagtgttgggattacaggtgtgagccaccgccgcctgctgcaatgtggtatt

SEQ ID NO: 67724 - DNA, 1099 bp, Homo sapiens
gagggagggtctcgagcctgcccaggcttatccggattcccatctcccacagtggggttccgcctgctggggctgctgtttcctcattacgtgaatggccatctgatgttcttctgttgtgtgcttgttttcttggtggtggtctctctcccgcgctggaatgggagagcagaggccgaagtccatcctcttctccgctttcctcaaggacactcagttgttgaatgagcgcctgtgggcccgtgaggcctggtggtgtctgagagccacctagcagagtgacatgtagctgaatgtcaggggcctgagcagcctggcgtggggatgccagtggggcagcagtgtgctctgtggcctctggcaagcatgggttcttgcagagcattgtgtttcctcacctgtgaaacagggccagtgatccctgccctgcagaccaccaggatgtcagaggatagggtgaacctgctgggggcaggtctcctcagcaagccacagccaggtgtgtgtagatgggcagggaagctcggggaggaggcaggctgggaatcgtgagtgaaagaggccgcttcagcactgccaggctgggcacgtgggtgcccgtggggagcgagctagccggctgcactgcaccccatcatgttgtggcagacccttcagctcttctgaaggccaaggccagacttacacaaggaacccatcaggccaaactgcaggaatgacctgaggctcggctggtctcctcagtcccagctgaactctgtggggttggaaagataggcatgtgagagggacttgtgatgagagcacatgacaccagccacagtccgggagactcatctcccctcctccagtcctgccggtgactcactccctgctccctgaccatcagtcctccagtgtgtgtgcgttgggggtttgcccactaggaagctacttgcatgaagtcaaggtgtctgcagggcagggtgagggggcccaagcatgctaccatctctggccacctgagctttggaaggcagcgggaggggtgggggcagggtgttcttaaatgcggatcttagggcatggaaatgccatactgttggctattgaaacccgt

SEQ ID NO: 67725 - DNA, 3342 bp, Homo sapiens
aggaggtcgaggcagcagtgagccatgactgcatcactgcactccagccagcctgggcgaccgagcaggatgcgcgtgcgcgcacacacacacacacacacacacacacagtcccgggccagtcacggtagttcacgcctgtaatcctagcactttgggaggcccaggcgggagaatcacttgagcctaggggttcaagaccagcctaggcaacatggcaaaaccccattatctcttttttttttttcctgagacaagtctcgctctgtcgcctaggctggagtgcaatggcacaatcttggctcactgcaacctccgcctcccaggttcaagccattctcctgtctcagcctcccgagtagctgggattacaggtacccgccatcatgctcggctaatttttgtagacacggggtttcaccatggccaggctggtcttgaactcctgacctcaggtgatccgacggcctcggcctcccaaagtgctgggagctacagcgcccagccggcatatttcattttattatttgactcccctagtgaaatgtaagcttcacaaggaagggattctgtcttagaacggtgcctggaatacaacagacgctcaataagtgggtgtcgaataaataaatgtcccacgctgaggcttaggtacgttatgatactcattttacaaaagagaaaactaggacacacaaagattaagtcattgggtcgcacacctagtaagtgggggaggcgagtcctcagcacacgcccaataacagcattattatgattactagccgcttactcaggccttgagctaagtgctttaccctgaatcatcgcgctcaatttagcaataaccccgagccggcaccgtcgcgaacgccactttccaaaggaggaagccagggccagacgttgccctgcaaggccggggctgggccgggttcgaacccggacgcctgacgcgccctccgctctcccagaggcgttaccttggtggcccccgcttcctccccacggagcccggcgctcacccccgggccggggtcggggtcgtgagcccacagctcagccaccatctccgtgtgaagaaactcaaacaacacagtatccgccatgccccctcctcgcacgcctaaagatgcgcccagcgcttccagctctcattggccaggcttggtaagccacgcctcttgcgtcatggcgcgagccctcctactccggcttccattggtgttttagactagccccgcctccccgccccggactcaggtggtgtgcgcgtgagcctgggacactagggggcgggcctacgccttctctggccacatgtggcaacatcttctgctcttactgccgtcccttccctatttccgggttctcgagcattcctattggccaaattactggttacacgtgacatactcggcttttaaaatccctattggtccactccagactttcctcgtcgcacaacctggaagagccggcccagctgtttctctattggcggttcctccattcatgtgactcttctgcacgctcactcaaagctgatgctgagaacttgcttcctgattggtagccgggcgaatccacgtgacttggccgctaatgcccgcccaacccgctcccctattggttgaaatcacagcccttcagctgccacggtgagaacgcagcactcgggttaggaagcggatctcgcaagctccgagcgtcagctgccgggtacggtctttggcgttagcgcttctcccatcccatgagtgcccccagcagagtccagtcggactgtcatcctttctgcgactctggcgctggtcccgagcagctcacgggcccgtgtgcttccgggtctgagattggcatggtggaccaggtggagggtgtggcctctactaggaggcaaattcgtaaagacctcggcttgggactccgggaactcgggccccagatccttgttcgagctggtcttcagtttccccatctgtacgctgaagagcctggggtccagtaacccccatcatcacccagtttacagaagaggaaactgaggcccagacggggagcagctgacaccaagtcgttaagagaatcagcgaaggggctgggaatccaggacctgcgccttttacccaccgcggcgccggtctcacgtgcagtcccttcgctcttctcccctagttcggtgccatggcgtcccagggtcgtcggcggaggcccctgcggaggccggagacggtggtgccgggggaggcgaccgagacggattccgagcgctctgcgtcctcgtcggaggaggaggagctgtacctgggtccttcgggcccgacgcgcggccgccccacggggctgcgggtggctggggaagccgcggagaccgactcggagccggagccggagccggaaccgacggccgcgccgagggacctgcctccactcgtggtgcagcgggaatcggcggaggaggcctggggcacggaggaggccccggcgcccgcccccgcgcgctcgctcctgcaacttcggctggcggagagccaggcgcggctggaccacgacgtggcggccgccgtgagcggtgtctaccgccgtgcaggccgcgacgtggccgccctggctagtaggctggcggcagcccaggcggcggggctggcggcggcccacagcgtgcgcctggcgcgcggggacctttgtgcgctggccgagcgtctggacatcgtggctggctgccgcctgctgccggacatccgcggcgtgccagggaccgagcctgagaaagacccggggccgcgggcctagccatgattctacttcccaacctgactgcaatttgggggtaggccttgctgcctctgggacctgactctgtctcctgtgtctcttatcaccccccacccccgctcccatcttggtgtcacccatgggggctaatccggtccccttggataatgctttatattggatatagttcaacccctactgcggagaccagggccccactatccttagatctggttcctctcccgatcctgaccctgccgcctggttctgagccttcccctggggcttggctccagcctttgttacatagttgctccttaatctgtttccaccctgggggctcaccaattttttttttttttttttttttttggagacagggtgtttatctgtcacccaggctagagtgcagtggcgggattactgctcactgcaacctcgacctcctgggctcaagtgatcctcccagctcagccttcaagagtagctgggactgcagacctgcaccaccacgtccagctgcccggttaatttttttctgtcggtttgaagaggggagaaggt

SEQ ID NO: 67726 - DNA, 1757 bp, Homo sapiens
gcagtggccaagccccgcacaccatccccttcacccaccccacccttaggcctccgaggggagagcttcccccgctcccccccgccaactggggagagaatgggccagggggagggacaatgtgggcagcgcctctggggtcttctctggctcagtccctttatctctatctcttcacagatctctgcgtctctgtatctctttgtctctccctgtgtgtgtgtggggtctctctcagtctttgtccctctgcgtctctgggtctctctgtctctgtctccctgcgtctctctctctctgtcatctggctcttccttcatctccttgcgcctctccacccttttgtaactcgtctctctctcttcgtgtctctctatctctacgtctctcgatctctctctctgcgtctctggcgctctgccccggcctctctctccccttctctcctctccagtgcgcctctcgtctcgggcgagaacacgctccccgccggcgtgcccagacccgcctccgcccccggagcccccggagcccccggcgccccgaccagcccgggcctgcgcctttaagggccggcggcggggggcggggtcccggcgccccgccctgcccgcccctccccctgacgtcccttcctccctccccagcccctccaccgcctccctccgccgccgcttgggccggctccgcgccccctccgcggcccccgcccgcccgcctgcccgccgcccccatggcgcccggggtccccgctgcacggggccactaggaccctcggcgtcccttcccctcccccgccctgccccctctcccgccgcgcggacccgggcgttctcggcgcccagcttttgagctcgcgtccccaggccggcggggggggaggggaagagaggggaccctgggacccccgccccccccacccggccgcccctgccccccgggacccggagaagatgtcttcgcggacggtgctggccccgggcaacgatcggaactcggacacggtgagtggggcccggccccttggggagccctggctgggtccagccgccaaacccttctccccgttgtacccctcgccccgcgagcccctaccctcgtttcctgggcccgacccggctcgtcacctctcgacccctcccggacttccaggcctctccaccctccccaccttttccagcccagcccgacccctgggggcgcccctctctcgggacccctctcttgtccccgtgcagaccgcttccgctcgggtctgttccctccaggaagccccttcccctgcttccaggagcccctcccttctcttgcctgtgctaagccgtttcccctccaggccgtccgcgtccgacacctcgccccctcccggatttgcagggcccctgaccccccaaggcccggccctggcactctcagcagggcctggcccagtcctgcctctggctccggccttccctgtctggggctgggtgccggctccccaggagcccccctcctcttattcccagccctctgcccctccaggacgcacccagggcgcctgtgggcagcccctggcaggaagctggtttccacctctcctgggccccggcccttttctggcttcttcaaggtctctcccgtcccaggcctggtccccatcttccaagcagccctgtccctagatcccagcaccccggggcccccagatgccacctggaccctttctggtctcttcctctcccaggaagccttggcctccaacttctaggccctca

SEQ ID NO: 67727 - DNA, 1080 bp, Homo sapiens
tactggagaggctgaggcaggagaatcgcttgaacctgggaggcagaggttgcagtgagtcaagattgtgccactgcactccagcctgggcgacagagcgagactctgtctcaaaaaataaataaataaaattgaatgtagtaatgattgtgcaactccgtgcatatactaaaagccatcgaattgtgcacttcgcttcaaacaaaacagttcctgtcttcccagactaacattcctactggggccaggcagctaacaaaacaataagcaaactagatatgatatcagatgctggcctgtgctatgctggggggaatactgtaaggggatgggaggtgtgggctgagttgttgcttgctttttttttttccccctttgaactttttattttgaacgattgccaatctacggaaaagttgcaacagtagagcaaataacacatggtatgtttcaggagcttcacaatcgctggcctgtgtccacatttgctctatctgtctgtatttgcacatgatctttgctgccctcatcggcattgatggcgcatttgacagttagttgcagacgctgtgtccttttatccctaaaggcgagagcgggttatctcctgagaccaggggcgttttcctgttgacggtgacatacaggaaatacagcagtggtataatcctggcctctacgccatggcccatactcagatttcatccatcatcccaggaatatctttggcagctatttttttttcccagtcggggatccactcgggtccctgcgttgcatttagctgcgccatctcttgtgtctcctttcatccggaacagttctcagcctctcttttgtctttcatgacattgacattatcgattagttcaggccagttaattttgcagaacgtccctcaatttgggttgcctggtgtttcctctcgattggaatcgggggtgcattggggcaggaattctgcagctgggacgctctgtcctgctctgcgttgcccgtgaggagcacgtactgtgatatgaaattgtaaagtcagggaaatacttgcagaggacagaccatcaaagcggaaccctgagt

SEQ ID NO: 67728 - DNA, 1400 bp, Homo sapiens
gtatggtttaacctaatagtgatgatttattctgccacataactaaaatgaatagagtatgcagccttcaggcacagttgtatccaggtgctcagagacagttgttgggaatgttttctgtggtagctttttcccaggctgctctccaggaggcaagcagatctgggtcacatgccttcaatgaagcagtcagtgtggctttgggtgtagaacacactaattagccagacctgggttatccgcctgccttagggttggagcaggggagccatccacgtgatctgagcggaaagaatgttctttcaaaggaaatcaatgtgctgttgggaagggaggatgggtactggacaggtcaaagagcagacaccagtgaatgacacagaaatgagtggaagtgggccaggtgcagtggcttatgcctgtaatcccagcactttgggaggcccaggtgggtggattgcttgtgcccaggagtttcaaaccagcctggacaacatagcaaaaccctgtctctactgaaaatacaaaaactgaggtgggaggatcagcagagcctggggaggccgaggctgcagtgagctgtgaccgtgccactgcactccagcctgggtgacagagtgacaccctgtctcaaaaaaaaagagaaatggatggaagttaaagtttctgggagtctgaaacttctctccatccccccctcccagaggtgatggtgggtatgggctacacacgggaagaaatcaaagagtccttgaccagccagaagtacaacgaagtgaccgccacctacctcctgctgggcaggaagactgaggtcagggggcgccaggggcccttggggacgcgtgatgcctgggtggagggacttggggtgcagaagagcctcatctgtcatcctctcgcaggagggtggggaccggggcgccccagggctggccctggcacgggtgcgggcgcccagcgacaccaccaacggaacaagttccagcaaaggcaccagccacagcaaagggcagcggagttcctcttccacctaccaccgccagcgcaggcatagcgatttctgtgagtatcaaccccacgccctcacgcaccctccttctccccaaggcccagacttacagttacgtcagggttctctgattggcaagcaacagaaacccactggagctaacctcagagagggaggaatgtcttataaagacacagggcattgcatggaacttggaggcaggaatgcacagccaggctcaggaagggattaaaaccggaaaagcagccagacccagagcagacactctctgtcttgcttcctctctgcttgtgtggtttttcctttgtctctcacttatctcatcctatcttttttcctgatgtcccagctccccgatttttttttt

SEQ ID NO: 67729 - DNA, 374 bp, Homo sapiens
cagagcaagactctgtctcaaaaaaaaaaaaaaaaaagtcgtgggaagcagcagcagcttccccagctcctcagctcttccggcatctacattcggtcccactccctgctcttctgctctgcacatgttcagtagccgccccacgtggctgtgcccttggcctttcgaggctggtcacggcaggttactaccagtcaagtcccagccttgaccagggtgcacacaggtgtgagtctgagccaattgtgggcctaaacttttaaaagtatgggtcacctgccaggcgcggtggctcacgcctataatcccagcactttgggagtccgaggagggtggatcatgaggtcaagagatcgagaccacctggccaacat

SEQ ID NO: 67730 - DNA, 1201 bp, Homo sapiens
agggaggaggatcacttgagtccaggaggcggaggttgcagtgagccaagatcgtgccactgcactccagcctgggagtctccagagggagaccttgtctcaaagaaacaaacaaaaaagtttttaaatactaatttttctcgtacgttcttgagaacattcatctttttaacttcttcttagtgctcttggtgcccctgggtacttccagtttattttggttctaaacacccaaggcaaaccaaggtctcactgcatggctgtttgcgaggtaggggtgtttctccagaggtcctgaccatcaggaggcacccagccgtggtggctggtggtgtctggctgttaccagcattcaccagccttgaccggctttgactgattgtgactggccttcactggcagtgcctgacagggccccactgaagctttgaccacaagtgtccacctgttaccagtggcagccagctgtggccagcattaaccagcctttactggcagtgtccagccatgaccagtattaaccagcagcaactgactgtgaccggctttgaccagccttgactggccgtgacaacccttggccaacggtatctggctgtgaccagtggtgtctggctattaccacttatgaccagctttaactgtccctgactgttggtgactggccatgaccagccttaactggctgtgacaggctttgaccagcagtgtctggccatgaccagcagtagccagcagcaactggcaatgaccggctgtgtttggtttggctagctgtgaccctgccaccacctgtgaggactgctagtccaggttcagggccctggactccagggctgtgcagagcccggggtcagtacagggaggggagtggaatgttgtgagggaaccccgtggggatgggccaggagagggtgcacctgaggacagctcactggctacctaacagcagaagggccttggggaaacagatcttgaaggcatcagctcaacttcaggcaggtggcacaggagggaggccgggatgcctgtgtgtcctgagtattccggataagtacaaattcatgccccttggctcttccccagccccgagacctggagcttcacaatgcagcctctgaggcccgtgtgtcagagaatgatccacaacccagagaatggatgggagcggcagggccaaagaaggagaggatgaggtggt

SEQ ID NO: 67731 - DNA, 1305 bp, Homo sapiens
atgagaacagacattgacagcacagtgattgaagctgcagtggggagcccaggggcctgtgggaacccaaaggaggaggcacgtgactcagcctggggccgggggtggtggtagattatgaactgacacctgaaagatatgtaggagtgagtcaggggaaaaggtaggagtaatgttctaacaggtgagacagccagtgcacaggctagtcacagtgacagaatgtggcatgaataagtacattagcaaacgtttggtgtggctgggctggacctcaagaaggtgggcattgctgggagaagagcggtggacaaggatgccccctggaaaccttccctgcctcgttttccctcagtgcccccctcttctccggtctccaggggtctcccctgactcagcctcggtggctgggattactcatgaacctttcacatctttgggacctttcaccatctcctactcaccctgggttcccacatgagcccctgacttattcatcgatggggagggcagagaagggaagagggagaagctcaggggcatgtcttcaccccctcactcccttcctggctgtgtctcctgcagaacaacctccctcctagcatgatgacccgcagaaacacctacgtttgcacagaacgcccgggggctgagcgcccgtcactgttgccaaatgggaaagaaaacaggtacggagggggcagcaacagggtgaggggtgggaagtagggggtaggtgaacaggacctcccttgatctgagatgataggcattggaggctggtgccatggggaccagagagtgagtgtatctgccctgcccttggcagaatcgacccatgtacccccctgaaaatcctccccacttaattaattagtcttaagcaccaggaaagcagttggccctgttctccgcctacaagccttgggaacctgaattgattttttgaatgatccatttttagaactcgagagaagccccagaatgtcacagcttcagcgtcatctggttggctggttttccggcttgttggcctgagtctgtgaggtctcttccagctggcaagggagggaaaccagttcagactggctggagcagagagagggaagggattggttcacatcacaggtcaaggccagctagaatggggccagctccaggatgaggacactgccccccaccagggctgtagggcaggttgatggccaacaccagggcacactctgggatgcacctgattagtgggtgcaggtgttcccactgggtgtgggcagaggaatggggtagttaacagtcacaaatctg

SEQ ID NO: 67732 - DNA, 1579 bp, Homo sapiens
cctcagcctcccgagtaggtgggattacaggcgcccgccaccacacctggctaatttttgtatttttagtacagacggggtttcaccgtgttggccaggctggtctccaactcctgacctcaagtgatccgcccgcctcgtcctcccaaagctctgggattacaggcgcgagccaccgcgcccagcctattcaccattattgttttagataacggaagattatggggtcctggattcccagggacctcggacttctaaaatccagacgtcctgcaatctgtcttaggcccaggcgtggcagccccaccggtcgagtgggcgggtcgggcccaccggccacccaccttggcgtccagcgtgcgtttgagctcccgcatgtaggagaactgctcggggtagatgtagtcgtacgggaagtagaccaggagcccgtccacgttgagcctggcggcaggggctgctgggtcagttcccgtcccctcagcccctctcccgcctccacagtgcccggtcgtcgagcccagagaagggtgacgggcccggcgcccccggtaaccctcaggtcctcaggagcctcggggccccctcagtgtctcctcgctatcactgctgctccctgcggctgcccccgtcccaccccttcaccctcccctcgcccccttggggacccaggcgcgcccaccgatgaccccatcttcaagaccccccgcgcccgctagcgagcgcgacccccagcccccttctcacttcatggcgccggccggactgtgcagcggggtcgacccgcctccctcatgaatattcagcgagaggccgggtcgtggacatcctcgagggctcgctccacctatattacgagaccattggctaacctgcccgtcaatccgctagggcagagccaatcgggatactgcgcgtgcgcacggaaaagcgagggcggctgactctcgggtgaggcggtgcgggaggcgtcactgaggatcgtcgagggccaatcaaaaagaaaacatggaagggaaagagccgagagactcgatctcattcactagaatttggtcctcctgcgcctgccaagattgtctgagtattgatcgaacccaggagttcgagatcagcttgagcaagatagcgagaacccccgcccctccacctcgtctcaaaaaaaaaaaaaaatcgtctcagtagcgaatagtctaacggagaatgacagggaaattggtgatcctttctgggcccaagagttagaaatggctttgcaggccgggcgcggtggctcaagcctgtaatcccagcactttgggaggctgaggcaggtggatcacctgaggtcgggagttcaagaccagcctgaccaacatggagaaaacctgtctctactaaagatacaaaattagccgggcgtgctggcaaatgcttgtaatcccagctactcgggaggctgaagcaggagaattgcttgaacctgggaggcagaggttgcagtgagcagagatggcgccgtcgcactctagcctgggcaacaaaagcgaaactccatttcaaatattaataataataactaataaataaaacataaatg

SEQ ID NO: 67733 - DNA, 1389 bp, Homo sapiens
ttgctaaaccaagcagaacatgaattaaataccaaggaaatactctcctagattgtcatgttacatcagccaatactaaaattgtcaagatacacaatttgaatgaactccatggtccaagtcgaattatctatgatattacccatctaataaacagcactatgtcccttaatgggagaaaaagttggagaatttaagagaatatcaatccaatgttggttgggtgcagtgaatcatgtctatattcccagcactttgggaggccaaggcaggaggatcacttgagcccaggaattcaaggccagcctcggcaacacggtgagatcctgtctctacggaaaattaaaaaaaaaaaaagagagagattagtgggatgtggtgcctatagtcccagctacttgggaggctgaggcgggaggatcatttaagcctgggacgttgaggttgcagtgaaccatgagtgagactcatctcaaaaaaaaaaaaaaaatggcgatcactagaggaaaaaaaaactaaagtggggtttgcgggtagtgggagggcccttcctgctaggttgcactatgatctccagggaggctccacgggagaatcatttccttgtctttttcagtttctagagccaaattctttgcataccttgcattccttggctcggaaccccttccctaaccttcaaagctggcagctagcctctggctcaagtgtcacatggcctgtctctgtcttcctatccaatcttcctcttataagaacattggagccaggcatggtggctgacgcctgtaatcccagcactttgggagaccgaggcaggcggatcacaaggtcaggagttcgagaccagcctggccaacacagtgaaaccccgtctctactaaaaaaatacaaaaaagtagccgggcatggtggcaggtgcctgtaatcccagctacttgagaggctgaggcaggagaatcgcttgaacctgggaggcagaggttgcagtgagacgagatcgtgccactgcactccagcctgggtgacaatgcaagactccatctcaaaaaaaaaaaaaaaaaaagaacactggagaccaggtttagggctcactcagatactccaggattattgtctcattttcagatcctcaaggtcagcacaactgcaacctcccttttaccatataaggtcacattcacagattatgaatttgacaaaccaaaaattggtcataaactatgttagcaatttggaaacagtcatcatagcaatatatttcatttgaatcattatctctctcatgatgaatcacggagtgcagaggtttggttttatttattatttttctttttctttttttttgagacggagtctcgctctgtcacccaggatggagtgcagtgg

SEQ ID NO: 67734 - DNA, 976 bp, Homo sapiens
gcgagaggctggctttggagatcaaggtgggaaccaggcttaccctagaagggggtccggcctgcgggccaggaggcgcgggagagtctgaccacagcgactccagctgcttggtcagttcatccaccttggccgccgccgtgtccagctccatctgcttcagatccatgtgtttcatggccagcgctgggaaggtgggagtggaggtaaggacctggcctcctggcaggggccggcctcagcacccctcgcccgctgccgaggtccccgcctcgccagccccgccccctactccagcttacactggaagttcatgtccagaaagtcccgcgcgctctggaatgcctcgctgtccatggtgccggccggagcgggcgcctgcatggtggggagggagggagctggctaagaccccgcccctctagaccccgccctcagggagtcagacgccgtcaggagcgggacaacgcctcaactcagttccttcccctggaagccctttaccctttcacctccccagctgggaaatgccaactcctccaaagccaagtccatgcgccacggagaagtccaaacccagtctaaaacctccggaattcactttctctttctttttttcttttctttttttttttttttttgtgtatgtgtgtgagacagagtctcgctctgtcgcccaggcgggagtgcaatgacgcgatcttggctcactgcaacctccgcctcccgggttcaagcaaatcttctgcctagctgggactacaagcgcgcgccattatgcccggctaatttttgtagttctgggattacaggagtgagtctccgcgcccggccgtgtccatctctttatctcagtcctaagacctgaatcactccttgaacaattatctattgatcacctacaatgtgccggtaaacataggatggaataactatgaattactgaatgtttactagggaccaggacgcactgtgc

SEQ ID NO: 67735 - DNA, 3787 bp, Homo sapiens
gcccagacattgggaaacactcctctctcatcagatgctcgcctcccccattctgtttttaatcccccttcttaggacgcatgggggtggagagaacggggagatagacagagggaggtgcctggtcctgccctccccccgcctcaaggacagacagacacctccagaattagcctctgtccctcccttatctcccacaataccccaggtcagacagatgggcgtggaggtgacatttctcacctcagggtcagggcaaggagccctgaggcagaaggttagtcagaaaatctggcgggggcggatggaatcccgtcccccagagagctgcagaagaaggaggaggcagaatcctgaccctacaaactctactgcctgtgtgagctccaagcctcagtttaccccttcctctccgtgtaatggttaaatgcccggctatgcaaacctcccagaatccaatagccgctttccggaattctgccctgggttctagaactacctctgcaaacccagctgtttcccaccccataaggcaataggggagcccacctccgccagggggtgccctagggcggatgtcccttctctggttaggcaggtctgacgcccaggttaatgacatgttgggttcgctcagcggcacagaggaggttggagatctgcctcggtgttttctctcctaccccgcccccatccccgagccgaaaagtcgggggagagccgggacacagcctccggagggaccccgggtacctgtcctgctccacttcaggaacccaggctccactatccctgccccacccttaattctgctcagagacctagaagatcggtcgagacagcagcttgaggctggcagggtggtcacccattccaccttgagccccaccagtctgagcctctcatttctgaccaagactcggggattcgaacccctatactacccaaagactcggcttcctagagccccccagttcgagggactcaggaattccagctccaacgtctccccgggatgaaggggtagaatccctccattccaagaattcaggcatccgaacccgctttccttccctccagtaaaacaggcaacggagtttccttctaaggatccaggtgtcggcgcgccccaaattccgccctgggacctggcgtccgagtcccctcccaatcctcccagggacgcgggtgttgggctttttcagggcctctggtccccaggagggtgaaactcacggatccgggcagatcctggcacctgggggcttcctccagctcgggctccggcttggggagcggagaacggggcggggcaggagctgggaacaggttagacgacgtgacttgggctggagggaggcgggtcccggtggggagggggagccaaggtcgcctcgagcaccttgggacttgtagtcccggagggacaggacgtagcccaagacgatcccatttggattcacccagagtccatttcacagacaggaagggcgaggcccagaagccgagagcgaccaggccagggagatacagaagagccgagacgcctgcctcgctgtggctggagactgactcctgagcccttgccccaccccttcaggcgcactatcccctttcctgatcagtatcccccagggtctctgagcccgaatctccccgtcgataaaaagcgcgggttggatcttcaaaggatgtcccagcaagagttcaaaatcttagtttggactacaacccccagcagcctccgcgaccgccctcgggcgactctttgcctcgggtcctgtgggaattgtagtcctggagcccgcaggggctgcaccccggtgtctctctcgcccacgcgaaggaaaccgtctggagatcctggataggggaaacatttccccttccccttgaccctccctccgctctggaaagcctctcccacctggggagaaggggtgccccaattctggagtaggatcctaaatcttggcagagggggcgggaagtggcgctgacacactggccaggaatgcagtcgggtcaccctgtctagccaccgtctcgcggctccaaccgccgcccaacgcggggcggccccagtgggaagggaagtgggtgcgtcccccaaatctgtgtccacgtgccgctgtttacacgctccctggggcagggaggagtcgccgatcaggtcccttcctgaaagtcatcgaggtttcccacgcatgagactaaacccccgagggcatctacaagtcccatttgatccacaaacgctacaccgtgcccagcaccactccacgcgtgtggggctcctgggtccgaggctccgccctcgagaaccacaagctcctccccctatgtttcccgctcccccggagtccagaagccccgcccctggctggaacttcacgccctccggacggattgcccctatttctccattttcccgcttctcccagtcaagttctgaacttgtgaggcatctgggcctccccagaagacatttaacacagaaagcacagccctactaactagtattcttacctgtctcttcaagaatttcagaccaatcgaccgtcctgtctctttaaggcttaggaagagcagtgtggctgcccctttaaggaggcgttgcaacaaaccatattggacagacgatgggggcgacccatcgggacccgacgggcctctgactccagcaatacagcgaatcagcggctttcgggaatacatttttcggaaaaagacttcttcctcggttttctgctctgcacacgttgaaattttccccagtttttcctgcagatcgggagtcgagcaatgcctacccccgcgctcccgcaccagttgggcgctcccggatgatgccctacccctttggatccacgtggtctgcaacctggtgcgagcagcccgggctacagggttgcctgaggtgtgggtcccaggatggaggagccccaggccggcggtgagggtgcgggttgacggggtgcggagggtgcgttggtggaaggagaaaggggcgtccgagagggttcgggcggaaaaggaggcgtacctgcaagcaggacttgcgaagagcgtgcattcccagtgggcgaacgggaattcgaacggagagagggttatcttgtggggggctacccgtggagagcaaggcgcccccaggggttggatcggtgaaattgaggtcgcccctggggaacaggtgggcagaaaggagaaaccaggttgaggggactggagtgctcacgaggttaagaccaatggaccgataggcgcgccctgcaagattggaccggcaaggaggtgtcagtcgaccccatttccccttctgctgcagatgctgctcggttctcttgtccccccaactttaccgcgaagcccccagcctcagagtcccctcgtttctccttggaggcgctgacgggtccagatacggagctgtggcttattcaggcccctgcagactttgccccagaatggtgagtggtcttgttgacggaaaagagggtcccggtccagaccccaagagcgggttcttgaatttgtcacaggaaagaattagaggtgagtcacagagcacagtgaaagaaacaagtttattggaaactactcctttacagagtagagtgtcctcagaaagcagggggagaaacccacagccctttgttagtatttctacttataagaaactataaggaactatagttaaacttggagtgtgcagataagctcactaaaggtaggggctattggtgttatccacgaccattaatcctgcaacctaagcttgctc

SEQ ID NO: 67736 - DNA, 2380 bp, Homo sapiens
gagcgagtgagccactggcgtctacgttctcatcccgcagcaggaaccccccactcacagccgtcccccacaaaactccgagagctccatagcgtcaggtccccaacacccagcgctagaggctctgtaacgccacgcccctttgacctccaccttcggctcgccccgccccttacaggtccacaagtcccatcgctccgcccctcgcccccaccggattctattggctccgtccccaccatcccccgccttccgttcgtccggcccccgaggctagcatctggacgccctccccacgcctggccttgtccatctctcagactcggcaatgattggcttccgcggcgccaatctccacccgcagtctccgcctcccgcacctgtggtccgggcctcacggtttcagcgccgcgaggcctcacctgctggtcttggagcctcaagggaaagactgcagagggatcgaggcggcccactgccagcacggccagcgtggcccagggctcgcagcacttccggcctctctggccccgctccccaggagagtagagcatagagcagggcgatctctgtacaactctctatggttctggaggaccgcggaggtcgtgggaggagagagatgtggcctgaggatctggctcccaaactgttaagtttcaaagcccttactgagcgcttctgtgtgcccagaatcctggcagggctcagtggagaacagatcgcaggagatccaacttggtccctcctctcagtaaggagagacttaagtttgaatccaactcagacattgacttggcttcagtttcctcattcattcatttattccacacctattccccccacgcgcttcctctcttcccggtcctgtgcgagtccgtgctggtgacacagcagtgaccaacgacagccccgtgttgtcctcccggagcttacggttcagtaagggacacagacacgttcccagtgctgacccagaatgggcaggtctgggatgggagatcccgggagagccgtgggatgggggtcagggggagcgcctgactcagccccggagtccggaagggcttcctggaggaagggacatctgagcaggggcctggctgatgagttagtattagtcacttcctgaaaggatagtatcacactgttctaacttgcagctctctgattactaaggaaatggaatgttttttgtgaaagtattggtcttgtaaattttgtcttctgtgaattgcttgctcatattccttgtccatttttaaaatgggttgtatggcttttttattactattaatttctaggggtactttatggattctgattctaatccttagttacccatattgcaaacatttcctcctagtttctactttgggctttaactttagttatttttggcacagaagttatttgtgtttatgcgcaactatttatcaatctgttccgttctgacttttgcttttggtgtgttaagagccctgccataacccagggtcataatgataaattcttttttttcttttttttttttttttcgagacggagtttcgctcttattacccaggctggagtgcaatggcgcgatctcagttcactgcacctccccctcccgggttcaagcgattctcctgcctccttagtagctgggattacaggcatgtgccaccatgcccggctaattttttttttttttttttttttttgtatttttagtagagacggggtttcaccatgttggccaggctggtctcaaactcctgacctcagctgatcctgaggtcactttgtgacctcccaaagtgctgggattacagtgcacggctataatgatatattctatcatttcttttatctacgtaaaagataaaagccccgtgttgtcctcccagagcttacagttcagtgagggacacagacacggtcccaaacagtaatgacctagaatgagcaggtcatctggctttaatctatgtaagatttatttatttatttattattttttgagatggagttttgctcttgttgcctaggctggagtgcaatggagcaatctaggctcactgcaacctccgccacccacattcaagcagttctcctgcctcagcctcccaagtagctgggattacaggctaacttttgtatttttagtagagacggagtttcaccatgttggccctgctggtctcgaactcttgacctcaagtgatctgcccacctcagcctcccaaagtgctgggattacaagcatgagccacggtgcctggccaagatttatttttgaaagtgcaccgaggtcgttgtttatgagtgatgtaaccaattgtctcaagttgaccaaaggtagatcttttctccactgttctgaaattctaccttt

SEQ ID NO: 67737 - DNA, 1642 bp, Homo sapiens
gagctgagatcgcaccactgcactccagcctgggcgacagagcgagactctgtctcaaaaaacaaaaacaaacaaacaaaaaaacaaatagcgcctcgttttctgggaggcagtgaattccccatttaggaagtgtccaagctcaagttgaaatgatggtacattgcggttcatgctgcaatgcctcaacccagttcctctccggacctcagtttcctcatttataaaatgggtgtggacgacgaggtcagatttaaaaaaataataatagtagttaataataataggccgggtgcagtggctcaggcctttaatcccagcactttgggaggccgaggtagcaggatcgcttgagcccaggagttctagacaatcctggggcaatatagcgagattctatctcaaagaaataatcataatcataataaaaataaatgaatagataagctgagacggactcaggcccagctcctgcctgcgatccctgcgggggccaccagggggcgcggcgcccctgcccaaaactccgccgtcggctctgaaccccggcggacgcgtcccgacgcccctggaagattctgcgccctgccggctcgccggcgcccgggagcccgggaggcgggtgtgcacgcggggtgtccagggcgcccccgatcgaggccccctcgccgtgcctcggggtagggggacggctgtgactcaggcgcgcgctcctccccggggccctcagtggtcgcgagggggcgcgcacggcctcgggaacccgcgcggcgccgcgtccatttttaccccagctccgctaaaaatagttgccgcgctccgagccgagcccgaaatagcggcccccagataaggcaggacgactcagcgcttccggggagcggaagggggagcgcgcggggggagcggtgctgggcgcagcccggccgagcaggcgccgctgtccccagcgcacccccactctgccctggcggtcacactcgcccccgactgcgaccccgccccgccgctagcctggctgccttcctacgtcccccacattgtatcctcatcccctgtcccccatcctcagcttcacctccattcctcatcataactcccccctcccctacacccccagcgatgtcccccactggtactcatccgcatcccccagcctgtcctactcctgtccctatttcccctctccaccctcatcgccaatctcctgtcgtcctgaatctgccccttaccatctctgtcctcaaggccaacctttatgggggcagagcagggcgagaggatcacagggagtcaggagacctgcgggctgagggctgagggctgggggtgaggatctgatttcttggtttgtttctactgtgggcaggggtaggcttagatctgggggttggagcatgggacacttcagtctggcctagtcttcagagctgaggcgaggcatggccagcatcacggctcattctgtgaccagggtcggggctcaggctggggaaggatgaccgtctttgtcaccaaatttgatcactgtgtcaccagagttagggctcagccttgagccgtttctttatttacccacctccactaatattttttatttcagacaaggccttgctctgtcgcccaggctggagtgcagtgt

SEQ ID NO: 67738 - DNA, 1519 bp, Homo sapiens
acccctccccaccttgggtcccagatcccagatcgccagtgagtaagaaaacgggttcgcgccgttggtggactccgcccacttgtgacgtcacgagccgctcccccaggatcccgacccaggcgtctcccttgggatgggggcggagaggaacccgggagtccagactcaggccccgcccccgggagcaggcgggccgggcagggttacacaacccgtcgtcgcgtcccgagggaagtcgccggatgtcctggccgggccggggacaatgggcaaggagggcccctcccgcaggaacctggaagtggcaggggctccccctcttctgattcacccttgtttccggcccggtttagcctccttctccctggggatcctatctcctcccaactctaccctcctgtggccctgcagttcggttctttctccgaaccggcaaacctctctcctctacaccccgtaccccgtcctttcacaccttcccaacgccccccgaaactctctgccctcacactcatcgcttgtaattcccgaatcccctaaacttccagtgtccccggtccttccttcactcatccataccgggcccctcttcccaccccctcaactacccccactatcctgcccaggccctcccaatcccctccccgggctcccccaagctttcctcaatatctcccagccctccctagcccccgactcacccgcttccctccaactgaccccaatacactctcttgtcctcctaatcccagcctcccgcagttccctcctgtctcctcgaactgccccatgtccctacctcatctccccaaatcctgttccccatttccccccctcccccagccagccgcttcgccccccaccccggagcccctccccgcccctaggcccaaggccggcccgcgcccctcccgggcgcgctcccacgcccggcgcgggttcccaggccgcccccccgcggtggcccagagacccagtttgctgcggcaaaacactggtctccaggcaacaggccccgccccgccccagggccgccagatgaggctgggcggtcaggaggccaccgggccgggacggagcacccaggcctgcgcgccaaaccctcggccttggcccccagaggcctcagggcgcagaaacccggagactgaggcgcagcaaagaggagatacagagatcagggccccggagcaagaaattcggagacatgcgtggaggccgaagcaacagggaactgtcggggcgcagagatataaggaaagaccacgcgacagatcgaacaaggacggggcccagaaataagcacagaaataatgcagttacacacgggcaacaccgaggccggcagggacgcccctgatggcagaataatccatctttagtcctcaggacctttgcactcagttcgagggacttcccctctctgactctgtttctgtatttgtaaaatggggacattaatacgcagcgcttagcaaatcaggctgttctgacgattcagtgaattcgcagaccc

SEQ ID NO: 67739 - DNA, 1428 bp, Homo sapiens
cttcatgagccagggaaggaaccctcttctttccctctaacgcctcagttccgccacgcggccggccgaggtcggcgctgtaaaatgctcctgctcctttaagagaatgaacagtccaggccgggcgcggtggctcacgcctgtaatcccaacactttgggaggcctaggcgggtggatcaactgagttcaggagttcgagaccagactgactaacatggcgaaaccccgtctctactaaaaatacaaaaattggtcgtgatggtgcgcacctgtaatcccaactactgtggaggctgaggcaggagaatcgcttgaacccgggaggcagaggttgcagtgagccgagatcgcgccattgcactccagcctgggccacagagcgaaagcgagactccgtctcaaaaaaaaaaaaaaaaagagagagagaatgaacagtcggccggcgttgcccggcagcgccgcgccggttgccgggcaacgtcaacaaacgacgcggccgccgtctccgtgcgcccgccccccccccccccccccacgcccgcgcagacgcggtgacgcgacggactgtggaacgccgtcgcctagcaacgcgagggctgtttgtcccgggctgggtggcgcggccgcacagggcgcagccaggaccggcccgggcggacagaccggcccgccgggagcccggggcggggggtggaggggattgcggtgatggaagcgggggagaaccgggttcccaaattaccggtttccctttagacagccgccgtctgttgtcgcccgctcctcctgtctgccccgggaccgcctccgctcgggtatctgtccgtctgcgccccctcctccccggcatgtccgtctgtccagcgcctcccgcgctgtggctgtctcatatcccccccaaaccatcacaaccaaaatagggacaagcacacacttcgctggcctgccgtttctgccttggactgccggatttccgggtgcattgttgcggttggggtccccaccaggggagacagacagacaaggggagacaatctgttcacactcaagccacagccccaaagccctcccgttcctttccccgctcccttggggttctcttgcctgtctttctcgagcctctttcaagagacaggcagcccgtggtccttccatcctgtgtccgggaagctgtccacagctgggaggttctaacaactcatccccaacacacactcccaacacccccccatccagtagcttcatgtgaccagggctggggcgaatctccgagcagagagaagaaattgagtgtgtgacagtgtgaatggatgtgactataggtgagcaacagtcggtgacaatgtgcacatctggtatttcctgtgtgagagcaaaactgcaggactcagtgagtggtttctgtggtttgcacttgtgtatctgg

SEQ ID NO: 67740 - DNA, 3430 bp, Homo sapiens
tatgcactcggtttcctcatctgtcaaatagggagaataatagacccagtttatgggactgttgtgggagagtaaatgagttcatatggaaagcatttagaaaatgcctggcagaaaacaaacatttacaaaatacctgttttgattgttgtcagtattattacttcctctgtgtgtgtccttggatgtgcgtgtgcgtgtctagaatctgggttgcagatgcaggctttagctctgtagtcctgtgttactgggtacccaaatgccctgagtctcactttccttcctataccatgggcatgttccagaccttctccagggccagttgggactcaatgaagctgcatctggaacaccccaatggctacaaggcccagccgtggtctggtttcaggaaaggtaaatgaagggtgaagttgggacgggatggaattgaggttcaaatcactccatgggactgggaaagtgggaagtgaaagagggatgaaagagcgcatttgaagcaggcagactgagggtcagactccagaaaggacttcctcctaggactattttggggctgggaactataagaaatgaactgttttgctgggcctggtggcctacacctgtaatcccagcactttgggaggccgaggcaggcagatcgcaaggtcaagagatcaagatcatcctggtcaacctggtgaaaccccatctctactaaaaatacaaaaattaggtgggcgtggtggcgcgtgcctgtagtcccagatactcaggaggcagaggcaggagaatcacttgaactcgggaggcgggggttgcagtgagccgaaattgcgccactgcactccagcctggtgacagagcaagactccctctcaaaaaaaaaaaaagaaagaaaaacatgagctgtttggagagctgcctggaggaagagaaaccagcctgagtttcacaggctagtggaatttggaggggggcaataatagcaataacaataggccaggcacggtggctcacacctgtaatcccagcactttgggaggccgagaagggtggatcacctgaggtctggagttcgagaccagcctggccagcatggcaaaaccctgtctttactaaaaatacaaaaaaaattaaccaggcttggtggtgtgtgcctgtaattccagctactcgggaggttgaggcaggagaataacttgaacccgggaggtgtgggttgcagtgaaccgagatcatgccactgcactccagcctgggcgacagagtgagactttgtgtcaaaaacaataataataataataataatgcactaggtgcagatactgataaaggctttgtgaggaattttctttctttcttttttcttttttttttgagacagagtctcactctctttcctggctggagtgcagtggcacgatctcggctcactgcaacctccgcctcccgggttcaagcgattctcctgcctcaggctcccaagtggctgggataacaggtgcccaccactacgcccagctaattttttttttttttttagatagggtctggctctggctctgtcatacaggctggagcacagtggcatgatgacaacccactgcagccttgacctcctgggcttaagtgatcctcttgcctcagcctcctgagtagctggggctacaggcttatttttttgtagagatggggtctcactctgttgcccaggctggtctcaaacttctgggctcaagcaatcctcctgccttggcttcccaaagtgctgggtttacaggagtgagccaccatgtctggccatttgaggaaatttttatttttgtctgtcttgtttcctgctctgtccccagcacctagagtgtgtgactgcagtgtgtgtgtgtgtgtgtgtgtgtgtgtgtgtgtgtgtgtaggtgtgctgattaaatatttgaatggctgattgaatgaacgaatgaatgtcatcctacaaccacttgtgagtcctggtcttaggggaaggctgggctggggccctggcctctgggatccctcttgtgccagtcccccagccctgctgttcccacagctctgtgctgaagagggcgtggagggggccagggaagggagtgtcaggcagccagccggctgcctgccctggacagcagcccagagtgtctgcaggagggagagggtagttcaggagcctgagtcaccctgggagaaaccccagccacatacctggccgctgacatcacccggccagggcacccccggcagcctagacaagctgactgaatcacaggcggaattcagccaccccgggcacgtggcctgctgtgaccccccgcaacacccccgagtggccgtctggctgcgggggttgggccgggcacacaggggtcagtgagggggcatggggcctgagtcagggacagggtggctacagccagagaccacccagccacaggcgtccatgtggggcaggaaggagaaagtttgggaaggagagcctgtggggaggccctggcgggtgaggaggaagcacgtgtgggtgtgacggggaggctgcggcttgtgggcagcggctgggcgacccacaggggtgggatggggtctgagtgtttgcgcagagaatcaccaaatcgtaagagacttggtcgtaagagtcagtcaggaggacaatggaatcaccaatgtgcttacacacgcaaaggcacacacgcacactcaacacccggcctggggaggccctgactccacccaccccaggccagcggggcctcactacccataagcctgcaagttccctaagggactgaggcctaagggacagtttcctcatctgttgagtgggggtattaacaagcattattaggccaggcacagtgactcgtgaggcagaggtaggcggatcccttggaggccagaagttcaagaccagcctggacatcatagcaagaccccttctctacaaagaaaaaatttaaaaattagctggatgtggtggtgtgcacctgtagtcccaggtactcaggaggctgtggagggtggattgctggagtgttggagtttgagactgcagtgagctattgattgcaccactgtactccagcctagacaacagaacaagatcctatagcaaaaaaaaaaaaaaaaaaaaatcactattattgtaatagctatgcttacggggaacatactttctgccaggtgctgttctaggcattctacattttttttttttaaataatggagatgacgtctcactatgtttcccaggctggtcttgaactcctgagctcaggctatcctctcgcttttttggtggctggcacgcctgtaatcccgacattttgggaggccaaggtgggtggatcgccggagcccaagagttcgagaccagcctgggaaacatagtgagatgccatctctaccaaaaaatcaaaaaattagctaa

SEQ ID NO: 67741 - DNA, 546 bp, Homo sapiens
tcttctcgaatgggggcgctgcaccatcggtagaacagggtaggtgggggcgccagaggtgaaggggacctgcaggctggggtcttccccgcccgggtcagcggggtccctgcggggctagtctaagcgcctattattaccagcccccggggcggcgttgcactgcgcaggcgcgggcggggcgcgggcgcgcgcgcgagcgagcgagggattccctctgacgtcattgctaggataccaaacaaacactccgccgcgccggccgagctccttatatggctaattgcgtcacaggaactccgggaaggcggggccgggatcccctcccgccgagtggcccggaacgcaacccccgagacccccagggccccgagggtcatgcaagtgaccagatcgagtctagaacagacctcttgctggacagtgcgggactcgatttggcggggccggagatttggggaagtttgtccagcaaggggcgggtgacgtaagcaggggggcgggtcccgggcatataaatacaggctggcgggtctgtgcttcatt

SEQ ID NO: 67742 - DNA, 1397 bp, Homo sapiens
cggcagggacacgcggaaccaagacttggaaacttgattgttgtggttcttcttgggggttatgaaatttcattaatctttttttttccggggagaaagtttttggaaagattcttccagatatttcttcattttcttttggaggaccgacttactttttttggtcttctttattactcccctccccccgtgggacccgccggacgcgtggaggagaccgtagctgaagctgattctgtacagcgggacagcgctttctgcccctgggggagcaacccctccctcgcccctgggtcctacggagcctgcactttcaagaggtacagcggcatcctgtgggggcctgggcaccgcaggaagactgcacagaaactttgccattgttggaacgggacgttgctccttccccgagcttccccggacagcgtactttgaggactcgctcagctcaccggggactcccacggctcaccccggacttgcaccttacttccccaacccggccatagccttggcttcccggcgacctcagcgtggtcacaggggcccccctgtgcccagggaaatgtttcaggctttccccggagactacgactccggctcccggtgcagctcctcaccctctgccgagtctcaatatctgtcttcggtggactccttcggcagtccacccaccgccgccgcctcccaggtaagtttttgatagtaggggtgctgctttgtaggttttattttttaagtcaagggtgaaaagaataaaccccaacccccacaaaaaggcgcatcagaaccctagatctgagatggaaaaggctcacagcgcactttgcaaactgcaaagagtcgggagatgtttgcaattggttgcgtgcgtggagcgcaaggagggaacgcggcagggagggtaggctttggggcgaggtgggggtggggtgggtaatgcgctgctcaatgcaacgtgtatgcggtagcggggctgagaactttgagccggccccgggactgccccctgctcgggtcccagacctgaagctagcgcagttaggcaggtgggggaaatcccggggaagcttccagcagtctcttttcctttcctcctccttcggagcgcccacttcggtgccgggtcgccctccacccatcgggaagaggggcctcgaaccctcagccgcgctgcctccgcctcctgcgcggagacgtaacgggggacccgtgcgtaacggctgacgcgctggaatcctccgtctgacgcggggcacgcacggcgcgcggcgcccccttcgtccgccccgcccctgacgtcccgggagcgttctattttggaacgccggggccacgttgctaagggagggggcagcccggcgtttcgattggccgccggggcgcacgccttggcc

SEQ ID NO: 67743 - DNA, 3431 bp, Homo sapiens
cttgagaaacttgcacagcaaactactaaagaccactcaggctaggaatgaggcgtcatcttggattttttacaaactacaactacaaaaaacaattattttacactgaagatgtgtttccttttgttttccatatgaccactattggggccaacccaagactgactgaagcaaatatatgaccattttttttttttacacatagagtggagccatccccattgcaaaatcctagccgtctcttatttgcataacagcaagtcctctgggaattgaggtgagggtccaggggtcgctcagacgctttggtaaatcaataagcaagggaatttgtcatggtggaatccatttattaattcactcaaaaaaatgtgctaagcacctacccaactgtgctgggagttggggacactatagggactgagcctcaggtcttgccctcctggggctcacagtccattgggggacacacaccgttgccagtcagggacaacctaaagtggattgggtttgggaagcccatggggctagggaagcacagcagggacacctagcttggactgggagtcgggaaaaacttcctggcggaggggacagctgagctgagtcctagaggaggatagagagtatagaaagaaatagaaaaaggccaaggccaagaaaatagcacagccatagatctgttggtggggagaaggcttgatacattgagaacgcttagagggtcgggtgcgatggctcatgcctgtaatcccagcactttgggaggccgaggtgggtggatcacctgaggtcaggcattcaagaccagtctggccaacgtggcgaaaccccgtctctactaaaaaatatatatatatatatacaaaaaattagctaggcatggtggtgggcacctgtgatcccagctactcgggaggctgaggcaggagaatcgcttgaacctggaaagtggacattgcagtgagctgagattgtgccactgcactccagcctgggcaacacagcgagactctgtctcaaaaaaaaaaaaaaaagaaagaaaaaaaagagaaaactcagagattcgtggagactggaaccacgggtgtggagagaggggttagtagagaccagattctgcaggtactataatgacattcccaggctaaggagtttagatcttttcttcagggcactggggagctattgcaggttttgaacacgagaggggcaggggcaggtttgtgatttaggaaagacccctctggccccagactgagcgtgactggaagggagaggagtgagactgagcaggagaccagggaggaagtggggtggggaccctgcagggtggggtgaggaggagtccagaacagggccagggacatgggacagagaggaggggaaggattcaggagacactcgggaggcaggacagttgggcttggtgagcagccggcttgggaaggaaaatacagggcagtaataaatagcatgggtcaagtggtctgagtgaggctgggagtggtggcacgcacctatggtcccagctactcaggaggctgaggtgggaggattgcttgagcctggaagtttgaggctgcagtgagctatgatcgtaccgctgcactccactttcggtgacagagtaagaccctgtctcaaaaaaaaaaaaaaaaaggaaaaaaaaaaaaagacactgcctatgagttaaccctgctctacaaggagcagtttttaaagtaaaattaaaaaaaaaaaaaaaaaaaaaagaaagaaagaaagaaagaaagagagagaaaaaagaaaaaaggctgggttgccttggacaacagacttcatctccctgagcctccatttcctcatctgtagaatgggggctgttaagaggagttgcaaggcttgtgcatgccagcagtaagtgcagagtgacggtgcaattatcattacccccatcatctttattggggtcagcctgaaccctcgatatcccataatattcacccccatccttcaagggtctgccctaatgttcccatgacacccgaccagctcagctctccttatgagagggcctcacttttctattccctttgcagccgttatcccctttgtagttgttaattaagtgtgtaattacatgatggcttaatgtttgtctcccccactgggctgactgcaccaggagaccaaggccagggctgtcacccaccgctgcgtcctcagcaaatgcttgtttgatgagtgaatgacagatgaacaaatgggcaagtatttgactgattaatcacggcatgcgtgattaaataaatgagtgagcaaacgactgaatgagtaagcaattgaaggggagagatctaggataatttccaaactgccaatatcccagaactgggtagatgactttttctccgtcttttggagtgggtttttatactccggagggggaaataagtaacgacaatcagagatcggagtgacagagaatgagtttgcgatgcggaaggccgcagcgacctctccaggtgcaggctggaggagcgcctcccgggcaacaagcaaaagaagtccggttcgataagtaagatttaaggcgcttagttactaccgcccgaaaggtggaattgaaccactctgtcgctagacagctacaggtttgaagcctgcaccccagaccactgaggatcatccgggcaggacaaccttattcccgcgcagctatataaggatcgcaaaagcttaccttttagagttatggtcgcgtcctttggaaaggtgtgagatggttgacttcaagggctataagttctccccactcatttatcgtgagagatgtccttgtaaaacgttgccttcacttcatatagtatgaatcatcctcgctccccaaaccgtctcatttacatagcgccacgcattctgggaagcagcgtttgagcacctggcaagctgttaaagggcccaggaccccctttttccaaaatgaaaagtcagctttttaagaggagagattcatgattcggcattcagaagcgccttctcggaaaattccgaattctctttctgcggaggagtggtgagtgggttcctgttagagtctgattcaccctggccccaaaggctctgagcaggcggctatagggctggtgcgacacctgctgttcttttatggaattgcgtaggccgatggagctccgcgttcattcaaacgtttattgagcgtctactgagtcccaggaactgtctcggtgctggtgacgacagacatcctgtcccgattgagtttaaacactagacataaccaatttctgcacttgcgttttatggttggagaaactgagacagactcagaaacggatagtaccatattccggttaaaacagcccatccacttagggaaatcgaacttgtgttacaatttttattacaaaaaaggtgattcttttttc

SEQ ID NO: 67744 - DNA, 4341 bp, Homo sapiens
agactgaggcaggcagatcacctgaggtcataagtttgagaccagcctggccaacatggtgaaatcccatctctactaaaaatacaaaaattagttgggcttggtggcccgtgcctgtaatcccagctactttaggagggtgaggcaggagaattgcttgaacccaggagggggaggttgcagtaagcggggatcgagccagcgccctccagcctgggtgacagcgagagactacatctcaaaaaaaaaaaaagaaaaaaagaaatttagtctacccattctcccagacaactcagcctgaggaaacacactgagaaacaatgataacctccgaggaacagggttcaaggtctcccagagtggggtggagaaggggaggggaattaatgtcaaagcttggcctggaaggatgacgtgctccccaggtaaaggaggtcaggacaacatcaacatccggacatgggactcggcttggacatacgctggaaaagtggattctctcacatagtcagctggccctgagaattgttggttttacactcagaccttggtggctttccgggttctgggggctcaggcaagagggccataggccagattcattccctgtctccaggcctcagtttacccgtgtgtaaatgtggaactaactgatttcccagggctcgggcgcctcacccgggccaggtggcgctctacccaaggggcgcgaccaaatcagtgacgtcactcggggcggggccggcaagacacgctgcggaagcctcagagggtgtctgggctcagcccggagccggcgtgtgggggcgggggctcccgggagggtctcctcacctccgggccctcctgagggctgggatgatcctgctgtcctccgcaggcgaaactgagtcagagcggggcgtgcgtgggccggaggctttacacaccaaagaagccggcgcctcctgcccaccccgggcgaatgccgggccccccactcccgcactcctcgccagtccccacctccaccccaccccacccccgaccctgcggctgtgagtcagcgaccgaccgcgcccccttggcccacttcctcctcaccttcccggggcgggcggggtggggtgagaggggttgggccctactcccccgacttccactcccgtgcgggtgggggtctcgcccccttagtaacctctccgaaattgacagaagagaaacgctggggaggggcggtgttccgaagatgggatttcagggagaaaatctgagaccacttgcttaacttgagggtcctcctcgacccccaaaattgagcggagtacgagatggagaagtcgatggggaaagaaatcgcgccccttccgagaccctcctcagaattcccacagtgggagcgaactaggaagcaagggaggtccccttccccttcaccaacttgcccctcaggtgggggtgattcccagggtgcacccctgggctacaacattggggagaggagcgagatcgcggaagccgagggtgcagagttgcccttttaagcgccctccaccccctcgcctggaggcgcacgcggcccctttaaggcgcggggcattgtgggtgcggggagtggaattttggaacgaaatgtaacgaagagaagtacagtagtaagagtaacactgtagccgccaccggcaaggggtgcgcgctggggagcggacgctgcatcccctttctgctgcaggaacctctcatcagaccgcctgagggaagcggcgcccggagacccgccccggcccggtccacattctccccaggaagccggactctatggggcgggaccctgggggagcctgagccgagcccggagccagccccgaacccctgaacctccagccaggggcgccccgggagcagccagcccgtgggcgagccgcccgcccgccgagcagccatgaggtgagccggacctgccccccgacccgtccccgcccgggcgggctccgcgccccgcctttgtccccctcccccccagctagctccgggctggaatttggggacagatccttgggagcctcggatttgagctgaatccccttggacgcgccccagaaccgtcgatcacttctccacgactgactccccaagctcggggggtggtggcggtgaggttctcctgggagccctcaagatttgggggcgctcggaggactcccgaattgttaagactttttttagaggacctcaaagttggcagcgactccccgcagggatgccaggattgaggcagggctcagactctcctccccctccccccagacttcagctcgaggtccgggaaggattgtgggggaccgatttgggataccctgggacttggaagagagactgagactcagaccctgggtgtgcaggtcccccgtttacttggtgctggaaaaagtctccccaagtgggaccgcgctccataacttcgggggtacttcttaatcccctggattttgggggtcacttaggtcttcctgtggaggaggctggtgtgaaccgatccagggacctggacgcagcctccagagtctggtgggaccccccccttccccgtcgctccgcacacaatctgcttaactggccgtgcctaggaccgagcgggcgctcggagcagagggcggctccccgcctccggccataagggcggcccggctcccccacctgcgcggccctggagagggagggggcgcggcagctgggggaagggggcctttgtcttcctgactcacctgtcgagacagctggtgtggggggcgggcaccaagcgctgtaggccggctgccttccccaccacggcccctccccctttgctcaccgtccccctatccacccggagccttggggttggaggagggggagctggaaagcttcaaggtcatagccctcttccctagggacccaggcttcccagataattccagctatcttcccaggaatttaatcctgggggtggcggcccaagggacccagggatttggtctggccggggcctcccccgaactcctgggctcacctgagggcggggccagtgtgggcaggggggcccaaccatcccccctattcttccctcccctggccccccataatctctcccatggggccagagcctgacaatactatctcccttcctctactctctctgggacttcctgccccaaagcccccagcctgagcagggaggcccctggggacggttggggattaaccccgtggtgcccacatcccccgcatttcctgaacccctgccctttgacatcggagtggcgtggcattcctttttatgaccactagagaatccccctcccgcgtttgttccttctgatgtgaaaggcatggctggaaaatttggagcaaggaggacacccacagataccctcaagacttcctgcctatccgctccccattatagcaacatcccttccaagtccgccctggagaggggtcagtttagggagcgtcgctctcttccttcgccctcttcctccgggactcttctctccccttgccccccagccccgcccctccaccccccctcgcgtttccggtcccaggctcggtggaaggcggatggcggatgtccgagttagtgctgcctcactcactgcaaccgtaaaagggcaggagcggtgtctgggccggccccctgtcctccccaccaccaccaccaccaccagcaccagccctggaagccctggccctcccacaaggcccacctcttgctgtggtggtggccaagcatcccgtcttgtgggggtgctggggtggggtgcggtgcagaaatgaccagatgcctgtcccaccaaaaggccactcccacctttccagggggtctcccctgcaggtggtcacacccgacttcctgggctgtgcctcttctccaaggacagccagaattcaaaacccatgcccctattacccagctggggaaactgaggctcaaagagaaaaagacatggccaagatccctcagaaattcctaggcaacgttggaggggtggaggagcctaggatcctctgatttctggctggtttggctggggacagtcctgggggcagttggaagagaggatgttaagatggaaaattacaagatatagttctttttctcccagtttgacaaatatttgttgagtgttggctgtgtccgggactggagctggggtgctgggaagacagagaagcgaggcagaggtctagaatctcagggcagaagggacttggggagaactggggtccatttctttcttcttccaataatagctatttttatttttaaaaaataagagaccatttgatcaagcatctattttatgtggggcatttttg

SEQ ID NO: 67745 - DNA, 928 bp, Homo sapiens
agagaacttggcattgattccgtaggagcctggagccttcaagaagaagaagagacatcccaccttgtaggtttttgttagtttgttttgttttttagagatggggggtctcactgtgttgcccaggctggtcttgaacttctggactaaagcaatcctcccgcctcggcctctcaaagtgctgggattacaggcatgagccaccgttccccgccccacctcgtgttttaacaggatccttctgttacaatgggtatagtgttccctggagaggggcaagaccaccccttggtcacccagcaggcgccctgttctccggccagtccagagcctcagtagggcagggctgcctgggagagcaaagtgcagccagggcggggcagcagcagccccgggctcctggccagagtcggccctgggtgtgggtggcaggtgtgggtgaggccgaggccttaaccctgccttgccaggggcagcaggagccagaaacagcccccgaggctgtgtttgtctggaaagggcacctggtgtttgggtggggcccacacagttcccggtggttaaggcttggaagcctgaattcacatcttcactctattcctcagtagctgtgtgactgtgggcaagtcactcaacctctctgggcctctagtcctcacctgcaaaattagaatgagtggctctctggataagctgcagtgagaataaaatgagtgactttgggggaggggcttaaggcccctgatccacctgaaatgcctagtaagagggagatggcacaattaggtaaatttgagggtccctaccccaggtccctacccacagctgagtctgcctagggactttccctgccctgacttcccagcatcagtgtcacacccagcccccagccctcctagagacagaggctttgcggggggtgtctaat

SEQ ID NO: 67746 - DNA, 431 bp, Homo sapiens
tggtgcgcgcctgtaatcccagctattcgggatgctgagggacgagaagtgtttgaacccaggagatagaggttgcagtgagccgagatcaggccactgcacttcagcctggcgacagagcaagattccgtctcagaaagaaaacaaacacaaaaaaaatgcacgattactcagggatcagtactccatgaactttacacaggcacactcccgggaaaccacctcccagatcaagacataggtaggtcctgccccagaaacaggatctcgctctgttgcccaggctggtgtgcactggcacaatcatggctctctgcagccttcacctcctgggctcaagtgatcctcttgcctcagcctcctaagtagctgggaatacaggtgtgcaccaccatacttggctctttttttgttttgttttttgagacaga

SEQ ID NO: 67747 - DNA, 577 bp, Homo sapiens
caggttcaagcgattctcctgcctcagcctcccgagtagctgggactacaggcacgcgccaccatgcccggctaatttttgtatttttagtagagacggggtttcactatgttggtcaggctggtcttgaactcctgacctcgtgatcccccagcctcggccttccaaaatgctgggattacaggtgtgagtcactgcatccagcctgaactcctttttcttaagttggtaaataaacctttacttccagctattcaatgagttactcattacagagttcccttgcctaatgtgtaaataaagtttttctttccacgtgttgatctgtctattgttaattaatttgcaggttcccaacaacagggatctagattggtagaggaaaagattttcctgtcaatgcaatccatgaacatggtattctcttcatttaggtctttaagaaatttatctcaataatgttttgtagtttacagaatagatatcttgcatgtaaattcagtttattcctatgtattagatattttgatactattttgatggcaacatttcaaatttcattttctatttgtttgtt

SEQ ID NO: 67748 - DNA, 1827 bp, Homo sapiens
agtgcttcctcccacagacctggcttgatctttccattacagcaacccgagactgcagtaacacacaatgctccagttaccagaggggcatgactggttccatctgcccagcatcctgggggatcctatctccccaacttttggttcaagggattcaggaggaggtaaccccactcctgagcctggccaattagggcactgctttccctgggccacagagacggtgctgggatggggatgtgacgcagggtggaccactggattcagcctgggaatttggcaggaaatccgggatgaggcacccctctgtgccctggggtcactaggcaggtaactaataccctcaaatgtgccccatgagagcaaggatctttgttctgttgactactgagtcatgcctcttagaacagttcctggcacacagcaggcactaaataaagatttgttgagtgaatgaattactcagcctcctaatggactgaagcatagccacaccccagaaaatgatccccacctctactctcctcccaggcctggagagaccaactcaacttggtatagaggatactcaggggtttctaaggctcagaggacgcaattaacagagaggctagggccgagcgctgtggctcacgcctgtaatcccagcactttggaaggccaaggcagacagattacttgaggtcaggagttcaagacctccctggccaacatagtgaaacaccgtctctactaaaaatacaaaaattagctgggcgtggtggcgggcacctgtagtcacagctattcaggaggctgaagcagaagaatcacttgaacccaggaggcagaggttgtagtgagccgagatcgcgccactgcactccagcctgggcgacagagcaagactctgtctcaaaataaacaaaaaagatttcagaacaacttcagtgcgtctgattaccagtgctactttatattattctctactgtcttagtaattccatcctccccacctccattagagtttagaagccgatactcaccactgcaacctcccatacaccaaggggtgggaggtgacccggttgtggtaagctggcagtgaggggagtttcctgggggcttctggaaaaggattttcctccttgaagcgttaccctcacttacctgaccacccgcccctccatacacacacgcatagacttcctcccttatgaaacataaaggcacaatgcctggagccgcagcagccctactgaggccatgaggactgcctgagcaccaacacagcagagatggagtcctcaggttcccaatgacaccactgagccaccaaaccaaccaagaacaggccttcctcagggcttactgaaaagccagcaaaaaacacccttttgatttaaggtttgattgacatttactggctgggttttcaattaattacagatgagcacaaactaatacagagatacaccggggtcaatgaccgagatggcctctggtgctttctcaggcaggcgccatccccaggctgacacgggcgccctctcctgtccacttggcatattgcttgcagccagcgcaagtagattccctgggatgcactcaggttgcaaatcagccagccctctacacaggggcttctgaaaaagatccctgttcagaaatcggccagaagatttagccatgagtacatgagcaaattccagcaaatgcctctgcataatgaagggtgggactaaaaaaggagcagcgagattaaacgcagccaatgacacacttcttccatctgagactatgtgccttagttaggtctttgccagctgtgacagccacatacaaaga

SEQ ID NO: 67749 - DNA, 2246 bp, Homo sapiens
aatacaaaaattagggcatgcgcctgtaatcccagctattcaggaggccaaggcaggagaatcgcttgaaaccgggatgcagaggttgcagggagctgagatcatgccactgtaatccagcctgggcgaccatgtgagaccccctctcaaaaaacaaaacaaaacaaaacaaaaaactgggcgcagtggctcacgcctgtaatcccagcactttgggaggccaaggcaggtggatcacctgaggtcaggagttcaagaccagcctagccaacatggtgaaaccctatctctactaaaaatacaaaaaattagccaggtgtggtggtgggtgccaggtgtggtggtgggtgctactcaggggactgaggcaggagaatcgcttgaacccaggaggcagagattgcagtgagttgagatcgtgccactgcactgcaatctgggcaacaagaatgaaactccatccccccccccccaaaaaaaaaagtccaaaatggctttcactaggctaatctcaaggtgtccgcagggctgtgttcctttctgaagtctccagtggagaatccatctcctcggcttttccagcttccagaggctgcccgcattccttggctcatgcctcccttcctccatcttcaaggccagcggggcagcatccctcaaatcattccctctcttgcctccctctttcccttataaggacccctgtgatcacactgacctgacctgcataattcaggatcatctccccatccccaaatccttcatttgatcacatttgcaaagtcacctttgctgtgcatggtaacatattcaacaggttcttgggataaggatgtggacatctttgggggaccagtcactctactgcctactgtgtgtgataaaccagaaaaaggaccagtgcgcgccaaaggaataaacacagatgagctggaattttcctactgcccagagatatctcacagcctccctgggagcaccaaaagtgcactttgcaggcatggcctcaacctgcctaacatcaccaacctcctttacttttgggttaaaataatttaaacaaaggaattctgtgtttaaaaagatctttgcctccccaacagggtgcatcatcgatgatttatgcttctagcatgtactgttctttcctcaggcagccacagctactgctccagcctctcctgtgagacagctgggcgcagcctgctgagtcaaaagtatctcagccaaaggtacagatactggatttgctggtcagctcaggacgcctgacctgagagaaagcagggccgccagtgcaccctgggaaattccaatcaccatggctgggggccacagcaaagggcaatcagcagtgtgaagacactaatgatgtaattaaaaggtgtaaatgtaagaagccagtacattgcaatatctggtagcatctccaactcgacctgtccctaactgagctccaggtctttctgtccaacctgcccctcctccagtcggctgtctcacacccaatccatgggaaatcctgctggctctaccttgtaaacaaatctactggttattcattactaagaggaaaaggaaaggttcttgacatggttacaccttaaccaagcgatccaaatcaccatcacaaatgacagaacaaatagacctcaggagtcccctgaagggatgtccttaggaggcacctcgagtctgtggtgttcccgccaaacatgttcaacatgaatccaatcggggaagcaatcaggagactccagacatcgggacacactatcaatcagaggactggctccaatgtcaatgtcaaaaaacaagggcagggatactattctagagcagggtcagaaaactcttcctgtaaaggggcagagagtaaatattttagattttgaggccaggcgtggtggctcacgcctgtaatcctgaaactgcctttgcaaaattatgactgacacagcaaaagagatctaacttgactgactccatcttacttccaacctccaagctgtccttgttcattcctgagtgaaggctgaactaactttgggagaaacttagtttatagtttaaacaaacatggtaacagccctttcccaaagcagacctccttcttgcctggtgactagattgcctttgtaggactaacattagccacaagattagaaattatggtttaggagtcatgcagctggaggatacaagattctgaccctccctaaactgctcctaagatcagtgcttga

SEQ ID NO: 67750 - DNA, 2479 bp, Homo sapiens
atctgcccacctcggcctcccaaagtgctgggattacaggcgtgagccaccgcgcccggcaagatcacctttttaaagtagtttatattttgggtgtttactaagccctttatttctatttattattttttgagacagtcttgctgtgtcgcccaggctggagtgcaatggcacaatctaggctcactgcagcctccacctaccaggttcaagcgattcccctgcctcagcctcccaagtagctgggattacaggtgtgcgccaccacacccagctaatttttgtatttttagtacagaccgggtttcactatgttggccaggctggtctcgaactcctggcctcatgtgatccgcccgcctcggcctcccaaagtgctggtattacaggtgtgagccaccgcgccggaccttactatgccctttagatctgagctcgggcggccccctctaggcagccctgctggcctcaggtccctgggtcagccagttcctctgagctccggggctcccactttcccgaccactctgggttgacagtgatggatcaggagtatatctcccagtgctgagcaaaaaggccgcatagtctgtcaaccgaatgaaaggacggcgtatgagcgcattaatgagtacacagatgaatgtcctctctggctcaaagtccttttccggattcccaggccatgtctccagaacccagacttcacccccgaaccatgcccctaatccagacttattgactacagtaaaactgaggcacgtcgacgtcctaaacggaggatatacaagcacctcctagatcagtggggaaactgaggcacacggtgccgcttttgaaatgaagttgcccaaggacagccgggcaaaggaccccgtccggtttctcctcagcccctcccctagctcctctatcctggaaagccccgtccaaatttctcccatctctcacactattggtttaacagggcatcagtctccaagcgctctcttcctttatcggctggcatttcctactcgcgtggtggctccttgacccgccccttacgccccgccccgccctcactactgggccacccgtacgcccctctatcagaaaccccccactattggccactggactttgccggttcgggctgtgattggtcgtagacagaagtccatcccctaagcaaccacctgacaggggttggagaaaggaaaaaggttggagggaattcgggtcagactcacgttgagccggcgggaggcagatataggtcttgaagaactcgcttcggcgggcggcctccttaatacggttggcaagcggcttgctgacctgccggatgcccaagtatagcagcttcgccatagggaacgcgcccaccaccatcttggcggtctcacagggcacgcgcaaccttgctgactgggcggggcgcctcaacctcttcactcctcccccgccctctcgtggccatgcgtgcgtcagtacgtatgtacgtacgctcgagggaaacttcagaggcgcatcctgacgtcaccccgtcgacgctggcgtagcgacgtccgttcgctgaatatgcaaatatacacggaagtgaggcgggtcagggggcggtgccgttaaacggatgctggaaggcgtgtggattcccacgcccgccttggccaacgtcactgtactccttcgtgatgtcacgttccgagttggcgtccccacccaaaggaggctcttaattagtcctaattagtcctatgagccccaaatacaccttcctctgcaagctagggctctcattgggattaagaggaagccgcgcggtcatacagactttggctgggatcccagctctgccatttcctcgctgtgtaatattagatgagtggcataacctctctggacttcagtattaccgtctaccaaatgggaatcctaatagcagttgcctctttgggttgttgtgaggcttctatgctaatcttgagtgtaaaacagtggaccatgggaagtggttagaatggtgccattcatatagttaagcgctcagtaaatagcccttcttactatacaggtcatgattgcattattaatgctaaatccagcctgagggtgcatttcacccccagaagcagcgaatccaaccctttcccaagtaactgacaaggaaactgaggcccagagcagggcagggggtggcacaaggttcctgcagaggttgatagcctggcatcttggccaataaaaccatacccgttctcaagcaacccaacttccttcattaggaggtaggttccccagggagctagttcagaaataaatttaaggacatgtcccagactgtcctttcttacccagcagggagtaaaatcatataaacaatgtcaggaaggggttgagagaaattcctggatgatggagtgctgatgggtaattgagagattctcggaggcagagggacagaagaaaacaggaacagaggactggccgccatggc

SEQ ID NO: 67751 - DNA, 555 bp, Homo sapiens
cacagccactgtgagtgcgggatgcagggaggggcccaggaagcaaataccctgacctctctccaccgaccctgccgatagaatttgcacacggcggtctcccagggccccgagctggggaaggaaggctgagagtgaccctgggggcgcggaggagggtcacgtggagaatcaccagcacttttccagcagaactttcttggcacatttttccatgcaggtccaagactggccacgaggggtcgaaagagcacccggatgcccgatgaaagggccgcttccgcagcgctgggccactttcccagaacctgggcaatggggaagggacaaaaggtggggagtgaggggaggaggagaggaggctttgacccaagagcggcagaaaactgtcttctagacctaagggtgataggataggcctagtgcaaactccatccacagggtcggtggagagagtcagggtacactcacttcctgggcccctttctgcttcccttagtcccacagtggctgtggccccctcctctgaaccacagctcctctgggaactctgcc

SEQ ID NO: 67752 - DNA, 1237 bp, Homo sapiens
gcttgagccggcaagaaggcagctccgagcgtgtgtccaggctgtaggtgggtgccagctcgtctgggatcatcatgggcacagggcggcccctcaggaacattttcacggagccatcctctgccaggacacccccagaggtcaggcactgacaccagccccatccctattccctctcctcttccagctttatttatttatttttttaaaggcagggaaactgaggccagagaggcaaagacccagtagccaagactcctgacctctggctccagcctgtcaccccaacaagcaagcttccaccgagcccttccccatctccccactcacccacactgaagataacttctttggttttgctgtcaggaaaggacaaagaaaaaaaaagggtcttagtattcagttcagaaaaggggagaaaccattcctccacccccaccgctccccggaggtctccgatgaaaacggggccgagtaaggggcagagcgctgcctctctgcaggccgtgtgctttgctcggttgatcttgcagagcctaagacacaggcccagagaggcagtgatcgccaaagatcacacagcacgaagtggcagggacgcgatcctggaagaagggagtcaccaaggacccttccctcctaatcagcaaggtgctccccagcgccccccacccgcagttcccccagcacaccaaacgtcaagcagagggagaaacggggagagtttaagggaaggggcgtgtccccacgccggtctgggtcccaggggttgggtgaaacctgagatctaagccccgggagcgcggagaggagatggggggtggtctgcgaaagggtctcacccagctccaaagctactcatggcggcgggtggcggagcttcggggccgggggtggagccgggaccggctctgccgcttccggccctgggaggcgcccgggccgccgcgcccctgccccgccctccacagccacccctggagccggagggtcccaccgggtcacacatcccgggctgtggactcccgatcccaggttctttcggggtgggtgggggagagtggttgagaacatggactcgggagcgcgcctgcttgagttaaaaccccagttctgctaattcctagcagtgtacacaggtcgtccaacctctgcctcggtttcctcatttaaaaaatggggataataagagtacccggccgggcgcggtggctcatgcctgtaatcccagcacttt

SEQ ID NO: 67753 - DNA, 2286 bp, Homo sapiens
tttccttgtagaaactctgtggctgctgccttgacttcatccctgaaactcaacggggcctctcctgtaccttaataaccacgcccataagccaagctcctccctgacttcctcacccagtagacctgaccgtccagcttctaaaaactctggccacgcccctcaatattgactccgccctcccagaccttccactgttaccgtgccacctcaagattggtccctccaaggctctggcaccgtccccgcttttgaactagctggccccactctaggttacgacctcgtggcctggggcatgactacatttctcgaccatttcctccctatctctttctgcggcttgacgccgccccagtccttacccttcctttttggcgctacagttgctgctggaggatgtggtccggctgcgggggtcctcacggcgcaccgaggcgaggcgctctggtgacaagtagcggcggacactgctaaaagagagcacacaggtgggggcagagccttctaggccagcaggcgagtgccgtgagcaagcgagattctccctgcaccctctgctgctggagctcaggcaaacaaaccacctctgtctcccacgaggtcttggaagaggctgggggtcccggccttgtgccttacctgcgcccggaggtcgcctccttcttgggagaggatggggacgtggcatagccacccacgcgccgcgggggtcccgagccattaaggggcgtcctggtgggaaggcctttcaagagctgacacactggagggatggggttaggggacagaagagggtgagtataaggaccaggccccggtcctccccatcccacccctccagtctaacggggatacccgaggcagtggtgcctaagcgcggaggcgcccggcccttgggggtgccccgcgcgcgtagcgccgctccctgttcttcgcatgcccgcaggcgacgcagagcatccgccagcgccgcctttaggaccgccagctcgtcttcctgtaactgcagccgctgctccagcgccgacacgcggtcgtccacttccataccgctcgtgcccgacaaattgtcatctggaagacgggggagtgccggctgcagggccacccaggagctccagtgcccaaggggtccctcccgccttcctgggtctaagcggggggccagccacgcccctttcctgtcccgctacctggggctgggacacttggacatgagccaaggaagaggactctgaagggggaaggaaatccccacagctctccaacccatccgcacactcctctctgccacagcgcgctggccgtgtgaccttggggaagtcccttccctcttattttctaagagtctgtgaacccaggagcctctcgctctggctttaagatgctatgactaagacgtgaccaggcgcagtggctcacgcctgtaaccccagcactttgggaggccgaggcgggcgtatcacgaggtcaggagatcgagaccatcctggccaacatggtgaaaccccgtctctactaaaataaaattaaattaaaaataaaataaaatttaaaaaaaagccgggcgtggtggcgcgtgcctgtagtcccagctactccggaggctgagacgggaatcgcttgaacccggggggtcggaggttgccgtgagccaagatcgcgccactgcactccagcctggccacaaagcgagactccgtctcaaaaaaaaaaaaaagaaaaaagaaaaagaaaaaaaagattctttgattttatgactaagacgttaagtatctatgagtgataagagcatttgcaaaatgacaccaacctactcctaatgacactaaagttctagaattgatccccaacatcctccgacgaagattctgttatgaataccaacgtctcttcactgtttctaagactttccaagccaaaaggtcatgcctagcctccccgtttcccctcctctcctcaccctggggttcgaccctagagccagctgcaaggacagagcttcggcggcccctggcggcggacttgggggttgcaggcagcgcatggcagacccagaagacccaagggagatgcagaccggattgacaaccaaactcttccccagcaggcattcctcttttctgttccccttctttatttcgcctctgtaccccgcgccccagatttggctctccagcctatgggtgcagccaaaatgactccccgagtcgcccccccaaccccgctcattttcccaaagtgggaggggcggagaccgaagtggcccctctcccccttttc

SEQ ID NO: 67754 - DNA, 2078 bp, Homo sapiens
gtcgctcaggctggaagtgcagtggcgcaatctcggctcactgcaacctccgcctcccgggttcaagcgatcctccggcctcagcctcccgaatagctgcaattacaggcgcccgccactacggccggctaatttttgtatttttgttagagacggggtttcaccacaatggccaggctggtctcaaactcctgacctcaggtgatccgcccgcctcggcctcccaaagtgctgggatttacaaacctgagccaccgcgctcggcctcccccagtattcgtaaaatcgctgccccttaacattcatttcaataggactaattatctaggaccactcccgttatcgtttaaaacatgtttttcataattaaatttttttttttttttgtagagacgggggtctcgctatgttgcctaggctagtctcgaactcctgtgttccagcgatgctccgccttggcctactaaagtgctgggatcacaggaatgagcccccgcgcccagcccagggcgttatctgataaagctgtcccctctcccgaagtcacgatgcgtcaaaggccccacgcccgttctcaaactcatcaggagaaaagcaggacgctgcatccctaaaacatctgcccctgccccccccgctctgctcaacccttcccacactcaatcggtcaaatatccaccctcaacctcattcccgccgcctaagcctagcccggcctcacatgatggtcactacgctctccgttcactcccgtttcctccgcgttgctgctgcctgaggagagagaggcgggacttcctcttcctgcgacccacttccgttggcgcctgcgcaaagccaaccagtaagtggaggcgtggcctgttgccacagcattccccaccaacggtgcacaatgatggaataaaagcttcgggtaggggttcgcggccagtcagaaccacacgggggcagatgtttatgacaatgaagacaaaaggaaaggcagtctgattcaaaccgtttcttgaagaatggtacaggttgaaggagggaaatgacaagctatttccaaatgcccgccggccgtgacttcgggggcgcggcctccgtgaagccaatccgctcctcgcttcggagacaggcaccgcccctcttccctctgggacgcgttactgacgtatctactgatctttccgaccctgcgccaccaatcccctgcctacatccggaaggggcatggacctgcgcccgggagatcgaatattttccatgatcaaacgctgttcattggctttccctcctccgctaaggcggagcctacttctcttgcgctcccatttgggtcgtgccattctcaggggaaccaaccccaatacctaagggaggctgggaggcgtgtcctcaggaccgtagttcttattggtttcgctgctcgctgtggggtgggctggtgcagccgcagctgttgcttattggcccaccgattccatggggaggaacttggctgggcctaaactcaatccgtggtctggtacaggtttcagggcaaagcggccatgcgttccgggggccgcgggcgaccccgcctgcggctgggggaacgtggcctcatggagccactcttgccgccgaagcgccgcctgctaccgcgggttcggctcttgcctctgttgctggcgctggccgtgggctcggcgttctacaccatttggagcggctggcaccgcaggactgaggagctgccgctgggccgggagctgcgggtgaggctgggcggggacccgggcaccgcggggaccctcattccctccccgctgttacccagggttgacgtggctttagcgtacggccctaaccgcagatgccaccgtcttcgtcatctgagcgcatgacccttaccaaaggaataaggcttcgggctggttctgcaacagtagcttccttttaagaggaaaggtctgaaatagtaagacgggggggttcagggttctacgcctttagtcaactatttggaagagtcccttcctccatctcccctctctctcactgggcctcgatttccccatcaagtttgaggtaggctggaccggatggtc

SEQ ID NO: 67755 - DNA, 2645 bp, Homo sapiens
agcctccaaaacctatagatggctgtttaccaaccaccaattcacatacatgttgagtatctcaaatctgaaaatccaaaatgctcccaaattcagaactttttgagtgccaagatgacactgataggatatgctcattagagcatttcagatttttcagacttggcatactcaactgataagtataatgcaaatactcaaaatccgaagaaatccaaaatccgaaacactttttagtcccaagattttcgggtaagggatacttgacctgtataaccaactgcccagggaggcaggctaacacagcaaaagccagtctctacagatgccatcctgctacaacctggccaccccctcaagtcccctaatcagttccaaccttacccccagcatctcaatgtcctcccccaaatatcgaaaagctttcaaatactactttaaaccaccgaacctaaaaatatcctctccagcactgaagggccgaatctcagtcaatctctcacagatcccaacacagcaattccccaaactatgtcataaacaatcactctcccggaatcctatactccccccaaccctcctccattatctcccaattccactagaagcctccaacagcagacgaactctttgaaaacacaaaagctccctaacactttaagatgaatcttaaaccataaaaatgtttcacaaagccaaaaaaaaaaaacaaagaaacctcacaaatgttacaatagcagacatgtgcttactgcacgctcgctgcgagcttactaggtaggtactgcgctaacaattcctaatcctcctcggtccctaggaagcaggtagtgttattaatgcctagttcccgatgagacacaggtgaaatctcctgtccgggttaagacaggtaggaagtcaagacgcgagcccagacattccacctccaggactggtactctcgggctctttgcttctgtctctccgggagctccccaaattctatgcccaacaaacactccaaaacacaaagggaacccgatcccgaaaacacaaccgaaccttccgcattacaaacgaacccaaactccaaggtgccccttaagcgcgagagaaccccaaaagtatcccctaaacccacgttaaaacttccccaagccccagaacattttgcaaatggaaaaggaacccccaaatcttgtaaccgcccccccaaagaaatcttccaaacccctcaggtgaccctcgaaacctacacacgcccccaaagagccctcacccgcagcccccccaggcggcgggagaaggctgcagcccacacgcatgcgcgcgaaaggtaaaagggcccgccccctcgctccttccctccggccaccgcgcgggcagactagcaactagcttccctccgcccttttgttgacagacgcgcgcgtgacgctctcagccaatgagcggccgccattcggggccgtgcccatataaggcaggccttggcgaaggggcccaacttcgaaatagggaggagtaggcgagaggtgatgggagtgggtggtggggtagacacagccggatgcaagggagcgtggaacaactcccaacgtccagctaaacggaacaaggtcagggcaaaggccacgacactccaggggaggcttattacaccacgtcccctcgaacagaagccctgattgacgcttgagacttaaagggccaggcagcccggggattaagaacaccaaggcggaaggaagcaggcggagagatcagagtatccagctttggttgggaactgtgggggcggggggcgggctgaggatttccgcggggggaattgggcatcgggataaccccaccctgaaaaacaaatggacagaaccctacgaaggttcccacggcaactgaaaacaagcctctaggcctggcgttcaaggctcaagccgtgtagccattcggagctgccagttcagcctttccaaacaggcgccccaaacctgcctcacttagtacaaaagagcagccagaaaagtcctgttaaagcacagtcctataaacctgaacccgtccctatcctggtgagaacctgccatggctccccagtgccctctggaaaacacccaggtaccccacctgtccagtcgcatccctccccactcctccgccccgcaggcaataccccagtgcaccctggtgggcacctgatctggcatacatagaatactcaggacccatctgatccccggtaggagtgatcgtctccacggtatggatgaagaaactgacgcagggcaggtctcctgaccacaaggtcacacagagctggagtgtgagctggagcagggatatgaagccagggaatctgatttcctagtcactgtgccctactgtttcactatatattccctggggtttcagctcgaccacccctcctctaagaagctgacacccccaatccccctaggccaggtcaggcttcacccagggcgtccatgcggtgggctcattgctgtctattcctcaaagttaccgggctcttgccttccctggtctctgcatttgctgttcccaccaactgcaatacattccccctctgcaaggctcaattccttacttcattcaggtctgtgttcaaatgcagttttattagagaggccttctccaactcc

SEQ ID NO: 67756 - DNA, 655 bp, Homo sapiens
gccttttgaggagctgaaaccacaggtgtataccagcacgcccagctaatttttacatttttttgtactgatgaggtctcactatgttgcctaggccagtcttgaactcttgaactcaagcaatcctccaccttggcctccccaagtgctgggactacaggcaggagcaaccacaccaagtcagaacttagaatcaaagatcagctgactccagagctcaaggtctaaactacaatataaacatcatcctggctgggcgcagtggctcacacctgtaatgtggtggcaggctcctgtaatcccagctactcaggagcttgagacaggagaatcggagaattgcttgaacccaggaggcgtggctgcaatgagccgagattgcaccactgcactccagcctgggtgacagagcaagactctcagccaaaaaaaaaaaaaaaaagaagtgaagcggggaaaaaaacaacagaataaaccaaacaaataaggaaaaataggccacgtgtggtggctcgcgcctgtaatcccagcactttgggaagccgaggcagacagatcgcttaagccaatgaatttgagaccagcctgggcaacatggcaaaaccccgtctctactaaaaatacaaaaattagccagcatgtgcctgcagtcaca

SEQ ID NO: 67757 - DNA, 1712 bp, Homo sapiens
tgtgtacaaacagctaaggacagggccaggcattttgtaaaacaataagcgttagctgtaatccacagtggggagcccctacatgcttctgagctggggtgtgtgcccagatcagtgccagcttttgagaaaacgcctctgggactggactggaaaggaggaaatccattagcacctgtaacccagtcacattccgggggcggagaacttcccaccaacagctctgagactgaaacttcacagcccagctctcccactaatagtaacgattttaatgactccctttaaccctgttctcagaggcatgcttgctgttcccatactacagataagggcactgaggctcacagatttgtccatggcacaaaggggtggaagaataggggatatgaatgctgtacttctcatagggataaaccattacactcttctaaattccaccggggaagtgagggtgcgaaagcctgtctcgatggccctttctggccgtattatcctacagttctgtgcctgtccagcttaccgggagtctctggcgggactagggaaattatcactacatccaggcccctaatttcacgctccttaccccaccctcagtcctggagcctaaacccacactctatcctaccactgatttctccctcctacctcctcaacttgccttcctgcccccaatccgatccagaggccccaacccattgcgtccaccgttcgcctgtcccttggagcttccagaccccctcactcatcctaaccctgatcctcataccctcgccgcaggttaagcccccatcgaaatcgaccccttcagggcctctacctggatgtccagcccagtctccaactcggggcccacttccccagctctgagcccctttacaatcaattccaaagctccactcccaccccacctccaagacccctccccaagccaccattcttctactactacctccggctcccattcctcccagtcctctcccccaggcaatctcccctcacccagccccttctttcgcccctgcctcttccccctcgtcacccggtcccgaacccccgtcccgactctccagcgcccccggcccgcgcctgggctctcaccatcgccgcgcgctgcatctccctcggctacgcgggtttcccccactcgctcctctccagcctccccttccgggttctcgtcccgaagcccgctgggaattgaagtccgggcagccacggactacatcccccagaaggcagcacggtcaagcttggaggtggggtaggaagcaaattaggcgggcggaggaaaagaacgactcgaactcccgggagacaaagccggggaggacttggcagcgcaagcgcagggtgcttccccgctgggcgcgctgggagatggagtctagccaggagggctccatttttgcccgaggcccttgggaagggaattgagaatattgcaatagggtgttggtgaggggtggagagttggggaagagcaaatttattgattcatttgtgccgatcaacacaatagctaacagctccttgtgcttttccaaactccttcccatccatccccttctttttttttttttttttgagacggagtcttgctctgtcacccaggctggagtgcagtggcgcaatttcggctcactgcaacctccgcctcctgggttcaagcgattctcctgcctgagcctcctgagtagctgggatta

SEQ ID NO: 67758 - DNA, 3990 bp, Homo sapiens
cgtgggattcccatcagactcgctggccggagaaatggctgtcagctggggtcccttagcctgtggggcctcccgcatagccagccagctgctcccccacctttccctggcccaagtttcggtggatcattccaggggttatgacgcctctctgagaccactccaaactccagggccttttgcaagccctgcgtggacaccactgcagagaagcgctggggagggaagaggcccttgctctcccccacctcggcctcgggtccccagaggctgagctcccaggttgccctaaaagttccttggttgggcggaaagcgggcgagtggcctggagagagggagcagcagccgccagcccagttcccggtgccctccccgcggggcgtcagagaagggagaggccggcgctcagggtgggaggagaagggtttgggttacagggaaaccggagctgggaaaggttcacgtttcacaacaaaggcagaagacggaccacgccgtccgggcccggagggagtgtgggggcgggtgggtaagagtaacggtcagtgaagaaagggggctgggaggcagcccctacgcggagtggagtggccacaggccctgtcctttttcctcagtccctctagtgccccccgcagtgtgattccccaacaccgatgggatttgggaaggagctcggaatggagccgctggaagaggagacgcgtgcggggagagggcccgggcgggtgcctgtcccgtccacacttagtccccgcgccccgcgggcgcctgagattgtgagctggtcccgggagatgtccgaggacctcggcgcgccggccccagcagtgggcacgggggaagagggctggtggacgggatgtccccgggagagctggacttgcgccgcccgaggcccctcacctcttgcagggcgcgccgcctccggccccggtccggtcgcgctgtcgccggttcttgaaccagttgctgacctgcgtgagcgacaggccggtgagtgtggccaggcggcgcttctcgtccggcgtggggtagcggttgccgcggtagcaggccttgagcgctgcgcgggagcgctccttgaagcagtagactgtctcctcgccgtcccagatggtcttgggcagcgggaacttcttgcgcagtcgatacttgtccactgcgccaagcgcgcggccgcgggcccgctcggcctcatggtagcgcgcgcgcaggtagaggtcctgcaggaaggcgtggtgggcggcggggaaggggcggctctcgagtagccggtagagctcggcgtactcgccccgctggaaggccaccagggcccgcgcgcgcaacaccgggtcgctgccacgtaggcgctcggccgggggcagtgcgcccaggaagcggctcaagcggccggcgtggcccgcctggagcagcgcctcgcagacgcacgccacctgctcgggcgagaagcggaggcccgtgggcggttcggaagcggcctcggggggcgacccggggacgcccggggatcccgggccctcagctcccgcagccgctgcgcccgccccggccccggccgccgccgccgcctcaccctcggccgcctgcaaagtctgcaagagctggcgcgcttcctcctcctcctcttcggtcgccgccgccgccgccaccgcctcccccccagccgccggccccgcgctcggctccgcaggcaaggtagccatgttttgcaactttgggaagttcctccctccctctcttcctccctcgggctttccccagcctcctcccccacctgtccccccttttcgcccccactccccgctcttctcgatcttctttctggccgaccctgcgccccacgccgggaaggcgagatccagctctccactcgggtctctgtccccttgtgtgtgtccgtccccctcccgtctgtctgtgattctccctttgttttccctccgcctctggccgcgctttctgcctccccccagcgtgtgcttctggctcagggcctcagtttccccatcgggacaacgcagaaggtaacgggccgtccaggaggactaagggcgcgaagcctccgccccgagactgagcttctgcacgcctccgtctccagggtcctctgcaggcccccacattccccatctcggcctgcgctccgcccctcggaattcccggctccgcagggggggcgggtctggccgggaggaggggcggggaacgggctagaaagtttgcagcaacttttctcgagcttgcgtcccaggagcggatgcgcgtggcgtgcgcaggcgcagtggaaggaggatggccgcgcgcgctgccagcccagccccctcttctcgacgctcggtggcacagctgggccacagctgggcgggggcggtgcctccgggtggcccgctcgccctcctattggccggacgccaaagccccgccccgtggcttttcctcccccaaccctgattcggccgcttcgcatcccgctagctcctcccagaccttcggccgcctccacacgcctccggattggcccgctgcggagcctccggcccacaacgcaaaccgcggacactgtggagtccagagctttgggcagatggagggccttttattcgcgagggtcgggggtgggggtcctaggtggggacagacaataaataccgaggaatgtcggggtctcagtgcatccaaaacgtggattggggttgttgggggtcctgtagcctgtcagcgagtcggaggacgaggtcaataaatatccaaaccgccgaagcgggcggagccggctggggctccgagagcagcgcaagtgaggaggggggcgcgggatccccgaaaaagcgggtttggcaaaagcaaatttcccgagtaagcaggcagagatcgcgccagacgctccccagagcagggcgtcatgcacaagaaagctttgcactttgcgaaccaacgataggtgggggtgcgtggaggatggaacacggacggcccggcttgctgccttcccaggcctgcagtttgcccatccacgtcagggcctcagcctggccgaaagaaagaaatggtctgtgatccccccagcagcagcagcagcagcagcagcagcagcagcagcagcagcagcagcagcagcagcagcattcccggctacaaggacccttcgagccccgttcgccggccgcggacccggcccctccctccccggccgctagggggcgggcccggatcacaggactggagctgggcggagacccacgctcggagcggttgtgaactggcaggcggtgggcgcggcttctgtgccgtgccccgggcactcagtcttccaacggggccccggagtcgaagacagttctagggttcagggagcgcgggcggctcctgggcggcgccagactgcggtgagttggccggcgtgggccaccaacccaatgcagcccagggcggcggcacgagacagaacaacggcgaacaggagcagggaaagcgcctccgataggccaggcctagggacctgcggggagagggcgaggtcaacacccggcatgggcctctgattggctcctgggactcgccccgcctacgcccataggtgggcccgcactcttccctgcgccccgcccccgccccaacagcctacagctgttgttagtccactcgcacgcctcgaatcccgtccgaactcgtcattggctgcttcctagcggcctgtgttgattggctgcccgaagatccgccctcctgccgtgggcccagccccgcaaatgcgcagctaagcgggtggcaaggggcgggtggagcgcggggcgcgacggcggaggggggcgtgggcagccggacgtaccctggcagggagcagcaggtggcggcggtgcatggggcctggccccaccagcgggcactggcccacagccacggccggggggccatctagctggagagagaagggacaggtgacccgatcggagcccagcccagccctcagcggtggggcgag

SEQ ID NO: 67759 - DNA, 961 bp, Homo sapiens
caaggcagctggcagaagcggaagcatcctccttccagccctggccccaggccctggaaagcccttgcaagaaggggttttgtgggacagctggaaggttggaggccctgggccaggagaactaaaggacgcagggacccggggtggcgggaatggtggctgacccacacggctcataggaaccgagactttggggctgggggtgggggtgggtgcagaacctacaaaagaaggagacacacccagaagaacccaaagttgtccctcctggatcgcagaggagggggcactggtggcgcctgtctgcaaagctggttctcccacagggcccgcgtgagtcaccgccctcccagtgcctgggcacctgttggggcagctggagaggctggcgccgaacacctgcctgtcggctgcgcccctggcagctgccccatgctggccctcctggcttgccccaggccacaggaaaccaggggagagggccatagagcccacttttggggggagggtcctaggagagggagctcccagcatgaccctgaccctgaccctgaggcggggtgcagagaggccatgggaggctgttggcagcctagcctgctgtgactcctaagccatggctctgagtcacagccaccctagcctctgctgaccttactctgcccctccagagtggtggcataggacagagaaatgttgccccagggcccaggtccacactctgagccccaggatgggaggatctccccatgcccatcctgccatcctgcccccccaacagccaggcctctgtgcccagacctgtctcctgccccacccccaccccatctgcaggagccccgagggtaggcactcaccccactgcaagaagtcggccacgtacttgtcctgggccagttcggaggcgcccagctcctggtggacgcccaggagaaggtcgagcaggggctccagccccagg

SEQ ID NO: 67760 - DNA, 1183 bp, Homo sapiens
catcacttctagacttctcctcattcctgggctcaatctcaagacccctctcccacacctccaggctgcaatactgggttctccatcacctctgggcttgcatcacctcatgattccccattacctgcagaatgcctgccaccccagaacccgggggatcccacctcatctcagataccccatcatgtccaatagtcaccatcccagaactcctacgcataacgggggtaaaggggatttcccccatcacctccaagatgcctgcccagcaccccgcgggcctctcatcacatttcagaatcctgtactccctccaatgctgtcgccctacaacgtccatcacatttagaatgcctatctcagggccccatatcaattcggggaccctcctatcagttctctggaacctccatcctttcagcacccagggccccacgatgcaggccgctcacccgttggctcccacgacgacagcagcctgggtagaaatagagctcacggcccaagttgaagcagacgcggtctccccccgagcccagccccgcgggcgtggcgggcggctccccggccccggcgctgtccggctccccgaggcgcacgaggctgaggcgcacggcgggcagggcgggcccgggtccggggcctgcgggcggcggggacgacgcggggcctgcagcgccgggaccggaggcggaggcagggccgggcgggggctgcggtggctgaggcggcaccggagtctgggcggaagccggacccgacctgcgagcggcgccgtcgcccgggagtagcttgtagaaaccctcgcgcgtgcggaattgcgacttaatctccgcgcagtcccccatggcggcgccggggcccgagccgccctccgcgccgcccgccgccatcttgggcgccccccgggccccgccactgccggactgccgcccgcagccgggccccctcccggaagccgctggcccgcgccggaaaaggtggggtcgtcgcccgggcaacgcctcttcgattggcacccagatccggaggcgggacgaatccccgcggtcgctcgggtaacggtgctgggactgtgggcggggcgagaaggtgggcgcggcctttgagcctgtgaccgacttgtggttggctgcgggggcggagcccgcaatggaaagaggcgtggccagttagaaagctc

SEQ ID NO: 67761 - DNA, 1547 bp, Homo sapiens
gtaatcccagctactcgagaggctggggtgggagaatcacttgaaccagggaggtggaggttgcagtgaactgggatcgtgccagcctgggcgacagagtgagaccctgtctcaaaaaaaaaaaaaaagaaaaagcatatacaataaacaccaacctccacttcacttgttttcccttaatatatgttggaggccactatatcagtgtatagagattttcatcatttccttttatctacctcattcctttttagagttgcatagtattttttatgtggatgtattatagtttctttcagccaatcttcttatttaagaacatttgggatgcgtgtagccttttgctatgatgaacagtatcactgtttccccttccctctcgatgtactcgttaagaagtggtaccctgccccactgctacctaggaatctgatgactaccctgtttccccaaactggctctaggagtatcttttattccttcaacgaacattagctgggcgtctccggcgtgattggcgctgtgctgagaacacagtggcgacagagacaaacctagtccctaccttcatggaacacacggtcatagacatcataaaacagcacacagataagagtcggataacaaattagaccacacgtgacatgaaggaacacggaccgacaaaagcatttaacaggcggatttctggatggagggcagggaaggagggcttcgcagaggaagtgacgttggtgccgagacccgaaggatgaaatgggagttagccaagccgaatgggtaaaaggatgttgcaggcagaagggacagcctgtgcaaaatccccgaagcgggaaagcgcatggcaagtttaaggaaccgaaaggccagggcggctgttagaggtgggggaaaaagcaaagaggccgagtcgaagcaagcgaggtctgcggggcggtggcgcccggggggccacgttggaactttgcctcgagggcactagggagccaaggaagggtcctgagcaagggaagaaacatgggtcgcgaaagccactgttcccctctccccacggcgatgccctccccgcccgagcccctgcttctttaggagcctcctcctttcgtctccgggcccaaacgccgcctcccgctcaccgcagctctggcctccgttcccctcgcgccccctcagcagtgcctcttcctacactccgccgccgccgccgccgccatcttccgttcgtcgccgggaacggtgcgcacgcgccacacacccagggccgccgggaaatggagtccagagcacagcccgaccccgcccatgcctcgtcccgtgcgagcggcattctgcccgcctccatactacggcgagcagacccttcatttccggctctgggtccggctaggccttctgggaaatgtagtcccttcggaggcaccgggcggaaagggagctagagcattctgggaaatggagttctcagtggtgctgagtccctggacggctggctggtcttggagagtgcggagttcgggcagcgaagctcctgggtcttggaggggagg

SEQ ID NO: 67762 - DNA, 1940 bp, Homo sapiens
ttttcttttcttttctttctttctttttttttggaaacggagtcccgctctctctcccaggctggactgcagtggcgcgatctcggctcactgcaacctccgcttcctaggttcaaacgattctcctgcctcagcctcccgaatagctgggataacaggcacgcaccatcacgcctagctagttgttgtatttttaatagagatggggtttcaccctgttggccaggctggtctcaaactcctgacctcaagtgattcgtccgcccgcctcggcctcctgcagtgctggaattacaggcgtgagccaccgcgcccggccaagttaagcatttctagccgtcggaagcctcagtcttcctgtctgtccaatggggatgtgatttcggggaccttttacgggtccttgtagtcgcatagtggccctagcgttctgattcccctttcttccgccacggtcatgcagggctctggctcttcgtcctctcctgccgagatgatgaagccccctgaggtagaaaggctccagagttctgacctcggggcccttggtatctgcagcgtcgctgcgggcagctccctcactcctgaatcacccccagctgtcgcgtcctggggctgcggcccccggcgcctgaggtctgtctcctggcgatcccgcagggggcgccccagtccgagcgcgccgccctcggggaggcgggaggggagcccggggcgggcgagggcgggggtgtcccggctataaagcgtggccgcctcccgcggcgctcgggacagccgtaccccgggcggtcggacgggcgggcgccggtgggagctcgggccgtgcccgctgagagatccagagcgctccgttcccccggggccggagcgggggcgggtgggggcgtaagcccgggggatgctgggctcagtgaagatggaggcccatgacctggccgagtggagctactacccggaggcgggcgaggtgtgtcctcggggatggcggagcgggaagttgggggcaggtatcggggtgtgggctcacatggagcagggactggttgtgggttcaaatggaggcaaaggcgtctacttgggcagctgaggaactgggaacacggagaccaggtgtggaagtcggggaccggggacgaggcatggatgggagcgctgtttgggcagcctcgccgcggccagggcttaaaaatggaagtcaggaaaatttagccaagggtcgggtcacaccttaaacttgggagccgggtgttggagccccaaaaagcaagggatttatatgtacaaaccaaagataggaatcagagttccagggtaggggacagactagggggtttcaggatgtgaggttcaaagttggagggaaagaaagactaaaagatggaggaggagtcaccattaaggggaagactgaggtgggagctcagggccagcacacagtgttaaagaaccggggttcggggctaaggatcagctggtaatctaaggtagggtcagacatagggattggtgctcaggggtcagagatgggggtgctcagagatgaagcttcgtttttggagtctgaaataacaggtggcttagagttgggcatctgggagcagaagatgtagccatcagcattggcaggagaggggccgatctccacccccccatccctacccatgaccctccgcagggactccccaagtcggaagatggagagttttagattgtgcaccttcccctgctccccgccagtccagcaacctccagctattgctaaaattcccatccagtctcacctcagacaaggcttccctggagtggggggtggcggcatattctaatcccctcacctggacagacagaaagtccttcctcaagtctgacccccattcgtcttgctgcaacgacccctacaccttagctacctcactctgtaatcaacgttgtgaggt

SEQ ID NO: 67763 - DNA, 1090 bp, Homo sapiens
gggtactgtgataaccaccatggatacattttggtggcccactgggtactgtgaggactgctacattgatggatgttattggctaatccactgcatggtttgatggccaccatctcggttggccctttgggtgtgatggtgatagcatttcagtgacatcttctttggccccccccattaggtgctgtgcccacttcttttttggtgtacttggcacagtaggtgccaagttggccaccattctgtgtaacaccttttttggcccattgggtgctttgatggacatcatactgggtaggtgacaacgtcagtgggccaccatgtgccatgatggctgctgcagccccgtgttggccatgtcgtcaccattctctctggcatgggttgggtaggggatggaggtgagaatactccttggttttctctgaagcccaccctttcccccaactctggtccaggagaaaccagaaaaggctggttagggtgtggggaatttctactgaagtctgattctttcccgggaagcggggtactggctgtgtttaatcattaaaggtaccgtgtccgcctcttactgaatgtctcttttccttggccagtgggccctgtggggcttgaacacctgaatttctgctcctctgtcccttctgcttcctgcccctaagagctggctgcctctgggggaggagttgggggaggcatcgacctgacctttggctctttgctgtccctgaccccaaggacagtttgctcacagatagcagcccccgcagcagtggggccagagcagcagggggaggtggctctgcagtgaccaaggccatctccccacccccacttctcagacatacacacagacctctacctctgaggctctgcaagcctaatggccgaataatctttggctaagctggggaggaggaaaaaggacagatgaggtgtcaattcaatgactggagatcgtgcacatgttggagtttatctgcgtgtgtgtgtgtgtgtgtgtgtgtgtgtgtgtgtcctctgtgtgtcataggatagcactatgcctattggggtcctcatggtctaccgcagggtgttgtctgtt

SEQ ID NO: 67764 - DNA, 3942 bp, Homo sapiens
tgcagtggcgcaatcacagctcactgcagcgtcgacctcctgggctcaagctatcctccctcctcagcctctcgagtagctaggactacaggtatgcacccccacgcctggctaattttttaatgttttatagagaaggggtctccctgtgttgcccatgctattcttgaactcctggcctcaagcaatcctcccgcctcagcctcccaaagtgctgagattatagacatgagccactgcgcctgaccagtgtcatttctttctgtatcaatctgtccctcaccctctttctgtgcctttatctgtgtttcttggtttgagttgctggtgctgtctgtgtgtgtctgtctctcctatggctcacctcatgctctctctctctctcccccctcgctcacccggcccccgccttttctctctactgctctgacttccctcctccctccacctgggtctctgggtttctccctccttctctcagagtgactctttcctggggtccgtctccccccactcctttcctggatctctggtctctctttctctggcctccatccctctcccagctctctgggtttccgcctctacctgccacctcgcaggccaggccctctattcctgtcgctgcgccccgccttgccggctgcgtgtcacccccgccccctgccgcgctggctccccgtccgtcccaccagccttgctgtcctgggcaggccggggaattcctcccggttcctggaaaaaacaactggggccgagagaaaggccctcagtctccccaggcacccgcccccctccctcgggcctgggggtctctcccggagtcggccagcccgaggcaggaagccctgcggtttctggcttctcccaggcggcctccggatctggcccccgccccccggccaacagcccaaatattattccgcgggaggagtcggtggtggcgggaggaggcccaggctgaaagaggctttcagggcggccaggcctggggcttcctgtccccaggctcgggcctcaggccgccccagtggggacctcaggtggccggaggggcggggtgttgttgtagggtcctcgggggagggtggggccatccgtcggggtgtctggtggccaccagctctgctggcgtgggcaggtgtgacccccaccccagggacagccggctgatgtccagcgtggaaaagtaccacggtcagacatgggacgcatggacagacacgggacgccacgaatcagggatgtggggtggccatggggacacaggcggccctgggctgtgggcctaaggtgacatggtccaggggaggggcctgtgggttggagcagaggccggggcagggtcgcagctgtgggcagagggctgtcagcattaggaggtaccagatgatgatgatgatgatggtgatgatggtgatgatgataattaaaagatcctagggcttcccatgagtcagggattgtgttagcaccttacagaactgatgggctccatctctcccgctccccccaactttactgttgaatgaaactgaggcacagagaggtgaagtaacttgcacagataatgagtggggtgctagggcatgaacccaggcagtctgggcccagagtcagtgcctctaagcaccccgctgttctgcaggatgggagggatagcggcagtgcagcacagtcctggggtcccaagccctccctggcaggcaccccccctctctgccacagcctgccatatggcaggaggtgggttcccagaagccacatactcactggtgaccaggcggttcacagctaggtaggacatgtgtgtctaagcggtttgtcattgggctttattcgcgtgtcttgctgtcagcgtctcaatgtcactgtgtctgtgggctcgtgtgttactccatggtgtgtctctgttgagcgcatgagtgtgtgtgcctggacacctctatgttggtgtccattgctgggtttgtgttggtgtcactgactgtctcaccgtgtacacgtgtaggtgactgttctgtcattgtcttctttgtggctgtcaccatgttctctatgtctgttcatcgctgtgtgctttgtcactatgcctctgtgcctgacaacacatttgcctgtcattgtgttttctgtgagcatgcatcagtgtgtctgtcaccgtgtctgtgacagtgtgtctctgtgactgtttacgtctctgtcactctggacctgtcactgtggctctgtctatatctgtcactgtgtgtcaccgtgtctgtccctctatgtgtcaccatctacccaggtgtcaccatgcatgtgttactcatcgcccaggccacaggtgggtgtgtcgggcccactggtgccagggctgtggcccagcccctcccacccttgctgaccgtgggccaggctgggcgcctatttgcaatcctgccccaggtaaacaccaagatccggaacccaagggccacctccctcacctctgctcctgcccctcagcctgttctgggctggaccagagccctgcagacagtgtgccccagactggaaatgggccctgagcctccccctaaccctgggcaccagcctccccaagccttcagcctcaactctctgtctgtctgtctgcttctctctctctctcactgcatgtcgatttctctgtttctttttgtgcctgcttcctctcacctgggcttctctatggctctgcctctctctggaatgacgcttgtcttcattctgtcactgtccctctttctgtggctctttctgtctctctgcagataggttccatttctctggatgttcagctgatgtgtctccatttgagtccgcctgcttcgtgacacttgctttctatctaatgctggcactgtctccgtaagtctgtttctgtcccactttgtaagtttctcccccaccttctctctgtccaccgtctctctgtctactctgagcctcttagtcttgggcactatctctgtgggtctctgagtccccagcccccacaggggcagactgccatgcctggacccttaggggagtgtgtagcccccagtctcccccagccagtgtgctggtgtgtgtgtgtgtgtgtgtatacacacacacacatatatataaatgtatatgtgcatattatttatatctgtacccaggcaggaggggaagacactggggcctttgtgtagccgctgccctcctgcccgccactcttctcccttcgtccctgccgcccgcccacctccactccccctgcacagaaaggttcctgtggggcctgccagcttcctctgcctgaggtgtgagtgggcacgccacgggtgaggcaggcaggagggcctgggggatttttccagccccaggaagctttccgggtggggagggttctggaaggaatgggagttctcagcagggctgctgtgggtctgtgtggatctgctgtccctgagtgtccccgggccctgagctggcctctccctgggggtctctgagcctgttcgtccatctagttgccattctgacgttttctctgttggtttggggtctcactcacacatgcacacacagtcatcgggcatttgtgttgggctccgtgttgagaacacacagataaatgtcggtcccagcgggttctatgccgtttctgtctcatttgctccatccctttaccctctgcttgaaagctcccaccttttcctattaaaacaaaattcaggccaggtgcagtggctcacgcctgcaatcccagcactttgggaggccaaggcgggcggatcacttgaggtcaggagttcgagaccagcctggccaacatggtgaaatcccgtctctactaaaaatacaaaaattaaccgggtgtgatggtgggcgcctgtaatcccagctactcagaaggctgaatcaggagaatggcttgaaccctggaggtggaggttgcagtgagct

SEQ ID NO: 67765 - DNA, 2858 bp, Homo sapiens
aatgacccaaacagatccaaccttgcacttcctccagttccctgcctgtctcacagaactttcgagtttgatgatgtcatcactctagttcacacctgtgccttttcctgatttcagtctttctcatctctcctttttttttcatctctttattgccttctctctgcatctcagtctcccctcttttgcatctctgttgttggcagctcatccgtacatctcagtctcgctcaacccatcagaatattgtccatttccttttcttttctgtctctccttctctgtgtctgcctcatctctgaggctctctggagtctctccctgtctcactgggtctccggcttctgcgtctccttgtctcgttcagtgagctggtctctgcatctctccctccccacctctgttgtctcccatcattccctgagtgtctctctgcgtttcccctatctccaagtctctctacctgcttcctgattcccaaataaatccagaacccctccaccctggccccaccctggcactgggggaaggggggctgatccagcccccacacccacacaggtcaggccttctgctctgttaatggttaactcaacctctatctagaatacacaccagccaggctgggggtgactcccctgccccccacccacctaccagctgttcttaaaggaccaggtgtcctccacagcaatttagctcccgctgggacataggagccaggtgtctggaggcctccagctgtaaagatttgggggtgggggagatacccggcacttgggtctgcagagctgggtcaggggaagccacaggcttgcctgggaggggagcccaggcacaggagctccatccaggtctctcttgccccaggcttatcacctggtgtatttaatcaggggtggttttcccagccctgccctgagcccaggctggcagtgccaggggtggcagaacacctgagagctgacggctggggggtggggaaggatgggacccctcagtccaagaacagagggtcctccagatgcgaaggttgaagccctaggatccctaatatctgggagttaggacatgtaggtatgcaagtatgggtgggacccctgggtaaccgagctgatgggtcaggactttaggggcctccagattcaggtgatgggaaccctgggttcccgaggacatctgggggcaaacttggatcccagagctgtctgacagtgctgggtggtggttggacaatcattccctatctctctgtccatccgcgggcctctgagccccgcattcccccttcccggaatctccaccttagcttggccggggaggccgcaggggtgggggctgggctcttggggccgccccctccccttaacccctgctttgccgcagcccgctcaggccccgccccgtgacgccagcgagcaggaagtcctggttaatgatcagccacccggacaggtgcgggacaaggccgcgcacatcagaagcagccgcggagcgagtgcctttcactctgctctctagggtggccgccaaaggggcttgtctcccaagacgagggtgaggaatccagctggggcttcccaaacgtccgcctctggggcaccgccagaggcaagaagtagccaagttgtttctaggcatcctgttagtttaccccgtggaggtaaatttcctctttcctcgggcagtccctctagcagtctaccctaaattctcccttctacccggcaagaacccactgcccatgtcttctaggaagcctcccgctgcctctttcccctccccacgtaggcgctgagtcctccaccttccaggtagagataggggatgggtcagctacagaagggtaatctactcccaagcctgtctgtggctcccctgcaggagccatcccctctctgagcctcagtacttttatctggaaaacgggccgatggctgaaacgtgaccagtgggtcgcacttgttgaaggtcggccggcgggaccgcctgggtgcagggcgccacctggaggctaccgcgcaacgtcctcgccctcgcaggaccagttcagtcccaaagggggcgcagcatctcacacaactaagggaccaagaaggaaaaaaaaaacccatctttcggtttattgaaggagcagaagggagcggggggtgggggggtgggaattaaatgcttttgcctcgtttataaagagcgagttttcaggaggtcccttctcaaggaggaggggggcacctctcccccaactacaagcagcagcaaagccaagccaaggaggacagagggaaactggaggggccaagggaccccaaacaccccctcggacaggagccacaagctttctccccccacccacaatgcatctaccccaggggacccatctgggtggaagaagggagtatgtacacagatagaggtggcactgggctgggtcggggagggaataatttatccgcggcagcggtgggtggcaaaggggcagagggcagtagcctggaggcagtggtagcctaggggtcccgttctttcttaactttgatgtctccagcaaggatggtggcgatctcgccctgcatgaaggcccagggcacggaggagccgaccagcgggcacttgtctccgctcgggcagtacacctccccggccgggccctgcgccttgatgaactcccgggagcagggaaagcagaacttgtgtccgggcaccgaggggcactggacgaagtgggtgtcttctagccgctccctgcacagggtacagcacaggggggccccaggggtcgccccagtgccgctgccacccccgctgacagcttcggcccccgctgtgggactgacttctgcttcgccgttgcgggc

SEQ ID NO: 67766 - DNA, 2659 bp, Homo sapiens
acagcgccagtagctgttcccgcactgctttggggcgcccgtgccattcctctgcccggcctcgcatggcctcgttcagttctgccagacagtccgcattcctctgctgcttctctttctcgaaatcggagccgaagaggggacgggcaggactcaagccgggtgccagcgtcaggcctcggcttcccaggccagacactgcagctgccagcagcccagggggcatcaagccaggcatggagccaagcaaggcccttcgcgccccctcagccacggcctcctcacggcccagcccattggccaggcgggaccccagagtgtactccagggcgggcgagggcagggggaggcggcctgatgatgtggccctgtcatagcggtcctggcccgacacgccgccgccggtccctgacggctggggctgggcctgcgggggcggcagctggggcccctgtgcggctgccgccgccaggtccttggtggccgggtgcttaagggccgggggcccgggcgagcggccctcggggagcacgtggctgcgcttgagctggcgggcggcatcgatgagcagttcgatgcggtccgcgccctcgaagttcacgcagccgcgacacacggcctcgctgaagtcccacaccatggcccacggcatcttgggcaggtcgcacaggtagcaccactggcggcgggacgcctgcacagacgccatggccccagtccgcgcgccgcccagctcccgcgttccaccggccgccgacgtgcgatccgcgccgccaacgttcgatccgcgtcccggggacagcgcgagccacggtccggcctccggctcggcctccccgccggatccaggcccggccccccttccccgccccctgggccctaagcctttctgctcactcccgcctccctcgcgaaggcaggctgaggcacgtcggcgcccccgcccggtccgggctccgagccgaggcgcacagctcgggccccacgatgggccgcgagcgccgccgcctcgggctcccgccgctctcgccgccgccgctgcaacggccgccgccgcctccacctccttcttctgccccagaggccgcttcgcagggaaagttacataacacgcctgcaaagccttctgggaaacgtagtcccgccggggccggctcttaaagggaacggcgggcagacgcgggctgggggggttgtcgcctctgccggcgcaaaccttacaaccttctccgtggggccggagttcagcgcgccgcaagatgctgggacacaaaggtggtaggcgaggatgcaatacaaatgatcagagctactccggattcagaaattgtgggggtgggtggacaggcttccgggcttccaacttctgctcggatttgctgtgcagctttaggcaaaatgtcttgccctctctgaacctcagtttccccgcccagcaaaggtgggccaatgacggattaggaaagtagcagcttctggggcggggcggagaagccctgattggcttcagagcagggacgggaagctggcaactaggtgggggtgggggtggccacctggcacttcgtcctccccccggaatcctagatatatgcttctggggcccgccacagccagagaagggagaggactaagggcttccgagccagagccttgtctcagttgtttctctgctaaaagagtggggcgactggccgccctctaaccctgtcccagctctgcccgcgcgctctggtctctaaagggttacaccatcgggggctcggcgtcccccacccgcttcactacaattcccaaaatgcactgcgggtcggacatagtgacgcacttccgccctctgggaggtttggggaggccttccagattcacgctactttcccggctaccccccgcccccccacttttctgggggctctttacgtgcattcggagcgtggcgtttgggggacccttatcttctgttgctccccagtttgagggaagagtaaggggttaagaagtgacgggcaagaggagggagttgctggggaagggcaaacaccagaccaacctttccccaaccttgagcgctcactacctggaaggcccaatcaggctgtgaggacccttcttctttcccaggcattgggaactggacgaggctgtctttggggaagggcggaggcgggtctccaggttccaacccacaacagcccctttctctaggcctgggtccgtgttaggtgctcaaaaatatttgaatgacgtaccagttggccctggttttgtctagtgaggggctgcttgtcccttctcctcccgtcccactggaaccgcagcagctctgattctgttacccagacctcacaattttaaaatggtttcacaattttgtctactacctgtatttgaacacttttctcccttaaaaaaaagatttatcaggctgaagtgggaggattgcttgagcctggagataacaggctacagtgaaccatgattgcgtcactgcactccagcctgggcaacagagcaagatcctgtctcaaaaaaataaataaaaataaaaagatttatctatttttgcctcatcctaggtaatacgttcacaatcatgggtttcatgtactgtggttaccttaaaaaaaattagtgaaaactatcgactcattcaagagga

SEQ ID NO: 67767 - DNA, 1191 bp, Homo sapiens
ggcacgggaggataggaaatggagggaggatgggggtgcctcgggggggtcttagatgcatgaagataaggagatgcggaaggggggatgcagcaagaaggggggaatctggagcagaggaggcgctctaggggctctagggggcaacggggcgtctgtaagaccgatatgagaagggcccttagagggatgtccaggaataatggtgaggtgggagctcctgtatcactggaagagctggaacgatcaaatattagggatcagggtctgcgaggattgtgggggctctggggattgccagaaattaaggggagctctggaaataacgggggtcccgtatcacaaggagacaacggaggctacgggggacggcagggagagcgaaggtcgcggagggtggggaccgagtcgggccacgggtcactcaccggctccgccgcagccgccggtgggtcagggctcgggcttctgcggcctgttcccaccccccgcctccctccctcccctctttcggccccgcctccggccgccccgcatgccaaggcgcaggcgcgcccagggccagtcggccccaatgcccttaccgccagggtttcattcccacctaccccagcacagcgcaggcgcagaactgcgctccgccgagccccaccagcaggccgcaactgcgcagccgcaacgttagcgccgcgcgggtaccccagcttcctggggccacaacggcgcacgcgcaaaaactccatcgcgcgcatgcgcgtgcctcgggttgtacccggtaccgggtctcggcgcaggcgttgcgagcttggatgggagagatgctgggagcgcgccagtacccaacctttcggacagtcttccagcccaccctgccctctaaccaaaggggagggagacagcgctgaagggaagcgctttgtctccttgacaactgtgtgggtggggtggaggcgtgaggaaaccgctttgcctcctggcttgcccgcccctgcgctgggccgctccagagcttcccacctcgcacccctagaggctgggcgtcctggggatgtcccgccccgggcggatgcagtaaccatagcgacccacaagccttccagtcacgccttgggggcccctctgtgcgcacctttacctcgaggagcggggaaaataagagggaagagcttcctggctggtaggaagggagat

SEQ ID NO: 67768 - DNA, 1517 bp, Homo sapiens
ttcctttcttaaagaggtccctcctcccccatccccgcgctcaattcctttagctggatccttccagttcatgactgatcggtttaaaatatgggtcgttcaaaagccgtgtgaacccgggctagtggctatacctctctgagactgttttcttagtggtaaaatggaaatcataataactttgcagggctgttataaagtttaaataagccaagtcctgcaaaatgcttagtgcaggtttggaatgcaccaagcgatgacaaatctcaacctgtctttatgctgagaccactccccagtttccggagccgcggccactatctccccatgcgcatgcacacccggctctcccttccaggccctccccaccacgtgggcgcggcctaccctcccgcagggggtaataggtggagtcaaggggctacttccgggattctttcccttccactctggggaacaacctttttgtatgactggcagcattattagccagtagtgattagagaagagcccgacgttaggtgcctcccccaacccatttgggacagcctcttcttagttagccaattggaagttttggagggcgggttctcctctgggggagggacagagtgatgggcgtctcttttggctaatggaaacttggctgctggtaagctgtgaccaatcagaagcgagaacgccggatcctggggcggggctggagcttcgtcagttgaaccgctcgcgaggagggttgctagtggagaaggtgagaggccgcgggagtggcggttgcgcgggccgtggtggaggtcttaggtggaggggaaggggcttctctcgggggagagtgggctgcggtgggcagctgacctggccttgtaggaatcgggagggagggtgccctttaacaagggtaggcgcttgattgaggggttgtgaggctgagcgcagcatgtgagttgggggtgatctgtatatcgcaggagggtcttcaatggggaaagttgtaaagcaggagacagcagatggtaaaatatagagacgtccttggaatgcagcgtggcgatttagtaggaggttttaaggcagagggttattacagcgcactatgctttacaagctttgatttgggtgaaagtcgtgggaagaagcaatattgaggaagggagggaaggagacctccagggatgagcatgtactttaaagagatgtgaagccctattatgcctgtggcgtttgctatgtgctgtgcacctgccaagtgttttaggtgaattaactcttaaacttactctactgatggttaagaatgtgggctctggcgtcgggttgaatcccgaatttgaatcctggctctgccactgatcattactgtggctttgggccagttgtttaacccttctgtgcctcagcttcatcatcagtagaatgacatcatctctgtctataccattggctagcttcaccctctttatctaatgagaactcccacgtgtgtatttccagcctggatctctgccctgaactccaga

SEQ ID NO: 67769 - DNA, 3106 bp, Homo sapiens
acacccatttaattttacgtaaacatgctcttcgaggctgaagcgaatatgactgattttcagtgtgaaaataaaacataaaaaccccttcttggctcatgcctgtaatcgcagcactttgggtggctgaagcaggcagatcacttgaggccaggagtttaagaccagcctggctaatatggtgaaaccctgtctctactaaaaatacaaaagttagccgggcatggtggcctatgcttgtagtctcagctactcgggaggctgaagtgggagagtcgcttgaacccaggaggtggaggttgcagtgagccaatattatgctactgcactccagcctggggagcagagcgagactccctctcaaacaacaacaacaaaaacaaaactgttcttggagttgtttctaaacagaacttgtctctagtattaacgtagcagaaatgtatatgattttacattagtattaaagataagaatattcttggccaacaggaaatgggttaaagccttgcagaggagggaaacagtgaattttgtcattcacttaaccagttttcacacacacacagagaaagtccagaagcctggctggtaagaaattcttacccttttgctggcatgctacggttttgggttctctttttctgagcaactttggtgaccttgctccctgtggcatagctgtgggggccaagccacgttacaaaagaaaatgatccctttccatttcatggaaccataggcaaaagtctctcctttttacaagaggccaaccagtgggttgcatgggaaaataagatattgaattaaatgcacagaaagaaaacaattcattgggacataagtgacacaaactttggttccacgtgctgtcagttctctccttaaaaagccagcacccaaagttgatagactcacacacccaaacagacagatgacagaaaagtccacaggcttcccctcctcacatggtgtggcaaagagaaagtgaagtggtgaggggttttgaatagagttacaggattgagggccagtatgacagagaaggggagagagaaggagaggaagagggagggaaaacgatagagggagagagggagggagagggagaggaaagaagaagaaagggaaggagggagaaagggagggagagggagaggaaagaagaagaaagggaaggagggagaaagggagggagggatggatagaattgtttcttgggactggaacccaaaccaacttaggccagggaaaaggtacactctgtcccactgcctgctgagttgatcagatccaggtagtcaacgatttcaacctgtccctcacagatatctgttcacgtgacccaaaccactaaggattaggagaggagagacaaggcaccctaagtgacagaaaagttaggaagtgaaaaggagagaaagcaagaagggaagggagaaaagcattgcctgcaggagggatgggggaggcaaggagggctggcaggctggagaaagactcaaccagcttggcgacactgaatcagaagttcaggcagctgcttgtcagccgtgaagggatcttgtccagcagtcccatcagctcacaagtctccccctcagggagagaaaggctccccacatcccattgttgggaatgggtgctcggtgtcacaaaaatcaacactgagacaaaggatctctcagcaaggctagtttactttctgcagaaagagggccgcttgctagcagtcttgccatgagagcacacacgaacaaaggagacagggtcatttataacctgatatgccaccctactgctgtgtctggcttccgttggctggaatgggacctcacattctgtacttgacctgattggctagcaacttagaacttccccaaagaggcaaaggcagaggagaacaaaggaagacaggaagtaacttgtggaatgctgagagaggcaaaagcacttccaaataaggaagaggaataggctatgacctaatgcttgcttgggcctgttcaggcatgccagggcaaatatctaggctaaaatgcggtagctaagaacgcagagtatattgatttctttattatggctagcagatatttaagaatattagcacaggtctttgagtaaattttgcttctaagagaggttactatctattctcaattagactgggaggaaagtccctctgaagaggaacctctacttattttattttctacaccatgatcccaggcaagcccctaaataatacattactggtcttgggttcttgggctctcaatgcaatagaaactgacatgaggtcaaaatagttttcccagacaaaacttcattggagattattcctggaaataagagaggcagcacaaaagagaaagaattccctgatgactccctgaaaagagctggtagggctttttttattaggcaaagtgtgggaattgacatcaggggtagggtatgcaggctgggctgggcaaagcaggagaggtatacggtatgcaggtcagcagtatctgcttaggatggttttcttgaggaagagaccacctggtggtctggcctgtggcagcaaggctgtgaatcagttgttcaacattctttctggaatcttggttgtctcctaagaccagttcttgggattctttaagtaaaaggactattagcaatgaggtagtggcgtgggttttgtgatcagcaggaatgttgtagtacagcagtccctaacctttttggctccagggactggtttcccaaggaagacagtttttccatggacaaaggaggagggggatagtttcaggatgattcaagcacattacattaattgtggactttatgtctattattgttacattgtaatatataatgaaataatatacattatatattacatatgcaactcaccatactgtagaatcagtgggagccctgagcttgttcttctgcagctagatggtctcatctgggagtgacaggagacagtgacagatcatcagacattagattctcatattagataaggagtattagattagataaggagtgtgcaacctaaatacttcacatgcacagttcacaatagggttcatgctcttatgagaatcta

SEQ ID NO: 67770 - DNA, 1593 bp, Homo sapiens
gagcgtgactgctctgaagcacagcatcacagggagacaggcctctggataactgcgggcaggcctgacggatgtcaggccctccacaagaggtggtggagcagagtcttctctaactcccccggggaaagggacactccttttcccagtctgctaagtagtgggtgcttttcctgggcactgacgctaccgctagaccaaagtcggctaggtaacgggcatcttcccgggcactggcattaacgctagactaaggagccctctagtggccctgtcggggcataatagaaggctcacactcttgtcttctggtcatttctcactgtgtccgttcagctcctatctctgtatggcctggtttctcttaagttataattgtagagagaagattattattataatggaataaagagtaattgctacagactaatgattagtaatattcatatataatcatatctacgatctatatctagtataactattcttattttatatgttttctttattatactggaacagcttgtgccctcggtctcttgcctcggcacctgggtggcttgctgcccacactgggaaatgtgtaagtaacacgtcctgggttgacagggtagaatctgagtaataaatttgtgaatgagcccttggggctgaaatcaggaactctgcagggaccccaaagcccagaacccaatattaaacacggtgttatgtgtcagtttgctggtgctgcagaatcaacgacctctacattcagtgtcatggaacaaccacatcatgattgctcctgagtccataggtcatctcgtgattctgttgatctgggccaggctcagttgaccttgatgggggggttgctcacatgtctgtgctcagcaggtagatagactggattctggttcatctacaaagaactcattcacctgtcctcagttgtctggaaataggcttttctgggatgtcctcagctgggacatcagggctctgtctcctccatgtggtctctcaccctccaacaggctggccagagggtgttcacattgctttaatttcctgagaaagtggaagtaccagagtccttgagcaaagtcttaactcaaaactggcacatgatcgatcactccacagtgtcctatagaccacaaattccacagggtgcagacagtcaagggaatggggacatggataccaaatcttaatagacgtaaagtcatattttgcaagtgtgtgaatgaggaaggagagataatcaggactgtatctgcagcctaccacagaccctcccagccctctttgccaaggctgaggatatttatcacgccccctggtaatcccccaaccctctcctgtggggcaaagagccttgcatcattccttcccccatggggggtgggggttgactttgaagagaccaaaaatgcatgtggctttagggtattctgcaaaatcacggacctggatctttttaccatcaaaaagaaaaattcagaaaagacaatccctgagactctggccctcgccctcagaagaagggttgactattcgggagtcccgctgagtcatctgtggtgctaggaacaccaggaatgattg

SEQ ID NO: 67771 - DNA, 1854 bp, Homo sapiens
ttgtggtatagtaattccctcttatctccactttcactttggcgtaggtttcagttacccatgatcaactgtgatctgaaaatattaaatgaaaatatcagaggccaggcatggtggctcatgcctgtaatcccagtactttgggaggccaaggtgggtggatcacttgaggtcaggagttcgagaccagcctggaaaacatggtgaaatcctatctctactaaaaaattacaaaaattagccgggtgctgtggcatgtgtctgtgatcccagctacttgggaggctgaggcaggagaatcacttgaacccgagaggtggaagttgcagtgagccaagatcgtgtcactgcactccagcctgggggacagagcaagactctgtctcaaaagaacaaaaacaaaacacaaaacaaagaaaaaacagttcataaattttaaagttgcgtgtcacactgattgtgaaatgccgtgtcgtcccgctctgtcctgccccgctggtgagtcatccttcgtgcagcatattgacactgtagatgctaccggctcagtagtctccagtagctgtctcagttatcagatcaactgtcatgctattgcagtgtttgtgaaagtttctcaagagggctttctttatcgtaaaataaaacctttattttactttgtaatggccccaaactgcaagagtagtgatgctggcaattcagatatgccaaacagaaactgtaaagtgcttcctttcagtaaaaagatgaaaattctccacttaataaggaaagaaaaaaaaatgggctgaggttgctaagatctatggtaagaatgaatctgctgtacctgaaattgagcaggaagaaacagaaatttgcactagctttgtgtcctacctcaaactgcaaaacttacagctgcactatgtggtaactgttacaatatattgtaactgttctattttattctatcttggatgtctcccttcgatgtaatgatgctgctctgtccagcagacaccgctctcgggtctaggctgctatcagttcaggaagagatgggtatttctggtcagagtattaccacagtgtgttggctcagcctctctgtttccaccagagcccaacaacatgttaatagctccttcagaaaaggtgcatgatgagtggccatttctgggagcctagaagtccagaaactttgcggtcatcagactctgatggcttttccttttggtcagattccagtcttcctcatctcctagcactgaaacttgtcattcaaatggggagctgggctctacgggacacaggggcctgagtaactgcctgaggtagggcctggagtgcattgtactccctggacccccactgggggtccctggaaagcagctatgtctctggttatctggtgcagggggaccaccagaatgcccagatggagtctatgttgtctttaatatccaaaatacccagtgaggcgttgactccacggtctgcaagggcctctctctgcctggtaccagatatcagatgtggaaaggctgtcaatctctttgttagaaacctcctgtggtatcagccaggcacccagaggctgcctctggcacaagcgcttgggtttagagtcttctgactttgtttattttaactttcatcactcattgggtctgatcccattctgctgcagaaagcagtaaagcttttcaatggcttcaccagggacaatgcaagcaaaaaccaatcaagggccggacacggtggctcacgcctgtaatcccagcactttgggaggccgggggaggtgggtcacttgagatcaggaattcaagaccagcctggacaatatggtgaagccccatctctact

SEQ ID NO: 67772 - DNA, 1627 bp, Homo sapiens
gcagtgagcctagatggcgccactgcactccagcctgggcgacagagggagactccctctcaaaaaaaaaaaaaaaaaaaaaaaaatgtgaagggtaaactggagggaggcagagtgcatgcaatcaatgctgtgatctcagacaagagaatctgtaaaaacacaaacaggagagtttatttgaagattcaggatttgggaagctgaacacaggaagaaaggagatggtgcaacacacttctaagccttgctcaggacttgaaatccagagtgccttcagttaaaaactcaaacactgaccctcaaggttggaccctttttggcttgagaaaccactaatttttcagagatgggtaactgagaccctagagaggaagggaagatttgttcaaggtcacacaggtagtcgacaatagggctcgacgcccgggtccggctccgcgtagggcatggcgctgccttgcaaaacagccacacccgccagcgacattcacaacccaccccccaaccctagaggacagcggggaaatcccactttcagaaccgagaaactttttacagccttggaacacggtaactttgggaggagaggccacaccaggtctgtttccccgcgcgccccttctctcattccctattggctctctctaccaggggtaccgtctggggaacctctggtcaccttgtcctccgcgcgctctgtggcgaaagggacctgcgcaggcgcgtgaagggcgccttcagggcccgcgctttacgacacttgtgcggcagcggcggcggccacccggcgctccttcgcgacggttcggccgggtgccgctggcggccgttgccagggtaggggtcgctttgcggcatggcgatggcggagggcgagaggactgagtgtgctgagcccccccgggacgaacccccggctgatggagctctgaagcgggcagaggagctcaagactcaggccaatgactacttcaaaggtgcgcccgcctggcagggagggtggacagtggcccaggctgaggggtgccgggcccgcgcggaaccatagcaacgcggagctgcagcctgggcgcggggcagacactaccaagtgaccgggcgtggggaggcccaggatggcgctgccaaggagcgacatagggggcttcggagagtgatacctaggagtggcgtgcggagcgggtgctactcagtggagagactgaggagggcgccaccaattgtggggcgagagggggactggaatgagggcgctaccaaacgtgaggcctgtagagggcgctaccaggcagtgacatgtggtgggggagtgattgatggcgctaccaaatggggagtcctggggtgggtgccgccaagtggggggtagagggggcacagccccaatagagaaggcaatcgtgggggtggggaatggatcattagatggggggaacaaggaagtaggagatttgggctgacccgaggaaaaggaatgtgatggtgggggccttgggagtaagggtggggatccttaagaatagtatcacttagaatattgagagtcaagtgtggggcacccattcattcattaattcaacaaatatttattgagtacctgttatgtgccaaggactgtgcttga

SEQ ID NO: 67773 - DNA, 2377 bp, Homo sapiens
acaaaaattagccaagcgtggtggcacgcacctttagtcccagctactcaggaggctgaggcaagaggattacttgagctcaggagctcaaggccgcagtgagctatgctctcaccactccactccagcctgggcgacacagtgagaccctgtctcaaaaaaaaaaacaagaagggtgatatgctgccagggacagcagacaggatatgtgtgatatgctgatgagggaggggacctagggcacagtgagaattcgctagtgccctcacccacctaatgaaaatcctgacggtatgaggctctgcagagcgagcacacaccttcacaccaggtgtgctctgcatcttccttcagggaggctggctgaatcattacagcaccctgggacgtgggaactgggattactccccttgcacagatgaggaaacagtccctaaggggtgaagtcacctgcccagtgacccccacctggttagtagcagagctgggatttgaacccaggaggcctggcctcagggccttatctctcccacctcagagttcgctccctgagacggggccgtgcgcttgtcctgcgcatggggatggtgcagcagggggcttggtcagtgtgtgtcgagaggattgttatcctgccccccgacacagacacacttcactccctccttcccttgcaaccatcacactcggagctgcttgtgtcgtgtagggaggggcaaccagggagctgggagccgcgagtctgcagttggtcgcggggctgagaagcacgagtctgcagtcggtggagccagctcagacactgtcctggctgttggccgctggcctggggtggagggtggacttcaggccaggtgaaggcttgagctaagcatgagtccaggggacacatgttaggatgggggcagagatgtggcggggggttagggcgacacctagaagggtgggggcaggggcagcagagcagaggccttcccagcttgggctcccaagccattcttggccaagcccctccctcattgtctcttcctgtcctaatctagaaaatggtgacaagaggagtggccgcctccggatggctgtggctgtgatgacatggttgagtaaaggtcacgagctgcagggctcagtaatgagtaaccaaggacagtcggtgttgggttggggcagggctccaggtgggaagggggcctggggagacagtggggcagaagagaggagccccaaggacaggtttagggcagggtcttcatctcgtgtggggctgcaggagcatctttccccagggtaaggagcaggggctgcaggcagggtcttcgtcaagtgtggggctgcaagagtgtctttccccagggtaaggagcaggcttttcaagactctggcccagtctagggcccaaccccgcatactcccaaccccgcatactccctgaggctgggctggttggcttcagccatcttgtgggtgtgccacgtctgagctgtgtcccaggcctggcggatggcagggagggttgagggggtggggaattcagagtcttttacagaatacccagcacctaaattgtcatggcccatttccccatgggggctctcccagcagcattggggacccccacatgaacatgagggcttacctgtcatcaggccatccatatgcctgcaggccttcagccttgctcctttctgcgcagttcttcaggctccatgtgccctggggcagttcatcttcccaagactctacctcctgcttgctggatgctagagtttcctcctagaccagaagctcgccagggaagcagagcaaagacgtgaccttggccttgggcgggggagctccccttagcctcggtttcctcagcggtctgctcactctgggcccagcactgctgggagccctttgtgcacctgaattcagcctgaattcagactgaggcctagagaggagatgtccctcctccaaggtcacccagcagggaagtggcagagctgagacttgaacccctagtccatgcttgtaactgtttctgggccacaatcagttgaatagcttcagcacttttgtcttcatcaaacagagaattaaaaacggttcattgtttggaggaagtgtgtataaatattgttttgtggaaatgacttttcatttacacaagtacagatgagtgatggatgtgatataaaaatccctattttacatgtgggctgcaggcagagagtctgcggtcaccagtgcaggggctagatggggcaggctctgggctcaggacgcctaggttcacagccagctcagattgggtagcagctgcatggctcctagtgccttttttctcagccttagtgtcctcatctgttaaaggaggtgagaatataggaat

SEQ ID NO: 67774 - DNA, 1763 bp, Homo sapiens
attgccctggttcactcatttgtttctcaatagcacgccgacttgtcaggaaggttaatagaggaaattggtgacacagacattgcaatcaggaagggctgagagtagcaagtcaggtgggctcaccattagcaatgcagggagctgctgtctcgtgaggattggaggagccacgtggaaaatgctgctgcccggagcccaggtggctgcgctggccagggagaagcccctggttggcggcggtggccgtcactgctgctgctgcttctgcagccaccacggcccaagcatcccccagatggcgtccccttcctctggcttcctctcccgtagcaacagcagtccctgcagaggactctggagtggtggttgcggggtcctaccccgcagggggcaggtgggcgtggcggggagaggcagtagagtcgctcagggtcagctctgacctgtccccgcggtgttcccggccccagcagctgctcagttatttgtcgagtgctgacggtcggtcggaagaaaccacccggactgaggaaggctgaccccagatgcgcctagttgggaatgtgctggaaagatacgccccctggagggagtgcgcccaggaagtggggaggagcgtttgagatcgaaggagtggccgcgtaaaggccctgaggtctcgcaaggaagggtcccggggcgtcccaggccctgttctaggtgcaagaaacaggaacctcctggagcgagcatgcggtggggaggcagggggtacgcctcctacatgaggaggagatccacgcattaggaagtgaggcctgctggggacaaaagtctggcaggcagggccccaggagggccggggcaggagagggtttgcagtcatcgtaaacggggcggcatggaaagccctcactgagaaggtgccaaagaccccaaggaggtgaggggttgcggccggcagatgcctggggaaagcgcatgaccggaagcgcaggaagagccaggttaaaagccccaagccagagtgtgataatatggggctgttaatgtgtgactactgcccctcccgtgccaggctcggtgctggcgtaggggaggcagtggggccaaagaaggccacctgcctccatggtggtcgctgtcgggttggatttccacgtgcctggagtttaaaagtgaggcagcctggaaatgagcttgcagagttcgctgggggcgtgggggaggtttggccgtgcagactttcagatagcgggcccaggcagggacctcgatcctgaacccgcccccaccccgatcccggagccagctcagacacaggggcgcctgaaaactcctagggacatgaccaggtgctggagggagggagaagtctgggttccggggacagaaaaagacagtccctaccgccaacgggttccccagacccggtttccactgaggccccaccttccccagcgcagtcttcgccccttgcataggaggccacatctcctacacgtagatatgcagagagcgtgtcaacgcgcaagagctgcagcgccccatttaaccaccaagaggctccagggccgctggttaaaatcgtgcgggaagagatagcttgacgccaggagttcaagaccggcccgagcaaaatagtgacccacccccaacccccgctccccgcctctcgtctatacaaaaataaatatacataaataaaataaaataagcaaataaatattacatcgtgccggcgatggtgtttcccgagcactcgaagcgcctaagttttc

SEQ ID NO: 67775 - DNA, 898 bp, Homo sapiens
ttgggcagacacttttaggagaggaatcccggggcacatggtaactctatgttgagtcatttgaggggctgaagggatgcttttagcaatggtcaacgcagagcaagagtctttcctacttcccacaaagccgctgtaagtgctaaaatggagttaggttctggacccagatcattgtagactgatttttcaacagtgtcacaggctggatggcttagataacagaaatctattttctcccagttccagagtctggaagtccaagatcaaagtgccatccgggttagtcttttacatttgcccaataaccaagcaagtcactttgtctcttcatggctctgtggccccagtttatcgtgaggttgtgaggatttaagcgggatgtgtgtgtgtgtgtgtgtgtgtgtgtgtgtgtgtgtgtgtgtgttggaacagtgcctggccctgagtgttactgggacaaagatttcattctcaccgtgggacaggatgaggtggcacgctggaatgcagaggggactccccaggagagcgtctggtttataagaggacccaaaggtacagaggctgaattatgtctctttaaaattcatatgttggagcctgggtgtggtggctcacgcgtgtaatcccatcattctgggaggctgaggcaggtggattgcttgtggtcaggagttcgagaccagcctggccaacatggcgaaaccccatctctactaaaaatacaaaaattagccaggtgtgatggtgagtggctggaatcccagctattcaggaggctgaggcaggagaaccgcttgaacctggaaggcggaggttgcagtgagctgagattgtaccactgaactccagcctgggtgacaggcatgactgtctctaaataaataaataaaat

SEQ ID NO: 67776 - DNA, 637 bp, Homo sapiens
ttttcagttgcaagcaacagaaatctaagtcaaactggctaaaggagaaacaaaaattcactggccatcttattgtaagacaatagtgtagcttaaacaataaaaacaaattgaattctctttcccatagtagctccggggtgaatgaccttgtgaggctgtgcgtgtggccatcattcaggaacccagattctttcggattgttgcttaaagtgtagtcccgagaccagcagcagcctctggcaattcataggaaatgcacattcccaggttcccccaagacctactaagtcggaagctccgggggcaggacccagaaaactgtgccctaacaaactctccagggaattctgatgcccactttgagagccactgacctcatgctctgtcagcatttgcataattgaatgtgccacctctgagtgacttggtgaaagggaaaaaagagaaagttcagagcaagacatttccttgaaagcaggtaaagtggaaattgcgcaagtcatgtccaactgcaagccactggggaggacccagtcatgtggctgcagccaacctcaagggaggctgggaaatgtagtccccagccaggcagccatgtgcctgaggagaagaggagatgggcttttgctgtcca

SEQ ID NO: 67777 - DNA, 3909 bp, Homo sapiens
tatgggaaggacccacccaaaaggaaaaggcttcttgtgcccaggctgcagatccaaaccccagggaaggactctcattggttcagtctccattctgttccaggtggagcataatgattggtccagcctgactcgtttgcccatctcttaaccatcaacatggtggggaggggacacgcaggagactgtcagctcctatcctaaacgggggagggggcaggggtgatcattttctgagctcctataaacaaagtttcagttctttttcctcctatggctggaacactggaataaggaaagaggtcgtctgtctggagaggctggttggggagtatggtctccccagcccagccaagctcaggtccctgcatacagcaggcgcctaattgatgcttatagcacgaatgactgaatgaataccccgttcccacaggctgtcctgggatggtcctaatttcacagaccctgagcggatcaagaatgaagcgggcccaggggtcccgcccaccggctgagtgcgtcttaggacgcagagacaagaccacggagggcggaacctctgagcgttaggtggcaccttggagaccccgccacctccaaaggcccagttaggggcggagcttctaaaccctagcattttggattgaaccatcgtccgtcggttaaaggggagagccgagaaagcccttctgcatttgtcgccagcctttttaccacctcctggccacagaaacgacgtatttgcttctctaacggcgacgccgtttcccccttcgcctcgttactcctcaaagccccacgcggccacagagttcagacttacccaccaccaccttgcagtggctcgccccagtttgacgcattgcagggaaggtcggaccaatgggcgccaagctctcatttccgccatgggccaggcccaatagtgacgcggctcacagagggacgcgtcacgcaccgccgagctgtgcccctccgccgaagaaagtgaagtgggcccgggaggcggggcgcgcggcgagggaaagtagtccggcgacgggagcgagcgcgcgcgcgcccggcggcaaacccaattcctgtgcagggtggggacgagagattcgcgggcccgtaggtgtggagcggggcgcggagggatccgtgggagccgcagtgcggcggcgcgcgggccgggtggggcggggccgagcgaggcggggcgcgcgcggcggccgttgagggaccgttggggcgggaggcggcggcggcggcggcgcgcgctgcgggcagtgagtgtggaggcgcggacgcgcggcggagctggaactgctgcagctgctgccgccgccggaggaaccttgatccccgtgctccggacaccccgggcctcgccatggtgagtgaggctggggggtcgccgaggctgcgggctctgaggcgggcttaacggggcaggacccctgagggggcgacagagcccagagtggggggcgtccgggcccggcgagagcctcgggacccttttctacccgcgttgtcgggggctgttgaacccagagcgggacgtctggatcaccagaggtttccagaagcgactttagcaccaaatgggatgtttaagtccacaaatgggtatctgagcccctaaaggggacatttgaaccccggatggaggatcgggaccctcagtgggacccctcaaaaggattttggacccaggatggggcgttgggtttcaggatggaggtgtttggaccccaggggacgaaataagaaagatgggctggggaggggagctattcgggccctgatgaaggcgtttggtcctgagaggatgcggggaacgggggacgaagggaggctgggctgctcctggatggggtggtggagggtagctgggcccgggcggggaggggcgacccctgggctcctgtggagcagaggagagggtcaaggatgggcggtcacttctacagatgagactcccgagggtgggggagggtgggggagggtggtctccagagcccagcactgcagaggaggaggagggtgaggtgcaagcttatgggaggaagagcctggggtgggtggcagcggagattagaagatactcttgaaggcttccgggacggagaaggatcagggtcgtggaggtggtgaaaagggatggtgagagtggggctcgccagtagtcgggggacagggacccttggggttaatttggaagtagctagaaaaggttccgaggttactagtgggttaagactgttgctctagaaagacagaatttttttaacggggtgggagtgttgtgtttgggtccaagagaagatggatttccaaggtgaggggtgggggaggacttgggcttgggtggttgggaggtgaggtggaaggagaaaatgaatggcagtcaggggggcctaggtttgggggtggatgtgggtagcaccctgccagtctccagggacaggccaggacaaagacggctcagtgtggatggggagtgggctgcagggcccggaggaagcttttctaccgtcctccttcctcaggaagaacgcggctgggtggaagacaccggggcagtgggagcaggtgggcggagctgttcgggcccctattgcgcactgaagcctcatgaaatggggatgggagatcaaagtttggggtgcctcgaatgagccagctttttcaagcctagaagcctcactctgtcgctgcccttttcaggccaagagcactgccttttcccagcaggagcgccggttttctcatgatccccagccccacgcaccatgctgcacctcgtcacttgtgccaaatgacagtgcagtacagtgtggcgtcagtgacaatcagatgcctattcccgtgccctcggggtgggggctgcagagcttgatcagagagtgcctctggggagaccccttgatcggcctgagggccacttgttccattcagggccctcgctgagcgtgtctgttaattcacagggctttgagagaaaaccagcagactagttctttcctactccctgccacccacaacacccacagccccaccaggctgagcctgggaaccgtgtgcagccatcctccctggcaaggctggggagaacaggcagccgctgctgtgtatcagatctcatacttgctgacacagacctgatggctcctcttgccgctaccccattttcccccagcagaacctggctaaaaggggccctgaagcactagcaggccccctacctccagaataggacccaagctttggccacaactagtttctctttctgtttgtaatcagcaaggtagaggtgggacaagtcactggtaactggccttggactttggcctgagctctgtggctcctccttggcccgggtgaggggccctggccttggtttctgatctcatctaacactgctctctggcattggctgggggctggggcaaggcagagaaatcacaccctcttccctcccccacctcatggttttttttcttgtccagccccttgctggagcctaagatgagggataaggaagcaggagaccagctgagttattttggaaacagtttttgttgaaagtttagtcttcaggtctagaaagggaagaaaccttgagcaaggatcaatgatatcttcttaggcggtcggttttctgggcggcaaccttgcttgagatctgtacctttccttgaccaagcagggaagtgggtctccaacatgggagggagagcatctgacaggccctccatgcagagccacgcctatttgcagcaaccctgtgacagaactgaacatggcagtgcctcatctgcatcttccagtcttttggtggagactggcaaacggtggccttcagagccgctcggggcagtctgcagcctgtcacagcctcctcgcccccacccccagccc

SEQ ID NO: 67778 - DNA, 558 bp, Homo sapiens
atcaacaaaaaccagggaaaatgtgtcttttggctgctaaagctaaatgttgggattcagcctccccaaccccccagccccgctcctgccccataggatcactatgcctggctgatgcccagcacaccagtgcaggagaagccagtccccgcatctcctccccacccccaaaccccgcatgcagcaagggctgcctgccacccactggccagtccccagagtgcccaagctggaaagggttaaaaactgcagtgcaagccagcttcagtcctctgctgctgcccgctgcagccctctccctgacgtttgtcccttctgcccaaaagaaacaaaacagaatggccctgtgccctcactgtgcgcagggggtggagcgcctgcctccagcctgaccagagttctttaggtgcttgagcaactcgggccgccggttaggagaatttttgccacttgggtggactctgcctgagccaaccgcctccaaataggtgacacagaaactagcagagatagccccagacatcgtccctctgccctacccaaggactggcctgcttc

SEQ ID NO: 67779 - DNA, 705 bp, Homo sapiens
agtcacacacagactcccagcaccacacaccatctcaccagtacaccatcatggcagtacacactcatggtgtcctggtcctggcactgcacaccatctcacggcagtcgacactcacacagtttcctggcgtcgtacaccatctcacagcagtacacactcacagatctcctggagtcacacaccatcacggcagtacacactcacacactctccagatgtctcacgccgtctcccggcagtacacactcacacagcctccaggtgtcacacgccatttcccagtgtcaccgcgaacaccagcgtcccccgctccccagcactccccttttggcgctcacacgcagcgtctgccggccacatgagggcgcgcgcagcacgcccaggcgcccaccctgccccgagaggccgcagggaggaggtggccacagggaggagggccaggcgggagatgaaggggagactcgggaccagaggaagcacggcagggagccagggaccggagggagaggacagaagatggacacagagaaattcacagacaggggagggagatgcagggagagtcagagagacgcagggggctatagggacacagatttagagaaggagcgagctagggactcagagagacagagacggggagggcgctgcggagagagggacaggagaggcagagacagacaggacacagagagaccgggg

SEQ ID NO: 67780 - DNA, 1528 bp, Homo sapiens
agaaaggggtagagatggaatctcactatgttgcccaggctgatctcgaactcctgggctcaagcgatccccccagctccagctcagcctcccaaagtgctgggatcacaggcgtgagccactacacccggcctctcctgacttctaactccccctaccctctcctcccccagatgccccgcccccacccgaggccccgcccccaggccggccaccacctctcacccgacagcaccacctccaccaggtcgccctcctggatgtctccggacgagcgcaccagctgcaggaggttggccgacgtggggtcatgtttgaaaagcaggatcttgtcgtaaaggccgtagaagccacactcagggaactgaggggcgggagagggatgtggcgacggaaaagctcagagccgccttcagcagcgggcggactgtgaccctcccagggcagggccggctgtttcccccggaaacgcagagaccccgcaggccctcgcttcctgcctgccccctcccaaccccagcgcgagccgggcaggatgccagcgccccaattgtacggggagggggcgccggcgtgggtttggtggctggaagggggagctggggtgggagggagagtggctccgggagcgtggacacctcgaattttccggaacctggcggaggtgggaggggatgctgaatgaacactccctcccctgtgcctcctccccaggctcacacacccgccccccagcttccttcctggatctgtctattgttgtcccagttacctggctccaggcccagcactggggtggggcgagctggaaggaggacttttcggggctcctgggaaagtgggggggggggccgggggacttggactcgagggcgctggagataaggagggcgcctgccacccaatgctcaaaggacccaggtgtctgggtcctcagctttgggggcctgggggcaggaaatgaaacctagtagaacagaaagtgaaactgccccggtggggcctcgggaaggaaggtaagcggccctaacacacctggacctggcagaaaaataaaactggggtgaagcctgagcggggcaggctggggacttgagcactggacaaagaagttcacccaagggacaatctgcccccgtacccccactgccaccagcttcccatgaagtgggctgagttggggtggtgagctgggcctgcgggattgaggcatttggtgggcaaaaccctatcagttctcactgctaagagagagtccacagaagaccaggactgccttggccctgaccccttgggaagtttttctctaagcttcagtttccttgtctgtagaatgggggagctggcccagttccccacgtttctctgatgcccaaaggattcatttccaggagtctgaaaagattctggaatttggatattttgggactccaacatgctcacattatagaattatacattctagattcctacctggtatcactatacattttaggatttcaataacctaaataagcggtaatctaat

SEQ ID NO: 67781 - DNA, 2108 bp, Homo sapiens
cacccctgcccagtcctctctcaaagggatggtggggagaggggcaatggaggggggcaatgccccctatccctccatcacccaaagctcaggtctccttcctccctcttccgcacaccaggccccagacccctctgccagcgccccctccttcaacctctccccgagctggatccagggagcctgcgccctcaccttctggtccacgatggaacaggccagctgcttcacatgagccagctcggaggcggcgggcaacagcacgaactcgcgggtcagcccgatctggatgtgaaaggagaccccggaacccggggccgggatctggggcagtagcggtggcggcgactgcagctctaggccgccggggggcggaggagaccccggcccgggagagccagggagcccggcgggataagagggggcggtggccatggggggaggccggggaccggccgcctggagcccacccgggacccggccggggggccccgggggaccctgggttctagatccgcgggatctcgtgagcaggtggtgggagagcggggatccgagaaaagatctggcaggcggaggggacctgaggatggcggggtcctgggaaggagagaaaggcactatagtgggtcagaggcccggaatccagggctcccagaagatcagaaaggagaaaagtagtgggttggaggtcccagcgattgagattccaagaagcctgagaggaaatctagtaggtcggggtcacagggatcaggagagcccgcgattcaaaggccccttccctagaggagggattgagaagggggcagagggaatcccaggatccagtgctccaagaagaggatcccactcagaaggcggcccgggggaattcaccttgggggtggagggcaggagtctctgagtcggggaccgagtggattccagagataaaggggttcgcagggacccgaccggccaggggatgggcagaggggtcccgagggccggagtgggtagaagggaatctcacgagtcgcagaagttggagaaaagttcggtcgggagccgtgaggaagggggcgttgccggagcggggttgggtggggggcagggagggtcgccaggcgccagtagctctttttccccctccaaagtttaagtcggcggcggcggcggcggcccaggaggaagtgtccggagcgacagtgcagtcgaccaatcggcgcgggcctcggcgacgtcagagaggggcggagcctgccgaggggccgggggcggaaggggagggtgggcccggggcctccgagttgggggctggacctccgcctccagggtccgggacaagggatggtgtgagggatggagggcaggcaggcgagaccagttccttccctgaacacagccaagcctggaaagttaacttttccctcggctggacagggaggggaaacactatcacccaccgccggtcgcaggcgtcgggcttggaggccactggccctttaaggaggggagccctctccggcaggcgtccggcgcccatggcaggggacgggtgggaaatcggtatcaggtcccggcccgctctctgggttcggcctctctgttctccgagcgtcacccctgccctccccgccgcgtcccagcccagggaagggggtgctgcagagcgtcccccggccccagcccatttaacacatggaaagaccgaggcctccagatgggtaggaaggggctcgccttaggtctgtctccagcgatggtgggcaaggtgcatggcgctaactggatgggtggggagggtccatccccccgcccaccccaaccccgccttaggatagtgtggggctgccccgagggaggacagcacacccataccacttcatagatgcagagtgtgtctcctggggatgtggagtacgtgtgcgtgtctttctctccatgtgactttgggtgagtggcttctctgtgagcctcagtccctccatctgttgggactgtaataggactgaccccacatgggatggtgggagccgatgccatggtatactggtgcctggaaacgcagcagttcagtaagaggtggttgtctctgataatacgcggaaaggggtggccacctc

SEQ ID NO: 67782 - DNA, 1628 bp, Homo sapiens
ccccagggtaacccctaactcgtcctcattggcaccatcccaggaccctcacctccatactggacatgcccaacaccccacactccagttcagggctctctacctacatcctacaacacacgtgccatctcagtgccatcgcgcccactcctgcacacccccaaagtggaacttccactcttaagctctcccatccaggctcctagggtacattccctgctctgtccacacttccactccaaagaacccttccctgcactgtgcagccacacatgcccgggatccccaaagtttctcctcagaggggaaggcacacaccttcatcctggaccccttgaaaccctcctcccacccctcgggtccttacacagccctccttccgtgcccaccgtccagtcgccccgaaacacaccgatcccaggttcccgacttcctctccctaaatcctcccggttccccatctggacccgctctttcccagcgggtcccaagttccccccttggacgctcccacctccaacctgcacctggctagggccatggtcggggtcggggtcgggagtccctcggcgcccggcaagcttctgcttactcccacaggagaccactcaggtctcccagacccctccagctcctctccacaccctttcccgagttctcttagcctcccctccagggctcgagtcgcctctctcaggagccccgcggccagcgtgctcagtcccagtcccagtcccactcccagctggttgtggtccctccgcccctttctctcggccggtcccggtgatccctcccacccccggtccctccactcccacctcgggccgtcccggtcccgtcccaccccggagtgccctcaggacacccctcggacggcccctcactcgccctccgggaccgtcgcggtcccctcccgcccccccgccggccgtcccggcggccattgctccaagatggcggcggcggcggcagcgggtgaggccgggccgggccgggccgggttgggggtcgggggtcccgggacagcgctcacctgtaactcggcgcgctcggcctcccagcgggctttctcggcttcgaagcgcgcccactcgtgctggataaagtgcaggatccccggcaggctcaggggctccgggcccgccgtgggcccggggctgcctccgccgccgcctcccttacctgccgggcccggcccgggggcaggggcggagaccggggccgccccagtggggccagggcccgcgcctgagccgagcggacggcaggaggaggcggcggcggcgaccgcggcggccgctcgctcctccatcatggaggccccggggccggcctgcgcgcccgctgtgcctcgcgcgcctgcgcggccgcgccaacacccccccccctcccccgccgcaaccaccgcgcgcgcgcccggcgggggacagtaggaaggggggccggcggcgagcgcgagcctcgcccacccgggtctacaccgaagggtagcgtgcccgcgcgggggccggcgggtgggagatcgcgccccgaggagggcgagggagacccaggccccgcgcgacggtccccctcgctggagtgagactgaggaaggggccgctttctgcccccctcctcccact

SEQ ID NO: 67783 - DNA, 934 bp, Homo sapiens
ccctacagttgcctccttttggtttcctgtgccaggtctcttcttgagatcatccctctctcacaggcagtctcctgcccctgtctcaacatcccctctccacctgcaatcagatccttgtctctagagactcctcccatcaagaaaacctccctccccttttccaaggtctcgcgttctcgtcccagcgctcccgccacacttccagagcgccttcctctttcggacgccctctccccacctccaatgccttctcgctacccacaagactgtgtctcacgagtttcctctcgtttcaaagcttccaaccatctacaacgtttcccacctgcacagccctttccccttggaacaccacccccaatgcccgtcgccgcgagacccctggtaacccccgcgcgcagaatcaccgccctgtgccctccttcccggccctggatcggtcccaatccccagagcccgcgcctgacccagaccatccgcggcagagaagggacttgtcagcgcccgatccagcctcggctatttacgcgtgggccccccctccgccagtccccggcgtagcgctcccccgttaccatggcgacccccgtccagaccccagcggccccggtcccgcggcgactgggcagctccggctcagggtgcagttgtagggcccagagctagagcggacttccggtagaaaaacccgcctgccttctcgcgcacagacccctgggagttgtagtttcaccaaaggggccagcctgggtgaagatgggtgaagagtcagagccagtccttttcctaccaaacgagtcagatcccaagtgcatgctgggatttgtggacaaacatctttacagaggactacaattcccgagatgctgaagaaccagcggtgaaggcgttgcattcagggaaatgtagttctcttaggtcccctcccccc

SEQ ID NO: 67784 - DNA, 942 bp, Homo sapiens
agatgtttattatgcattcatccagtagatatttagtgcgtcgatctactaagcaaggggcccaggcactgggattccgcggtgaatctgagcatccccgcctcccgttcctgcctcgtgattggctgcccttgggccaatggctgaagagtccaccgctctgccagcccccgcggcaatcctccagctgcagcttcccctgttcggtttgcaggcggcgctgtgggctcactgactcctccgtcacacgcagacctggtccccaccctctctgattctttcagactcttaggaatgaatagagtgtataccccagagtcccaccctctttacaaaatccttttgtgaatttttctgcctgtgcaggtttccaatacaggtccagaatcccacgcccgcctcttatcaaccaacaccagcggctctcccgttaatgtgacctccagccattcggcccgtaggccgatgcttgggaaatcttgacagcggcccaagccggcagtcggcacttctctcggtcggttaattgtttactcgtttgtttatttatcctggagtggaggctagccgggtgcgcggaggcggctgcccccagggaagcccgcttcctgtggttggcttgctcaactactatccgccctcttgcgcactggaaaaaattgcagagctgggaatgcaccccttgatggttccgttcatgcagtaaaacaatgcctgggcccctgccttgtgcctggatccgtgctagggacatcgacgatgactgaaacagccctggccctgccctcaggggccttgcagtccgatgggaaagacctatcaccagatatggaccacccaaggtggccagggcttggacgggagacctaaagggactgtgggagcttggaaggagcagctgacccagcctgttgcatcagagaaggcctcctggaagagggg

SEQ ID NO: 67785 - DNA, 3311 bp, Homo sapiens
ttactatgtatgcaatgcatgatttcaagagctttgcaaaatataatctatttaattttcacagcagccctacgagagaggtacgattattatcccattttatagatgaagagactgatggcagaaatgccaaatgtaataggaaacagcctttcttcatgcattccacaaatattggctcggcgcccgggaagctcatcttccacgatctgtacttccggaggagtcccagaggaacacctcctcagttcagaggagtcaagggttacagcggtgccctctcccatcactactcttttcccttcaggcgccctaattgacattcgatttgtagccatttgcacaatgctaagtgacaggcttgggctgcacacaggaccaggccgtcttccctctcctggggatcagtcgttcacagaaccaaaaacaagttgcatggacgcgcgcgttggctgcagattttcttcacagccaggagaaagagcacgcgctctccagccccgcctcttcttccgggacgacgaattgcggggctcggattgggctgaggcgggccacgcctcctcatatcctccaatcaactccctctctggtgcgctccctccttctcagccccgccccaccgccccacgttacgtcgctccttctggcctcctccgttatcccggcggctgcggctcgcgcggcaaacccacctcccattgcttcccattggctggtcaggtcccgcgcgagcgggatcgcgcccttcgccccccacccccaaaaccgggccatgcctctctccttcggctttctccaggagccagcgcgaggcagtagatcggctgcttgagacgcgcgcgcagctcctgcggaccactccctccgccctgcgccagcagctgcgccggctggcagccccccgcgcacgcgcgctcgcccatcccgctccctctgctcgtttgcaagtcgcctcgcgctcagtcgcgacggcggccgccgcaatagcggcattttcgggggcgcacgcgcactgcaccgtccgcggccgttcctaacctcaggcagcggctgtggcagtaagcccctcgggtgcgcacgcgctctgacctcttcccactgcctcgctggttgtcccttcgcggcgcgcgcccaggggccgttatacccctgcaacggtccacgcgccgcgcacgcgcagtagcgagggggcgcgcgcgcgggagcggccgtcgcaggaaggaggtgccgccgctgccgccattgcgagggagggagggagggagggagtgagcgaggctggtccgccctccccctggttgccgcccctccccccttcccctccccgccccccgccccgagggagagccgcggcgcggcggcaggaggaggtggaggaggcggaggagggaacccgcgagggagggtccgcccggccccccgccgccggagccgccgccgccgcctcagccgccgctggactaggagcaggggaacatggcgccggggcccccgtcgttgctgccgggattttggaggccggggccgcgctgagggcgcccagctggtgagtgcgcgagctcacgggccccgggcggcgaggccgggcgccgccccgctgcggggtccagggggaggcggggacggcggggcccggagcccgcgaacaatggaggagctggagggggaggggaggagcggccccccccccagccccccgggccccgccgtccccgtcgcttcgcgcgtcggcccggcccgtggggccctcctgccctttggacctgcccctgcccgccccagccctgctgtccccgccgccgcccccatccccgacccgttgggatctcggtgtctgcctcggagcctacccgacttcagccaaccggttcccaattctgcgccccccttcccccttccacccctccataatgcccttcgctcctcccgggctctgcagtgctcctgggacccatcttctcctcattgaccattctgcatctcttaattgtggctcccacttttgagatccgtgacgcttctccctcttctcgattctgctctcaccacccttcagatctgtcctcggccccttctttgacctaccttctgtgctattattcctgtctcagaatctgttgcaccctgggagctgtccctttaggacctgcggttccaaccctttggagatccatctgagacccctgttcggccaggcactgctgccccaggtcttccccttggactgaatcccgttccctcgtgggccctactacccgcatttcttgtctgccctctcgcagagcctgctgcaccccgggatgcccctcggctggctttctgacccttccgtgccccagctcattcccctgatcccctcggacttggctgcaccgtgcttgcctgttccccttctcagctcttgttcccgtttaccattcagaccctttcctctcttccagacctttctgcctctcagctctgccccttgcccgacctcagatcttgctgcgctcccctcacctgcttgcttctgactctgccttcccgggaagcagcctcctcccccttctctgactctgcaggtctcccatttctgctattcacttaaatgatgtatccctaactcagactgccttcagtttcagcccgtgttctcttggaggtttcctctcttccccacctcctttttggcactcctctgagctactgcattcatttgcttctcctttctttggcctgtctctccttcagttctctgcctgaaaactgcttcctgtcccctctttgctccaattcctctcctccccgttttagcccttagacatgccctttaacctcactatacctctgatacctcccgggctggtcacccatccccttcctgttctgcatctcacagacctgcccctagatccattttgtacctacactttcttctcgtttttttcaattctgctccatcctctttatttagtgtttccctccccagctcggctccttcggagctgtccacttgcccgcatatttttagaccggtttttaacttctgtattgccgtcctttcttggagcggtcctttaacactggggttcttgtcactgtgtcccctctctgttccctcccgagtcttttaagttttccacatgacagtctcttccccccaccattttgattcagccctcacccttcactctgctttatttgcccaccctccactgttctgcctcttgtcttcttttggagttctcactccaattgtgacattacgatgtcttcttaatcattctttcctatgtattcccccccaccttcctcttggagctgcc

SEQ ID NO: 67786 - DNA, 1013 bp, Homo sapiens
catatatctattaaatatttatttactgatcattctttctgttgtcggggagagtaacagatcttcagttcaaggaggttggcgttcagacatcaggaagaaattgcaaaataaagtgttttggatcctctgtgagatttttgtcttttgttcctccatttgttctgtgacatcacctagaacatgacctgacaggtcagtaggagctcagtcttcattgaataaaagtatgagtttctgaatgagagaatcctggaatagatgaagtctgtcgcctttcagtcttcagattcttgggattcctcaagccatgtagaggaaagaaactttcctattgttagttttcatttgcatcttaccaactttgtgacttaggacaagtcatttattcttaatctgagttctcgtgtctataaaatgggcttaaatacctattttgcttgccacagtctttttatttttattttttgagaactaaataccataacgctaaagttggtaacctttgagtttgctggaagaatgaaagagaacaattaggtaattaaaatgttcaggtaagcgagcatgtgagggtgctgcaaaggcggcgtgatgaaattttggatcagtggagtggcacatgctattgatttgttatctcttggtctttgtacaacttgtaatttgcccccaggtagcagatagtttgaaggtcttatcagaaagtgtctcatacacctaaatgttaacaccaggtcataggccaaatagcagttgtccacatttgtggaggcctccgttactctttttctcatcatgacacatggcctaggtttgagtcccagtcccacctcttacctgctctgcaccctccgacaaggccctttaaactcttggtgccttaggcacgtcgtcttaaaaaggagaatatagtagtgtttactcatagggtaactgtgctagttaatatgcttactgtgtgtcattattagtgctgcactacctggacctggctttatttttttttttta

SEQ ID NO: 67787 - DNA, 665 bp, Homo sapiens
gggaaatcattttacttttggacaagtgagaccagatcctcagagatagtttgtgactcttgcaataataatagcaaatatttccttaatcttttctatatgccaggcactgtattatgtactttacatgtattaactcaaggaatccacataacaacccaatgaagtaggtactatccttgtacccattactcagaataggaaacaggccatgcatgctaggtgatgtaagctaaggattcagaggaaggagaataataaattacccccacttagaaagtactggtctgggtttgtgtgctctctcttctgcccacctccctcctctctctctggccctacttgtttttattaatgtggggttaatgccggtgatttcatatactaaccttgatcattgggaaatgtttctctcacgggaaggtatttggatgggcatagtacattctttggtttgtcttcttgatctctagtttagcttacttgttaaagatttccagaatgatctagcagttaattccagttccattttcccctccacctttttatttttagtgaggtcctaattggatttttttaatcttaatttttttaatttttacctttttagagatgagttctcactatgttgcccaggctggactcgaattcccaggctcaagcaa

SEQ ID NO: 67788 - DNA, 2564 bp, Homo sapiens
gaaactccatctcaaaaaaacaaaaacaaagacaaagaaccgttctttagtaaaccaatcaacagcgattaattatataaaatgtgcaccgccttaggtggtatacatagcactatcagacatggctcctgcttttgaatttcttactttctagtaggggaaaatagaatatcctcaccccacagtgtgttactgtggctcaaccacatgaatcaggaaacaagagtagaggccattcggagcttgcagtgagccgagatcccgccactgcactccagcctgggcgacagagcgagactccgtctcaaaaaaaaaaaaaaaaaaaaagagtagaggccattgtggtgggtggtgaaacattacaagtactaaagccattgcttcagctttctttaacagtgtgaccgctgaaaaactaaatggttagtgttttgggttgcctctagtgagacatggctagacgtgcagattctaagcaaaggttataggaacttgaggttctgtagacccttaaggggttgggtcaggggtgtctatgatgctttcagaatgagtatatgctgaattttggggtctgtatattttctgcagagagagaatttgtagatttcatcaaattctcaaaggaatccatgacccaaaaaagactacaaccactggcttagagtaacactgagccccatggcctcattttgtctccgttttactttactgttctagattgagacctgccttttatttttccctgatacttatttggaggggtccttgatgcaaagaactctattgttgaacatctaaggaggagtatgtaagctttcttttttggaagcttgggtattatggctcttaaatcttcatcttttctgtcattgtttagtaaaaatgtctttctatttgaaataatgattactgtatttctaggtgcaagtattcattcatttgtcatgtatttatatgctgaggcccatgctgggcagtggtcatagagagatgaaatgaccagatcctggcccttagaggcttttagtgatacacatgtaagtgctcagaaatggtagctgttagtctcctgggaacagctattatatagtgtcatggccaaagtcatagaggatatacagggtagaacaggaacacaggagaggttatctagactatgtttcattgaaatttcactgttgattcatctcattagctcattgatgggttgcaaacctttgcatgagagggtgtaacagattaggtgtttggggcctttgccaaactggagaggtacagttggaaacacgacagtgactgaggctgtagctgtgacacatgtattcaaatggaactcacttaaaaactattgactctatttctctacttttctgtcgacaacagtatacggttctgtttgcccttagtcactcaggaggtatttattggatgcccagagggtgtgtaatactggactggacccttggactggactgtttacttactagaagagcagatggaaatgattgggttgtggctctttggcaatattctttgctgtctcccagtagtcagtatggtaataagcttccctctggtgggaggtaggatagttgggctttggaaatcaaaataccagagttccaaacccagctctgccactttccatctgggtagccttggccaggtcagttgatacctctgagccttggttttctgatgtacaaaatggggatataactatcacccgccctccaggacttctgccacatagtagagcccaataaatggaagttgtattgttactagcaggtgaggattataaaccatggaggaattccctcactttattgattcattaaggataattattatgttgtgcagaagaaggagtattctacttatgtgaatgggggagtttggaattcctagttagaaacagtggctcaatctctcatttttggccacttttcttaggctttttgctagggcaagttttttttttttgttttttttttttagatggagtctcgctctgtaaccaggctggagtgcagtggtgcaatctcggctcactgcaacctccgcctcccgggttcaagcgattctccttcctcagcctcccaagtagctgggactacaggctagcaccaccatgcccagctaatttttgtattttcagtagagacggagtttcaccatgttggccaggatggtctcaatctcttgacatcgtgatctgcccgcctgagcctcccaaagtgctgggattacaggcatgagccactgtgcccggccagggcaaaggttcttaatccagggttcctgaattttttgtgtaagtccattctattttctgggagaaagtgttcaagtttttatcagattgtcaaagggattcttaactgccaaaagattaagaattggttaactggccaggcgcgatggctcacgccttaatcccaccactttgggaagccgaggcaggcagattgcttgagttcaggagttcgagaccagcctgggcaacgtgatgaaatcctgtctttaccgaaaatacaaaaattagccaggtgttggcc

SEQ ID NO: 67789 - DNA, 1601 bp, Homo sapiens
agctcacctatttaatgatactggaatccaaacattttgaacatttcttctcttcctcctcctctcccaatgaagactgttgccagaacagcttaaaaatgctgacagtcttctaatttgtgggggtgtttgcacacctggaaattaggaaggtggcataatagcatactgaattataactatattctgacttctagctacatttttaatacttactgaaaatgatgctttaaaaacacattcccatgcaagccaggctttaaagagcacacactgtagtggaggctcagcagaaaacagctgatcacagtgtgcctctaagatagctgtgttcatgctggtaatgagcacttcctaacctgagacttccttccccgggttgctgggtcagcgtgcaagaagtggtcggcttccggtctatctttagctatgtgggccacacctcttcaagtcaaataaaaatgatacttctggcccaagagcaatagcgtgccagaagtcagttatggagtatcctctggaaagagtgactagaaggtgaaattttcttttcctgccttggaaaatggtgctttgaaatgagggtagttgctttgtcatcccagtgcagagatgagcaaatcctttgccgctagagcaaacctcctattaaaattgctgcagttcggaacacagactggcacttgttttactggaaaagcaagatgccatcaggggagagaagggccaagccaacccctgtgtgggagatttggcctttggtttttattggcatgacaaagcaatacaatatttatttggagggagggggcagctaggcactaggatttcagttggtaagggaaaatacactgagtacctcctgcgtgccaggcaccatagggaaatgacacagacccttcttgcccagaccttagtacccagttgaggcagcaaggcctacacagccactgaaaataggtggcctgcccagggaaggctatgtgtgggcatgtcgggttagttatgttagagtaggttgtagtgattaggagctcaggctctgggaatctgggctacagtcaactccagctcctccgcttccttagttggactttgggcatgtgagtcacttctccacattctttctgcaaaagagggagcaccttcctgatcaggttgtgagaaatgaacaccgggcgtagtgcatgctggataagtgtcagctgtcatcatttaactagaccccagagaatgagtggaactaaagcagtggcatgaggtaaggaaggacttgaaggtggaaatatgcatattgtattccgagaaaggagaaaacttgtctggtctagctgagggcttgagggaccaacattatccgtcccgtcttttggaagttttaacctcatgcattactgagctgctttcttggtacttaccctagcaaccaccctaacaaaaaaatagctatgctctgggtaccaatgtgatacagaaaaaaatcactcagtgcccttggctgatttgctagattaggtctttactataaaactggagtcggagtgagggaatcgctttcatttctcctcatgaaagtgcagactgtaaagctgactctcatt

SEQ ID NO: 67790 - DNA, 960 bp, Homo sapiens
tgcttttttcagttcagcctgctaataggtaagtgcctccggaagaagatggatgttgggtgttgttactttctccttttcaaggacctgttgctgaaagtgcacccaataactccctgaagagtgacacacgtctgactgggggcatgagatatctggcaggccactcaggagaatggcatttccatgagaaatatgcccagtaacccttcagatgcctgaagtgttgtttctatcagcagtctggcccagctcttggcatgcaccccaaaccctgattttcttactaggaaggtttagaattcattttgcaagagttccaattttgtgacaccctagagagccttcagttatctcaaggaggtattctgaaattctgtaaaccagagtttgtcttaaaaaatagggagtgagattgaatccacgtcactcagcaaggaggtggggtgatgctactgcaaaagcttaccctccacatccactgttgtaaatggaaggattgaactaaatctggggctctttgaggtgaaagagataggagcagttgtctcagttagccttccgtctctcttatcgctcccaatgtgaccctttggagccatgtaaaagaagcctgctctatagtcaataggtagctctatagctatttgaaaatagctatcagagtgccccattattctctttgccaatttaaagttccctggtattttatatgagtggatctttattacctttagaaacctttggaagtcctccagataatcagtgatcagtgtgccttcttttttttttttttttttttttccgagacagggtctcctgctatcacccaggctggagtgcagtggcacaattttgactcactgcagccttcacctccccagctcaagcaatcctcccactgcagcctctcgagttgctgggactacaggcatgcatcaccacacccagataattttt

SEQ ID NO: 67791 - DNA, 782 bp, Homo sapiens
aaaagcctagtcagttgtcttgcagaatgtcctcttcatgtaatgtgctctttggacctcttcagcatcctcagctgccttccaggaccaagtgtggcctctgactgagcagggggttgagcaccctgcaggtggtggacgcgggactgctgcctccctttctggacagggcacacgtatgaattgggcttacgggctccatagggttgtattgaataattgaacgaattgtgagctagtgttttccccaactttgactgacagatagtgggcttgcactttgcttagggaaagctggtgctgccacctgccctctcaccccatctctctctcttgctcatggttggaatggccatatgaccacacagtttccatgtagtattccaggcagggagtcctagctgattagagatgacattcccaatgaaacttgtttgccaggcctggtcaaagcagtccaaagtcagaagtctttgtgtccctgtttttgtgtccatttcatgtaccttggcactttaaggcttgtcctgcaaaataaaacattgcatcatcacttgtgaaggcagagcttgggagtttgcactgctaagatgaggataggaaagaaatttatgccgcagggcctttgatgctgcccactcacctgtctgcacagccagggcacggccagcgggagtggagaagatgagcgagaccaaaaccttgccgtggggaggagggtggcatagccattgataaatcgggacttgaactatcccatcactctaaaaatattttttatc

SEQ ID NO: 67792 - DNA, 895 bp, Homo sapiens
atgtcactgccacagctgctctgggaccgccactgagagtgggaaggaggcggggttgagggggagcttaggaggcggggttgagggggagcttaagagtcagactaactttctatttctagcttgaatgctttttttcctccagttttcatctttgtggaaaattggttgaggcaatggagtcactgctcccttctgcagcagtgtggctcctaatgacagagaacattggccaagctcatctgagctctctgatgcacagcaggaagtagaattattcaattcagtgtacctctctggaatggggcaagaggttacttttagagctggctcacaatcctcctgagaataatttctcagggtaaagtacactcttgatagctcatggtggtcacaagactgaggttttaaatcctgggtctcagggccaaatttgagtcaagccttcctaggattcaagaaatctgacagcataggaaccccctgaggcagcttccaagtgtcgtcacacctgcccacccgggacggtctcagcgttctggagacagaatcctagtgccccacttgccttggctctgctgtgtgtgttcccgggtccccagcctctcctcagcctcacttgctatttaactagaaatagcattctctacgcatgctttctttgaataatatgtgaggccagacttcgttccctgtttctgtgatttttaacctctgcttttggcagtgtgagaggaggcatggcaacagtgaggaaatgatttccctggccccagtcctttcttaattggtttgcttactgagatgaccaaccctccacatctctagccagtgctgtagaggccgagaagaggaattgtgcctagggagaaacagttttactggggcagaaggc

SEQ ID NO: 67793 - DNA, 581 bp, Homo sapiens
tgtgtgtgtgtttgagatggggtcttgctgtgttgcccaggctggtctctaactcctgacctcaagcgatcctcccttctcagcctccctagtctctgggattgcaggcatgagctcctaagcccagcttcacatttattttcaaaagctctttgctggagggtctgcagagccccaccttggggtatcattgcctgcacttaggagactgtaatgtaaatggtgccttctttatttgccttccaggggcacttccttgatggacacataatcaggtcaactttgacctcttgtccctggttgagtggggaaatcccagagagaggatcacgtggttgtaggaagacaaacttccagataactctttaatagctttaagcttaattcacttaccatcttttttgtgggggtggatggcagatcttgttcattaaatgagtatttattgactttatattaattaagcacctactatatgctaggcactgttttgaactcagatagcccccatgtgtctgggcgtgggggagatagatataatcacatgaatgcataattcttcagacaaggaatgttattgg

SEQ ID NO: 67794 - DNA, 2015 bp, Homo sapiens
gtgaacattcctgtacatgaattttggtgtacatatgtgtgcacttacattggtgtgtatacctagaagggaggcagttttgaataattcagtttagcatgttggacacaatgatttaaatgatgtctccaagcacgtatcagtccctgaaggggtaataatctctgaggctgatggcagaggcagtcaggggatctctctgtgttactgagcttgtggtggtgtgtttttgtatcttcggggctgaaggagtgattctggcagggtgagtgtgggttccccaaagctatcaccacattcttgccccagctggatcgttgccatctactgaggcctggctggccctccattacctcgctgtggctctctctgtggttttgcattgagtctgtggtttgcacacatcttgatgaccccatggtttttacctgccgggccatcataggacagtgctctctgatgaaatgctggccatttgtggcacagagaagtaggtgtcaacaagaacacctagcagtgagacaagtcttcaccaagactccaaaatgaaaggttcagccttgtgggcagtttgtgaggagaggaaagagagcaagtcaagaaatgaggctcttaccccagtccctttacagggcgaatgtggagcccggcagctgtggaccagtttgtctccatcatttgcaggtcagaggttaccctcagctcctcagctgcaaatggaagccctctatcaaacggcctttgccagaatacttaggctgtgaccttccccctatgcagctcatttgcctgggtaaatgagtagagtgctttctgcgtggcagatttaaatttcaccactaattgatgctagcgtcttcaggggaaaatgcttgccattagatcacaggcctttgggagacagcctcataacaaatacatccaggacagggggcggggatggggaaagtacagaatgcagctgtaccgaaaggaactgtgggacgtgcccagagaaaccaactgagtacttttgaggcatgcccttggggactgcgcatgtgcatggttgtgccatgtgtgttttgatggcctttttttttcttgctagtgtatagtatgtacaggacaaacttggagccaaactgtctggaatcaaatcccagctctgctgcttacaagcaaatatttaacttctccattgttagtttccttgaccataaaatggggataatgatggtactttgagtcatgagatgattcagtatgttagagacctcataacagtacctggcaggttgtaagtagtcaatttgctactgttgttggtgttattattgaaatgatctaagatgcatcttccactctaggcaggcccctgtgctggccatccccttcatttgccaagtcccccatgcagaggctcctggtcttcaagacccagtatgggtgtctccccagggagagtagcccacgtgacttgttctcccttctgcattcctcatgtcatagcagggcgggtcagagcatggactttggaattggtacaattggtttaaaatcccaactgaagggggatgggggattaagagaggatgcttaaatggatataaaaatgcagttagaaggaataagttctagtgtttgatagcccagtaggatgactatagttaacagtaatttattgtatatttcaaaataactgcaagatgtgaaatgttgccaacacaaagaaacgatatatatttgaggtgatggatatcctaatcatcctgatttgatcattacacattgtatccttgtatcaaaatatcacatgtatcctgtaaataggtataattatgtatccatttttaaaatacattatttttagaatagaatattaaaactatgaatactcaaagttctgaatgagtgtgtcatttattacattaattgtgctgttcaatttaaatttatgatcctccaaataaattgtcaaaatgatttgaaagcaggaactattatttatcttatgaaaagtaagccccataact

SEQ ID NO: 67795 - DNA, 2020 bp, Homo sapiens
cccaaagtgctgagattacaggcatgagccaccatgcctggccagaaggggcttgttaatgagtaacaaaagatacttctatcactcaggaaattccaagactttggggaactctgtgctaggagccggggacaaaaaccaaatatatatttcttctactacactgccccatcccctcctgcaggggtcctaaatttaagaccttgctagtgggcttcctgcacccttctgagggtgcgcaggagaggaggctgccagcctctacatctggaaggagcaccagggagggcccagcctggggctgggagctcaggggccagtgtgccgcggcagcacagtgagaatcctgggcctgtgtggggcttgttcttcactttacaccccatacatggtttattagttaatctcccgtgagccagaggacagtattaatctcaaagtaatgctaatccctttttacaagaggaaacagaaatccccaagtcctctggcagaggccgttcacagcccatcagaatggaaaaggcctacgttccagcccttttcctgtcttctctgctttaggctgatgaagctgtgagttttatagcattggactgagcagattcagaattttaccaaataccttcccacttggaaaacagccaccctgcaaaaaacctccgtgtttccctccacattcatcatagccaccagttcctagagctatcatgaaggagagttggcgggacgagagctgttaaattcagttagttactatttccctgcagtcagcctagatctatgtaattctgtctttcagagaaggcagctaatttcagtatagatactcccatctatcactgtaacagtttaataggtacggttatagcttgaatacaccaacaggctttatgtgagtaattgccgtatttgcactgctttgaattgataaagtgctaaaatatgaggtatactgtttcatatgctgtgatttttatgggggctgtctgttacttaatctctctccctccccctgtaattctagttttactaacaaattgctttcccacagtccaaatagttttaaaacaaagctttctccttttttttttttttttttttgctaccattcctcaccaccctcccgtttttctgcttgcttataagttaagcacaagtcacttgcattccagaaattccccattgccataaaggcaggcagtcagctcgccagctcttgcctgttccagataagcagggttcatttagcttgtgactcggcattgctagcggatttcctcaggccccagtgccctgatcagaacagtgtgccctggcacaccgcctggagagcccagcagccaaggagaagtagagcttgtttcacaaagtaaccctggccttccatccaagacagaaatagtctgggtggcggcccaaggccccgagacggttccagccggctgctttgcctggctgtcccggctgcactcgccttctccatggtggggagctcgggcagacaggttgctctggcctgagcgtgccaaccaggcccatggcctgtcctgccatatttgccaaggcagtacaaacaggacggtacagcaggctgtcctgtgagagtggtcccaaggagcagtacccactctcggctgcaggaccttctcgggcccttggtggagctggcctgactgtgccattgaattatcacctgggggctccggtggcccttgctcttgctctgtgtctgtctgttcatctcactcacacgcacaccttctgtgctgccttgctcatgaggtttcacacccagcaaatccccatgcctctataacccctgtcagtttccttgacctctgcttttttcctgttcatttcaccaaagccagtgaagcacagatgaactaacctcttctcctccgtgttacactcactgtaaaaacatctaagacccgcataaggtcagtctgggaaggctgagccctgataaaaggcgacagagcagcccattagcaagaatgtggccagcttctgc

SEQ ID NO: 67796 - DNA, 2692 bp, Homo sapiens
acggggtttcacaatgttaaccaggatggactcgatctcctgacctcgtgattcgcccgcctcggcctcccaaagtgcggggattacagacatgagccactgcacccagccttgtaattcccattcttgattgtagctctgtcccctagaaccattggaacaagacttttctacatggccttgttcagatatttgaacatagtgatcttggctgttctgagctttttcttgttctatttccaaagattaacttaaacatagaagataattgcagccagtagggagggcttttaaaaaagaaggagagaaacagaaaaggcctgcagccaaggctatgctttggtgacatgggtctttggagatttctggtaggtaaggatgcctgtgagtttaaggttgaggctttctcagatggacttgggagcctgcagtagacatggtgggtggaggtcactgttggtaagaattctgccttctgccactggcgggtgtgggccagagtcacccctagggtgtttccatgtaggaacagtggggtgttctagacacaaatgccttaatatccagcatctttgccagggggtctgctccaggaccccagcccttttcctgctgtggtctcaggcctttggcaagctgcccgtgctctttccagcgtcctgtttctcacctgggttgccagctccctgcagccttggtggtgtttgcagcctgctctcagtttttttaatctttttttaattgatgtctaattagtagttacgataaattgcactagccaagcaaatgctacctttcctaaattacgccgtggtattgtgtacgacagcagcagggttgctattttaaaatgggattgcgtaaaataaacatgtgcccagatgacaggaagtactaagttgatgattaattgatgctctggtacggcctcgtgctttccagtgcttccatttgtgtgacgatccatctagtgaagtttcagcaggtccacaccactgataattgccagatcgctaatttgcagttcgtctcctgccctctcatgccggggccggtggccattatgaggcaatgcagagcagtcctcagtcccgctgaaggtcagggtcaccagaaggtgatgtgcggccctcggctggccaggtcttctgcagctcggagactgcctctctacactgagactcaggaacggtgacattgctgcattattccggactcttgagactggtgctatttgtcctgtcattttctttgtattatgtagggctgatattcagggaaagggaaaataacttagatttagttttatttgtttttttcaaattaggagatgaagacttgagcctgctgacacatacccaaggcttgctcatatgtgaaataggtagaagtttaaatatgtcttgagagcagttgagaaaagagtcagtggaaaaattactaactagtgctggtgagcagggtctcgacagcacagggggtacgggtgtgccatctcaaaagctgccctggtgcttaggccagagggcttcacccaagtgtggtgctgcttctgagaaacgggggtgctgtggtctgtaccccagcctggtggattaataggaagcagcagaagcttgagccaggtgtcttctggaacactaaggaggcaggacagtggcagagtccccggactcagaccactctgcctcttagcagctatgatctggggcaaggacttcacctttctgaatcttagtttcctcatgtgtgtattctctacctacccaatagctcttcccatgaggtgtgggagattaaatggcatcatcgtttatttaataaacaagcaaatggtggatggggacaaagcacctagctcagtgcacagcgtgtgaccactctgatatggaaagtgccagcactctcccaggcgagtacagcagtggcagctcctttgtaactaggcgttgcttggtaggatgtccctggggttggtccattaacctccttttctctcggggaaagggccttggtgcaattaacagcttttaagccagagaattgatgcctcttgctccagtgttcttgaagcctcaagaagtctgggacccccagaaaacaggcaggccagttgcttttatcttgcctgatggctgtctctccagaggtagcagtgacaataacaaccaacacgtggctctcggaagcctgactgactccagggcccggtgctctctactgtcggcactgtttctgttgtccaggggcagcacccacagtgcttcctctgtgcaccttcagcaagacagagtcgctcaaagccagtcttcagaagggacccagggttgctttagccatgagaccccatgtcagttttcacagtgacttcactgtcctttcgacaaagtccttgagatcttgatggctcacagtggacttcgttcccaggacagggtgagtggactcagtagacagcttggaatccactctaagctgaacagtgctcctctgcccacggtaggatggggagggagtgggagcccatccttcccttgatattttattctaacttacgtatttaattgacttttactactttttttcttgtatcacactatacaccaaataagttccagaatgatcacagaatgaaatgatttttttaactgataaaaagaactagaaggaaaaaaaacaatagctgatacag

SEQ ID NO: 67797 - DNA, 769 bp, Homo sapiens
tcggcctttccatttgacagatgagactgttggggctagagataacagtgcagcctaggttaccaggggacggccctgctgctctctgggctcttgttcaccagctgccttgggacgttactggttctgggatcctgccttcctttgatctgtccacatagctgcccgagggcacgggggtgcttctcacacccacgtacggggtcattaatttcacagctagccaggccccgtgtggacagggacagatggcagtgggcacacacatatgtggtcccaggctcagtctggtgggacaggacattcaacaggtgattgcaaagccgtgtctccaggggaaggacagcttggattctccatcctgagccctgcagagtgaggtcttggccttggagttgtttaccacctggggcggggagagccgacgccggacgagcctgcgtgatcactgaagggctgtgaccttgagccgggctttccctttcctggcgatgcaggcgtgcagatggtcagcggcggccagcagggactttcctccaggcaccgagctggcagcagcagacccaggcctagagcttggttggcagcctggctgccagtgatggcaagtggcgcagcacagccagggcaggagtgttctttgggaacagggtctctgccgccactttgtttgaccttggaccggtattctggctttgtgaggcctggtgtgtctgttttgtaagaggtatgggaagctaatcggtaaggtccctgtgccctctgtctg

SEQ ID NO: 67798 - DNA, 774 bp, Homo sapiens
atagtccaggagtgaaacggtggcggattagaccagagaaggacggtgatagtggaaagaacagggaattccaggtatcttgaaggtcaaggctacagaatttgttgaagatggcatgagactggggcagagagaaggtgcagatgacgccagggttgccgcatacgacagtgtgagtatctgattatcctttgtcttccccactttcctgtgaaacctacgagggcgggagctgtgcctcccaagccgcagccagcacccagcattcgctccagggctccaggccaactgccctggtggagaatgagctgtgttactccgcgcggccaccaggggtcagcagagcgccgccctgcccagccatggccatcccgggaagagtagaaagcccggatggcggctttttaggaagtaaggccggattagaaggagaagcagcagggactgaggaggaggcgggttctgagaaatggggctggaagcgaagtgtcccaggagctggccgagaagcaggggaatgagctactgtttctgtcactgcatccatccacccatttattccaccattcagtcacaggccactcagggccttgcagagccgggtgagaaactcagtgtgtcctgagggcactggggagacaagactgggtccgatttgcaggagctgagaggaggggaagaaagtagagattcaggacatgcaagctcacagccaacctgcctcccaggtgggcctgaagagcatgcaattaacataaatgttagcaaaacaaa

SEQ ID NO: 67799 - DNA, 1626 bp, Homo sapiens
gaggcgggcagatcacctgaggtcgggagtttgagaccagcctgaccaacatggagaaaccccgtctgtactaaaaatacaaaattagccaggtgtgttggcacatgcctgtaatcccagcttcttgggaggccgaggcgggagaattgcttgaacctgggaggcagaggtcacggtgagccgagatcgcgccattgcactccagcctgggcaacaagagcaaaactccgtctaaaaaaataaaaagaagaagaagaagaagaagaagaagaaggaaaggcttgaagctgttgaagctggcgtgggggaggatttaatgagggggcggagcccagagggataacggactgagggaagcatgtgacctccaagctgaggggcaatgggagtcatggcagccatggtggtcaggtaagtaacttgcagaggcatctttgaactgtaggtcagaagaccagtgaggacgcgggggcagaaacacagtggggagaagatgggggcctgcattgagggaggcagggagagaaggggactgctaggagagagatttacgggtagaattgaatgtaaaagtgtctgattgaaaagctctaactctttaagagcttaaaaaccactcccctgtttgtatcttgaatctcattcctgctgggacacccagtgattcatgccagggcacagttgtttgctgtatgggggtggtagtgagtaagcaggagttgggtaaacggaggttctgacacctcccacccacgccccactcccacacacagccccttaatagagtgggcggggaaaaatccttactaatcactgggtatgaagcgagaagagtctaagtttgtatcttccgtttgaaaggtaattgttttttgtttttttcttttcttaaaaaaacacactggcatgaagcgcacctgcgtgcaggcaaatgaggcaaggctgagcccagagggcgagcgagttactgcgcgcgcacctcacccgccccctgcattcccctccttcgccggcaggtggagatgacgggcagcagcgtcttcgactacattcaccctggggaccactcagaggtgctggagcaactggggctgcggacgccgacgcccggccccccaaccccgccctccgtctcctcttcctcctcctcttcctcttcgcttgcagatacccccgagatcggtaattctaagggctcctaaagaatgaagtctgagggtagatcgggggacgcccgctgtactgtatccagccatgccgcgtttatacaaatagcagtgaagttagaactgtgtagaacgaatctttgcaaaaggaatcggagtataaattgaggcggtgagacttggttccttaagcttgccaaactcccaaagattcgagctacagaaagacccccctggctgctgaaaggagttgggagaggcttaggtaaataacaaggcaggcttattgggaatatacaccggctgtgtctgtaagtgcacaatcacattacataattacgttagggccgggcgcggcggctcgcgcctgtaaccccggcacttcgggaggcccaggggggcggatcacttgagctcggttggagaccagcctgggcaacatagtgaaacctcatctcta

SEQ ID NO: 67800 - DNA, 999 bp, Homo sapiens
ttgtccccttctccaatcctgaacttccccctcttctgcggggatccacactcccgctctctgcacagtggtggcctctgcaatcgggatggacccatcttgtacccaactccacagaccctaagctctccctgaagcccctctccccacggcaggcgcgattctacgaggctgcctcgcgcaaccctaccaccccctccaatccctacggcgccccgttacccggggtcctcgtcctccccgcaagcccatcccctctgcgggcacctgcgctcttgcagtctgcgcttccgtgcgctcacactgaagcccttctcggagccgagcccgggccccgtttcctgcagaagcccccgccccatcaaggtcccacgcgagcccgggacccccgtcccatccgcaccgcccccacccctagccaccgacctgtctcgtgcgcttttcggaggagccaggcgtccgcacgatccagctcggacactgggggcggcgaagccccggcgcggggaccgtggccgggggcgaaggacccccgggcgcccccgctccggggccgctgaggcggcagtagcgacctccggaagcgaagacgggcaaggcgagcggcccgagcccaccaccagccgcctcccatgattcgcactacggccgccgcgcgccgtaccgccccaccggcctccggtaggttgcaacccatgtcactcaggatgaatggcttacccattggctatgcgctcgccactcaggtccggcgtgaactgtccattggtcggaatggcagtgattccctcctctgtcatctaggccggtagtgcccgtccctccttgattttgtaccggactacgaatcccagcgatcattgcgctcggggaaagccgatattcagaagtcgcaggcgagatgtctgctgggaattgtagttttaattctatcttttttaacggagtacatgccgagcacctattgtagttgtttcttggttgtttctctttctttct

SEQ ID NO: 67801 - DNA, 641 bp, Homo sapiens
cggttatggtgtattacagtgcaagaatacaggtgaaaatcagcccagggaagacgggcattcggcagagcctgggggcggggtcccatcctgaggcttccagccctcttgtccccatggaatgtggacagcgctcactttacccagcaacagtgtgtgacggtacatgtggagctttgttgaccagggaagctctcggaagcctcactgtccagaaccttcattacccctgagacgcgtaaacccagtcgtcctccgtgagactgaggtgacctcaggcgccagcccttccagaggtcagctgataccctgtgaccccagggccccaccctgagtcacattgttactagcctagttggcccaaggctgataggtaaaccaagataatcttatcaggaacgacattccagagatttagaggagatgacctcaaaggcactgaggacaaaggtcttacctctctttggggaaggttaaattcttcattacactgaaccaaacaatgcaggccgactccagaagctgaaaaaagataaagaaatgaattctcctccgagtcccctgagcaggaacacaacccagctgacattttcgttttatttatgtatttattttattttattttttactttttttttttt

SEQ ID NO: 67802 - DNA, 1368 bp, Homo sapiens
ttcccaacctcaggtgatccgtctgcctcggcatcccacagtgggggggttacaggagtgagccactgcgcctggccagacgccacttcaaaaaagaaaaaaaaagtaatttcacctgtttctttttacttttttttttttttttaatgtggctactggaaaattttaaatgaatgatgtgattctgtggtgctcctgtgggcagcactggcctgaagcacaaacctggagcctccagcagggggcagtcctcagtcagagatcagtgagtcctcccaaggagccgtgaggcctgactggccactgcttcccctgtcaaacagctcagaccctaggtatgtactgattacataaccctggggcatgccaggcgctgtggctcacacttgtaatcccagcgatttgggaggccaaggtgggcggatcacaaggtcagtagttcgagaccaacctggccaacatggtgaaaccccgtctctactgaaaatagctgggcgcagcggcatgcgcctgtagtcccagctactcgggaggctgaggcaggacaaacgcttgaacccaggaggtagaggttgcagggagccgagattgtgccactgcactccagcctgggtgacagagtgagactctgtatcaaaaaacaaacaaaacaaaaaaaccctagggcagcaggctccccggagggacttgccttttcctacaggcgccctgccaacgaggaatggacattctcctacgtctgcttgcatggggcttcccctgcacccctcacaggggtgcccctgccaccagttaacaagacagtcactgacagatggactctggaagccggcagatgtgctgatgccttgatcctttccactgtcaaaaaaaatagccaatctcctagaacctccttgtgaactagaaggcaggaaagcttcatttgaaagggcaccagttcccgtacccactcactccccagatgaatcaggaaactcaggactgatgtttgggtatttaaccctaacccaaggtcctcagcctgactcctcagggaggacaactgatgccaggatgagtttcaaatgtcacctggctagtggggaagccctgacacctcccccaagggagccttcccctttagagacccccaacttccctctattttctctaatgcataatgggggccctgagagttgcaaagaaacgtttgacttttccaccaaaatacaatccttgcctcgtctttgtgtatctttggttttttgtggtctttcttggagatggcgtcttgctctgttacccaggctggagtgcagtggcatgatcatggctcactgcagcctcaatctcctggactcaacagatcctcccacctcagcctct

SEQ ID NO: 67803 - DNA, 2823 bp, Homo sapiens
gggccatggcctcttgttccatcccttatcctccccctgaaagaactgtgcttgctccagtctaacctggctgggggaggggtaggagtttaagggcattaccactaacaccgggacacatctacgccagatttcccaacagaactagtgttcttagaagaagaaaccgacaaggtgctgtggtcacataagcaggaagagccccatcttggggattcataatgcttaacgctgcacaacttccaggaagccccatagtccagaaacccacacagctctgctgtgaagcacttggggcacttctaaaccttgcttgaccacagaagtctctctcccagggagcacagacccacatcccctccctcccaggcccaggattgcctgctgggccccgggccccagtgagctgggcgtcagtgccacctgaggctgagggcggtggctgtgcaccgtggagagggccttggttctgaaccaggggtggccccaagctacctgggacccacccacaggcaggcctgggctgtggcctgagaaccctccaagtactttattacaaaagccccatgagaaccgctggaaacaggctcagagtcccaggtcacaaggtctgacccaccctcgtcagtcccacacctctaggccggaggcaagcaaacactgagcagctggaggaggggggacggatcccaggcccctcctgagggcctcacatgataccggccctgctttctctccctcctctgactcacctccagatagtggaaccccttctggctccccatcctacactcttccaattcccccgtgtcaccccaatctccaggactttaaaagtgctctccaaacatgacagacactgcccagtggacattctgcatatgtaaatatctatggggtggggtaggagtgaggaagaaattgggttcaggagggggaggctggaaaaagaatccagtttttgagccaaacccacagacacagtgttcacaagtacaggagttggtaaaggaaaaaaacaatctttttgaataattttaaaaagctcccaaagttccccatgaatgaccacaaaaaggcttgcgtgagagcatccaactccttccgtctcaattaactaggacacaaagagaagtgatgtaaggaggaaacatcacgagcccaggccccaaaaggttagccacaaatggagctatctctgcggaaaggcccgcagctgcccaagcgggagccaatgtattaggcgtgcttgcctgaaggttccagggcatgtggcagactcctcctcccaggaccctccactgtcctttcgcttatgtccctccctttgtctgccttggggctgctacccaaacatcaaggagcgcctcaagagcagctttttctatgaactctcactcccagttcaaaggggatgggttctatttcaaacccaagtggcccagccccacagatacccctgggcagaggtcaagggcaactctcaaaacagaatgcaggacacaaaactctttctgctgcttcaaagtcaacaacacaggtgacctgacccatgtgcaccttgtgttgcttccccgactagcaaacttggaatggggcgggggtgcaggctgcagtcctgacaagggaggtgccttcccgctggggtgcggcccacagaaaccaggcgtggagcaaagtcctcactggacacctcacccacaccgaaaagggccacatgactgggaaaactggttttgtcccaagggagaagctgttactcagtgacatggcaaactgcccgccgccaggagctgtgcagacactgggaggtggcaccctgatgggaatactgggggcaggccagggccacacctcaagagaaagggagagacggacagactgagcgggagaaggcccgggacagactggaggtatacatgctggggttccataaagaaaagctaagaacaacattactctcgacacttaagtctagaagggataaagctgagagggacatgatcaccacccaggccactaatattttaaatgccatatctgtgccaggttgcttgactacctccttttctgcactgacaagaaacttggtccacaaggcaggtgcctgatcatcagggctgggtcagctgagccggagtgggtggcagcctcagcacgccctcccttatgtccaacaccgcggcacagcaggcgacagtcttgcccagggtcagctgaggcctccttccctgtcctgatgccactcgctggctcggacgaaggtacaggctactctacatctaacacctgcgggcagaggacaaaagaccattcaaggaactccaagagccttaaccatcatccagaatgattctagaaaggaatcaccaaggtagagaagtgcagcattcaaattcaccctacaaagacctgagccaaagagggattctgcacattatcgatattaacagctccaggcacatctgggctcaaagagaatcaaccatacaacttttcacaaaacaggcagtgactacttgaaattttgtttccctaaagttgagagaggcagagaaatacataggatttttttgttgttgttaaactgctgacggttgataaaggggcactgagacagcaacaataaacagatcactgcattctcagggccctctggccatgtcaggccctcaagcccctccgagccctgggctaacttctgtccacagtcacctcaaggggtcccccctcacgacacccaagatgctctcctagctaaacgtcctgcgtgaacacgaggtcttgactatattcttcagactctgttcaacagaaagcaaa

SEQ ID NO: 67804 - DNA, 3280 bp, Homo sapiens
ccctagcctggatgcaacggctttcacactttttgacactgacccacatctgcttctttgcatttctcccaaacaaaagtttccagaagccacatttaaatgcattctgctttttctctcctcttccatttccttggttttccaatgcaaaagaaaaagatcaataattggacttcatatcccactagtggctataccccacagtctgaaaaatagcacaccagatccaccacagtataatggtatgtatagagatggggtctgagtaccagccaccccgggttctaactctgcctgcagcacacacttgttttgtgacctgggacaagtgacttcacctctctgttttggtttctcctcaaacagcagaggtaaaggttaaatgagctaatgcatgagaagcactcagaagggctctggcagataatctttgaccttcaggtcaattgtgcacaaatggcactgttgccccttcggaaagacaaagacactgacttaggagatgaactcaagaatcacatccagtttgcctaactcccccaaccatagctgtccaccacccatcactctcagcagagggccaatcccgtgtggagagaacatggcagcacccaggcagacatggtggcttatacctgtaatcccagcactttgggaggctgaggtggaggatcattgaagccaagagttcgaggctgcagtgagctattaatactatgaggtgccactgcattccagcctgggcaacagagcaaaaccctgtctcaataaaagagaaaaaacaaagcttttggctctggagttcactctatcctttctgggacaactgacaggcatgaccaggaacctgatgggcctgcctgtgatctagccactgagcctaaccttcaaattaattaaggcatctgctttccaagtgcatattagtaagctgcaagcagcagcagcaaccctttatcgtggccagaaactgtagaaggtaggccagacacagaggaagggaatacgaagcctggtaaaggcagtaacaaccctagcccgactctaaataaagtcttcatgatagaagggttctctgcacactcagaaaactcttgggctccaagaaaagccggggaggaactcagttactgaatgaacaaaaccttatctgactcagccagatcccaaaggagtgaagaatcctggagctggatgagaccttgttcattcccctctggagagagtaaaggacttgcgtggggaaactgactagtttgcagtggtatgagattctagatccctggcttcccagttctcagaagccctactgagactacagcactgactcggactctaattgcaaaagatgaacacaggaggtacagtcagcattaagctccagacagtatgaccatttgagcatccataaaaagacactgagcaagcaagaaatatcttaagatggcttccacttagtgtcaaccccaattggctccctgcaattaaataagctgaccagaaccctaagagatgaaagataaatgcacttccttcaaaaatagatgttattcttacttctgtttatacaccaactgtaaaagttctgtttcaaattcttctctagtagggaaagcaggaagattcactgaatgctggcattgtgtgggtgtccccaaatgcactcatttgaccacaaggaccctgagaagtgggcattttatactcgatgcctactgcacactgccggggagaagccaggcctgaacagttttatctggctccaaagtccacagtcttcctccacatcctgttgccacctccgacattcaaaaagatgtcaccacttgcctgacaaacagggcactgagtcacctattcacacagatgcgaaatggcaaaaaaaatacacgagaaagatcctttatgcagaccagtttggccagaagcagcaaactatgctctcagcaaataatcctgcgttctgttaagaaaaaaaaaaaaaaaaagtaacaggacacaactaaatctagcaccaaccaagaggccgtatcttcatttttgtcaacaactactaagagtcaccccaatgggtgatgtgccagaaatctatttaaaataaactgcctatcgcacctcattacatcaccagtgaaactgtacacaatgtcttcaaaactgcatctgcattaactcctaaaagcaaaagcgttctgcagcaaagacaaggccaagaaactgggagtcaaacccatgaagtttggctccccccaatcaatctcatttttactttaacttatccccatgaacttgacatgccacccagacaaactggcagcttttccatcctattaggttttaattatgaaactggcttcataccatgttattcggagaggagtccctccaccaatgaggctgctcctacagtctctgatctgctgaataaataccaattgccagaaatctcaggagtcatccttttttcttagctgtgctgccaaggcacaggttaagcgcctggctcaattcagctactttgcttgctattcactctgtcactcaactctcggtgtgaatcggacccagttgctctggcactagaattactgttcgtggggaccaaaattaagttctctagaatctggtttgacttgatagctatccacggagacctggaaatagtttcattagcaattttcaccagaggtatttactgtaactggatctgacctctatggagagatgtttctacaggcccaatagccataaaaatgtaacaaaaggaagtgaaggaccctcagacagccatttctctcccatcagggaagaaggtaaaagatctaagagcaagaagcagaggtgtaggcaccgttaaataaattactaaccaggcccaatatgaaattgctctacattcaactgtatggaaacgcaagagtcaaaaccgttcatctttaacttgccaggcagttgaacagccaggtccacaggtacaaaacaattctcccctgggatcagccttcctggctgtggaaaaaccacagcagtggcttactaaaatagctggctctacttagagaaaactatggcttataaagaaatcaaaaatttaaaccttcagagcagagcaaaattgtacctgggggagaggacaggccatgaattagtcattttggggaaccgcatttttttcttttaaagagcaaatttgaggggaattaaaaaaataaaggagttttaaaaaataaaggggttttatgacgagaacatccatatttccatggtcacaacagacttt

SEQ ID NO: 67805 - DNA, 3875 bp, Homo sapiens
aagaggctacttaccatcccaacccattgtaagacatacacttctgacataagagaactccttagaggtcgaataaagcgtgtaagcacctttgagtaatgcacctgcccccggagagggggcccggaagcccaacgagggcttagcgaacagacctttgctaatctgtttatttccttgaactggagtcgggctgcgatgggctgcgattcccaggacgatacatttaattagaacaaaacagaaaaaaaaaatgttgtaaaagctcaccaaactgctgcacttgtgtctctgaatgtgggtggcatttcttttaaaaggcaaagtatggtctgtgaaggagaaaggggaaaggggaggtgggagtggggagaaggggtcgtacgtacagcctggcaagggaagccctggctgagaccccccggctaaggaagggtcctcagcggctccccagccagggctgcgacggagtagccatctgtccagagcgttctcttcccctctccacccccattccctccaagactcgctttcctgccggctgaaacccaccgtccgtgtccaaacctactctccagccgcctcttctctcgccccaccaggaaacagtgggcgaaccctgcaccccaactccttctgctcgagcaggggaaggaaacggggccccaacctcgccctgaaacgcgccgggctgaccccattatcacccgccagccagagaagggcgtggggggcccgcgtttcggacttaataaagagaagggggcgcttcctttaacgccctgccaaagcacaaggaaatctccttttctctcccggaagagacggtgccccattttaccccgacagaggggggaaccccaggagaaagcgcgggaccaacttcctctccctacaaggcagggaaaccaaaccttacccccgcaaaacaaggctgagaatcctccctcacgtcacctacctacgaaaagcgagaggacccctgccctttagcaaaaacacggggaagagtcttctctaaaaaaataggctggggttttcatcaaaagggctggagatgcatctcccccctccccaattcggccttctaggggatagctaaaaaacaccccccgccaaaaaatacaagtgctatagagcacccacccaaatgacccccaattacaaggatggagaagggacctgaatgaacccccaccttctgcctcctaagctaaagtacctatcatccaagtaggacagggtgtgcctcccccaggagaaaggatactgccgggggctgggagacccccaaccccaaacccctaagagcggggctgttgttcgagatccccccaaaaagggtccggagcccctcccccatccccttccccgaagccaggcgacgggcaagcgggcccgtagctgccagctccgggcgcaggggcagccaggacccccgtgggtctccgcagcaccccccacggcgccccctccccaggacaggcggacgggcgcggggggtccgaggggcgcctcctcaccttcccctcagcatggcgcccaaaaaagacagagcgagagcgagggagagcgggcgagcgccgcgaggggggggaaacgcatgaggccgggagagaaagcaagcgagaaagagcgagcgagcaagcgatcgagagacacccaccgaccccgcccttcctcctcctcctcctcctcctcctcctccgcggcccggcccaacatggcggccgccccccttcctcctcctcctcttcctccccccggggacgcagccccggcccaaccgggggcctgacctgtcgtcagggagcgggaggcggtggtggaggaggtgcggggtggccgggcgggcgtcgggggaacacggaggaggcgaaggcgttgatggcggcggcggcgatggcggcggcggcgactctgatggcggcggcgggggggtcccgggcgcggcctccatagttcctttgggggggaggggatgttaatgcacgaaaaaggactgcttgggcgtggcgggaggggcacacttaagctcggagggctcctgatgggaatggggtatatattttttcggtttcggaatcacctctgcgctgacctccgcgtaggccgcacggcctaggcctcggagggccgctcgccgcctgctttctccgcagcccacccttgcggtcactcgctcactggcgcggggccctcataggggcgagagccccccccccacgcacccccggggggcgggacacccgggagacacggacactggtgggtggttgggtgtaattagcgcgggccgcgcgcgatggagcaagcgaagggtaaggggagaagaggagagcgagcgaggggggtggggggttaaaaagaaaaaaaggatttgagggagagagggaacgggccgcggagacgggccgactgtctcccttctctgcccgccctgggtgccccggctgcccggcccccgccgcaatcaggaattgacacaaaatggcggctcggcccgaaccagcctagaggctgaggcgggaggaagggtgagatgggagggggaactgagaggcggaggcggaggccgtgtcacgtgcaggagaggggtagagaccgcttgcccgaaggccggcggaaagagccgaaggcaaagggcgaggccgaggggaggcggaaatagccgaaaggagctgagcaggagcgaggaggcgacgggggagagccagaaagagctgaaggtggtgatatgggtggggctagagagagcatgagaaacctaggggagccataaatagcctaagccgatcgggaccggggaaggaggagaaactgagacggtccggaaagagccgaaagcggtgtccgggtgggtggcaggaggtggaaacagccgaaagaaaagcagccagggtaatgcgattaagagaatgagctgaacgggcggggctgaaggggagaataaacgactttcaggaattcgccggagagcaagagggaaaaaccgaaaattgctagtttgaaggaaggcgggaagagccaatagttttaggtgggagaatgggagggaaggaattcaggctacggagagggaaaaaaaaaataaccgaaagctggaggccaggtgccgagagtcggaggtttccggagaagcgatgaagcccagccagcccggaggtgacgtcactcgacaacccagtcgatgatgtcatcattggatgcgagaggggcggggcttggtagtccctcaggggagtttaaggacctggggtgtaggacccatggaaggctctcaaatagcagagctagaaacactggccggtgtcgtagactgtacaaacaaaatcttttgaccctcataaccgtcctaacataagctgctgctattcccatttgcagactgaagttcggtgttttaagtaatcggttcacggtcataggattagttctaaaaagcacagcaagattttttttttaagagacagagtcttgctctgtcgcccagactgcagtgctgtgacacgatcatacctcactgtaacctcgaatccagggatcttccttaaatacttgttagctctttctacagtgccagtccctgtgatggagcatgggaacagtttctgtcttcatggaacttaaccgataatgccccaagggagagaaacagagttaaagaataaagggggtgggtggagtgttagaggagggtcttgtaattgttcttttaggctggtacatgaaaaagaagagatggttccaggcagaagaaataccttatttcaggcggggcgatgttgctcacgcctgtaatcctagcactttgggatgccggggcgggcggatcgcttgagctcgggttggagaccagcctgacgaacatggta

SEQ ID NO: 67806 - DNA, 1778 bp, Homo sapiens
gtgagccaccatgccctgctaatttttttatttttactaaagacgggatttcaccacattagccaggctggtctccaactcctgatttaaagtaatctgcctgccttggccttccgaagtgctgagattacaggtgcgagtcaccgtgcctggcctattcctgttttcttaacgctcctctctcccactgggccgtgactgcctctaaggcagagatgtgttcatttttattattattgtatgtccagggctgggcacaaagtgcaacacatagtagggacatgaaaggctgggcacagtggctcatggttgtaatcccagcactttgggaggcagaggcgggaggatggcttgaggccaggagttggagaccagcctaggcaacagagggaccccatctctatgaaaaaaaaaaaaaaaaattgacagttcaatgtcacctctgataagccttccctgaccacccctgttactctgtagccccatgtcctgctttatttttctccaaagcatttatcatcgctgggtttatatttatttctcttcgggcttttctcactggatcgtaaactccatgaggacagggctttgtcgatttcactcaataccgttattttacaacatccctattgctgggatctcagtatgcactccttaaatatttgcagaatttaagtgccacataagtgaccacgtgggcaacgccctcggggccttaagccgcgccatttttggggctaggattggttggaccctccgtcacgtgacatgcagtcgccggatcgcctttgagtctcgtgaggtacttttggtcccaggctccgcggacgaggtactgcgcaggcgtgggagggtctgcgcatgcgcagaagcactccgggcgtgctgccggcggcggtaggtggcgcgcgggtccggcgggcggttggcttgagcgggaccggagctgaggcaggaagagccggcgccatggtggagaaggaggaggctggcggcggcattagcgaggaggaggcggcacagtatgaccggcagatccgcctgtggggactggaggcccagaaacggtcagggccggcgcggcttgaggccgctagggtctggagggggcgtctattctgaggcgtttgcggcccggaaggagcgggaaggtgtgatttgaagggaggaggcgggaattctgtgctctgggatcgtctctctcttggggggactggaggagttgattggggatgtttctggaaggtctgggaagtggttgggagggccgttccgaaggatgggagctctgaagggggcgttggggagtcctgagagagcgggagaattcaaactcaggaaatccgaggcccgaaagcggtgattgtggggtttgatcgcggttaggggataagaggggctggggatacgtggaaagggtgaggtgagggacgcagttcattcattcgagggtatgggacctggttccgtgctgcacacaggggagactggactggccaaccggacagacgggagcttacactcttgtgggagctcacgggcgggccagtctgagagaatgcgggttttgaggagttttggagcaagttatctcaaatgggaatcttgagaggctcggagaggctggagggggacggccgtaggctcccgaaaaggttgcttgtgtttggtatggggctgtgtcttgataggacaggagacgtagtttgggcattgtggagtagcttagggaattctttttttttttttttttttttttgagatagtctctctctgtc

SEQ ID NO: 67807 - DNA, 3425 bp, Homo sapiens
ttcatggctcagtgcagcctcgacttccttggctcaagggaccctttcacctcagcctcccaagtagctgagactacaggcccgcgccaccacacccggctaatttttgtattttttgtagcaacggggatctcattatgtggcccaggctggtctggaactcctgggctcaagcgtccttctatctccgcctcccaaagtgctgggattacaggagtgagccaccgtgcctggctgaacatagatgaatggaagctcttttgcccatatggtgaatctgaagcctaatattgagggaaaaaggaattctggggagaaacaaaaactatgtcatatacgctaagctaagaatgctccatgattctaagccctggttctggcctggtaaatacggagtaaaagcaacacctgcaggggttgagagaggccaactcgagagatttcctttggatgcaaggagggggaagggatggggagagtaaggagcttcaccacatgcgtttctgcggttttgtttggtttcttaataagcaagcaatgcgggtgtaatgttcaaactgaacagagctgcctggtgggcgcatgatgtttgtgatttcccattctctgctgtgggcttcgaatatttgttttaaaaaatcgaggccgtgccaggggctggggggcggggcctcccgcggggcggggctgcgagcccacccctgcggtccccggcccgccccggcgcccgggaaactgtgtggcgctgcgggccgcgcgagagggacggcagggggcgggcgcggcgcggctgctgactcaccggctataaatagcccgggatatatgagccgcgccgcccagcgccgccctcagtccccgcggccgcgggccacgggcgcgcagctccactcctcggcggcctagtccctggccctggccctggccctggctcgggctccggctatgccagccgcggcgcggagtccttgggcggctctgcgggcgcgcgattcccccccacccacttaccccccacctgcctgtccgcggagcgacccagccgcgcagggcagcagctgccgcacatctggcgggggccgcctgccgccccctcctccggcggaagtcccacctgccgtctaccccacccccagcactcacccgccgctcgtactgtgcgttgaggtcgtccgccatccgccgcagctgggccccgatctcccgggcccactgttcctcctccccgcggactcccggggccgcctgggtgggaccgcccgccagagcccccggggcgctgggcacgggcgactccaggtgctgctccgccagcgagagcgagggctgaggaccttggagaggcagaggggcgcggtcagcacccaccacccctccaggcctcgaggtgtctcggcctgctcccctctttcccagccactgctccccgcctcatttctagtgatcccatcgctagtgagtcaatttctcagcttctcctccacaggcaccagaaagcaagaagtacctggggacgccgctctggggtcacctgtctggccagctacgtccccacggcccttgtcagtgtggaaggtagacggccagagaggtgaccccgggggtggtcaggcttaacgacctctattttccaaaggggccacattttgccttttccatgtgacaggcagggaaactgaggcccgcccttagggagtatcccaaggtcacacagggatacagtgactgaccccacccagatcacaagcctcaggtctcctgccctctcgtgtccaaccacagggaagccacacctccggatgtggcagaggcctagagaccagaaggccagagactgtggcagcttcagagcgcgggcctggggggctgggacgcgggagatgccttcctgccccccccccccccccacttctgagcgccctaggaggctcctgccctcccgtcccaccaggtcctggcctgagggttccctaaggcctacagccagggcctcagtttccacatctgtgaccttggccttgaaatcggtgtccccttccagggcttccaggaactgagttagggaagttttctctttcctcgctccccttgggctgccgggacaagatgggggatgggaaaccaggacacactttccctagagcgcctgccggcagggatggggctccacgggcaccacagggttaacagcccatcaggcaggggacctttaacccttccctccccaagactcccccacctccccgaggggacttcccaacacaatggcccctccccctctccttcctccgccgggactgctgaggacagcccctggccaaagagatgcaaataaaagcaaaaggcctctcgacccctccccagaggccagagttgacagtcctcccgctcggcccactctccctgcaacaggaatcctccagggggtctagaggacccagactgggggaggggagctgggatgcagctgttgccccaggcccggaagagacagtgggctgcaattcggggactgcagtcagattccaggagggacttcccacttgacctccccctccacccccagcctccgtcttcctgcttcttgcaacacaaagaccacattggccacaccctcccagtggcccggctgggcccgccacctccccccgtcctctcccacttctccagttcctccgagtctccagccctctctcttcccggctcctatcaccccgggggcggggcgggcactcaccgtccgggcgcgggcctcggggccggctgcggggacccccaggccagcgggaaccccccagggcggcggtgacggcgggtggggcggtgggggcgcagaggtaggcagcgggcagcagggtgggggcggcgggggcggcagccaggccgggctcgcagaggccgcaggacactgccgagggcaccaggcggccgagcgggaaggggcgcgggccgtcgcgggccaggccctctacgggctccggggagctgccctcctggcgtgcgcgggccatggcgctccctggggcctgcgggacacgggaggaggagcaggtcagcagggaagtaccagggcccactgtacctccagcctacccggggttaggacccagatggagaagagtggaggtgtgtgtgcatgcggagggggtgacggccccacagagacacgcccagccgggggatgacaccaccgggtcctggctggcctggagagcctcccgtgcatacggtgatgggcacacaggagggacagggggcacaggacggctctcacagcaaggacagggctcacacaggacggatggaggggtctagcaggtgtgtgtatgagggctgtgacagtcccacaacacaaactcactccacttgggactcacagcatgggctggtggggacaactttcccaacacagcgacgggcacaca

SEQ ID NO: 67808 - DNA, 3659 bp, Homo sapiens
acgtgactgacataaacactacacacacgcagcccacatgacacacatgagccagccgatcacagtgacaagcccctcagacccaacacacacacacacacacaggctcagacacaaccccatccagaggctgccagcaacacccaccgtctacactgcatagaccccacagatcctgggtcctcaaatcccagacgctgatgccagacacacaagccaaacccagactgaaacaaccccccaccacacacatacatacacacacacactcacacctgacaactcacacagacacctggacagaaaacagacatttgcatttagcaggcgcagcatcacaaacgctgggcaaaagacacatgccccggagatacagagacggcctcagccaagacagaaacacacaggcaagacacaagcacacatatcgcacgctcgggcaagacacacacataaacacacaaacagctcactccagcaacacacacacactacaacctccacaccccagcacacgcaggcaccacagacccccagtatcatcccggaacagcacacacagacaactctcaccgacaacacacgcaggtccacccaccccacaagcagggcacccacagacagaaccccacacaaacaggcgcggggactcacgcagacaccccgacgggtcagaaaccccaacattcctctggatcgacaccaccactccctgcagaacccagcacaaactcggagccagacacgcgcacacacccaggcgagacacctgcagatccacaaccccgcacacgcgcgctcccacggcggtcccagacacccccctccgctgtcacagccccccccaccgccgccacgtgcgcccgccccgcccgccaggcgagcgcggggccaataaccggctgttgctggggcgcagcccccgcccgcaggagccgcagactccacggcccgcgagccgccccccgtcgccgcccccagcgggcgcgcgccctgggtgtggccgcccctccgtgccgcccccccgcccctcccggactttgggggctggggcacccctggggtcgaccctcttccccggggccgcactggccgccagggggcgctgccgagcccgcaccccattgtttgtaaacaaacccgccagaccgccgaggcacctgtgcgcccagaccggcgccccaacgccgagccgcctctcacccggcgaccctggcccagggtccctcgcggggtttggagaggcgcggtgtggggaggcagggcgcccacactgctctccgcctgcactcctgtcacctcctccagggagtccacccggcctggccgatcgccgccggagaggattcggggcgcgcacactcaccccgggggcatgaacacgccggagggggcggcggtggggggcgggcggcttccttcaggagggcgcgcccgccgagcgccgctctccgcggcggctgctgctgtggctgtcgctgctgctgccgctctaactgcagtggcggctgctgtggctgtggctgctgctgctccccgggccgcaggcgcgtccgcgtcgtggccgctgctgggatcgctggtgccgccgccgccgccgccaggcgcccgctcgcatgtggctcgcgccgcgtctcaggccgcccggcggatcccgggcccgctccaaagccgccccgccccgccccgccccgcccccgcccggcgggtcccacgccccgcccccgcgtgacgctacggccccgcccgcccgccgcggacaagtcaggacttgcaggcgcgcgccgcgcccccccctacctccgcgccgggggtttccctgcagcgggggacggggcagggcctagcccaaggcaaggaggacccaggcgctgtgcggcggggtgtggggagatcgcccagacaccgggacagtcggacacacacactgactgggacccacagatccacacccccagcgatgcgtacacagaccgaccgacgggcgttccagggtccacaaagtcacgtgcaggcagagcccagaggatgtactcacagacacaaggccacagtctcgcaaatccacaccatggacaggggcatgagcacacacactcacatactgatggggctcacacttacacacacccagacggaaatgcacagactcactaacagggtcccctggacaagcagacggacacaatgacagggccacacacagttgcagaaacacccacactgatgatcacacctgggcccacaaactgtgttcacaaacaaccctaccgaacaggcacccacaccacacacacggtggtgcaaccacacagacataggcggagtgcttatcaggaaacacaaacttgctgataggcacaggggacacacacatacacacagacacctgttacagggatacctggatacacggccaaatccaaatcacactcccacagggacatacacaaatgcactcacacaatttcacagctaacacattaaaactatcagaaagtgacattcgcccgacacggtggctcatgcctgtaatcccagcactttgggaggccaaggtgcgtggactgcctgaggtcaggaattcgagaccagcctgaccaacatgatgaaaccccatctctactaaaaatacaaaattagccgggcgttgtggcgcatgcctgtaatcccagctacttgggaggctgaggcaggagaactgcttgaacccgggaggcggaggttgcagtgagccgagatagtgccattgcactctagcctgggcaacaagagcaaactccgtcttaaaaataaaaataaaggaaagaaactgacattcagagacacaaaccaaatcagacatagaagaaactgaccacccacacatgtcacaaagtcacacctgtgacagcttcttgctaactggcccactgcacacacgtcggagcatgcacacctggccacactcaccacaaatctggcaggggacccacgtcgtggaagcagccctgggcacctggcatggacatgcctgggcagaccccatgccaaatttcatcctgtctcatagctttccattccgtttctttttcagtttctcattgttacttcctgccctgctctggtttggtgagttttgtccttcctttttccaaagccgtggattcctgtctcctctacactttccatccttactgggtctcacccaatcgcaatcgcctcaccagagtgactcaccttccagtgcctagtgtggggctggctgagtaaggatgtcagacttctcaaacttgactgcctccaagtacacactcttagctcccccaagagatgcaggtaatctatatctcacgtgaaatctccccatttgcaacattgggaactcctcagctttcctccctctttcactttccctcctctttcgctttccccgattattcattgtcccttccttcttcctggtgttttccaaactgtgggtcatgagtaaaccatggattatgacatatgacatcacttacatggatcttacttttttttttttttttgagacagagtctcgcgctgtcgcccaggctggagttcagtggcatgatctcggctcattgccacctccgcctcctgggttcaagcaagtcttctgcctcagcctccctagtagctgggactacaggtgt

SEQ ID NO: 67809 - DNA, 1321 bp, Homo sapiens
aaggagatgagccccctcctcttaggagatgcagatgtcccagccccgggacacaagaactcagggtccccccagaaggggacacagtcatgtctgatcccaggaaaactagggctgaacatcccactcccacaagaaacacggactcaggcctttgggctcccgaccctgagatgttacagagctcctgggcatcttggccctcaccacattgatgctgggagacactcctgtccctaacagtcaccagaccctcaggtgtccagtttacctaggtgggaccacctgcccagctccaaggtgcagacctgcccacttcccacccctctgagcccttttccccagggtccaggtggttgatctcccaggacgtgggcatctgacttcagagccgctttccttacctgttggcaccgaccccccaccttgcgccagggtcccaggcctcatagtgccaaggaccccagaagtccaagccccgtgtctctgattccccagacacctggccaagcgacccagcccctcacagtgatgtggctggggaggagggagtagtggagaggttggggggccctccccagtcccagacccccaggtctggaagatccagccctgcagcacctttacttggccccgtggatccagactgggagcccccagcctcgagagaccgtaacgtgcatggctgggccacttcagagaggcccaattcctcagtcccctccctcccgggagacccaaggcagagccgcctgcagctccagaccccagctccagacttggtgagcccaggtgcggcccgcccctaccctggtacctggcggggcggagttgaggattactcagcctccagaatgaggcgatgacatcatcctggggggggttgactaatggccgcgctggggggggcggggaagtttacccggtaacagcggctgccgcacggccccgcccccggggaagggctgggagggggaggcacagcctgcgctggcgcacacacaaacacacacacacacacacacacacacacacacagcgcatccctcccccaccgtcccacatctaacacagcttcctggggcaagggcaggggtgcgggggttgggtgtttgtgtgactatgtgtgtgtgtgctggagtcctctgtggatttgtgtcagtgtgctgttgtgtcagggggttcacacattacggtggggttgtgtcagtgtgtgctactgtgtgtcacttgatggattgtgtgtcagtgtgatggtgtgtgtcagcatgctacatttgtcacaatgctacatgtcatgggctgctgtgacaatgtgatt

SEQ ID NO: 67810 - DNA, 2188 bp, Homo sapiens
gtgttcctgggacctgtgtgtctgtcgctgtgtgtgtcattgtgattgtgtatgtgcggtgggcgacgctgcttgtctctgggacggtgtgtgtgtgtgtgtgcgcgccgctgtgattgtatgtcagcgcgcttcgctgggtgtcgggggaaggtgcgcgtgtctccaggcctcctgcccgagaacagcggcgctgctctctgattggccgcggccgcgccagtgagaagctcccgaatcctgcggtaacttggtaacttggagactcggcccgcgccgcagccgcggggctccgggctgggggctgggagggcggggagggggaggggcccgccccgcccctccggggcccgccccgcccctccccgccccgatttcgcaggcccgccccgagcgcccctccccggccccctcgccccgtctccctcacctccagctcggcacctctgaccccctactttgactccatctcccacacccttgcgtcgctcctgactcccctatctctgccactcgctgggtctctctgtctctctctttcccatgtttatctctcctgtctctgtctccctgtagatctctctgcctttgtctctgtctctcatatcccctctctgtttcttccatctgtctctcccatcagtctccaccactgctgtctctccccgtctctgtctccgccacctctgtctctcctagtctctctccgctacctctgtctctgccatctgtctctatcatctctgtctctccctgtctctgtctccatcatctctgtctctcccagtctctgtctccatcatctctgtctctccctgtctctgtctccatcatctctgtctctcccagtctctgtctccatcatctctgtctctcccagtctctgtctccatcatctctgtctctccgtgtctctgtctcccccatctctgtctctgtcgctccatctgactctctcagctgtccctcctggattctgtctctctctctctccctcctctgcctcagtctccccacctttgtctcttcttcctgtcgtctctcccacctcttgtctctgtctctcccgcccccctctcccttccccgatgccctctctcttactcccacagccaggctcagaattcacttttcatccttctaagacagccagcggacggttcgctacttcgtcctcgcccctcccctccggcccaggcttctggcagcaggccccacgcagggcagacttcaggaaggacttcccgccctggttcggcacgagagctttatcgctcgggccaggcggaggccgggcggccccgtggcttccggaggcgcccgggcgggatgagctcactgcgagttggccaggatttcatcagcttcctcctgcggacttgcccccgctcctttcccggcccggccgcgcgggcgaatccgccggacgcctgctgcccccgagcggcagaaggcggaagcacaggcgccgcgcaaaaagcccacctttgcaccagacgatgtcgccagctcaggaagcctgcaaatacaaacccaattcatcctcacaaccaccaggggagatggactatacatatatatattttgaggcggagtctcgctctgtcgcccaggctggagtgcagtggcgcgatctcggctcactgcaacctctgcctcccgggttcaagcgattctccttgcctcagcctcctgagtagctggaactacaagcgcctgccaccatgcccggctaatttttgtatttttagtagaaacagggtttcaccatgttggccaggatggtgtcgatctcttgacctcgtgatccacccgcctcggcctctcaaagtgctgggattacaggcgtgagccaccacgcctggccccatttattcttatatccactcattcagcaattaccacagagtctcccctgtgccaggcactggtgcagttgtaggcatgaggatacagctgtgagcaaaatggatacaaatcctgccttcatgggactgacactctggtctgtggcagaccacacaccaggagaacacagtaacaatacaaagcgaaacttcaagtagaaaaaggaagcagggaagggccgtcaggagtgttgagggatggtgtctttgaaaaagtgctatttgccgccgggcgcggtggctcacatctgtaattccagcactttgggaggccgatgcag

SEQ ID NO: 67811 - DNA, 2208 bp, Homo sapiens
ccgggctgattttttttgtatttttagtagagacggggtttcaccatgttggcaaggatggtctcgaattcctggcctcaagtgatccgccctcctcggcctcccaaagtgctgggattacaagcgtgagccactgcgcccagcattttattttattttcgagaaggggtctgctctgtcgtctaggctgcagtgcggtggcatgatctcggctcactgcaacctctgcctccccggttcaagcgattctcctgcttcagcctcccgagttgctgggattacaggcgcgcgccaccacaaccggctaattttttttgtagagacgggatttcacaatgttggccagactgatctcgaacttctgacctcaggtgatccgcccgcctcggcctcccaaggtgctgggattacaagtgtgagccaccgcccacggccggtagaacatctgaagcttctaaagcgaactctaaggtttcattggcacgagggggctcgaaccacgccaggcttccaggcgtcagtgcccagtgcttggcatctactgatagaaaccaggaatgaggggctggaggcggaaacagcttgaagaaagaggtagaggccagggagtgaggacggtgtctccttttcctggaagttggtaattcaggcagaaggaagttggatgagcttgcggaacacccggggggccagtcggccccgctcccgcatccatcgcggaggcgcggcccctttaaggctcccggaaacggtcccacaggaccggaagtgaccctctttatttcccttcctcacgtggtgcaggcaggaagtgacgcgcctggcccgggagctgcggtcgcagaggccgacggagccggagtcgcggacgccgcggggtctccgggacaggtgacctgggggagggggccgggagcgcgcccagagaaggcggggcctgaagccccacgtggcggggagtgcgaacaggcccgggcggggtcggagttctctgcggggggcggggacaggacgcccacatgggaagctggaggggcgctggcggggcgggccgttgggtgggtgggcagggtcggggcggggcgtggccagagcctgggccggcggctgtgggcgggacctaaaagttgtggctggactgtgggcggggccatagtgttgcttgttcagctgtgtggcggggctcggacgccgggcggaagctctgtgggcggggccagaaagttttgccttactggaagtgggtccagattcttggccgggacgttgggggcggacccagaggctgacgcaatggcgggggcggggccacaatgtagtgggggagccagggggcggggccagggtgctggcggggaatgctgggggtggagccagaaagtttcgtctgagccacgggcgcggccagagcgttggccgggaggcggggaagcggggagttgagccagaaccctggggaagccatgggcggggccagatgctgacgcaacgaggtgtgggagggagtcagggggcgtgtccaggaggttggccaggccaatcggaggcggggccagagggttgactgggcaggccgggggcggggctggaataataataagagatggtaggggcgggtgtaggctgttgcctgcgagccaggaggcggggaaagagcgtggctgggaaagtcgggagcggggccacattaatggcccatgggtgggggcggggccagaagtctggcgggaaaggcggggccagaaagttttttcccgagccgtgggcggggccagagcggtttccaggatgtcggggacgtggccctggcattcccagccggattgaggctggagctttgcacagaaaatctggggcgggcctgggtagttttgtccttgttggggcgggtggagtattcagtggggcaaaacgccagttccaggaagcctcgccagtgagttctgggcctgtgtacagaatcctttcgggggaggcgggaggctgtcgaccttccgtagggcgctggagacgggactaggacgtccctgaggaaggcgcgggcttggaatgttctctgagagcttgggcagccaataagagtggggttcggactttctttgagcgtgggattgggaatgtttctgaaccttacctggtggagctagaatattcgcctggatatgagaggcaccaggatgagcacagggaggtgggtctggaactttc

SEQ ID NO: 67812 - DNA, 841 bp, Homo sapiens
ccacttcccggtttcaagtgattcttgtgcctcagcctcccaagtagctgggattacaggcatgtgtcaccgtgcccggctaatgttttgtggaggtgaagtttcaccatgttgctggctggtcttgaattcctggcttcaagtgatccacccacctcgggctcccaagatgctgggattacatgcatgagtcaccgtgtctggctcagtggtgttaaatagcaacttttactgaagcctcagtgcacagctgcagcagaggaattgccccttgcagagcggggctaccccacaggcagtgtgcccagaagagcagcccagaggcagcactgctgtcatatttatacccacttttaattatatgcaaatcaaggggcagtttatgcaaaaatttctaggatgagggtggtaatttccagtcaccgggtcattgccatggaaagtggtgctaaggtccgagtgttgccatggcaatggtaaactgatacggtacactggtgggtgtgtcttatggaaaactgcttttgccctagacctgtttcagccagtcctcagtttggtcctgtgtacaagccctgcctcctacctcagtagggtagggcactgggcagaactgtgtgactcccattccaggccccagctcctggaggacatttcgaacacaccgtgagggggaagggaagctgctgtgttgaaggtaaggacccagtcctggcaggttcatcacctgctgactaaagagcccttgggccctgaataatcagcagcggtggccaggccaggtggttcacgctgtgggccttaggtgagactcaaacgtgatggcttcaggtggaacctg

SEQ ID NO: 67813 - DNA, 1005 bp, Homo sapiens
caagtgattctcctgcctcagcctcccaagtagctgggactacaggtgcctgccaccattcccagctacttttttgtatttttattaaagacggggtttcacaatgttggtcagcctggtctcgaactctttacctcaagtgatcttccctcctcggcttcccaaagtgctgggattacaggcgggagccaacgcacccggccgcttttactattcttgcaacttttttcatttgacattccatcgaaataaaaagttaaaaaaattctttttcttctgagggggtgttttatcaaggacacctttatcaagggtcccgggcctaaaaatgttaagaacccatgatttacggctgaggaggcaacttccatccaaaatcctaaaagtcaagttcctgtgacctggcttcctgaacctccccgctcctgcgccccctggaggtcagggctagaacaacacggcattcctataatgctccaaatcgccacaaatcgaccttggaaatcctgggtgagtaacgcagactgcgcacatggcttcaattagcggaactaaaacttgctgaacatcgtgtacccgcgtgtccatggccaaacacaaactccacctttgtaaaagtctaggtgaattcccagctgaattcagaagcgtgacaggaatgggacttttcattggtgtctttttcttttttctatttttagagtggggaggagtgtatttctggattgtttaaatatttacaatgagcatgcatttcctttgcaattaaaagaaaaccagatttttttttttttttttttgaggcagaatgttgctctgtccccaggctggagtgcagtggcgcgatctcggctcactgcaacctctgcctcccgtgttcaagcaattctcctgcctcagcctcctgagtagctgggactacaagtgcccgccaccacgcccagctaatttttgtatttttagtagagacggggtttcaccatgttagccaggatagtctcaatc

SEQ ID NO: 67814 - DNA, 1540 bp, Homo sapiens
ccaggctggagtgcagtggcacgatctcggctcactacaacctccacctcctgggttcaagtgtttttcctgcctcagtctactgagtagctggaattacaggtgcctgccatcacacccagctaatttttgtatttttagtagagacggggtttcactatgttggccagtctgggcttgaactcctgacttcaagtgatccaccttccttggcctcccaaagtgctgggattacaggcgtgagccaccacgcctggcctcaccctagatcttggaggtctttccacatcattatataaacattctttttgtctgtttttttcctttttgtagggatagggtcttgctaggttacccaggctgatcttgaactcctgggctcaagcaatccccctgcttcagcctcccaaagtgctaggattacaggcatgagccactgcacctggccaacttttccattctttttgatagctgtgtagtattctgttgcctggatgtaccatcattaatttagccagtcccctcttgctggacatgtcagttatttccagtctttggagaggtgctgcagtggcaaactttgcaagccgtttgcgtctgaagatcccggaaaccacaggacgttggaatcagcgtattttttctgcctttctgaagtcaaccagaggaaaggactgagtgagctcatggcaggaacggagctttgtcagctgatgagggagtgacaaggcgatgtcagagcagagggtggggaggctccccttacgagggtctgagtcattctgcagtcaaggattgctgggagcttgcgaaaccagcagaggcaaaatttaccttcatgcgtcacagccaaagggaacattcaaaatatttaacaatgtgctaaagtgcagaggtcccctgggcagggtctagggcctcctgctgcacctagcattaactctttagtgacatgaacatggcgacctggagtgggggtgtcccagagtaggaaacaggaacttagggtgctgggagcgggcaatagaagaagtgggtggctgagggcaggggctgtttaccagtgaaaatatttttaaaaatgttaaccttctatttggaaatattttcaaacttacggaaaaatgacaagaatggaacaggctcatatacatatacattttacctagactctccaaatttactgtatctgtctctccattatccatccatccatccatccatctgtccatcgattcatccatccatccatccatccatccatccgttatctagctattttttttttttagacagagtcttgttctgttgcccaggctggagggcagtggcgcaatcttgactcactgcaacctccacctcccaggttcaagcgattctcctgcctcagcctcccaagtagctgggactacaggcacacaccactgggcccagctaatttttttgtacttttagtggagatggggtttcactatgttggccaggctggtcttgatcttctggcctcaagtgattacaggcatgagccaccatgcccagc

SEQ ID NO: 67815 - DNA, 1337 bp, Homo sapiens
ggagaatggtttgaacttgggaggcggagattgcaatgaggtgagataacgccactgcactctagcctgggagacagtgagactatgtctcaaaagaaaaaaaaaagttcctgggccccagaccagctctctctttgggttaaaaccccggcgtcccggagctgaggcgcacgtggctatgcttggggaggagagggcggggccggggaggaggcgcttgcaagtctgtaccgcaatgcctctactggcctctagagggcgcaatcactcgaggctccgccccaagcgaggcggggcggaagcgtgctgtgcacaggcgcaagatgggtcttgggcagcccagagcttccgattggctcttctgtggtggcggggcggggtcagaacgagatggctgtgtgcgcaggcgcaagactagcgctcttgggaccggaagttaaggcgttcgcggcgtgtggtaagtgaggggggcgggacgggtgtaccgggttgtggcggcgatggctgtcggagttgggccgcttgggggtagtttggggtgcgagtccaggggcgagggaagtctcgagatgaggagaaatgtaggaggcagccgaagggccggcaaacgcggacagagatggcacctgagcgtccctgggagaacctgggcgacaggccagagaccgaaagaaatggaggcacgaaaagaagcttcgagaaactgagggactgaaagacgagggtgttgggagaggagggaagctgaaaactagagagcgtgggcgagagtgccgatgggttccagcgagagtcttagagcccacgaggccgagaggcgtggtcgcccatgaacttggggagtggagggaaaagtcggaaactgatcgtggacactagaaacagaaaaaatggaatttagatggagaaacgagacactgaatcacgggggagaccgagagatacggaaggatggagacagttgaaataggaagaaccccacaaaagctggagataatggagaacgatgctgagaaatggaaaagcgagggagtggagcccgaacccctggatttgagtggctcatgtaacactcggctactcacttagcctctctattgctcagtaaaatagggggtgatcatagtgcctgacagtcgtgagaaaagtgtgtgtgtgtatgtacataggtgtgggataggaatagatcatgcagataggataggtctgtgtgttaatgtgagtaagtaagcatgagctattactaaagcttctgatattgggagataaagtattagatggggaaatggagagaggtggtgatggagagtgaatactggaaggacaaaagggaggaa

SEQ ID NO: 67816 - DNA, 657 bp, Homo sapiens
acctgcgtcttcgctggcagccccgaggtgctgcacgcacaggagctggaggccagcaactgcgacggaagccgaggtacagtgagcccaggcggaaggaacccccatccgggatgtgaggggcagggataccgtgaactcccaggcccctctggctggggctcccacaccggcccaggctggtattgacgggggcccacaggaggggaagttccagggccaggcctccctgggtagccttgggtgactcacccctgctgggcctcaccttccgcatggtggtgatagtcaacctaagccagtgtggctgtgcccagagagtgagcaccggtcagggggcctgtcctatggactctgtgagctcccaggtgggtcctgcagagggaggcccccctggcacccgtgtgcatggaagggtgtctcgctgcaggcatggctgcgtgctgggagtcacattcagatttggctgaccttcttgtctgagccaggccaccaaagccatgccgtaagcatactctttctatcgatgtgtactttgaccgggtgggacaggcgggcttctgatgggcctgggtgggccagggtgggcctgagcggtcctcctcaacctttcagacgacaaggacaagatgagcagcaaacaccagctcctcagct

SEQ ID NO: 67817 - DNA, 1408 bp, Homo sapiens
aggcagactcatgcttccaatctccccaacatggtgagctctggctaccgcaatgatcatgccctctggtctgagtcctgaccaccatcacctgatctctgttccctgggtactagggatcctgacctgtaagtctgaagaatcctgaaaccctaggctcatccgggccccaactatgcctgcccgctgatcccagtgacccccttaaaaccacctgatcccattcttccagcacggtgacccggctcagacagagcctcagaagccttctcaacaccacgttccaggcccccgccccccagcaccatagcgccacccaccgggaatgtagttgaactgcagctccttggccactggccggattttctgtcggaggtcttggtagcggaagccgagcaccttgcctttaagggtggcggccagcagctccccgcgcccgccggcgccgcctgccagcccgtacacattgctctgcgacgagaagcgcgtgaagctgtcctcgcgcaacggacaaggccccgcggccacggccgcctcccccatcatgcccctcagttaagcaccctctccgcagcccccgccccaacccgcactacccaacctacgactctctaagcgacctgaaccgccgggtgcccggccgttgcgcgggctgatgacgtacggaagctgccggcgttgccctctcccaagatggcggccaggtcgcctgctcgggcctcccaggcgactttgccccactgcgcccgcgctctcttctcctttccatttctggaccaaggggctgccataaggagtctgtgactagagatgggaggtggtggccacggcctctcgctgtatgctgtgtggaaggtcgaatcatcatcatcataaaacttaatattgcccttatgtgccaggaactactgtaagtgcattccatctaatactttattaaaaattcgcaagggggtggaggtaggtacttaaatccattttagagatgaaggaattgaggcacagaggggtaaagtaacttgcctaagatcacacagctagtaacgagcggtcagtactggaaaccaaacaaggtaactccacagttcactattttttttttttttttttttgagacggagtcttgctctgtcaccctggagtgcagtggtgcgatctcggctcactgcaacctctgcctcctgggttcaagcgattctcctgcctcagcctcccagcagctgggattacaggcgccaccacacctggctagtttttctatttttagtagagatggggtttcgccatgttgcccaggctggtctggacctcctgacctcaggtgatccgcccacctcggcctcccaaagtgctaggattataggcgtgagcccccttgcccggcctatagttcataatcttaacagta

SEQ ID NO: 67818 - DNA, 4727 bp, Homo sapiens
taccatccatcagcaggttgagcctggcccaggccagggtctgagtcagagcgagcacttaataaccagcatctgctagtattaccggcactgcaacagcctcctgctgtcactctcccccacaccagctgctgcagtcctttctagaaggcaaacaggagctcgccaggatgggcctcccttagcctcctcggagatcttcagtgcctcctccaggcccagcccttgctcaccagaccttccttgtctggcctcacctgccgcttccacctttatggtctaacgtggaactccctgtgttccatcttcctaaggcatgctccataataatccttgcctggagtgctgctccctgccagagagcaccccagaactcatgttcatccccccagggttggggcctctcccccaggaagccatttctgatccctctggatctcagttccctgtctttccaggcagaacctcccgtcacggtagatctctgttgcaccatccctgctgcctagagcaccctccccggccccactccccagcaagtcctgggattccttggggcccagctcactcctcaccaagagcctccccctggttcacgctgcttcctctgagctcagacagtcacaggaatgacatcatcgagcccctccttacagtaggtaattccactttattggtgtttgctgttcatcctgccttcccaatcaggtagcaaatgccttggggctgacttagctgctccctccaagcacacagtccaacagcccactaatccctgggccaaagggaccagacacccagagccacccaggaaaactatcaccaaaaacccagctcgtggccccacccccaaacacagcacttgaacttctccccttgtgaagaaaaagaaacacacacacaccctctctctcctcgcagcctctaaaataaaacatttttcacctaatcaatccagtccatcagccccggatgtttctccacaccaggcaattcgccatcatgttcttcaagttattttgctaaacattatccaacctcaaacaaggggcgtggcctagagcccttttcctgttccttcctctcttgtaaagatccctctccttcgtgtcttaccagcctctgccaggctcctaccacagtctcttcccatccccaggccctcctcccaaacccccttctccagccttctgcagatgttcccagtcccaccaccgtccccaggctctgcttctgagtggccaccacacactgttctctctacaagcccactagtcctttcccaggtctcctctcagtttccacaacctccccttgaccctttcgggtcgtcccatcagcacagatcccaccacctcccacaccaccgccccctgccaaactcccttctccttcctctgcccagagcctcatgctcctctcaaccctactaagtcttcgtggatcccttttctgttccctttcagctcctcttagcacactcatgtttctcagtctctccctctcctgacccctcccagacctctccgctcgggcgtccaccttgaacccccatcagctctctgcacgctccgaacctgtttccttctggaagtcacattaacaacagctaacactctcagagatgtaactccacgccaggctcaattctaacactcatagcaaatgggaggtaggtttgatttgtgatctcctttagcagggagactaaacaatttacccaaagtcatgaagtaagtggcagagctacttgggctcttggcacttctaagccactacaatttatcacaggatggtcgtgtcagcttttaggagctaacgtgagttttatgccacgtcatatgtgttagttctgtctcccaggccttttcccatccctcttctcagcatgtctctgtcatccctattactcgaggatcacacagcaggaatttgatcccccgttttggttctctcagtccccctgtctctccctgttatccctccatctccttggccaagccaccaccacgcattcccccacccaggagtctccagcctcaacccaggcctcctcaggcttttttctttctttctttctttttttttttttttttttttgagacagagtctcgctctgtcccccaggctgtagtgcagtggctcgatctcggctcactgcaacctctacctccgggttcaagtgattctcctgccccagcctcccgagtagctgggattacaggtacccgccaccaggcccagataacttttgtatttttagtagagacggggtttcaccatgttgtccaggctggtctcgaactccccgcctcagataatctgcccacctcggcctcccaaagtgctgagacctccacagtcttgactccatcatcccgggttcctccgttcagctgtccttaaactagtcactgctaaccagggccgtactcaccccatgcaccccccacacttcagacgcggctcaccgctcctaggatcatctagccctgagcccctctgcctggtgtcagcccccttcagccttcaccctcaccgcccagggcccacgcaaatccactgctccaggggttgaaaaggtcagtccctcgggcaggcgtcctcagccccaggccccatcactgccgcctgagagccttcaaacagactcccctagagctccgaaaagcctctggacctggcttctctcccggactccctccgtccccccaggccggtcccctccaaggcttcaggacgtactccctcggtccaggttctcccccgcccgctggcctgtcttcggcctgggtccccttcctcgcctcaagatagtgtcgcctcggtccgtgtgtcctcagcccaaatcccttccgccatgtcagaccgtctctcctcaaaccgtgttgccccggcccaggctcttggccctcagcctgcgtcccctctgccgcctcaggccatgtcaccttattgcaggttcctctccgtcccctcggcccgagctctgcgtgccctaacccgccacctccgagcgtgactccttcgtcctctcagcctaggtcccggccgacccctcagcccggttctcacccaaagaggccagagaagaaggactgcgagttcttcactttgcgctccgcctcggccaacagcgccatcgcctccgcttccttcccggaattgtccatggcggccacaaagggactcagcaaagcgcctgaccctgaccctgggaagactcagccgcggccgggccgcggaacacagatcggtaaaactcgcccggctgcgttgacgtcgcaccggcgcgcgtcgcttgcggccaggaaccacgtgactagcgctggccaaccagcggcctcgtaacgccgcgcccgctccgccggacacgcccccaccagccgccgcacgccgcccgtgactcgtgaccccccaatcggcgtcaagagacctcaacgcatgcgcacataccggcgaacggcgctccactctctccccagcgctctgtacctcacctcccacgtgaccctgtggaaggcaatggcagtaccccccgccgaggccccgccccacggtgttgctgctggatcctcctccaccaatcagcaggagccctcggctcgcgctggggcggggggtcccccactcgccctccccgcggaactctggcacagtcagctgaccgcagacactcacgtgacagctcggggcccacgcccgggtttgacagttctgcgcagaacttagtcccgcccccgcggctggtctcgccggtttcttcacttggaaaggcgtttgtgggaaaaggaaaccgttctgctttttcttgctccctctgtcggccagtactagaactgctttggggagaccggtgaagagagactgcaaacaaaaacttaagaggttctctaactctggtttcataaaaaatagctgaagagggccgggcacggtggcttacgcctgtaatcccagcactttgggaggccgaggcgggcggatcacttgaggtcatgagtttgagaccagcccggccaacatggcgaaaccccgctctactaaaatacaaatattaaccgggtgtggtggcacactcctgtaatcccagctactgaggaggctgagagaggagaatcgcttgaaccggggaggtggaggttgcaacgggccgagatcgtgccactgcactccagcctgggcgacagagtgagacttagtctcagaaaaaaaaaaaaaatagctgaagagagcgtgttaaaaaaaaattcagattcgaagatgggcgcggtgtctcgtgcctataatcccagctactcgggaggcgagaggatcgcttgggcccaggagtttgagtctagttcaagtcccgccttgggcaacatagcaagactctgtctctaaaaaaaaaagtttaggctcaaacacacctcctgctgtcccagaaaattgagttgctggtttctgagacagggtctcactctttgggttgttggttttggagacagggtctcggtctgtcgcccaggctggagtgcagcagcacaatcatagctcacctcagtataactttgtagtgccagaaaggaaggaagtattccacacgtgtgctcacacacaaaattagggggtatgccaaaggagccaactgaaagaactcccaatggccaaagctggaacaatttgagcatcaaaataaagtagtattggattataatcccaaacataaagtatccatgagccta

SEQ ID NO: 67819 - DNA, 726 bp, Homo sapiens
accttttcctctgtcctttccacttcctccggctctctcttgaccctcttttctagccctggggctcggccacagtcaaacttgatcatttttttccagatgtaataatactcaacgcactgagctaccgtctttgtctggatctagtgaaagaaaacaagcaggctgtggctgtgccacgcgggccctgggagtgtgaccttgccattgggccggccgcctcctttggaaagccctccggaagcacctcttcctttggcttggcgttaccactcaccacaaaggcacaggaccacaaaatccttcctggggacgagggcgttcaaactggagccacatagtagccaccagtacctaagcctgcacactctgagcagccattccagctcaggaattctttcctaaggaagatgggcacaaaggttgcaccagggatgccaactgtgacatcatgctaataaatcggaatgctctctgcaggcagaataccacacagacattacaacagctaggcagagcctctaaagtcttggcaggaagtgacccactctagaagaaggggaggttttgagtgcacagtgtgaacctaggggattattttcccgttcctccactaagaaaggatcccactaaaaataacttctgttaaaaacaaaagggaagctgggcttggtggctcacgcctgtaatcccagcactttgagaggctgaggcaggaggacgact

SEQ ID NO: 67820 - DNA, 1358 bp, Homo sapiens
ttagccaagcatggtggtggcacctgtggtcccagccactgtggaggctgaggttggaggatcacttggacccaggaagtcaagtggtgaacacgttgttgcactccagtcagcgagatccctgctagaaaaaaaaaagtataaattttggaacagggctgcaaatccctgtgccccctgactctgacaattttgcaacttctctatgactcagtttccgtatcagcaggaggtgatattagcatatcctacctgctaggattgttggaggcattcaatgagagcatccaagtacagaaagaagctcggttaagcattacttataactacattgtaaatccccctctagccatgggtgacttttatagccatctgaacaatgtttcacaaaccctgtagtaaaaaggggatgatccgcctgtctcggccccgcaaagtgcaggattacaggtgtgagccaccgcactcagccgagatctgttaacagactccaaatctcgacttagtctcattgctgcaagcggtctactcattctctcctccagatcttcgggaacagagtaataataaaaatcaaaacccagccagctcttcctctgtcagtggtgttgaccagcagagaccgcttcccttcttaaaggggcctttcctagtttcgactttctcttctctttcctaagatggcctggtgcgtttctcctgtcaccctcccccaagcatagccaaggaagcggcccctcccacatagttggaatgttaaatatctcagtgatgactacaaggcttaaagcaacaaataaataaagccactcttgagtcagaatattttatttggtggtgcatgagtaacaatacccgataaatgaagacacattcttagcgtgttctctatcccccaaacgctgcggggtgcaggggctgcgggggctgcaggtgggaggtccacagcctctagggcaggagctctagggcaagagcaggagcaaagggacatgtggatgaaaacgggaaattctcagaatttgtgtatttattggattttttgtgtgtatttctttgaatgtttttgtgtatttgatttttttgtgtgtgcacgtatttgaatattttgtgtgtatttttttgaataggtgacactaggctcaaactttacaaaggtagaaaaagacctaacatccacccacccctgtttccccacggaaaactgctgtgaccagtttgctttttttttttttttccctagacaaagtctcgctctgtcacccaggctggagtgcagtagcggctcaccgcaacctccgcctcccaggatcaagcgattctccttgctcagcctcccgagtagctgggattacagg

SEQ ID NO: 67821 - DNA, 2373 bp, Homo sapiens
catcccattgcgggccgcaccactgcttatctgagtcccccatcgatggacaactaggttgtttctggtctttttttttttttcccacaaatttttacgagaacaacaacaaaaaaaacaatgctactcaacctcaccccttggttagtgtttgtcaaaaaacggacaggcagaagccccaacctgcgccccccaacgcccgactctccgcatccgccgagggtaccccagctccagggatcgcggtgctcagggaccgcgcgtccaggactggccctgcctcccagaagctgtcaggcggcggccgtggcccgctgtagccccgccccgtggcccgcccgcagtaggcccgattcaaatctggccaatgatagtgtgtaaacaaacccaggccccgcctcccgacgaataatcccccgaccggcgagaggcccatttaacccgatggggtttggggttgggacggtgatggagtcgtggctccgcccccagacctgggccaataggcggctgggctccgcccccggcacttgccgcgctgaggacccgaggcagggctgggcgcgcagttgcctgatttcgtggcggctcgcagtctgggcgctccgggcgctcggcgcgggcgggcagggccaggagctggggcggcgcactccgcggtcccagccgcatttgaagggagcggtcagagggcggagatcgccccggcatcaatgccctctcatcccccactttatttccaccgcctagctgctaaaatccggacccggaaacgtctccaatgggaacttgttcccctcgcccctatttaacagaacctggaggggacgcaggggtgtttttggattgggcaaggctttcatttctttcccctggttcttacatgcatacgggaaaatgcacgtatcttgtgcgccgctctacagaaaactaaaactccatgtggcaccagcagcctcccaggtcgagaaacaacttgggttggagaaattttcttttcgtttctttgcttttctttctttctttctttctttttgagacggagtttcgctcttgtcgcccaagctggagtgcaatggcgcgatctcggctcacccacaacctccgcctcccgggttcaagcgattctcctgtctcagcctcccgagtagctgggattacaggcatgcgccaccacgccttgctaatttttgtatttctagtagagacggggtttctccatgttggtcaggctggtctcgaactcccgacctcaggtaatcctcccgccttggcctcccaaagtgctgggattacagacgtgagctaccgcgcctggcctgaacattgtcataataaaatgtttggggacaggggcagatttgggtgcctgacgatacactcccattgaagagatgagaaaatggaggagctggagaagtgacttgccctaggttcatctggtgactcagccacagaacacctgggtgtactgatttagtccccaccctgcctggctggccttggggacaagtcgctgaacctgtctgggtctgactgcctaactcagtgcttaacctaggactcataacttgcgcctgattctcaaatagaaggggcgtgtcactcccgaaggacagcaggtctctttcgatctgggcccatattgatccccaacactggtctttggtcatccctttggctgcctctgaccttccccactgattctagaacagtgtggaccacactcactcattaactctgaaacttggacaggctttccaggatgtcaggggacagacaggacagagcaggaaaaacagacgtttgctctcccagggcagggattgccagggaatcaatgccctttgatccacccccttagttccactgcctggtagctaaaacccagatgctgtaccaagggatcgtttaaaaaattccatttgagaatcatatgcaagttatgagtcccccattaagaactgagttggtgcctgtaatcccaccactttgggaggccaagatggggggatcacttgaggccaagagttcgagaccagcctggccaatatgatgaaaccctgtctctactaaaaatacaaaaactagctgggcatggtggcgggtgcctgtaatcccagctgcttggaatcgcttcaacccttggaggcgcgcgttgcagtgagctgagattgcgccactgcactccagcttgcgtgactgtcaagaaagaaagaaagagaaagaaagatagagaaagagaaaggaaggaagggtgaggtggctcatgcctgtaatcccagaactttgggaggccaaggctggcagatgacaaggtcaggagttcaacaccagcctgaccaatatggtgaaaacccgtctctactaaaa

SEQ ID NO: 67822 - DNA, 3840 bp, Homo sapiens
caagcgattctcctgcctcagcctcccaagcagctgggattacaggcgtgcaccaccacacccagctaagttttgtattattagtagagaaggggtttcaccatgttggccaggctggtctcgaactcctgacctcaggtgatctaccctcctcggcctcccaaagtgttgggattacaggtgtgagccactgcgcctggccgataaattataaaaaaaaaaaatacgttgaagtaaatattatgggtagtaccgccaagatactagaacacatgttaaggcttaaaaaaacagaggccgggcactttgggaggccgagaatagcttgaacccaggggacggaggttgcggtgagcctagatcgtgccactgcactccagcctgggcgaaagagcgaaactccgtctcaaaacaaaacaaaatataacacaacaacaacaaaatcacaatctgtctcgattactcatttattcaacccgcattcacctactgtgtgcacgagcttttctagggcactggggaggcagaagggactaaaacaaagtataaatctccctgggctgcaagcatcgggagggcaggtccgggggctctgtgtccccactgggcccccagcactgcgcagcgcacacagtgggcgctcaccaagcgctcgctaagggcaacgcgtgaatccgtgtcccgccagcagggcgtttacggcctggtggggcggaaacggacccgacaccaccgcggcgtcctggggcttctgggaatcccatcagcgcggccagagcggccggggacaggctccgaggcaggcccgacccgcctccccggcgccgccgtggctcgacggagaccagctagggtgagtgatcgagccacgcctggggtcccggcctgtcaccccgaagtccccgccgccttccaccctgtcaggctccaactctgggctccggcgcggtcccacctccggggggaactcccctccatcccctccatttccttcatcctcgactcccgctatcttttcggacctgcggcgctccccctggacgcgtcctcccgccggacgaccgtcctccgcctcaggggacgcgcccaggacgcacggcgccccctccccagccggaccggcggtctgggagcgcggatcccttcagctcccccgcgccccagcatccggatcagggctcgaggcagtcgacaaactacacccgagctcgagcaggcgcgcccctgaacccccgggactggggctgggggcgggggcggcgccggcgcggagggcccagtccccggacgtccgcagcctcccattggctccgggtcccgccgctcggcctggcggggccggggctggtccgcccggacgcggggcggggattcctgaagcccctcctccggcgagggcggagggaagaggaggaggaggaggaggaggaagggggtggggggcggaacacaaaacctgagaggtttttttttttttttttccgtttgcatttaattaaaaaaaattttttttttttttgcatacccgaggggcgctccccggaacgggcgcgggcccggggcgcgcgggcctgggcgcggggcggcggcgggggcccggcagcggctgccgagcggccgccatgcgatcaggcagtgcgctgaccggcccggccggccggccccttctgggtcctccctttgcagcccgtgcggggccgtctcggagaccccgcgccgacggctgctcaaacatcagggtgagtttctcacaatgtagcaatttctctttaaatctcttaactctctctacctgcgagtcggggctgtgacagggcgcaaaagcgaggggggagtgggggttggcggcgagggtgtgtgtggggggagccggagccggggccgaacccacccccgcgacactctcacactcagccccccagccggggcgcagcgcccgctgcctccttttttttttttttttttttttcctgctcggcgcccaccgccaccggcacccccagccccgcgtctcttccaccaccgccgccgccccgatcctatggggacccccccccaaccggcttccctgcccagacccggcgcccagtgcctccccggccctcccgccggctgccggggatacaatggagcggcggagagaggagacctaacgttccacggggggaggggcgcggagaccccctccccgtcccggccccctcccctcgccccgctccccgcctttcggggaaggcgaaggccaccgggcagcgggcggtgatctcccggccggaggcggagagcctgcatctccccgcctcgctcggcccctgcgccccctccccaaatccctcccgtgggtgtcgcggacagtggggggccctggaaagctggggagggatggatggggaaggaggccaccggggctccccccttcgcaccgcccctaaacaatgaaaggagttgacttgacccccagcccccggcaatagagggaggtgaccccctcccccacccccagctgaggctcatcccggagggggccgttacgggggtggggggggtgagcgcctcctgtcacttcccgaggttcggggcggccccccatctcctacccctcggcctgggaacgggaggcaccaggcccggccggggcaccgcgctcgggtggtgacctttagacaaaggcagccctttccccggggtgagcccggacgagctgggcctgcggcctccccgggcccctgcggagggcagccaggccgcgggcacccggagggagggatggaggaggagggaggagggatggagccatctggttttcccatccctggctgcccctcgtctgcttccccgactcctgtcacgggcggccgcggggagacgagggaccaggggctgcttgggccttggtgcgcggccagccgggaggaccgggcaaggagccgcgggagagctaggctcgggctcgggcgccggcggtgattgggaggcactgcggcttcttcctctccgcgcccctttgttttgctttgtggttctgagcagctgaacttcccgggaggtggggtcagaggccgcggtgtcagctctcccggggaggcccaggtgacaggtcctagctctctggtgtccccatcctggtgggctgcagtctgtgcccaggcccatgtcctgaccatcgtccccttttgtcaccccccccccacacacacacctacctacccaccccatagtataatacagatctaggggtgcctttctcttacacctctttacggagggcacttgaaagggaaactagaaacatccaaggcatcaaggcctgagattcatgataagctctctgtgcttttaacctctcccagcacctggggtgggtgtggggggtattgtcaactctgacctgccctgggtcatgagaaaatgggaagacaactcaggaagcacccccttcccatgcactggtaggacttttgggacatgttgacctcccttgccttccctcatagctccccgctcaagatggaaatattaataacaatatcaaactagggagctttattccgctgctgctaagtacattacacgctggccacagtccaaggaggaaatagagacgggacagacattcccgttttccagacaggttcatggaggctcagagaggttaagaagcttgcccagggtcacacagccctgggtcacacagagccccaatttgtaacctcctggagtttttccagcttggctcaaaactgttaagcccttcttctgtcccaccctttggcattttgtccccctgacttcagtggacctggttcggaaatgtagataatatttagaagaagcggccag

SEQ ID NO: 67823 - DNA, 2588 bp, Homo sapiens
gccacaccaagcctcaaaccctgtgggttgtttctgattacacaggtttgggggtcacacctgggtgcatgcagtgtggggtacaggttctgttactctgtgcagaaatcgtcctcataaaggaagagttgaagtggggctggcagcaggggatggacccctaggatgaccctggaggtgatgggcaactgggtcagctgtgtgggttaaagtcctgtttctgctccttctaaccctgtgacttggtggcaagctatttccctcctttagtccaggttagagaactggaagtacaggagagataataaatacttatttggatgaccttattgttaaataaggtctagcgtggaaaagatgttttgcaagtgcctggctcagagtaaacggtcactattgttagtgttgttattgcttctgtgtatactcttgaggttggggacaaaaatgctgtttctaggattgcagaggaagggttgatgccccttgaccccccagcccggccccgctaccttcattcccttgccatgcccaccctgtccctctgcactctccctttgaagtgcttgcctgtttagggggctgccaacttcagcgtggcccctctcagcctcttatgtcctctgtgtcccagcctggtaaccttgggaacggagtgagcgggaatatctgtctgaggctgtgagacccttgctaaagacccttggggtccttgagggagcgcctggtggcctctgctgcctggaggcagaggatggcccagtgtccagggacacctgcaggtgaagctccccggagccacctttccagaggctggatgccaactctcgtccaccgtgtgaggctgggcgggcagatgtccacagcgcctgcctcacagggtggctgtgacagttagctggactataacctccatcacctggcacgcatagtgtctcattgacctcagacacttggcgcccggcctgggtgcgggagttctccctgggagaagtctgagctcacagcttagcaagctcttgctgtactgcggaatttctctccctagaacgtgcgcggtgatctcctacttttgtgtgtatacttactctttcgtggacagtgtatatatatatgtatatatacatatatatatacacattttttttcccaaccccttttttttttccttttttttgtgtgtgtgtgtttgagatggggtctcgctgtttcgctctgtcccctaggccggagtgcagtggcactatctcggctcgttgcaacctccgcctcccgggttcaagacattctccctgcctcagccttccgagtagctgggattataggcgcccgccaccacgcccggttagtttttgtatttttagtagagatgaggtttcaccatgttggccaggctggtctcgaactcctgacctcaggtgatctgcctgctttggcttcccgaagtgctgggattacaggtgtgagccactggtcccagcctctcccaatcctttttcattgaagtgtaattcgtatacagtaaaatccgcagaggggccaggcacggtggctcacacctgtaatcccagcactttttgggagggcgaggtgggaggatcacttgaggccgggagtccgagaccagcctaggcaacataataagaccctatctctccaaaaaacaaataaagaccttagccagttgtggtggcccctgcctggatctaatctggaggctgaggtaggagaattgcttgagtccaggaggctgaggctgcagagagccattcattaaaatgcacatagtttaagcatgcctttccatgagtcctaacccctatcaagatacagcacattctcgtcactgccagaaagttgccctttgccccttcctggtcagtacctgctcccagaagcagtcactggcttgccttgtcattgtgggtcagccttgcctcttctagaatttcacagagggggagtcctgccccgtggagtccgttgggttgagcatcttcggctcagcatgatccttttgagatgcagggatgttggtgtgtgtgtatcgggagtgtcttcctttaagaaattctttcccgtgagtatttcttcaagcctggctttctcatgaggctccaaactgcagaagatgagaagggagggctgtgtttcctgtgttctcagctcctggtgtgcagtaggtgctctgtagatgcttgttgaatgaatggatgggtggatgacaggcatgtcccagggatggagaaaggggagcagagaccctgtctttggagttcctgtgtgtttctcaaaaagtgtcccactggccagggcgcagtggctcacacctctaatcccagcactttgggaggtcagggcaggtggatcacctgaggtcgggagtttgagaccagcttgggcaacatggtgaaaccccgtctctacaaaaaaatacaaaaagtagccgagcatggtggtgcatgcttgtagtcccagcaacttgggaagctgagaggtgggaggatcacttgagcccagaaggtcgaggctccagttagctgtgatcataccactgcactttagcttgggcgacagagtgagactgt

SEQ ID NO: 67824 - DNA, 1634 bp, Homo sapiens
gatttctctatcattttgatgattcatccattgtcctgttgataggatctgggttgtttcagtttaggggtgctatgaacattctagaatgtgttttgcggtccacctctgccccgctatgcataaagttgggattccatagacagtaggtcctgttaggtaacaggaaaaatgatctgtgggctcctctctctccttggcacgtgtgtgtggcccacgttgcatgttcttgtagaatcctccttcccgggtgaggattggaagccatgatcgcctgcctctgttgctggttttagtctttaacccttgctctgtggacttgagaaatgtgcttttccatggtgcctgtgaccaagatgtccgcatcgttagtgaagaccctgctatgtccttgaccacactgcacggggatcctgtccacgatggggggtgtcctgttgggcttgagtgtctagatatggagaccgtagttcgcggggggagtggggggccgtttggcatatttgccctggcatttggggttgtttattgggggtgggagtgctcctggcatttcctgggcgggaactactggtgtagacctactggattaacttgctcctgggtcggtgtgcgggatagggggagggtgcatcagtctttgtggagcgtctgccttctctccgtctccctgttttcctgttaccgtctccccgtccctctctctgtctctctgaactgctcgttccctccttgccttctgtgccgatgcccagttgaactgcccatccctatagattgggcgtctctgagcccgcagtggctgcctgagctgtaacccaccccgtgccctttcacctcctctcccgcctccagctgaccaatccctggggtttctggtcggcctgtggatgtgtcccggtcaggcctaggtcaggcgcctgacagcgtcacctgtggccactgagaatcatcctccttcaggagtcccagtcagtcaatatttacacaaagcgaacaaaaagaaacctggagctcaccactcttgggggagccaggcaggagctaagataagtcccatttatggcctgtcagatagcgatcggcacctgcagtaaagcaagcaggagagggactgggggagggcttgtgactacagacggccctggtgacactcgagaaaaggaagggcatggctgggagtggtgactcatgcctgtaatcccagcactttgggaggctgaggtggtggatcacctgaggtcaggagttttttttttttgtttgtttttttttttttgagacagagtcttgctctgccacccaggctggagtgtagtaggctgatcttggctcactgcagcctctgcctcctgagttcaagtgagccctgggctctcctccctcagccccctgagtagctgggactacaggcgtgcaccaccacgctgggctatttttttttttttttttgaggcggagtctcactttgtttcccaggctggagtgcagtggcacgatcttggctcactgcaagctccgcctcctgggctcacgccattctcctgcctcagcctcacaagtagctgggactacaggcacccaccaccacacctggctaattttttgtatttttagtacagacggggtttcac

SEQ ID NO: 67825 - DNA, 5862 bp, Homo sapiens
cgttctcttctcttctctctttctttttcttttttgagacagggtctccctctgtcacccaggctgtggtgcagtggcatgatcttggctcaccacagccttagcctcccaggctcaagcaatcctcacacctcagcttcccaagtagctgggaccacaggtgcacactagcatacctggctaatttgtaaaattttttgtagagatggggtctcactgtgttgcccaggctacatatatatcttctatactctgtacgtattgtatgcgtctctgtcttagaaacttacatgtacattagtttcccattgtcgctgtaacaaataccacagatgcaggatcttaaaacagaaaactattctcgtatagttccagaggccctaagtccaaaatgagggtgttagcagggccactggggttgtcagagctgtgctccctcaggaggctctagggaagagcctagagccttcttcgcctggtccagcccccggagctctaggtggtccttggctcgtagccacgtgacattaagctttgcctccttcttcacatggccttctgttcttctgtgacttctcctttgctgttaagaggacatttatcataggattttgagcctacccagataatccaggacagtctcatctcaacattgttaatctaattatgtctacaaagacccttttttccaaataaggatggccacatccacaggttctgggatgtttacatattttttgtggtgggagccaccattcaactcactacaaaggccttggaaatacatcctaagagcttaacttctaggcgtcatagcatgttaagtccacgtaccaggtgaacacatcacctcatttgtctgtctgaccaaggttcacgggaatgactcattcgaggcatttcaggacaactaaagggatagaggacctggccgggtgagtggcagaggtggggaacctgttgtagtacacccctgctgtggggggtggagggagagatggccaggctggcatcatcatgtagttcccacgggcttaggagtctcagctgggttcaaatcctggctcttgggtgaccttgggcaagtacccaaccctttttggcctcagtctcctcatttgtgtaatgggcatgaggataatggcatctgccttatagtgttgctgtgagaatgaaatgataagatgaagcactttgccgggcgtggtggctcacgcctctaatcccagcactttgggaggctgacgcgggcagatcacgaggtcaagagattgagactatcctggctaacacagtgaaaccccgtctctactaaaaatacaaaaacaaaaaattagctgggcgtggttgtggcgcctgtagtgccagctactcaggaggctgaggctggagaatggcgtgaacccgggaggcagaggttgcagtgagctgaaatcacgccactgcacaccagcctgggtgactgagcgagactccgtctcaaaaaaaaaaaaaaaagacgaagtacttagtaagcattcagcaaccttggctggggtgacgaagatgatgaagtcagaggtggccgtagccaagggctcatgggacagaatctgacccatcaaatgcccagactcccaaacaccagggctcatagccacgtggcccaggcagaggttggactcgtagttggggcaggtccagtcggtggccagcgaggaagggggttcgcggggaggagcagaggccagagggagccgggccggggaggagggctttctatggtcgtttacacatggcatctcggtgtccagtgtggggcaggcatataggaggagctgaggctgcttgggcagcatttatttaccaatcggtaggtcagcttttgagtattttaatggcaggagcagccagatgtcaataagccaaatgtgaacccaggcttggtgatgagaaaatacatttactacatttgggccagaatagtggtcatggacaggagggcactgactggagagatatgggaggtgggatggataaaacttggatgagtcagatgtggggtcaaacttggttcctaagtccccagagagagctgtatcagtgagctgtcactacataacacacagccctggctgggcacagtggctcatgtctgtaatcccagcactttgggaggtcaagatgggaggatcgcttgagcccaggcatttgagacctgcctgggcaacatagtgggaccccgtctctgcaaagaattaaccaggtgtggtggcgtgcgcctatagtcccagctcttcaggaaactaaggtgggaggatccctggagcccaggaagtcaaggctgcagtgagctgtgattacaccactgcagtccatcctggccaacagagcgagaccctgtctcagaaaatcaaaataataataaacagaaaaaagaaaaccatgatcccaacggttagaatttggactgggcgtagctaggtgcttctggcctgggctgggtgtctgtagtcagctgttggacagctggtgactgcgtctagggcttggctggctgttagctggggtgatggggtgatgggcacgtggctctcatcctcttgcaggccagcctgggcttcttcacctggcagctgggcaaagactggaagtgtgccaggctcagaatcacacaccatcggccaggctccttggctcatgcctgtaatcccagcactttgggaggccgaggcgggcagatcacgaggtcagttcaagaccagcctgaccaacatggtgaaaccccgtctctactaaaaatacaaaaattagccgggtgtggtggcacgcacctgtaatcccagctactcaggaggctgaggcaggagaatcgcttgaacccgggaggtggaggttgcagtgagccgagatcatgccactgcactccagcctgggcaacaagagcaagactccatctcaaaaaaagaatcacacaccatcactttcaccacattctgttggccaaagcaagtcaagaagccagcccagggtcaagggctgaagtcatagaccccacttcttaataggaggagctgcaaagagtgtgggacgagggaggagaatttctggccactttgcaatcaaccacagtggcctttgtttcagatcccctttccaccagccctctcacattttgtttgacctctcttcttaatcagtgacccacaaagaacagcccttgacccatgtgagaggccttgccatgggttgcaaagaaaatccagaaatgggagctctttttgcgtcaggttgtatttgtctgcaaataatgggaaaccacatagtggcttaaaccataaggattaacaagtttggaggcgggcagcccatgaagagttatgaagagtacagtcaggccggcgcgatggctcacgcctgaaatcccagcactttgggaggctgaggcgggtggatcactagaggtcaggagttcaagaccagcctggctaacgtggtgaaccctgtctctactaaaaatacaaaaattagccgggtgtggtggcacgtgcctctaatcccagctactcaggaggctgaggcaggagtcacttgaacctgggaggcggaggttgcagtgagtcaagattgcgccactgcactccagcctgggtgacagagcgagactccgtctcaaaagaaaaaaaagaacacggtctttttgtcagctcccatcaaccatcctctgctggtgggcttttcagcctcaggtttgttgtcccgtggttgcaaaatggctgccacagctctagtcatctcaactgtattcaaaactggaagcaggagcaaaagactgtctttctggagaaactctgtctttgtattctggaaggaaaactttccctgaaagtctcactgagcagaacctgtctgtacacttcagtttttactatttgcacaactgtggttactctaactgcaagaaaggctgggaaagtgagtgtctgataaaggagataggaatgcctctggcttagttcaattattttaaggctattttgaccacaactcacagtccaaaatatgtttctttgtgtcgcagtacacacacacacacacacacacattattgaaaccaatttctcaaatactcactcttaccatgtatgatacacgttaatgtcttccattccattccattccatgcattttaattatttaaagcagttcctggtcacaacctgctaatttgatttcacaaccttcaaaggcatgacccatagtttgagaaagactggcctagaacagtctttgtttacatcttagcgttggcaagtgttaaccctgcacagagtcaggcttctgcgagcggaggaggagaggtggggaaatggtgttttgaaaagcaacagatagactttgccacatcatttgcacttcttatcagcaaatgatatcgttctggagactttgtattactggcaggcaacctgaggttactccaatttatattgggaaattaaaattcgcctgtttgtggagcttagctggcccttttaattccgtatcctgctagcagcctggcttctgcacagctcctgatgacagcgcaaaactccgattgcattacaagtggaggaggaattcacacaattttctggaaggacactgtgtcattgttgcgtcatggctgttctctggagctggttgtggttttcaggcccggcctttcctgctttttatagtgtggtggtgaagagtgaggtcttcagaatcacagggtctgagttcaaattctggtcccatggtgcgatctggggcaagtgtcctgaccacctccgagtctccttttcctgtaagatgtgcatcagcagtgcttccgtggggatggggagggatcggtgggtatggagtaagcacaggggctggtacccggaagcactcaggcaatgcgggctcttcagggtgtgccaggcagcttcggctgtgtgatgccacagtgacgagtgggcccgggtcgcagtggtccgtggtggcagaggctggcttctcgctcgtgtgtgtgcccgtggggggttggctgtggctctggccacatgtccgccctgttctggaactcaggggaactatgtgatggctcttgaagcttctgctctgaacagacacagtgcgcccactccatctcatggaaggagaatctttccgtaggagcaggcccactgggtggggggcagcggacagatggttaaaaagccagtgtgccacaccagggcttgtctccagggtgctggtgacaattttgggtccgcaaccctgcatactagttttcaacccccacccccccgcccccccactctgcaacctcagtcactgtttcaaaagtttctgagtgtggggggtaggggagaggtctccagcaccctccctggctgagaaccaccagctgtgctccccaagccagggatggggtctgcctctgcccttttgctgtcctcagcaccccccaccagacacacagtaggtgcctactaaatgtacatttcagcaggttgcctcttgaataaatgaaaggatttgtttaatttcctctgcaaattcattcattcatcccacagatatttattgagctcctactgtatgccacataatgtgccagccccagggatcttgcagaggacaaaacaagcaaaagttcctgtcctgggggacatttcggtagaggagacacacagtaaacaaccaaaccatcagacggatatatgatatttgatgttaaagttttggttttgttttttttgggatggggtctcgctgtcttgcccaggctggagtgcagtggcacgatcacagctcactgcagcctcgaactcctgggttcaagcaattctcctgcctcagtctcct

SEQ ID NO: 67826 - DNA, 1655 bp, Homo sapiens
attctcgtgcctcagcctcctgagtagctgggactgcaggcacgcgccaccacgcccagctaatttttgtatttgagtagagacggggtttcaccatgttggccaggctggtctcgaactccgcatctcaggtgatctgctcgccttggcctcccaaagtgatgggattacaggcatgagccaccgtgcccggcttcacacccatttctttaaaaaggatcccgtagcaggcagaaaagccccttccatcctgctcctctgatactgtgcccccttggagatatttccgtcctccacccacgtgtctgtggctggaactgcccagcctgctcctggccccctggaagcctccccacagctggtaatctggacttaaggattgctgggccaccgcctctctgcctaccaccattccatatttaagtggagcccctacgtagaaaggccccggggctttattttagtctccttttcagggatgtcgtgggcgggggagggggttcttggtgctacagccctctccccacccctaaagggacgccgacgctgtttgctgccttcaccacatattagtgcttgaccctggcaggggaccccatggaaaagatggggaagagcaaaatacatggagacgacgcaccctccaggatgctcgctgggattcccacgcccaccactgtcccccaccccatggctgggaggggcctctgaacggaacagtgtccccacagagcgaataaagccaaggcttcttcccatgtggcagtgaggctggcttgggacagggatcgcccgccctcccccagggaaagagagacctgggcaggatttggggtggggggaggcccccttccgtgctctcaggggcggggtggagtccgtgactcaatgcagcgaggcctggtgactcaggcctgggctgggggccagaacggcatattttccgaggaaaagtgactctggggccctccccccgggacatcccttcctcccacctcccgcggcgggggcctgggaaccaagccctggggcgcgcgcggggtgtgtgtgtgtgtgtgtgtgtgtgtgtgtgtgtgtgtgtattcgggcacgaagtgctctcccagctcccgccctgcccggcaacgtgcccttgcacaacctgggtacataactcccgacgcgtaacaccaggaacacgctggtttctggttggggaagtggtgaccttgcccacacgggctgccaggagtgtgcgcgcgctcacgcaccggggactcttggccagagctgggcagcgcaccgtgcgcgccgagtcccgcgcactcacatccaggccacacccacggcgtcccgggacacgctggccgcgcactcatcccgcccacgcgggcccagtttcgcggctcgcggcgccccctggcggacgctcagaaaacagataggctgtggtcgccaaaatccctgcccaggtgattcggcgctcaggtctcggggctgcgatccagggcctgtcacctttagggcctgtcacctttccaacgctctgcgcaaggatccagttgaatttcgctgtgtgaccatgcgtgtgtcgcctgccctctctgtgcctttttcctttatgagtccagagtggcttttatgaggcctggattcctttgatttgattgttttgt

SEQ ID NO: 67827 - DNA, 1221 bp, Homo sapiens
acctttgtctcttaaaaaaaaacacacacacatcagtttggaccgggagtggtggtgtgagcctgtaatcccagcgctttgggaggcctaggaaggaggatcacttgaaaccagatgtttgagaccagcctgggcaacatggggaggctccatttctacaaaaaataaaaataaaaaattagccaggtgcggatgcacccttctgtggtcgcagctactcgggaggctgaggtaggagaatccctgagcttaggagttggaggctgcagtgagccattacccttccactgcactccagcctgggggcaacaaagtgagaccttatctattaaagaaaaaaatcagtttgagcaaagaccccaggcggccgggaaaggtgttcgcttaagggcgaaagctaagaacctgcaaccttcccgtctctttcctaccacccgccgccgttaggaatcttcagatcccgctgtaaagaatggaggaaggaggagccatttatcctttaccaagatggcagcctcctggcaactccagtcactttataaatatggctgccacaggaagtacgtcacggaagagggtgggaaatctgcgcgcgcacgctgcaaaggggctttttgggacgccagtggctgagttcttcctttgacaagatggcggcaggaggcagtggcgttggtgggaagcgcagctcgaaaagcgatgccgattctggtttcctggggctgcggcccacttcggtggacccagcgctgaggcggcggcggcgaggcccaagaaataagaagcggggctggcggcggcttgctcaggagccgctggggctggaggttgaccagttcctggaagacgtgcggctacaggagcgcacgagcgggtacgttgggcgggacttccgggaggtgggacggttcctgcgcccaggtgcaaggccaggcgtgcttgcgtggactcgtcgggggtcgggggtcgggggtcgggggttgggggctcctgtcccggggaccgccgaggaaatggagagcatgggcaggggactcagcatgggaagctggagagcttgatagagttaccagatttagcagataaatatacaggacgctcaattaaatttggattttaggtaaacaatgaataatttttagcataaatacgttccatgcatccaccttagcttgctgttttctaaatatgtgtgtgtgtgtatgtatatatgtgtgtgta

SEQ ID NO: 67828 - DNA, 1533 bp, Homo sapiens
tccccaaagggaaactgaaaggcagggggtgtcaggtcggcagggggtatggggcaccctctcacccaccctcagctcctttcctctgtccccaggttgtagctgccatcagatgccggagactcgcccttcaataaaaaatctcttctagctgatcagtgggctccacgtgtggcttgtgtgcctcctgcgggcggctgctcccgggtgcagactctgcgtgtccccccgtggcgcacaagcatgtaggtgccagaactcaccgccagagcctggtgagggcctagggtgtgtctgaaggggtcatcagccgactggatcgtggtctgtccaatagctgtgaagctggcagcccttccaagcctgggcagatcctaaaaagacagcaggcagagggcgcagggcttatggcctggccggagttgggaggtgaagcagagggcacagggcttatggcctggccggaggtgggaggtgaagcagagggcgcggggcttatggcctgtctggaggtgggaggtgaagcagaggtgaggaggaggttcccccactggattccgacttggagaatagcccagttccttctgctgcgggtgacgtagcagctcttgccacactgatagaaggagtggtggcagctgacctctgccgatagaacacctgctatcgggtttaagcaggtggattcactcactgaactcacagcggcctaaccaatgagggctgtacttattcccattttaaaggtgaggaaatagggctgggcacagtggttcactcctgtaatcccatcactttgggaggctgaggcgggcagatcacttgagcccaggagtttgagaccagcctgggcaacatagccataccctatctctaccaaaaattcgccagttatggtgggatgcagctatggtcgcagctactggggaggctgaggtgggaggatcacctgagcttgggaggtggaagctgcagtgagccatgatcacgccattgcactgcagcctgggtgacagagggagacctgtaccaaaaacttaagtaacaaaggtgaggaaacagaggcacataaaatgaggtaattttcctcccttctgtgcctattttgaaaacgtttttaaaatctttacaagaaacgaaaaacttattctcactgtaaatcattgtcaaaacgtgtctgtcactgttgacctttgccctccagtcacatccacgcccctgttctggagctgcctgtcaagcagtcactgcagtgtggtttgagtgattatgctccctgtgtgattctattaaattacataatcgattagccaggcatggtggtgtgcacctgtagtcccagctcctggggaggctgaggtaggagaatcgcttgaacctgggaggtggaggctacagtgagctgagattgcgccactgcagtctctcctggatgacaaagaggaccctgtctcgacccccccaccccccaaaaaactaacgtaaatttcacgcatgtacttgtgaggatagaattggttttttttttttttg

SEQ ID NO: 67829 - DNA, 1746 bp, Homo sapiens
agtgatccgcccgcctcggccttccaaagtgttgggattacaggcgtgagccaacgcacccagccactaatgtattattattattattctgtagagacgcagtctggctatgttgcccaggctggtcttgaattcctgcctctgcctcccaaagcgctggggttacaggcgtgagccaccgcgccctgcggctgcaggtctttataaggcaactgtgggccctggaccgctccctgaaaacctccccctcaactccctgtctcctccctcacctggtctaccccgaatccttcccctctcgccccctcgccctctccaggggaggtgagggactcaagaatcgcgccctgcttctgtccccaccgcgccgtccccaagcccacgcagtgaaaagaccacccttgaggctgattccgggtccagctgggagcggccagccgtaaatcaccgcccccgtgggccgtaccattctggccggggggacctgggaggggacgcgcggagggcttcccccggggactgcctgtatcgagactctctccagcccaacaggaggatgggaaggagacttgtgtgggggcctcgggctggcgggtcgcgggttccttatcctccgccttggcgcctctccgcccaccgcccaccgcccctccctggcattggttggcgccaggggaagccgaggctccatcctttctgcgcaggttcccgccgcactcgcgcagacctagcgcgtccaggtgggaggttagtgtggcccgggcgtccgctcctcagcggatgtggcagccccgagccatggctctcgccgtccgagtcgtttattggtaagcccagcggccagcggcccccgtccccgacccccgccgggacccgattctcggagccggggtcagggagccccggggagaggacccatgggagcccttgtatgggaaaagggagcccctgtatgtgggtggggtgggcgtacggaggggcgaaaaacagagggcggtcgtccctaggccccgtcttcgacttgtgacacgctgggcatctcgggttataaaaggtggggctgagacgagtgtgtgtcaatttcgaacccccgactccggggctccgctggggaaggggctgggggtcagctttgtaaagggacctaaggctcctccaccctaaggcttcccctcccccaatatcccgaacagtcgcggggtggggacagtgagagcccagaaggttcgagaatgtctcagcctgtgtttcagaagcacttgaattgttggcctctgcccagtgggttcccttggccacgaaccccactccttttctggcctcagttttccgtctgtggcaagagggaggctctgtgtcaataccgaacacgcttaatttctgcaagtctcaggaagggtataataggataggatataaattacgttctctccactccccagcacctaatactgtgtggcatgctgtaggtatttaataaatacgtgttcaatgaatttatcctcccaggaatcccttaagagaggggaattttaggccaggtgccgttgatcacgcctgtaatccaaacactgggaggctgaggcgggtggatcgcttgagcccaagagttcgagaccagcctgggcaacccagggagacccccccctcgtctctacagaaacttaaaaagttagccgggcatggtggcgcactcctgtagtcgcagctgcttgggaggctgaggcaggaggatcactggagccc

SEQ ID NO: 67830 - DNA, 696 bp, Homo sapiens
cagccaggaagtgatgcgtatcagctttcgtcacagcccattggccagaaccagttacgcagccccgcccactttgagaacccctaccacgaaacccctgcctacctgcagaacttggctggggaacttagtcttcctgtgtttaggaaagggatgagaacttgaaaacttggtgagcactacaaatatctaccagggctcttattttaatcgtaccgtatgcatgaaaacgccagcatcggattttggcgtaatcaagacaattcacaccttcaaagaattcagcctgaccatcacccagcctgaaaaggggagacaccgtgaattcctttctaacagcgacagcatgtggccgcgtctgagaactgcatcttctcagttcacctcggatcaccgcggaagaccaggaatcactgtggaatccctgtgggtcaccaggaatcacttccggtcatctagattttagggtagtcaagtgaatcaccatctttgaattggtgacatgacactttctttttaaaacttaaaaattaaaatttagccgtgcgcggtggcttacgcctgtaatcccagcgctttgggaggccgaagagggcggatcacgaggtcaagagatctagaccagtctggccaacatggtgaaaccccgtctctactaaaaatgcaaaaatgagccgggcgtcgtagctcccagct

SEQ ID NO: 67831 - DNA, 2422 bp, Homo sapiens
cctccccaagtgctgggattacaggcgtgagccactgcgcctggctttttttttttttttttttagcgatgaggtctccctctgtagcccaggctagagtgcagtggtgcaattatagcccactgcagccttgaactcgggctcaagtgatccttgtacttcggcctcctgcttcagcctcgcaagtatctgagacctcaggcatgtgccatcgcgctgggctaattttttgaaaaaattttattgtagagatcaggccttgctatgttgcccaggctggtcttgaacgcttgacctcaagcaatctgcctatcttgccctcccaaagcactgggactgtaggcgtgagccactgcagccagctctcaaccacttttttttttttttttttttttttttgagacagagtcttgctctgtcacccaggctggagtgcagtggcatgatcttggctcactgccacctccatctcctgggttcaagtgattctcttggtcagcctcccgagtagctggaactacagacgtgcgccacagcgcctggctaattttttatttttagtagagacggggttttgccatgttggccaggctggtgtcgaactcctgacctcaggcaatccacctgccttgacctcccaaagtgctgggattacaggtatgagccaccatgcccagcctgtcaaccacttttaagcctacggtttcgtagtgttaagtgttaagtatattcccagtgctgctcaaccaatctccagaggatttttgtgttgcaaaaccgaaactctatgcagagccagcaccgactccccatttacccttctcttcagcccctggcagccgccagtgtactttctgtttctatggacttgatgactccaggtaccttatgtaagtggaatcacacactatttgtatttttgtgactggcttatttcatttagcataatgtccttgatgtttatctctgttgtatcatgcatcagaattttcttccttctcaaggatgaataacattccattatagctatataccacattttgtttattcactcacctgtcagtggatatctgggttgcttccatcttttggctatttgctgaaatccctcttattatgttcccattgctcttggcctctcagggccatgccacttccaatgtcttcagcctcaatcctcaccgcatccgcagtgctcttaccgccctccacccacagccccactcccagagacatatgatcctcatctttcagccccttgagattgcctggctcttttgtggttcctggccattgccctgatgattctcctatctgaaaatagccctccccccaagtaatttcatactcattctttgcatttccatttaaatgctatttcttctttcaggacatcattggtcatcctcagccatcctccctcccactgccaccaaacaaacacctgaatttgccttgggattcactcctgtggattctcctaataccttagattacccctctgaacactcatcctactgtgtaatttcctgactaaatccttttctctgattgtcaatggtattaggcattcctctcttccccttaaagcattgtacactgtctgacataaaggaagaactccaatcatgcactgaatggacaggaacacaaccacagcctttctcagttcacgattctgcctccttacctgatttggggtaagtcaatattattacatcttcatcccttatcacaaactcatcacgtacttttcttaaggtttcggatctgaaacccatagtagggaaagctatgccttcaaaccataagaaatcgtccgacatgatgatgacctcttcctgcgtggtgtgagggtttcaactgtagccaccgctggaggctgtggcagctacaggcagatcagcttttacagcaaggataaaacgatctttaaccttgtcccagcatgtcacatgtttgttgtaaagtttacttgctgataaagagaggtataatgtgacccatactcaaaagattgaagatgttgagcaatcatgaacttatctagagaccattttaggggtcatctgagcttgcgttcctgagagtgaactgcaagatcgaataacaaacacgaggacaaatattttttttgataatatgggtgaatttatttcttaaggtttgagtgcaaacttaaaaacaagaacaaagcttttcatcaagcataaacacaaaatctaaataatcctgcaatcgtgcattttaacagaaagtacaaatatgaatacattataatttgtaactgcatttaaaaattaaaatatgtctctccaaatccaaaagaccacacagtctttatctgttctcatcttgttaccttagaaacatttgtcatatgctctcaggaaaatataggcaagaattactaatcagttat

SEQ ID NO: 67832 - DNA, 3069 bp, Homo sapiens
gtgaaaaatgggaaaccagttgaatttggggatgaatgattaatttaaaacacaggataagttatagaatatgtggaagatgacactatagttgaatgaatgaatgaatgaatgaatgaatgggacttacatctgtcagcctgcacacactcagcacagaatgttagaggaacaggcagattcctaattatgaagagatggtgctcaggccacgttcacaggcacagagcagtggggagaggtgccatgatcgtaaacaccacgggcaggaagttgcagaacaatttcacctctggaaaggggagcagagcagcagactcaggaaagactttagaagaagcctcaattgtgttttgactttctcactggagtctttatctgaagccatagggcaaaatgatagccttaaagagttttgttgacatgcttttcttttcttttttttttttgagacagagtcttactctgtttttcaggctggagtgcaatggcgtgatctcggctcactgcaacctccaccttctgggttcaagtgattctcctgcctcagcctcctgagtagctgggattacaggtaggcaccaccatacctggctaatttttgtatctttagtagagatggggttttgccatattggccaagctggtctcaaacccctgacctcaagtgatctgcttgcctcagcctcccaaagtgctgggattacaggcctgagccaccgtgcccagcctgtttacctgcttttctatatgtgtgagacatttcattataaaatgaatagataaaacctaaacatggctccacgtgggcactggcagattggctgggatgagctcctgagatcttatctccagcatctggtttgggttctttccatgtctggcagtaatctctggagctggaagaatcacttcagctgtggcccagagtgaggcctctgaggagctgatctgggagaagatgtcaatgtccccccagggctgagatcagggctgtggatagtgagagaggaggtaggaagaaagtggtcagacaggcagttagggtgagtccttggtaaaactccttcaaacgaagaacagcctgaaaatccagctgcaggccccagataagaaagagctcacatcagcaaaatttcttcaaatcaagaacagcctgaatatcaagctacaggccctagataagaaacagcccgcgtccttgaatggaaatgcctgctctgtgaacctagataaacaaattccactccttttttggacacattttcctccctttgatgcatgtttgtctcatttcacatgcttcctctggattgatccttacctttcacctattttacatatacttatctttctgtgattggccgtgggcaaaatcctcatttgcataaagtgtaacatcactccagcccctaattggttgcaggccaagccttcacctcagcctctaattggctcttttcactgttgtgtgtctttctgagtggcccacagaccagtcaagcacactcctcccacttcccagtccataaaaccactgaacttagccctgcagccagcaactctttgtcgggtcacctctctttgttgagagcttttctgtcactttcgcttgataaatcccactctgtcctactcagtctccagtgtcaacgtttcttattcttcttggttgtgggacaagaacctggagcttgctggtggtgggagtaaaagaactacaacactccctcccattcactgaacatcagtagtgaaaaagctgcaacagggctgggtgtagtggctcacgcctgtaatcccagcactttgggaggccaaggtgggtcaggagtttgagaccagtttggccaacatggtgaaactccgtctctactaaaaatacaaaaaattagctaggcgtggtggcgggtgcctgtaatctcagctacttgggaggctgaggcaggagaaacacttgaacccgggaggcagaggttgcggtgaactgagatcatgccactgcactccagcctgggcgacagagtgataccctgtctcaaaaaaaaaaaaaaaaattgcccctagttgagaaccactgtcttagatgtaaaagctgttattcagacaaagaggacgggtgaatgctggtgtcatcagcagagagaagggtagagttcatctcctggaggcacatttagaatagatgccatctttcacatgggcacatacttccatttcacattcattctttctaaaagaactagattataggccaggcgcggtggctcacacctgtaatcccagaactttgggaggccgaggcaggcagatcatgaggtcaggagatcgagaccatcctggctaacatggtgaaaccctgtctctactaaaaatacaaaaaattagccgggtgtggtggcgggtgcctgtagtcccagctactcagggggctgaggcgggagaatggcatgaacccgggaggcggggcttgcagttagctgagatcacgccactgcattccagcctgggtgacagagcaagactacgtctcaaaacaaacaaacaaaaaactagattataaaattctaaaagcaatcatataagcaatcatgtattttaaagacaattataataatactgccaacaacaagattatgttatttagttttcacagtgaccatgggaagggtaagaaattattttactttattttacagatgatgaaactgagacacacagatcttaaaggatacttttgaacttttaaagtcagtatttcttttgttttctttttttgtttttttgagacagagtttcactctgtctccgaggctggggtacagcgatgcgatctcggctcactgcaacctccacttcctggttcaaaccattcttgtgcttcagcctcccaagcaactgggattacagccccccaccatcatgcctggctaatttttgtatttttggtagacatggggtttcaaccatgttggccaggctggtctcgaactccttacctcaggtgatctgcctgccttggccatccaaagtgctgggactacaagggtgagccaccacacccggtct

SEQ ID NO: 67833 - DNA, 2954 bp, Homo sapiens
tttacgccattctcctgcctcagcctcccaagtagctgagactacaggcgtgcaccacctatgcccggctaatttttttttttttttgtatttttagtagagacggggtttcaccgtgttagccaggatggtctcaaactcctgacctcgtgatcctcccgcctcggcctcccaaagtgctgggattacaggtgtgagccaccgtgcccagcagcagttaataatattttcctcattttacagatgcaggatctgaaccacagagaggttaggttgtgggctcaagaacacacagcaaacaagttcccacctcaaactgaaacccagaacatgtgctcttaatcacaacactgttaggctcccttttctcccgcaggaaaaaaatgattaattaactcatccttagttacagagttagtgacccagctgtggctgggcatgttggctcatgcttgtaatcccagcactttgggaggccgaggcgggcggatcacctgagttcgagaccagcgtggtcaacatggtgaaaccctgtctctgctcaaaatacaaaaattagccgggcatggtggtgctgcacacctgtagtctcagctattcgggaggctgaggcaggagaatcgcttgaacctgggaggcggaggttgcagtgagccgagatcgtgccattgcactccagcctgggcacagagtgagactctgtctcaaaaaaaagaaagtgacctagttgtgattcaaactcaggtttagtcctttgaatttgtgctgagtcatcattctgctaatggaattggaaaacttagaacatttgttccaggaaggaatgttaggaaagaaacaagtggtcctggcaacattttatagtacttagtttagaaatcaatttttcagtatccttcagttgcaaaatacagattgtgaaattattaatgttctgttttctttactagtacctaacaaaccacccccaaacttagtggcttaaagtagagatttggcaaacttttttttgtttgtttgtttttggtggagggagggagtgaggtggctccctgacccaaggtcttccatggtccaacctccctcaccgccatcccacctgcaaagggagggcacagaactgttttctgttctatgactccatagggcagacttttttttttttttttttttgagaagggctagagaatgaatattttcagctttgaaggccatgtttctactactctgccattacagcatgaaaacattatggacaatacatccatgaatgagtgtggccgtgtgccaacaaaactttgcttaccaaacaaggtagtgggcccgatttggtttgtatatggtagtttgctgactcctggcttaaaacacaattctgtggttctagggctttactgggctcagctgagtggttctaatttggagtctgtcatgatactgcagccagataatatctagggctgggattgtttgaagacttcttcactcacatggcttgcacctgggctctgaaggttggaacagcttcgggctggttggacatctgtatcttaaagatgcctctcatactcctattccaatttcttttattccccccattccgatttctaaaaataaaagaaaaaaattaaaagatgcctctctgtgtgactagcttgggcttccttacagcatggccgtctcccagtgaggatgctccaagagacttaaggtgatactttcaatgtttcttaggatctgactttaggagtcacaggcatcacttctgctttattctattggttaaaacctagtcataggtccagtcctgattcaaggggaaggaatgacacagggaataaatactggtagatcgctctttgggtaccatctttgggaacaagccaccagtttgatttttcagagaacttgctgacttccagatgctaatattcttgtggcccagtaaagatcacacaaacccaaataacatggccaggatggaaatacatacctttatgtgataactgttcatagcagaaggttttataccctccctttggtagacagtttactggagaaatctgaaaagaatgctattgataaaaattcactttgactgtaagaattgtggttatttgataggtttttggatgctcacgttgaaacagagtggagagttgatatgtaggttgagaaataaacatttagtctggacaatgtgtgtgcattatgggaagatgtgttaagccctggccaggcctgctagcttcagagagctagctcatgggtcaacttcagactctggaagaaggactttcaccccactttccatctgcacgctatgtcaagtcaggggtccctgatatctgtggtccaagctctacaaatgcgtgtgttcactgtacagcaggggaagtgtgcctttgagtttctgctaaataggcttaattccacctgccacaagctgacaaagacctgagatcagggcttcatgctatctagttatctccctgtgtacctttgccctttccatttacctataaacggcatgcctgggcaacgcaccaggatctacttccatcaggttggtggaaaagtaattgcggtttttgccattacatttatgacattgcaattacttttttttttttttttttttgagacggagtctcactctgttgaccgggctggagtgcagtggcatgatctcggctcactacaacctctgcctcccaggttcaagcaattctctgcctcagcctcccgagtagctgggattacaggcacctgccaccatgcccagctgatgtttgtatatttagtagagatggggttttcaccatgttgcccaggctggtcttgaactcctgacctcgtgattcacccgtctcggcttcccaaggtgttgggattacaggcgtgagccaccatgcccggcctttttatttttattgattttttttttttaggtg

SEQ ID NO: 67834 - DNA, 1049 bp, Homo sapiens
gggttttttaaggaaactttggtgggcaaggggctgagggaacaattgatcggctatggatgaaatcacaggtgtgtccaaaactatctttgtatagctgagtcagttcctgggagcgggtctcaggaccaggtggtagctcttggtctgccaaaatgctcactctgaaaactatctcaaagacaatttcttttttttaaaacaaaaacaaaacgaaacattattgccaggagcagtggctcatgcctgtaatcccagcactttgggaggccgaggcagtcagatcacttgaggtcaagagtgaccagaagacaagtgtgagccctctgtcatgcccgaatagggccactagagggccccttggtcttggggtaacgccagcgtctgggaagatgcccattgcctagcggaccttggtctagcggttgcgtcagtgcctagagaccaggaaagggagtctccctttccccgggggagttagggaagactctgctccaccgcctcctgtggagggcctgagtgatgtcaggcccgcccgcagttatccagaggcctgaccatctccctgtgatgctgtgcttcagtggtcacactcctgtttcactttcctgttccactctgtatacctggctgcaccctctagatagcagtagcagaattagtgaaagtattaaaatattaaagtctttgatctttctgaaaagaacataaaagaaataatgacataagctatcctctctctctacgccttggctacctaacatagaagggctccctgtccagtggacacgtgactcacatgaccttatcaatcattggagatgactcacactccttactctgccccttattatccaataaataacagcgcagccaggcatttggggccactatcggtctctgcgtcttggtggtagtggtcccccaggcccagctgtcttttcttctatctctttgtcttgtgtttttatttctacgatctctcgtctccgcacatggggagaaagacccacagaccctgcagggctggtccctacagtggcgcaatc

SEQ ID NO: 67835 - DNA, 1801 bp, Homo sapiens
gtgagccaccgcgcccagcctgattggttttataaggagagattagggcctctgcaagaggcttcaggagaaaccaaccctgccaacaccttgatcttggacttctagcttccagaagtgttagaaaataaattcctagccgggcgcggtggctcacgcctgtaatcccagcactttggaaggccgagtggggtggatcacgagttcaggagtttgagaccagcctggccaacatggtgaaaccccatctctactaaaaatacaaaaattagccgggtgtggtggtgtgcgcctgtaatcccagctactcgggaggttgaggcaggagaatcgcttgaaccccggaggcggagcttgccgtgagccgagatcgcgtcactgcactccagcctaggcgacagagcgagatgctgtctcaaaaaaaaataaataaataaataaaataaaataaaataaaaaagaaaaagaaatcctgttatttaattgcacccaatccctggtacttggttatggccgccccagcgggatgaaacagccctccctgcccccacggcttgcctgagcctgggtctggggcgtgtgcgcatgcgcggtggagcttgtgctccggaatccggtgcggaggcttgggctccctgcgcttagcggtgtagtcgctggacagctccttcagccggaatctccgcgggtgaagactgcggggatcctcggtgccaaagcttctgtggtcctcctgctttccttttccccctgtgggaggaggtcgcgggctggaggtgtttcctcctggtcctgagcagggccaacctggaggtaaaatggcccctgcgcctttaaacagccctcctcggcttgtaggccctgcttggttgctccagctttttcagctgttccagagctcacccggagctattttcatccgtgggatcacgtggagggctgggactttccaggcttccttagtgatgtcacccttctgtcattaggcacccgagaccagtattcaaaaaaagaatgttgtcgttatataactatattggagataagtattcctcaaaacagattagctaatcctcctatgcatctggctgtctaataaccatcatatataatatcatactcaaatacccagaaaaagaaatattgaggccaggcgtggtggcttacgcctgtaatcctagcactttgggaggctgaggcaggcggatcatgtgaagtcaggagttcgagaccagcctggccaacatggtgaaacaccttctctactaaaaatacaaaaattagctcggtatggtggcgtgtgcctgtaatcccagctactactcgggaggctgaggcaggtgcttcatcctgggaggtggaggttgcagtgagccagatccttagggccaactctggttcatttaatgtccatttttagaaaacctgtgagctccattcacagtgaaggtttgaagcccagaagtggcctcccaacagggtaccacatttcccagcacctttgcagctaggtgtggtcatgtgagcgagttatgtggtcatgtgaccgagttccagtcagtgcaatcgggcatctgtggggagcaccgcttccaagagtggctcctagaaacctcccatactaccctcctgcctactcttcctgaagcccagcactaagcgtcatcccaactcgatgggttttgaattttttttttttttttttgagatggagtcttactctttgtcgcccaggctggtgtgcagtggtgcaatctcggctcactgcaacctccgtctcctgggttcaagcgattctcct

SEQ ID NO: 67836 - DNA, 1409 bp, Homo sapiens
ccccccccggccccgcccctcagttccatttggcctctcccctttccaggtgaactcgcacctcaaggcctcttctcagaggacctgtccaactgtctctgtctctcgtctaccctctacctggcccccctccctctgggagacacctctctgcactctccggcggcccgcagcccgcgctcttccgtctccaccgcgctctcggcagcctcagcgtccccacgcccactcctctgcagacaccccgacatggcgaagcataggccccaagcattcggcgcacccgccgccctccgcctcccatctgcttgcggacggccccacttgccttgcgttggtcccgcgcgccgctgcccgggcaacacactcagatccgccaggcgcgcctctgcagtcccaagttcgcgccacggcattcgcgcgcagacgtctgcgggcgggggcggggcagagcctaggggcgggacctgggcaccgtccgcaccgccgccgtcgcgcggaggacactgggagtcgtagtctcccgaatgggaggagggcgggaaaaggggtgaagtggggcgagccctcccgcagagcacactgggaaaatgcccgcgctttccctcgccctggatgagcgggtgtggctgagggtctgaggagtgactggcagggaaagaggaggaatcggtggaagcgcccccgcgaggcacggcgggaagagaggcgggagaccgcgcggggcatcccgggagcaagggccgggccaggcctgggcgcggggcattgtgggaggtggacgccgctccggggcgggtaggtgagtggggaggggcgggaagggtgcacatcttggggaggggagaggcacagctaggtgggacggcggggctggaaggtgccgcagcgggcggggagggggggagtaggagggtcgggagcgggctggatggggctgctcgaggggagacgcgcagctggacgtggggggagcatctggggtgaaggagcccatccgaggacgaggggccatgtctagaacgaagatgcatattgcgggggatggtggatgtaactgggaggaggggcccacagctggactgggggccgcatctgaggaggaggggaccacaggtgaatactggtgacacttccgaggagaactagccacaagtggggcacacacctgtaggcgaagcgtggataactgcatgtggggagtacatctggagatgagagtgtctcagggaagccccagctacagctgcatgtggcgagccatagggtcataatcgggggaaggggcaacagctgcacgccagaggcacatctggggagtgcggagccacaggtgcatgaagcatgtgaccgggtgaggggtccgtggcctggatgtgggagcacatctggagatggagcgtctttgg

SEQ ID NO: 67837 - DNA, 630 bp, Homo sapiens
tggagagagagaggagacagcttatgccattatttctgcatttcagagacttttagtacttttactaattctgctactgctatctagagggcggagccaggtgtacagagtggaacatgaaagtgaaacaggagcgtgaccgctgaagcacagcatcacagggagccggttaggcctccggataactgcgggcgggcctgactgatgtcaggccttccacaagagacggtggagcagagtcttctctaactcccccggggaaagagagactccctttcctggcccactaagtaacgggtgccttttctaggcactgacgctaccgctagaccaaggtccgctaagtaacaggtgccttcccagacgccggcattaccgctagaccagggagccctctagtggccatgtctgggtgtgacagaaggctcgcactctcgtcttctagtcacttctcaccgtgccccttcagctcctatctctgtatggcctggtttttcctaggttatgattgtagagcgaggattattataacattggaataaagggtaattgctacaaactaatgattaatgatattcatatataatcatatctatgatctagatctagtataactattcttattttcta

SEQ ID NO: 67838 - DNA, 1587 bp, Homo sapiens
tgggcgacagagcgagactccgtctcaaaaaacaaacaaacaaacaaacaaaactgatgggcggcgaggtcctgaaaggggcggagccgggagggcctgtggagcggtgctgcggagccctgagaggtgcacggctgtgaggcctgagaggggcgtgccgtagggagctgtgatgggcggggctgagacctgtgaggagagtgagtgggaagaacttcgaggggcggggcttcggggccggcgaggggaggggcacggacaccagtacaggacggggcttcgcagacagcgagcggaggggcttccccgtaaggggcgggcttcgagggtcgcgtttggaaggccttacgaggggcccggtggaagggcggtgaagggcgggctaatcgggaggcgctcaggccttgaaggcctgcgggaggtcgaaatggtcctggggaggtcgaggctgaggtctcactagtaccgcgggcctggaagcggcgggagttgaaagagcctgcggtgacctgtatggaagccctcgaagccaggccgaggtcctacaagacggagcccgagaggtgccggtcttaagctgactgtgaccacgttaaattaaggattcataggaaggaaggcggtgtcgaagccgggagttgcgcggagaaggagcgctcaacacagcctcagcggttcactacgcaagcgcgaccaacggcttcccgggaagcagccaaaaacgcttggccgcctaccacgtccgcgcgctggagggcggaagtgggtgagacctcgggcactccataccgccccccggtttctggccacgccccctctggttacacccactcgctctgtaaggcacgccccctccgcggcggcggctgctgcccacgtgggcctccccgggcgggcgggcagtgggcgcctctccctgcaggctgggtgtgcccgaagcctgcggtttcctgtgggaggaagcggcctgcgtacgctcagctcagctcataatctcggaggcccaggatggggagatcccgccgccaccctcagatcctttgattcttccccttctacatagccatagtgcggggacccccctaatatccccagggtacccaagcctggcgccgatcccactcagggaacttgattctgagtcctagactcgtgtttttcacctccccggctcaagtttccatcttcctagcccctggctccccctagtcctctcaagaaagtggagccctcttttcctgctccccaagaggaacgtatgtctccccagcccctaatttttccttcagtgacccagactttgcaacttccttagggatctgagtgcggaccccagtttctgtctctcaggcacttaagtttgagactacttattctcccccagggaccctcattttggattcccaactttagccttgagacccaatggacccaagaatttgccccttccccaactcctagagatcctgaatcagggtcccccagtactgactccactcagagccccaatgcctgatatgactagcactaccctaagaactgccctataatgtatttactattatctctatttttcagatgaagaga

SEQ ID NO: 67839 - DNA, 1186 bp, Homo sapiens
ccccattccaagagtttctcatctcaaccctgggagggagccccagatgatgtctgtctggagggattgggtgggggcccaaagaaagaggaaccggagtgcctgggccctcccactggcagccgacctcagctgggtgcggtgagggtgggtttataaaagggtcagtatatattgagaggaggagagaaagagaaacgggagcaagagagaaggaggcccagacagtgagggcaggagggagagaagagacgcagaaggagagcgagcgagagagaaagggttctggattggaggggagagcaagggagggaggaaggcggtgagagaggcgggggcctcgggagggtgaaaggagggaggagaagggcggggcacggaggcccgagcgagggacaagactccgactccagctctgacttttttcgcggctctcggtaagtttccagtccgttattcagggctgggacttcttaatttacttgggaatgtagcagtttgggaaggacacccccaggctgggagagacgtccctgactcttggaaatccttttaatttaataagtgatctcttagcacttgaggtggggatatgggaaggggtggggcccggcaaagttttggggtcccagcagagccctccactggaaaacttcctgcagtttttccctcagcggtgtccactgtcctctggggtccctgagatcagggcattgcatgagaacaccccaaatctgggagacctctaggtcccctgttcctgggcaccaaagagtcctgggaggctaactccttcttgggcctctcttccccccagcgcgaatcctatccatttcctccagaagatgtccaacagtcaccagtctggcagcagggtggggtgaggacctcgtggacatagccaggggctggggtttccctggtgcttagagatgggggggggtggggatgagtcaccagatgactcaccaggtccccctcctcccctcaacccaggagaggagtggtgtgagtcaagaatgcctgttgctgggggcagctcctcaatcctgatgtcggggtgcagggtggggtctcaacttgaattttcactatctggcctgtatgtaacccagagtcagggttctggggagagaggagccacattgctagtcctcctcattcaaggaacccaagagtccatctt

SEQ ID NO: 67840 - DNA, 1149 bp, Homo sapiens
ttggcttatagaaacacactcaaaaatattccttggatggatagagagatattattggacctagagagattaaatcagttacctaaggccgcgctacagttgcacggcgctgggcgggggggaaagaaccacaactcccagcaggcagcggcgctgcccacgggccctccggcgcttctttgcccccatgggatattgggaaatgtagtcttgagggggcactgcatgacgtgtggttttcatcttccgcaggcgtggcggtgtttactggcgccttgatctatgccattcacgccgaggagatcctggagaagcacccgcgagggggcagcttcggatactgcttcgccctggcctgggtggccttccccctcgccctggtcagcggcatcatctacatccacctacggaagcgggagtgagcgccccgcctcgctcggctgcccccgccccttcccggcccccctcgccgcgcgtcctccaaaaaataaaaccttaaccgcgggctctgccttgatcttccttccttccgcctccagggacccaggctgcgcacgcttgacctctcctgaacctaacatggtccccaccgccagctgctcagccctcagaatgcccatctcccagcccccaaccccttcctcccgaggacacaggagccgggaccccaggcaccttttccctcccacagacccaagagcctgggccttccccgctcaaggcccaagagacctctgtgaggcacctgaatctagaccttcagacacttctgggaagaacctggattctgggtcccagcagaccctgttaggataggaagcctgcagtgaccagtcctgtctccttgctcaagcttctgtcactctgttgctctctctctctgaaccccgggcatagtgtgtgtttctagattgtcggactctttttttctttctgtccaggttggagtgcagtggtacgatctcagctcactgcaacctccgcctcccgggttgaagcgattctcctgcctcagcctcccgagtagctgggactacaggcacgagccaccacacccggctagttctggactcttttttctttctactaactttccatttgggaagacagctttctttttccctctaggaaaccagtctccctctctct

SEQ ID NO: 67841 - DNA, 1355 bp, Homo sapiens
tgattacagcgttgtgactttataggtacaattattatcaggtagtagaaatagtaatgatgaggatgattactatacccatcttaaagagggaaaaaccatgccccagagagtgcctgttcaagccctcagaacaagccagagttgggaatggatgctgcgtctgcatctcggagacctggctcctgcattccagctcatctcccgcccactagggaaacacgaagggacccgggaactacaactcccaggaggcgccagggcagctctctgcagcaactagggccctgccgccgcgaagcctgctgggagccgtagtccccaggctcttgggcctgggacaggcggtacctgtattaggaggcggagcagctgctccttggagaagggaatgaagcgctcgcggtactgctgggcccagtcgcggggctccctggggttccacatcttgcgatactcccccattttggctgccagcgatgagagggcccgggggggcccgaggagcgcgggcaacagtggccatactcggaccctggacccccagaccccccgggtcacatgcagcatggctagaccctttccccggagcctaaacagaggaaaatgggcaggggtcaaaggccatctagaggaaaagcgccctctccacctccacgtcccaccctccagaagccgtctctaccccaggcagggcgcagagcccatccgctcgcctcaaagcccctgttgcctgtccccttcccacactgctcagttggcctgggtcccagacaggggtcagaggtcttaggttctggggcgtttttcaggcccagagaccctgtagtggtacaacgtttctttggggtctagacagcgaggtagatcttaggagagcaggaaatgctcgtaaaggttacctagggggtgcagggccgccctccctggccatgcaatcccccgatttctccctcaccttagccaaagctcgactgtcattgagcctcctgcgcatgtgcaggagggcgtcctgggctcccgaggttcggcttcacccagcagtaaaacgcatgcgcaaagcttcggtcaatgcgggctgtccatttctcaccgccgactccctacatcaactacgcatgcgttgcctgcctttctccaccgccggcctcgtttgggcgcgacgcatgcgccgcaggagtgtctccttgtcagcttgctacaaagggaaggggcggtgtggacgcgagactccctagagggatggggcggggtagggctcccgcgcgcagtccgccaacggcgcgcagtccaacgttcgccgaggccacgccccggctcgtgtcagctcctgagtaggcggaaagagggagggg

SEQ ID NO: 67842 - DNA, 1451 bp, Homo sapiens
aggagtccaggcccccagcccctcctccctcagacctaggagtctgggacccacacccggctcctctgcctcagtgggggccagagaggtggggtggagcctctaccttcatacacgtgttgtagagtgagatgtagttggtgaagaggtccagatatcgggcagtgaacaccacagcaaacaggacctggctcttccctgaaattcctgtggtccagagacagagaaagagagagagagagagacagagagagagagagagacagacagacagacagacagacagaaggagagaggaagctgggggtgggctgcatgggcaataaactaaggcagggcgcccgggaccagcctggaggcagctctggagtgcagctgtccccggaggcctccccagcccgccccgcctgagcagggccctttcccacggaccacagccagggggcagcccaggcccccgaagctactccagcccgaggctccgtcccagactaggcctcatggctacccctggcccctcagggtcctcccgcagtctggacctgaggtgaggcctagggaggaccttccctgacctcaggccccggatccggtcacctccctcccgttcccttcctggccgccacggtccacgtcaccaactcacagccacctccccgcctgccatggttccctgttcccggtccatgaaccctcgggctgcccagattggggctgggggtggctgaattgggggcctaaagccattcacatgaaactgtatgcacccccgccagtctggggaagggagctgatcccctggagacccagaacctagaagagagatccccagcaagcagtgggggtggaacctgtgcccctagtgcccccaaacccttcctgagtcctgcgacgtcccccaacccccgcccgcaatctctctccttcgccagccctggtgggcctctcaccggcgcacgagcgggacttccagattttgagcagtagcaagatgatggcgaggaggtgggagaggtctcccaggaatcggaagagattcatggctggggaaccctggcagggctgagcgggagggaggcaggctggcgggggggtgccccccgaggctgctggtctgaacgggtagctgggctggggggacggaagagggaccctaggtgcgctccgctccggggaggggactttgggagggggagcaaaggctggagctggcggcggagctggagccgggaagagggaggagagcgagagggggaggagtccgggaggagaggctccgcccccgagggcggggcctggatccccggcgccccctatcgcccacctcctgctttgccgtggcggcgctaaacgcacccccaaagctgccccataggaacttgggagggtcgcagggttcggaaagtgccaaatccagcaccggttcgcccaggcagtctgtgtctctggaa

SEQ ID NO: 67843 - DNA, 1558 bp, Homo sapiens
aacatttcattatgtcaattagccaaaccgctggtgctgatgggcgataaagagagacgaagcacttgtaatagctgcctccagagggtggactttctgattaagtgctcgctgaccagagctgaaatgtgaatgtctggttaggcaattgactgcccctagagggtagattgaaccgcctaacttacagataatatccatcctgtctacaagaaagcatttttgaaacaaatgaaagccatcacaacagagagaggaaaagaaaccggccttatgggtcctcggggagtagaaactcagtctccttgccagtgaaagagcaaatttgcatatatgaataattaattaactggaaagaacgctctcggaatcaaactggacaatggggaaaacaagcctcccgtagaactacaactcccagaaggccttgccactaccgcgaggaacagcgcccaaagtcacgcgaagatgcagtttctccgtatccgcaggcttctttcgctggcgccattacctgagttctcctccagcgtttccgcaccctctccgattagcggtcccaggagtttccaaggtaaccgcgcagtagggcggatctcattaggcggaaagcgaaacccggaagtgacgctcttaccgggtgtcagcagcgagagggttcgaagatggcggcgcgcaagggtcggcggcgcacgtgtgaaaccggggaacccatggaagccgagtccggcgacacaagttccgagggcccggcccaggtctacctgcccggccgggggccgccgctacgcgaaggggaggagctggtcatggacgaggaggcctatgtgctctaccaccgagcgcagactggtagggctgagtccggactccagggtcctgaggtggctgatcccgagcctttaacctgagaggtgctcgggaagagaaggctggggtctaagagaagtgatttcataccggaggcggttgatccatgagggaggtggggactgagctcttactgtcccgtcttaactcgtaaaccccgccttccatccccaggcgccccctgtctcagctttgacatagtccgggatcacctgggagacaaccggacagagcttcctcttacactttacttgtgtgctgggacccaggctgagagcgcccagagcaacaggtaagacccgaggcttttccaggaccaggaggctcagtttccagccccttcctcagcacccaggagttagggcttccagtttctgcctctcgcagatccaggagtctgggtttccagcctctctccttcctaagaatcctggaatctagtgcctaactcaccccacaatttctcccagactgatgatgcttcggatgcacaatctgcatgggacaaagcccccaccctcagagggcagtgatgaagaagaagaggaggaagatgaagaggatgaagaagagcggaaacctcagctggagctggccatggtgccccactatggtggcatcaaccgagttcgggtaagtatggtcccaggagcctgctctgcatactctgaaacacatctgacccatc

SEQ ID NO: 67844 - DNA, 1833 bp, Homo sapiens
aaaaaagaaaaaacgaagaagtcttttgtttcaccactccacgactccgaagaggctgagggggatggggagggcatagatggtgataaagaaggagttcggcggtaagaaggggctgagaggaggggaaatacgcggagaagaaatgcaaaagaaaaggaggcctaaagccgctcccggttgcatggcaacctttgcggtcagaagccagcatggcctgctaggaggtgtggcttacggaaacaagccagttctagccccgcctcctagcaacaagactaacaaagtaccgccccctagcaacgtattatcggaggcggggctcggtttacctagactccaagtgtccagggcctttgagcaggcgcagaggtggctgtaccgcgtggctccgcctccgcgcgacacttttccggggcttctcattggagagcaagcctgtcaagtgctttctgttgtttcggaggcggggcctgctgccctgcctgcactccgattggccccgcgggccgtctacctctggccggacatacctacaccggctttttgtacgactgttggccctggagaacgatcctttggtggcgagggcggggaggacgaaagcgcccactgtggattggacagtgtcaaaaagaggggcggtccctactgaaggggcggttgggcgacgaagggaagagtcttttcagcgctgaggactggcgctgaggaggcggcggtggctcccggggcgtttgagcgggctcacccgagcccgcgggccaacgcggatccaggcccgactggcgggaccgccccggattccccgcgggccttcctagccgccatggaggacggcgtctatggtaggtcggggaggggcggggtcggctgggagttgctggagcgttttctcctgaacgttccgccgcgaacgtttccccctggcgcgcggcgcccagaagcgttcggctcagtcgtagacttgtcgcgccgcttttgttgggcgctggacgggcttccggcggggcccgaaagccgggcgttccaggccattgtttgggctgagcctgtttccggtggcggcgggaggggcgggatggagtggtggaggcgaggccggggcggaaccattcccgctggaggggcgggcgagcccagcgcctgccggggccggggaggggcgcttgggttgcggggaggggagaaatcttggggggcgggggccttcgatgtcccgccccaccttcccaactctcctgagctgtcatcagttcccccggctgtagtgacttttcatggacccagtagtccggataaccaggtccccagctacctcgccagtaatggagtcagaaaaccaaggcctcagtccccttccaagtaatggacctagaagccgaggcccccagccctttcttccctcagatctaagagctcaggcacccattccccttctccctcagactcaggaatccgggccccaattccccttgtcccccaggactcaagagtttagagccccagctctttctcctctgcagggaggaatccaggcccccagcccattcttctgtgcagacataggaagccccttacacatcctctcccagctctgtccgcccccagattgcaggaattcaggctcacggcccctagcactgacttttaaaccttgaccccgatccctagaacccccagacctgactccggaggagcggatggagctggagaacatccggcggcggaagcaggagctgctggtggagattcagcgcctgcgggaggagctcagtgaagccatgagcgaggtggaggggctggaggccaatgagggcaggtgagggctgg

SEQ ID NO: 67845 - DNA, 1683 bp, Homo sapiens
acctgcctcggcctcccaaagtactgggattacaagtgtgagccacgcgcccagcccacctggctaatttttgtatttttcatacagacggggtttcaccatgttggccggctggtctcgaactcctgacctcaaatgatctgcccgccttggtctcacaaagtgctggaattacaggtgtgagccaccatgcctggcctaccctgtccttgtggaaaagcttcctgtctgcttgttcctataaaatgtaagctcaatgatgacaggagctgcggtcactgctgtgtccccagcatcccgtctggcacaaagcacaccttttccctgtggaaagagctctccccaggaactccgaccaaactttcctatgactctagctctgacttccctgggcgagcagaatgaaagccccatccattgtacagaccagaaagctaaggtccaggaggtgcaggttctcgttgggggcctcatatcaggctccctcatgctccaccctgtactttgtacctgggaggcctgggtcaagtcactgccctcactcccagtccctgagcttgagtttcgctcttttaatgggaagcatgaccttcatgcttcatggagactttggggtatgtggcatctcttggtacccagtaaatgtttgctaagtggacagagccacattgagcagggcagaggagaggacccgcctcaggcccccacaccatggtcttgggagccagacaggctcagcagctcgcagcccacgctgccgcaggaatatttgtcaactgagcgaaaggatttggggtttggcacaattgcaccctccgtctcctctcctggtgattaaaggtgaagccattctcgcttgccagccctgccagctcagccctgactcaccacttggcagtgtccccataccctggaatgcacccccaccctgtcctcacagaggccctgcgatgatggcctaagggagaaagtgacattcagagtgaagcctgaggatgcagccaagtgaaggaagagtcagcccccagacctgtcccacctgcccttgactctctgccctgtccaacctctccattcccacagccctggctcactatcctctcctcagcctttccccagcctcccagctcccactcttgcccttctgcccccaagagaccccagagcagtcttcctacacccaacattgacttccctcccttgcttatagtcgtccgtggctccctggcacccccaggacaaagtcccagctcctcagtgcaccccctgccatctctcctcagccctccatgcactctaagtaaccctgaagccacaccagtgtccttctgttccttgagcgggccaagctctctcctgcctcaggccctgtgtgcaagctgtcccctctgccagcacgccatccccttccccttcacctagttaatgacaaccaacccttccagttcccagttaaattacacttttttttttttttttttgagatggagttttgctcttgttgcccaggctggagtgcaatggcttgatctcggctcaccgcaacctccacctcccaggtttaagcgattctcctgcctcaccctcccaagtagctgggattacaggcatgcgccaccatacccaactaattttgtacttttagtagagacagggtttctccatgttggtcaggctggtctt

SEQ ID NO: 67846 - DNA, 556 bp, Homo sapiens
ggtcacacagctgccaagcagggcgtagccaggatttgaaccagggaagcctgactgtatcacgccctggatggggaacttggggatgagcaagacccggaaggagcgagatccgggagggagactcagcccagacaggaggcgttagcaggcgctctgcggttccaggcgtttccttgcattccctgcgtgctgggctacggagagtgtcaaggccagagaagccacgccggcctttggacctggggcgcctcgggcagccaaggagagctgcggtggccgctcctccccgcgctctgatctcgggagtccctggcgccggcaccttctgatctctgcctcttattgacggggagggcgaggaggggccagctctggttttacaaccccggccccaccttccttagggagggctgagccacatgaatgattttatggccaaagccctgccagtcatgaggctgctttttcttttttcttttcttttcttttttttttttttttttttttgagacagagtttcactctggttgcccaggctggagtgcagtggcac

SEQ ID NO: 67847 - DNA, 734 bp, Homo sapiens
tagctgggcatgctggcgtgcgcctgtagtcacagctattcgggaagctgaggcaggagaatcacttgaacccgggaggtggaggttgcagtgagctgagatcgcgccactgcactccagcctggaaacacagcaagactccgtctcaaacaaacaaaaaacaccacacacaggaatagctaaaatagggtgcagccacttcctctagggctgaagccaaactcccaagaaagaaagaaattgggaagaaggacttccctgcccaaccggctccccacacaagattagagtttcgctgcagaggtatggtcatgacccactgggtgactgagaagttcactgaagtgcaacaggccactgaaatttgctagggggaggggtaaacgtcactgcgtgtctagtgcagggctggcccctgtccatcacaagatcccgctaagaggagctcgtgagaatcaggaagagccccatcctcattcagtgttcctccagcgccctctgctgacaaggtttaacactgagctagctggcagaggagaaatgtttacagggtccagctccaatatcacaaaaacggcagagaggcatgaagttggagccaccagcctgtaaactgataactggtacaaggtggttgttagaatgaaatccagtgaatggattggatgtggtggcttacgcctgtaatcccagcactttgggaggccaaggcaggaggatcgctagaggccagg

SEQ ID NO: 67848 - DNA, 899 bp, Homo sapiens
gtttaacatataataacataatgcaatataatataatacataaaatgtctgatgggataaatttacattggggggagagggctggagatagagttagaggtgggtgtggggctgcaattataaataaggaggtcaagggggcccccagtgagtaaaaacccgggaggtgatggtgggagccacagaggtttctagaggaagagcatttcaggcaagagggaaaagcaggtgcaaaggccctgaggtgggtgtatctgaggtgcaagagggaggtcggtgtggccggagccaagtgagcaagtggggaaaggagtggagatgaggtccgggtggggaggcaacaggggccaaaatgtgcagggccgcgtgggcccggtgcggacttgagctctgaccgagtgacgaggcagcgcggcagggatcgcagcagaggaggagcccgagcgggcttaggcttcaccggcgccctctggcggtcagatggggaccgactgtcgagagagcagaagccgggaagcccgagaggcggcgctggccggggtccaggggaggggacggtggctggactagggtgatggtcacggaggtattttgaaggtgagaccgggaggatttgctgacagactggatgtgggtgtgagagaaggggatgagtcaagggtgactccaaggtttcggcggaagcaactgtcagggtggggcaactgggaaggggaggagggaggggagcaggcgggggaggaagacacgggctctgcggcggcccatcccacgtccagcagaggctgccggtgggcacagaaatgcacccatcgggatctgaggggagagacttgggctgacacgtccatttgcaattccttggcacatatattctgtaattaatcgaagctccagga

SEQ ID NO: 67849 - DNA, 2350 bp, Homo sapiens
ggcccaccaccaggagacctgtgggctgccactgatccctctgtaaaaaggggctgtttacaaagccttcagcccatggcacacagaaccctgaaacatcgtaacacagcaatcatattaacttaatacaaaaaggtcaattctttacaacttgtattttgcaacaatgttatcaaaactggttcccatacccggagggataaccaaaaatatcaaaccaatggcagtaatgatgaaaacgaatccttattcagaacctagcaatactactagaaccacctctcctacagcatcagtcaatccaacaacccttaccaaatagtgtctttttaaaacatcgtttttaaagtggagacagggtctcacaatattggccaggctggtcttgatctcctgggcaaggaatcctcccgcctcggcctcccaaagtgctaggataacaagcgtgagccgcctcgccaggctcctaccgccctgctgcctttctgagcaacttaagtttttcagactgtgttgacaattacaagaactatttaatagctccacttatgcagcacttactgtgtgcaaaaccccgtgatgagcatctcctgtgaattatttcttcccaaattcacaaacttgtcagatgagattactgtgtacccaacgaacagccagacactggggcaaaggctcaaaaaccatcacaaggtgggaaggggcctgagactcagagacctgcctggtccccaaatccagttattcggctctcgatcctctcacccgccgcggcccccatcgaacccgacttttcatactagaaagtgacaggtccagataaaggcagcaaagccaaataactaagagtggctgcgggtccagccacctgggtcggaatcctggctctgccacttcctggctttgtaaacccagtcatatcagcctccgagtacctccacttggtcatctactaagtgggggcggtaggctatgactgacccatccctgctttcctggcccccagagtaggtccccagtatcgggaattgctccctccgggcagccgcagaccccctgccgccctccagcgtgcccctagcccaaaaccacggcggatggcagcggattatccagccccgaacgccgcaaagcgagctcaccatgatggcgcctcctgctcggccaggtccggaaagagagaacgggctggggtgggcggggaaagcctcaagcgagtggcgccgccgtgacgtcacatgggtgcgacgcggcgctctaccacgatccggacttctctgtggtgagttggacgactgactagccgggcgataacggcagagagcatagagcgcaggaacaagcgcaacgtccaagagggaagggccagcacgtcgggggcctctctggccctacccaggccgtgttctcgatagctttccggaagaaagggatctgggagcgagatgcgtgtagctagcacgatgcgtcgcgcggtgacgctctggcccgacgccgacggcctctcagtggctcccggaggacccggcgggcccagtgttggaggtgaggaggcggggctggcagggctagtcggggcatctggaaatttccgaccccacgcttcgggcgtttccttatcaggttcaccgctccctgatctcgcgctgcacttcgtaggcgcagccgctgcttgggaagtcctacttaaggtctaacccgagatgatcttgctgcacctcaatctatagcatcctgtattcccatcctttgagttccgcttctccttctcccccggcccctagatggcccttccctgacctagaaagagggagacagagtttcataggggaggcaaaatggagactccgtggcttgggggtggggggaatggaggcccaaagggtaggaaggagacctagaaagaggggtgagatggagacccagggagaagtagtggcaaagaaagatggtgagatggggccttgcaaggctataaccaaattcaaatcctggctctgctagttactaatggggtgattgggcaagtcatttaacctctctgtgatcttgggaaaatcacttaacttctttgggccttactctccttatggacaaaaaggggatgacaacaggcctggcacacaggggtgtttttcaggattatgaaagttaataaaactgctgaggtcaatattttgcacataataagtgctcaataaaaattagccttcactcctattatagcatacatattgtgtgcaaccagatggactggctggggcagtgattaaaatgacttatctactcttccccccacccgccagggaggcccctgcctcttggttctcaggcacattgagcctggaag

SEQ ID NO: 67850 - DNA, 858 bp, Homo sapiens
tttatatctctgcttttctctgggtctctctgactctgtaactgtccgaaaaaaaagtatccttcactttccccactctccctctcctcccagctctcttattgcctcatccaacctctgtgggtctctgccttgctctgtgtctggatcggatctctgggcctttgttacgcgtgttagagtctctgtctttgcagctaaagacctcctccctcacgccccttttcttttgtgaattcaatggatgagacaggcccactctcccttaacaaagatggcgacaacggcgctgtctatggggccgcgacgtcgtctccgctgcgcgtcggccctcacccacgatggcggccagtctcccgaagcgcgaggccccgcccagctctcggcctctcccgcggccggtccctgcaccaagctcgcgagctgactggctccaccccccgcgccctcgtattggtgcggcccaggccggctgcacggccattggctgagcggatgcacaccctccccccacccctaggtctgatgggggctgttggtgctgacttgcgggaccgcctggaggaggacccggcgtgtgaggagggtgcgggggtcggggcagggaccggagtctaggggactgagggaccaagaggaacagagactcaggcccgggactggggcaccggggtgggagatggaaatggaaaacctgggccaggactgaacccagccaggcctgggactgggttctggaaataagagtgcggatggcggtttgggggcccagggccagacacgcaggcctatggattggggaccaatggatggagacccaggtccaggtctcggggacccagggacagagacccaggc

SEQ ID NO: 67851 - DNA, 885 bp, Homo sapiens
acccgggaggcagaggctgcagtgagccgagattgcaccattgcactccatcctgggcgacaagaccgatactccatcacaaaaagcaaaacaaaacaaaaacgcaggcagagaaaagtgatttacatctgctgttctcttgctagatttatgtttctgtctcctatcctcttcccctttgcatgggtcttgaccacaggtgagtcacccagggtggtgagagcagcagcctgagacaggaccaggtaccacccagagtgatgggtgccaacagaggtctagggcttccctggagttcagaggtggcatctaatcctgcctggggcccctaagggctggaagtaacctaatcctgggtaataggtgtttggggtgaggaaagtgggaaccacagctctgaactacagctcctcccacacatggggacaaagggcatttggtttcacacctaagccctgcctttgtctcagcagctaggagttggggcagggctgcatacctaggcctggccacatgagagccagcaggtcccaggggccagccctccaccaattccgttgggggctgatgaagggactgtttccaaggtggggggcctgggtcactggcctctgcagaccctaacctctctccacagagatcacccctgacctgctacctcggccgccccggttgcttctattggtcaatccctttgggggtcggggcctggcctggcagtggtgtaagaaccacgtgcttcccatgatctctgaagctgggctgtccttcaacctcatccagacaggtaagggccagtgagaatgggagctgggggctgggacagctgagtcctaagggagcaaagtggtgggtgggactcctgggtctatggggctggggtgg

SEQ ID NO: 67852 - DNA, 621 bp, Homo sapiens
tgccccgtggccaaggaggactaatctgtggctgcaggccaggagaggctgagcactaatcccaaggagaagcccaggcttgactgtgagaaaaggcccctccctggctgtggggcatgtctccagccaagtctatctcccacatccagctctgctcaccttctgctcctccggcacctggatttttcttgccttcttcatgattggctggggcttaagttcctcttctgagaagcgatgtcttcgagggtcaaaggtctcgtggccaggaatgcttgatagggcaagatcagctgggtcgggttcaaaggtcatcaacacctccacggtgtctgggtccacagggctgggtgtgtcccgagaggtcaggccttggggaaacagcacgtgtcagctgagtgtgtattttaaggagggggtttcctgaagctactttttgctgtggtatcatagccacatggaaagtccttctgggatctagcataaattcggccagggattaatctccctaatataaaatatgaaggttcccttggccaggcgcagtggctcacgcctgtaaccccagcagtttgggaagccgaggcggcgaatcacctttagtcaggagttcaagaccag

SEQ ID NO: 67853 - DNA, 2856 bp, Homo sapiens
gccctaggtaacacacgaatcagggctattgcttctacacttgatcttagccaaaaggccgagaagcgatggggctattgcttctaaaacctcaggacttcagatgcacagtctagcctgaatcctacttaccgaatccacgacctaagcttagaccccagactgtccagagaaaaagaatctactgcactgaaaagctctcaagttagagtctaagagctactcgctggaaagaggaggagaagctgctctaaggttccagaagattggttcgaaaggaggcgcctgtacctttaagcaccagccagccggggccagctaaggacacaggttcagggccgagtcacgtgctgacgcctgcttccctcctcctcccttcctcccaggcccccgccatcggcgccctcacgttcccccggccccgcccccctcgcgcttgaaggcgcctgcgcgaagcgcggaggagggatgggaggactcacgtggcgcaggaatgtgccgctgggaagggtagggccctggttcggcccggaggtcggacctggagcaggtgtgcccaggaatccccgacctgcagtccgtccctggagacctcaatgtgcccaaagggaaacatctttcctcttgctcttccagtcacttagttccactcaacctccaaagattcccaaccccctgctctccggggagcatcggcctcctggaccttcccagaacccccgccactgggctaccacgattctgggatcccaggcctctcctaggaatataggaagcttggccccagccccaattggaggatccagaaacaacatccctaacgttttcccttctgaagaactctgggacccggggctgcagcacgccccactgggggacccagggacctgggctgccagtctcttatgtcctgggtaaacagaattctgtgcctctcctttgcctttgcccctgtaaaggacctaggggctccagtcctatcccagttccatcgattatgggcccagattcgggggtcagtccactccccagtaaataactctggtgttccggacttccagttctggcttcacgagtatccacatcgtttgtccccaagtcccacagaaaaacccacaaaatctcattgggcaggcttcctggaatttagggttccaagtctctcctcccccatggatccattggtccctgacccattaagagacaccgaatctggccccctcccacgacacctctcgacaactggacacagaattcgaggccgcagccaggtcccacggtcccagcccccagcgtcgcacagccccgccccctgagtccaagccccgccccgtcaggacccgccccgcccccttcgccgcacctgcgcggtggccgctggcggtcccgagggcagcccgggcgggggcgtgcccaggagaggagcggggggaagccgagccgcacgaacccggccctggggagggtgcgggcgtccgcgcgggcgacggctccggcgacgggccaccggggggcggcgggctgggcgggagcccgtgctccagcaggaaggcgtccaggtctacgtactccacatcgccgaacggcagcgtgcgctcccacagcagtggcgccaacagacccggggcgggcaccggccccgggcgcccccgcggggaccctccgcccaccactgccccagccggggcatccgccgggcccgcagtctccaggcctggcccaggggttgtggctgcaggcagggccgccttgcgctccttttccttcaggagacctgcgggccgggaaagacgggttgggatgagggtgaggtgggggagatagagatggagaagagaccccgagtccgagaggcacagggcggagatccagagaaagaggggacggggggtcggagaggagagacgggagaaaaagggacggagacgcagagtgggagagagacccagaaagaatggagacgggggtggcagagacaggtggacagattcacagagatggggacagaatgccgggaaggaatagacacacagaaagacagcgaaccagagaaagagagacggaagttcaggaataggggggcagggacagggtaggtggagggttgggcaggtgagagaaaaaatgacagctctgtaatttcactgtaattacccaacccccatcccctgcgcgctgtacccccttcccctcccccaccatctgtaaggggcaggaaggggctctattcctggggcacatccctcatccctagactccatgtgaccccatgacgccccgcccaagcccgtgtcaccaccgtgtgagcacccgacacaccccctccctgggaccccaggggtccagactcccggaccaaaaggaagaggaggctggggcctacactcttgtgaactaagcggggaggacgttggggacgttggtgcctgggtccttagggtggacgggcttcagagccggcgcttttgggtcctgggcgctaagggatctaggggcctaaacacctgagtaattgagtagattaaggttgggaagatggactccccgcacgcaggtttctatgggaccccaccccacggcacctgagtccctaagggggtagggtgtccgaagtgggtgagatgggggttagaactcacagctggccggctctttgggcttgctggtcccctgcagaaggctccgcaacccaagcagcgctcccccgccagggggtgtcccggccgggccgcccagcagcagaggggccggggtcctgtcgctcacaggccgcgccatcgcctggcacctgcccccaggctcacgggttcatggagaggcgaagggctggcctgccagtcaccagcacactccagt

SEQ ID NO: 67854 - DNA, 1280 bp, Homo sapiens
aggcgctccttctacaaggtgggcgagcctggctcttgcaaaatctgcagctctcgcaacggaaggcgctttgcaatctgcaccgagaggtgtgcgcggaggggcggaggagggggcaggaggaggcggccgccttgaggcgtggccaaagcaaacttctttcgcggaaaaaaaaatccaaaccaaaacacccgacgccacagcgcgcgcccctcctccgggtccccgcccggcgcgtccagccccgccagcctctatgggcatgcaacccagccgcgtgcctccctccggctgcaaacacggaccaatcgtctccgacaccttgagacgcacagccaatggggcctctgggtccgccagggcccaggagggcgcgtgaggggctcagcgcgtgaagttgccttgcctttcggtgggaggcgggacactgacctacatttgcccaatgggaggcggtactggggggcgggaccgtgacccagtttgggccaatgaggcaggcgggagggggaagcacatggctctgctcgtgctgcctgatggcgaggggggtgatggggggaaaaggggcgccgcttaaaggggccgcggtcctaaagatggttttgagaagcaggaagccaaaataccgagagcggaggtttagaaagaggaagattggtttccggaagaagtctgttctttaatacccaaatgtttccccaccgcgcctagaatcagaccactgagaaaacaggaagtattctgtccctttaatagctttgttttaggggtaactcccctcgccttgtggggaggcttaggacgggcgggtgcaatcctcgaaggggagtctcagcgaccatgggggacaccatccactgtaagacagagaacaacggcagggggcgtcagtataggatggaaggggcggggggtgtgcagggggcgtgggctgcgccgcgctgggccctaccgtcggaagtctgcgagcggggaaccagaatgtactaggtcgagaagcactgggctgaaccacaagaagccaataggaggggggaatcgggacgtccagattcagcagtaggctgaactacttgaaggtcttcatgggggggggggggtgtggactgtaccatgttgcgaagccgggggtgtgtgagattcctgggctaaaccacagggaggcagaggtggagggaaggggttgtaccttgtagattctcagtaagggggaagggagcatcagattgtggaacagcgtaaggtagtacgacttggaaagggagagaggatccaaa

SEQ ID NO: 67855 - DNA, 1465 bp, Homo sapiens
cggttaggaagcaactgcggatggagaaatttggcgtgaactcgggactgcgacctggacctgactggagaaccctagccggattcaacccacaccctcttacctgcgccctccggatcgcttcctgcagctcctcctccagagtcagagccgctgagcccggccctgaggaaggggtcagggctggagctgcagcaggagccggagtgggagttggagccggagccgtccccggggtatccgcggcacgtggaagaggtggcctgtgagatgctgcgctgggcttgacctagagcagccaagagggcgagcgcccataagccatgcccacagggcgcaaccccacccactcgcaacgtgtggctccaccccttgatcctctcgcgacccctcgctcatcaacccctttggcctcgccccctattctttcattggctcctcttctctaaagatccgccccctgttagtctgaaccacgtcccctcgccttcaaggcttcctaccgctggtcctcgcccccacacttcattggctagttttttcgacaccccgccccggcccactttgctttctcttcattggtccgcaagctcatagccccgccctcaccgagccctgacgccgggcggctgccagggccttgggcttgaggcgcggccagggagcacccgcgggactgtcctcgcgccgcggcttcggccgctcgcggggcggcgcgccgccgcgcatgcgctccaggagcatagacttggtccccgacactgggaggccccgcaggcgcagctgctgccggagctctgagacctggggaggggcggggcgtgggaagaggcagtgctgggcgggctcccgggcgcaggcaggagctggacaggatatttggaaaccgagaaaggaggcactgggggtccggactcctgggaccctaaaacaggatgggactgggtacccgatctcctggatttccagagggcagaggctgcggggttggaattctgggaccccaccgaaggagagagaaggcctggaaagttacaccccaaactcaccgtcagctcctccagtttaagggtctgaagttccaacttgtgtggggggggcgaggggctagggactcctggtgggcagggagtgaggggagagggcttcatcctggtgataatcgtgaggggcgaacaaaggttagagaggtagagggggaaaaggcgttctggggtcctcaaagacggggagctggggaagatgcagaaaagtgagggtccagaattctgggtctccaagggcgcaaacatggggctagatttctgtgcatgggggaggaggaactaggcgttcagactcgggtctgaagggcgaagggaggggctgggatcctggactcttaaaccctgggagaagagagggttgggggccccaatcccctaatcttggactcgaggtttgagggaggaggatgctgggacct

SEQ ID NO: 67856 - DNA, 1738 bp, Homo sapiens
tgtatgataactattcttattctaactattttctttattatactgaaacagtttgtgccttcagtctcttgcctcggcacctgggtaatccttccccacagactgaccctcccattcaagatacatcaatgtcaaagactcaggagtttgacttgattcccagaagtttaaccatcatctccccaggctcgggactcccagcacccagacccttctgctcacacccagcagtccaggcccccagaccctcctccctcagacttaggagtccaggctcccggcccctccttcctcagacccaggagtccaagccccctgcccctccttcctcagacccaggagtccaggaccccagcccctccttcctcacacccacgagtccagatccctagcccctactccctcagacccaggagtccagaccaaagctccctcctccctcagacccaggagcccaagttccccagcccctcctccctcagatccaggagtacaggcccagaccctcctccctcagacccaggagtccaggccccccacccctcctccctcagacccaggagtccagagccccagccctcctccctcagacacagaaggcctacccttgcacccttaggggctccaggaaattagccaacctgtcttccctctgggtgcccactccagggcctggcttggctgccaactccagtcagggactttcagccacccctccccccaggttatttcaggagcacctgcctgggcctgggatggcttctctggtgaaagaaacaccaggattgcatcagggaggaggaggctgggatgtccagggtctgagcatctgagcagggacagatgaggttgaggttggcccacggccaggtgagaggcttccaaggcaggatacttgtgtctcagatgcggtcgcttctttcatacagcaattgccgccttgctgaggatcaaggaacctcagtgtcagatcacgccctccccccaaacttagaaattcagatggggcgcagaaatttctcttgttctgcgtgatctgcatagatggtccaagaggtggtttttccaggagcccagcacccctcctccctccgactcaggtgcttgagaccccagatccttctctctgagactcaggaatgtgggcccccagcccctttcacctgggtcccagctaacccgatcctcccctccctcatcccctagacccaggagtctggccctccattgaaaggaccccaggttacatcatccattcaggctgcccttgccacgatggaattctgtagctcctgccaaatgggtcaaatatcatggttcaggcgcagggagggtgattgggcgggcctgtctgggtataaattctggagcttctgcatctatcccaaaaaacaagggtgttctgtcagctgaggatccagccgaaagaggagccaggcactcaggccacctgagtctactcacctggacaactggaatctggcaccaattctaaaccactcagcttctccgagctcacaccccggagatcacctgaggacccgagccattgatggactcggacgagaccgggttcgagcactcaggactgtgggtttctgtgctggctggtcttctgctgggagcctgccaggcacaccccatccctgactccagtcctctcctgcaattcgggggccaagtccggcagcggtacctctacacagatgatgcccagcagacagaagcccacctggag

SEQ ID NO: 67857 - DNA, 2777 bp, Homo sapiens
aaagaatctcgctctgttgcccgggctggagtgcagtgggctcactggaacctccgcctcccgggttcaagagattctcgtgcttcagcctcccaagtagctgggacttcaggtttgcgctaccatgcccggctaatttttgtatttttagtagagacagggtttcaccatgttggccaggcggctctcagaactcctgacctcaagtgatctgcccgcctcggccacccaaagtgttggattacaagcgtaagccattgcacctggccgaaaaccaatctgtatcataaccccacggcacctgaatcatttctaagtgtacagttaagtcgcgttaagtatattcacattgttgcacaaccaatcttcagaattttttcatctgataaaattgaaactctctgccgcaattaaatcccacttccccaattctcctcccttcagctcctggccactttttccagccccatttgttgaaaacatggtggtgagctccttgaatgactgagaagcttttgtacatggacaggaaaattcacaacaatttgtttttttgttaatgatcaatgaatttttaaacaattatctttcctttaaacattcacagactacttctacagctaaaaataacaagccacaaatttcacaattgtagatttcgcctaaatatttgaacagtgattgcacatttaatcagtgaacttttcacaaatctgatattgtggtttcccttaaatgccatgaataggagaaaaacagtaatacactctgtcatacttttcacaagtctgatataccagattcttacaaatgctttaaatattttcgagaaggctgggcaaggtggcttacacctgtaatctcagcactttgagaggccaaggtagaaggatcacctgagcccaggagttctaaaccagactgggcaacatagcaaaagcccatctctaccaaaaaaaaaaaaaaaaaaattagccaagtgtggtgaagcgcacctgtagtcccagctagttaagaggctgaggtgggaggatcacttgagctggggaggtcaaggctacagtgagctgtgatcacaccactgcactccaacctgggtgatagagagagaccttgtctcaaaaataaataaatatggccggtgtggtggttcacgcctgtaatcccagcactttgggaggccgaggtgggcagatcacctgaagtcatggtgaaaccccgtccctactaaaaatacaaaaattagccgaaagtagcccagtatggtggcgcatgcctgtaatcccagctaattaagtggctgaggcaggagaatcacttgaacctgggaggcggaggttgcagtgagctgagatcacgctattgcactccagcctgggcgacaaaagcgaaactccgtctcaaaaaataccctcccagagagctcccttaccctttcaccaagtggaaacacagcaagaaggtgccagcaatgaacaaggaaactggcccacaccagacacagaatatgctgctgccttgatgttggactccacaccctccagaactatgagagatacatatttgttccttaagctacacagtctgtggtatttttgttacaacagcctgaatgccctcttccaagtcaattctcaccaagccgacattccagggcaaagcccgtgttatcttagagtttgtcgtaaccacatgaattgggttatttatttatttatttatttatgagacgcagttttgctcgtcacccaggctggagtgcaatggcaagatctcggttcactgcaacctcctcctcctagattcaaatgattctcccgcctcaggctcccgagtagctgggattacaggcacccgccaccacgcccagctaatttttttgtatttttagtagagacggggtttcactatgttggcctggctggtctcaaactcctgacctcaggtgatctgtccgcctcggcgtcccaaagtgttgggatttcaggcgtgagccaccgcgcccagtcgactcagagtgtcttatttttataatacagcctgaaaaacttgttctaagtcatagtattgtaataggttgggacatgagatgatttcacggctgtttgttccaggaccttctccgggaaacgtgtggggcatttcctctttgttacacactcagggtgagcccatttttcctctacttgtttgggtgaagcttcgccgctgtctctgccacaaagctgaccctccagctctgtgacccccttggcagctggcaccagcagcacggggccctggcagggcgctggctggcaggaggaggggtgtagggatttctcacaagaccctagttccacactgcgtcttgccaggagccagggacagcaatggctccagcttcctgttactttctgctcttccggaagtagatttccaggcccctcagagagaggtcccagactccattaggccacaccctcttggaggtgagagacccgctgcctgcagcccactccctagaggtctatttggtttgcatagtcgccgttttttcataataaaacttaaaaaaaaaaaaaagaccaattaaaacctgtaaaacaggtggcaggtgatcaggattagaatgctttgaaatcttttgttattctggaatatgacagaatgattatatttagatttggtcactttaaggatgcatgttaaaatttcaagagtgggccaggcgctgtggcacacccttgtgatccgagcactttgggagaccgaggcaggaggatcgattccttgag

SEQ ID NO: 67858 - DNA, 1983 bp, Homo sapiens
ggctgaagtgggtgggtcgcctgaattcaggagtttgaggctgcagtgagctatgattgcaccattgcactccagcctaggtgacagagcaagaccctgtctctaaaaataaataaataaattttcttaacttggaaacagtcacaaacatttaaaaatttggaagtacagtacaagcaattcttattttccagaaccatttgaaagtcacatgtgcccttgaaaccccatcactacattaacacatactccagtgtgtactttctgcaaacaaggacattctcctacacaaccacagcagggccgccaaaatcaggaaagtagccttgacccacgactactctggaatcatcagacctccttcatgtttgccacatgtcccagtgatgctttttatggcaaaagaatgcagttcagagccgggagcggtggctcacgcctgtaatcccaacactttgggaggccaaggcgggcggatcacctgaagtcaggagttcgagaccactctggccaacatggcaaaaccccgtctctactaaaaatgcaaaaattaccaaaaatggatgcctgtaaccccagctactcggaaggctgaggcaggagaatcacttgaaccctggaggaggaggttgcagtgagccgagatcgtgccactgcactccagcccagatgacaagagtgaaactctgtctcaaaaataataataataataataataataaaatagccgggcgtggtggcgggcatctgtaatcccagctactcaggaggctgaggcaggagaatctcttgaacccgggaggtggaggttgtagtgagccatgattgcaccaccgcactccagcctgggcaacaaagcgagactctgctctccccactgccaaaaaaagaatgcagttcagggtcatgcactgcttctgagggcaggtctctttgaaagtcaggaaggacagttcctcagtcttccctggtgttcatgaccttggcatttggaacattacaggccggttatcgagtcgtctctccctccatgtggatttatttgatgtttcctcgtgatcggattctttggcagcacaacgactgagatcatgttgtgtgtttctcactggaagtcaggtcactcgcggcgtccacctctccagtttctgatgacatttgcttcagtcacatgatgcaagtggcatcagccggacttgtccttgccaagcaatgagagctttgaaactatactaatatcacattcctcaggaaatcttcaggattttttgttttctttttttttttttttttttttttcagacagagtctcactctgtcgcccaggcttgagtgcaatggcgcgatcttggctcactgcaacctctgcctcccgggttcaagcaattctcctgcctcagccttctgagtagctgggattacaggtacatgccaccacagccagctaatttttgtatttttagtaaagatggggtttcaccatgttggtcaggctggtctcgaactcctgacctcatgatccacccgccttggcctctcaaagtgctgagattacaggcgtgacccactgcgcctgggccattttttttgttttttttgagatggagtcttgctgtgtcgcccgggctggagtgcagtgctacaatttggctcactacttcagtctcccagcctcaagcgactcccacctcagcctcccaagtagctaggaccacaggcacacgctatgacacccagctaattgtttgtctttttggtagagacggggtttcatcatgttgcccaggctggtctcgaactcctgacctcaagtgatccaccacctcggcctcccaaagtgctgggattacaggtgtgaaccaccgtgcctggctcaagttattatttttttaattatattttttagagacagggtcttgctctattgcccaggctggaatgcagtgatgcaatcacagctcactgcagccttgacctcactgg

SEQ ID NO: 67859 - DNA, 1114 bp, Homo sapiens
cagtgccggagacatgaaatgctcccccaggttggagaaaccatcagaacactgggggctcggatgactgagtccttcagaataaaatgggctgaggaagcaggattcctgggttaaagccccagagtcacgtcactgaagaagcccgacaatgtgtgttctttggcattttatttcaaaattgcagcaaagacagagaaaaaaaaatcaacggcagcaccaggggtctggcctgagaacggagagatccggaatcggggccaaggtgtatccttgaccgcacgacaaggagtaatgggcggacctgaacccgcgacgaggggctgggggccaagatgcctgggtcggcccttacggctttgggagtgtcgcaaccacatgggggcgccagagacccagacgccgcccgctggccttttatttcgtattgcacttcaggtgagtcattggtagggaggcgagtgctggcgtgacgagatgctacgggtcggtggatctggagcacagcctgcagcttcacaccgggaacatccactcgtgggctctgattccgtactgcggaacaacggaggcagtgcgtgaggtggaagctgcactacaactcccagtaggccctggggtgttccaggccgagtgcctacggagctgtgccccagcggctcacgggaaatgtagtccacttcccagagggccccaacaatgatgggaacggggaatcaaggctaaggcggcgcagaggcttccgggagatgtagttctgaagacaggaattatggccaggcctctaaggctcttggaaaaagtcactttcagctcagaaagcccagatagtcagaggatgtgtagttctaggtcctgatgcacaaaagtttacagaaatgtagctctaggtctgggaaaggagcccagagattcttgggaaagagatcttggcccagaagatgggaatacccccagagatttatgggattaaacagtctggtgccagagaggggccaaggtccagaggctcatgggaggaagctttctccggccaaagggatagcccagggctccagggaatcttgggaggccaacctctgagatggccagagggctggctaaggtctcagtg

SEQ ID NO: 67860 - DNA, 1838 bp, Homo sapiens
cccaaacaccaggggctcgccggggccaggcttcttatgaggcttctgtgtcatttccagctgcaggtctgcagcctgaggaaagacaggggtatcctagaatctggccacaacctcccagctgaaaaactacaactcccatgaagccctgggcctcagacccatagagaagaaggacctgtcaccctggaggattctgggacatgcagtttcatcccttgtctgcggcccaatggcaggctgttaagctaccaccactcactgccatctctgggctgtggaccttttggagatgcccaaaaccagctgccagccccctcctctctcagagccaagcatcgagttccctcctttcaccttgaaactggaggaggcatatcttctgggaccacacagaagccaagggacagagagaagctttcgtgcccagatctgggtggagaaagaagtgagagagggggtgagtggggcacagcaggggccctggcagctcgctcgccacctcctgcacttggaggtcccactggcctgcctgttctgtcccagtttcagtccattctagacggggcaggtggtcctgaaggaggccaagtcccctccctgccctgacgagggctcgctggaaagagctgagtcagctcccgccccctcctccatgctgcggcaaagtcaaacgcaagcgcctcccaccccagagacctttggtcgcagcctggagatcagctcagacaagaaaacaaccagggaaggcacacaggtaagtgaaggcctccgggtacccaagtgctgacaggccttagaagaccaaggaccgacaggtcctgctcccccagagctcaggggtgcagaccccaggcccgcctccctcagacctaagtaagagtccagactctagctgcctcctccctcagacccgaagtctgggcccccagcccctcctccctcagaccctggagtccaggcctcagaccctcctcccttacatccaggagtacaggccccacccctcctccctcagacccaggagtccagttccccagcccctcctccgccagacccaggagtacaggtgcttattctctgaaggtattcgatcaactgggctctgattacctgaaatacaaacccattttggcagtgactccaattcccttcagcccctggggctgaggggcagctacaggggcctggggagccactgcagtcctcactgcatgaggctcaggcgggtcctcccagaggggagtaggaagagcaggtctggctgtgtccagcaggctgggccctctctggtgacctttgacctcacaaggcctctttccccagccctgtggggaggcgttggggcgtgaggttgagagagacagagtggcctggcctggcctgccctgtgagctgggtgagttggcactgattctggaagatggacgtgaatgggcgtggtcacttgtcgctaggtgagttgctgggagatgggcctgcagcgtggtcttgctggtgtgaggctccagggattccggggtgatcagagcgtgggtccccagattgcctttgggtggcgacatctagactgctcagccttgcagccatgcttctgcccagagggataggacacccacagtatgagagacacaaacacagtgcgacagccagcctgtgggcaggagagctgccctcagagccaagatgaaaaaaagagagtaagagatggaagaggaaggatgagaaaaagaaacacagaaaggggcgcacaaacagaaaaaaaaaaaaacaaaaacagaaattgacgccaagaaacaagagatgccaaaatagatctaatcatagaaagaggccac

SEQ ID NO: 67861 - DNA, 1093 bp, Homo sapiens
gaaggcttgtaatgacccctttctttggctgtttccttcctcactgagaaaccttgttctctgaaatcatagactctgggaaacgctgctgctgtttgacatcgcacagtcagaagggatcgtctcagccagcctgcagcatctgtcactttgaccatgagacgctgcctcgatttccaatccaggtgcaaagcttcagataggagtttgggaagcacagcaatccccatctcttatttttttcaactttcattccaagaaaataggaccttgagtccaattcccagagctgagacttgaggtccaactctgccttcacctgcacccggccctggaggtctgggcccctttattccagctcccgcacaggctgatgccccaccgcaccccagggctccgctccccaaatcacaacctccccacccccacgcctccctcattacagggtcctccaccatgtttccctttttttttttttttttacctccccgccaattacttgccccacctcatccgcgtctacctgctccccctcaccccattaaagcctcgtgctcctttccaaagggcgccatcctcctccgcgccctgcagcggaaccccagggcgggaggagcggcgccgagtcggaccggctgcaggccagtggtcttcccggaagtgcgcctcccccggttatttcccagaccccggcgcggggctgcgaacccacctgccccagagcggctgcggccatgatccgtgcggcgcgtaactgtgcccgcccggggcgcggctccgaagagagacgttccggccacgccccgctcacgcctccttctgggggaaggcggccgaccagcgccccaggccgtcccagctccagggcgtcggcagggagccggacactgctgcggggcgcaggcgctggtgggagggcaggacttgaaatacggtccctgccaggcgaagtggctcaggtctgtaatcttagcactttgggaggccgaagcgggcggattacctgaggtcaggagttagagaccagcctggtccaacatgatgaaaccccgtctctactaaaaatacaaaaaattagccgggcgtggtggcg

SEQ ID NO: 67862 - DNA, 799 bp, Homo sapiens
caccacagcactccagcctgggcgacagagtgagactccgtctcaaattaaaaaaaaaaaaaaaaaatcgtatccctcggccatcgtgtctcggcaatcctaccctgggacactctgtctccaaattctacccccacagtgcccccaagtcctgtccccgggtcactatcctgccacccctaacagccacaggcccaaacagccaaaccgcgggacccttccctcacagggcgtcgccctgtttttctgcgctccgccccagtcctcctgccccacccgccagccccgggctgtagggtcggggcccactgacagctcccgcccccgccgcggccaatcagcggttggtgcacacgcccccccggccacagccaatccgcagcagccctgcagctccacccctcacctgggggacgccagcgcacccgggccctgccccccccctgggtccagctggggagtctgcgtcccccagtgccctgcggaccaaaacccaggagtttcagcccctcctccctctgatccagatgtctcaaccccctactttctcttccctttggacttttcttgccagccaccttcctattctacaggcagtgagaggaaaactccttttccctgagggccaagagtaagagggccttctgcgtctccccctccattacctcctaattagcgcttaatttactctcccctgcgggcctttagttagcgcgctggtgaagccaaaccgctctacccttcccaggagcccctggcgacagcgacagggctagcaacatcaggcacctgcttgctg

SEQ ID NO: 67863 - DNA, 930 bp, Homo sapiens
atggtggtgcattcctgtaatctcagctacttgggaggctgaggcaggagaactacttgaacccgggaggtggaggttgcagtgagccaagattgcgctactgcactcgagcctgggcaacagagcaagactccgtttcagaaaaaaaaaaaaaaaaaaaaagaaatgcactgtttcctgccaccgtttctcctgcaattcaactccctggccacctgggaagtccctaaatactctctctgtgtgtgtgcgtgtgtgttcgttgactacacatgaccttggataaactcaaattctatctttgatctcgcttgccttagaaagctgagctggccaggcaaggcctgtccctgccacttaagactaattggtacaaggcagcacccctagcaggctctccgagtgggaatctaaatgagctccctgcccggttccccccaccaactctttcaagccatttctgctcccctcccaaacgacctccacccttttccgtgctgtatcttcgacacaccctgcgtgttcaaacctcagggcctttgaacttgctgttccctctgcctggagtgccttttcctaagagagccacatgacccactcttagggtggccagccatcccagtttgcccaggactgaagggtttttggggacatggtattttcagtccacagtgtcaatgctaaacggggactttcctgggtaaacactccctcagctccctcaaaccctgatccgaggtcacctcctcagtgaggtcttccctggctatactgtttaaagctgcaagccaggatcactagctcacacctgtaatccttgcactttgggaagccgaggagggaggattgcttgaacccaggtgtttgaggccagcatgggcagcttagcaagaccctttttctttctttctttctttctttctttctttc

SEQ ID NO: 67864 - DNA, 838 bp, Homo sapiens
ttcgaactcctgacctcaggcaacctgcccacctcggcctcccaaagtgctgggattacaggcgtgagccaccatgcccagctcaaatgcaatcaactcctaatactggttctcccactctcacgcttaaccctcagatttgtccctcatacctacaggagccagagcctatgatctgttaataatactaacaggatcacatcactcccttgctcaaatacctgccacagctccctattgctcttgacataaagaccagatgattcagcatgcccttcaaggccctgcctgatctggttcccaccccaatctcttcttgcaacatcccgttctctcactgggcccagctggcagcagcaccaaaccctgtctcgctgccaggccctcgccctgccatctctttctccacctcctccactggtcaatgctgctcagatttcattacttccaggaagtttggctacattccctgaacgggccagcctccaggtcacactctcccagaaccacacccatccccctcataaagcaaaacacactcttctgaactcatgtctctgtttaggaagacctggctgcccaggactgtaaactccccaaggacagagcctacatgtacctggctccctgccctatctccagcacctataacactgccagggccaggtgtggtggctcacgcctgtaatcccagcatctggggaggctgaagtgggaggatcacttgagcccaaggagtttgagaccagtctggacaacatggtgagactccctcgcagccatctcaacaaaaatacaaaaattagccaggcatagtggtgtgcgtttatggtcccag

SEQ ID NO: 67865 - DNA, 435 bp, Homo sapiens
aaaaaaagtaaaagaaaagaagaaaatatatatatatatacacacacacacacacacacacacacacacacatatattaactcttcatgggctgaggtgtaggtgtgttttatgtgtggaggtgtttttagtgttgggttaatcctagaaagtcaacacaaatttggaacaggagccagggttcactggttaagcaggggattgcccaacctcccgggaacatttcacctggatcttggatgcgacctcagagtcagcacctgaagctccctggacactgggcccgcccccaggcctctcccctctttgcctactcttgctcccctgagttcctccagcctcaaactggtcagctgcaagctggtatctccagagccccacctccacgatctcatgcccaatgcccattcccaccaggacgtccaccaggcagtt

SEQ ID NO: 67866 - DNA, 1748 bp, Homo sapiens
catccccgccaggaagctcaaaccttggggctcaggctgctgagcgaggagatggtggaggcgctgctggccaggctcaggctgctgcgaggtcggctcccctccatcaagggctgggggagagaaagaaaggggctgtgtctctgcagtgacgggtgtgagacagagatggggtcaggggcttggaggtcggaggaggctgcagagaaagagcctgttgtttcgggacttggggggctgggggaggccatggcccgtgaccacataccaagagtggtgccaagagaggtaggcggccctggcagctgcgggagggggcagctgtctgcagcccaggccagagaataggggcttctttattcctgcccactgcactcaggccaggaatttgaccctctctgtgcttagggactccccattccctgcctccttccggctgccccaggctacctgtctcccgccctcccacatgcacccccaaaccacccctgccaactccccaagccaagccctgcggcaccaggaatgtgaacccagagagcccctcccagcccagccagggaacttacccagctctggggtcccagtgacgggggggcaagaggacggtgtgggtgctgcggcacctaggcagtctcccgcctcctttgtctcttagctgctgtctctcatagttctcaatctctctcctcacctgctcactcacactttttgtctctttgtctcctgtctcttacggtctctctctctctctcttccttttacactacctctctccccactctcactttctgtgtctccctctgatctctgtctcttccagtctctctctcactcattctctccctctctctctctctccaatctttctgtttctgtccaaatcttttattgtcagactcacagggtctcttccttaagtctctgtctcattctctctctctctctctctctgtctctcagtcatcccctgtgtcctctctccttcacactcagtctcttcctctttctctctggctctgccgtttcctcccttttctctttccgatttcccttctcactttctcccttcctccctctcccagtttctctttcctctctgctggtctttccctgcctctgccagccgcccacgctgctgttctcccctcccaatcccggctgtccccgccccttctggcctccccactacagcctgacctctggctcagctgcccccatagctgaagggaggggcttgggccccccaattcccaggtcccctaaggaccaaggttgggacttctcagtgtttggagagttggacttgaggcctgcactccagggcccccgtgggtttgctgctgtggttgggggcctgagccactggtgtcctaaacggaggaggcttgtgtcctgcaaggggtggggactcaaatttccaaagccctggagggaatgggttagggatccagactcctgggtgcccgagaaggtctgagctaggatcaggactcctgagtcgtgaaagagctgggggtctggaaacatggctgtgcttggaaggggccagggacggtttgtccaggtcccctagggagaaaaggggatggtcccagtagggcagggtgaaatggagagttccaaacctccacctcagatccaggtgagaattctcttctagactgaggacaactccctcaggagagagacatgattccttggtatattttgaggaacaagattatgcatccgtaggcaggggagga

SEQ ID NO: 67867 - DNA, 4522 bp, Homo sapiens
cagatactcgggatgctgaggcaggagaatcgcttgaaccccgaaggcggaggttgcggtgagccgagatcgcccctttgcattccagcctgagcaacaagagcaaaactccgcctcaaaataactaactaaataaataaataaattggggtgggaaggcattgaccctgagctgagagagaactggctcgctgttgaagcagggccacgcatttgattgacagttcgtttgttggaggggcgtggtcacgctcggaaactccgccgtgacgttgcaaaagctggaatctccgcgagaagtcctgtcttacttccacttcccacccttcgggttgcggtctcgaaaccccgcctctcttcgtgacgtcagcacgccgggcgcggtaggctataaaagcctagtggccattgtgttcgttgctcttatcggttcccatcccagttgttgatcttatgcaagacgctgcacgaccccgcgcccgcttgtcgccacggcacttgaggcagccggagatactctgagttactcggagcccgacgcctgagggtgagatgaacgcgctggcctccctaaccgtccggacctgtgatcgcttctggcagaccgaaccggcgctcctgcccccggggtgacgcgcagctcccagccggtgagtaaggggtcggaacgcctgggtccccacggggctgggggcccggatttagaaaggagaaggggttgggagcctggagtcctgagcctgagggaggagggatctggaagccagattcttgggtcccccgtgaaggaatcatctgccaagtagggggtcgggtcagaatgtttcagtctgcgagggaggagggtgtgagggtttgatttgtcaatcttcagcagaatgagagagctagggactatgactttgtcgccaagggaagcaagtaaagacttttgttcttggttcttgggactgggagttctgcgtctgaagaaagagagggctgggggcttggacccttggatctaaggcagaactaggggctcagactcctggctattgagagataagaacagagccaagggacagagatgggcgtggccgagatcagaaaggaatttgggactctcgcgttgctatttacaatagttgtgttactatttccgttgctatgactcatagtcacgcccggatgccatcctctaaatggcccctaaactttatttttttctcccccttttccagcccagacacatggccccaggccaagcaccccatcaggctaccccgtggagggatgcccaccctttcttcctcctgtccccagtgatgggcctcctcagccgcgcctggagccgcctgaggggcctgggacctctagagccctggctggtggaagcagtaaaaggagcagctctggtagaagctggcctggagggagaagctaggactcctctggcaatcccccataccccttggggcagacgccctgaagaggaggctgaagacagtggaggccctggagaggacagagaaacactggggctgaaaaccagcagttcccttcctgaagcctggggacttttggatgatgatgatggcatgtatggtgagcgagaggcaaccagtgtccctagagggcagggaagtcaatttgcagatggccagcgtgctcccctgtctcccagccttctgataaggacactgcaaggttctgataagaacccaggggaggagaaagccgaggaagagggagttgctgaagaggagggagttaacaagttctcttatccaccatcacaccgggagtgttgtccagccgtggaggaggaggacgatgaagaagctgtaaagaaagaagctcacagaacctctacttctgccttgtctccaggatccaagcccagcacttgggtgtcttgcccaggggaggaagagaatcaagccacggaggataaaagaacagaaagaagtaaaggagccaggaagacctccgtgtccccccgatcttcaggctccgaccccaggtcctgggagtatcgttcaggagaggcgtccgaggagaaggaggaaaaggcacacaaagaaactgggaaaggagaagctgccccagggccgcaatcctcagccccagcccagaggccccagctcaagtcctggtggtgccaacccagtgatgaagaggagggtgaggtcaaggctttgggggcagctgagaaggatggagaagctgagtgtcctccctgcatccccccaccaagtgccttcctgaaggcctgggtgtattggccaggagaggacacagaggaagaggaagatgaggaagaagatgaggacagtgactctggatcagatgaggaagagggagaagctgaggcttcctcttccactcctgctacaggtgtcttcttgaagtcctgggtctatcagccaggagaggacacagaggaggaggaagatgaggacagtgatacaggatcagccgaggatgaaagagaagctgagacttctgcttccacaccccctgcaagtgctttcttgaaggcctgggtgtatcggccaggagaggacacggaggaggaggaagatgaggatgtggatagtgaggataaggaagatgattcagaagcagccttgggagaagctgagtcagacccacatccctcccacccggaccagagggcccacttcaggggctggggatatcgacctggaaaagagacagaggaagaggaagctgctgaggactggggagaagctgagccctgccccttccgagtggccatctatgtacctggagagaagccaccgcctccctgggctcctcctaggctgcccctccgactgcaaaggcggctcaagcgcccagaaacccctactcatgatccggaccctgagactcccctaaaggccagaaaggtaggtgctgagagcccagattctattttttttttttttttaattgagttggagtcttgggctgtcacccaggctggagtgcagcggcatgatcttggctcactgccaacctctgccgcccaagttcaggcgattctcgtgcctcagcctccagagtatctgggattacaggcgcatgacaccacacccagctaattttttttgtatttttagtagagacgggggttttgccatgttggccaggctggtctcaaactcctgacatcacgtgatccacccatctcagcctcccaaagtgctgggattacaggcgtgagctaccacatctggctgagagcccagattcttgagtcttagaaagaaagggggctgggggccgagacttctgggtccctgtatgttgcagagggttgcatgtcatctccatggagaaggctgtgtacgctgtcacgcaatcccttgtaagaggccaggcccctgggggaggagggagcagctgtggctcacagcagccccaggaaaccacctcttccttcagtgagtcagatagatagagaatcccgtgacagtgacaggcaagtgactagccagatagaaagcatttttgtgtaataactaatttttgtttgcttctctctctctcttccccgccctccccatccggattcccgtggctgtgtgcatctcctgcctgtgtccccatgtctgcccgcaggtgcgcttctccgagaaggtcactgtccatttcctggctgtctgggcagggccggcccaggccgcccgccagggcccctgggagcagcttgctcgggatcgcagccgcttcgcacgccgcatcacccaggcccaggaggagctgagcccctgcctcacccctgctgcccgggccagagcctgggcacgcctcaggaacccacctttagcccccatccctgccctcacccagaccttgccttcctcctctgtcccttcgtccccagtccagaccacgcccttgagccaagctgtggccacaccttcccgctcgtctgctgctgcagcggctgccctggacctcagtgggaggcgtggctgagaccaactggtttgcctataatttattaactatttattttttctaagtgtgggtttatataaggaataaagccttttgatttgtagcgagcagcgtctgtatgtgtcagaaactgacagcattctacttacaggtccctgagggagctgggaagagaatagcataaaacaaagcacttcaatggcggataaaccgcttttcctcaaatttgctaccactcatcctgaggcttcttttgaacctaacagtgcagggaccagccccacagggtcggtgggcttctccctgtgtgcggcgacgagagagtgtagaaataaagatacaagacaaagagataaaagaaaagacagctgggcccgggggattactaccaccaatgcgcggagaccagtagtggccccgaatgtctggctgcgctgatatttactggatacaaagcaaaaggggcagggtaaggagtgtgagtcatctccaatgattgataaggtcacacgagtcacgtttccaccggacagggggcccctccctgtttggcagcccaggtggagag

SEQ ID NO: 67868 - DNA, 1466 bp, Homo sapiens
agaattaaagatttaaatatttgtattaaaaatttaaaaaatatacattagccaggcatggtagtgtggcctgtggtcccatctacttgggaggctgacgcgggaggattgcttgggcctgggaggtagaggctgcagtgagaagtgattgcgccactgcactccaacctgggtgacagagcaaaccctgtctcgaataataagaagaagaagaaagaaactcataagaaaggctatgcaattgctaccgcgctataacttccaggcacttcgtggggcgaaaataaatgggaaaactacagctcccatgaggcgaaggggccacgatgcccgcggaagttatttttcccccggccggcagggagttgtagttatctttgaaagccttctctctcttttggcataggcgggaaatgtggcgtcaagaggctgggattccgagaaagaagcgaggctttcacgaaaatgcgagcggcttcggcaaggggcggggccgctggacgtggatgaaagctacagagccagcgtggaccaatcagacctctttggggcggggcctctgtggataagtgggcgtggtctaggggggaagtcaccaagaacgcaccggaggtccttgcccgccctggaaaacgccctctgcggtgaaggagaggtgagaggccagggttcccatactcttgggtcctagggaggatgggggccagagggctggaaaactgggtcccggaggaggatgcactgggtgccagtactttaggtcctgggaaaagaggaggctgggaccctggactcttgggtctgggggaggaggcggccgagatcccggattcctgagtgtgagagaggagcgtgttgggagccaggacccctgggtctgagggcccagactcctgtgtcggaggaagggaaggccggaggcctggaatcctggggcctgggtaacaaaatgcttgtgtcttgattcttggaagtgggggcggcgctgggggcccgaactcctggttccaggggaggaagaggcttgggacagacattatgcattatccagccctccatcccccacagaccacactgccatgcctccctctgggccccgaggaaccctccttctgttgccgctgctgctgctgctcctgcttcgcgccgtgctggctgtccccctggagcgaggggcgcccaacaaggaggagacccctgcgactgagagtcccgtgagtggccctgccctgctatccagccaggtgtttgcagtggtactacagctcctgcagaccccggtgcccgtagggcggatgctccagtgacttcctggccctacagttgtagcttgttttttgcccaccattcctcccagcagcaggggtttgacttggtgaaaaactggaggtccctgactctgaggtgtggaaaatctgcatcacgccccaactaaacgtctgtttttttaagattctctccaccca

SEQ ID NO: 67869 - DNA, 1912 bp, Homo sapiens
cagtggcgcgatctcggctcactgcaacctccgcctcctgggttcaagcaattctcctgcctcagcctcccaagtagctgggattacaggtgtgtgccaccacacctggctaattttgtatttttagtagatacttgattttgccatgttggccaggctggtcttgaactcctgacttcaagtgatcctcctgtctcggccttccaaagtgctgggattacaggcctgagccaccagccttggcccccatcttaaggtctttaatgtaatcccatccgccaggaccccttagcccggaaaggtcacgcattcacaggttccggggatcaggatgtggatatcttttagggcaccagtatccagctgccacaacacccaggctcttcccgtccctcctctgcccagagcctgcccccggcaccccagtgccctcaggcccgcattcatgttcctcttgtctgctcggagcctgggtggaccttggccacacccgcccaaccctgcccttcccgtatgcaccctgaccttcttgcgtcagcatttttagaaattgctggcgtgcagccttgggacctttgtccgttcgccccgctctcccgtgacattctttctcagggctctttgcctggtccatggaccttccatctcccctggaatgtcacctcctcagggtgtcaccgccccggctgtcctgtgtgaaggagcctctgtgttatttgtgtccttggtattcctttgttcatcccttggtcgcctgttctctgtctctctagactgggtgctccaagaggcagaactcttttggttgttgttgtttttgagacagagtctcactctgtcgcccaggctggagtgcagtggcgcgatctcggctcactgcaacctctgcctcccaggttcaagcgattctcctgcctcagcctcctgagtatctgggattacaggtgcccgccaccatacctggctaattttgtatctttagtagagacagggtttcaccatgttggccaggctggtctcaaactcctgacctcaggtgatccacccgcctcagcctcccaaattgctgagattacaggcatgagccaccccgcctggcctccaagagtcagaattctgtcatcatttgattcctgctgtgtccatagcggccggcgctgggtcagcctggaatagcggctcaacacacgtccctggcacaaataatgaatttgagattcagtttgtacctgtgtcctgcacacctgtcactcctctgggctcagccagggccggagctgcctccactgcagcctaggtctcccaaattctagctgcccgtgtgtgtgtgtgtgtgtgtgtgtgtgtgtgtgtgtgtgtgtgtgtgtgtctttctgcccacttgaccaaggggtgtgtgtgtgtgtgtgtgtgtgtgtgtgtgtgtgtgtgtgtctttctccccacctaaccaagggccactggaggccagggccaggctgattcattttgggtccagcattgcacagcgcaggcctgggcccctagaagcctcgggagacatgcgtgcggtaagtgtgtgttggcagcgtgtgcgctgtcctttcctgcctggaaaccctaccccttcctgactacttggaaactcccatatgagggaggctgcacttgtttgctgaggccgctgtaaccaagtaccactgaccaggtgcttcagcaacagaacttgactgtctcatggcctgcagtcagagtccaaagtgaaagtattggcagggttggttccttctggggctatgagggaggatctgtaccaggcccctctccttggcttgcagatggccgtcttctcactgcattttcacaccatctttcctctctgtgtgcctggcccaaatttctccttccattattattttttattaattattat

SEQ ID NO: 67870 - DNA, 2249 bp, Homo sapiens
agtttctgccactttttaaacttcatattccttttctttttacacaaacacaaacattcgagtcatgactgggtggggtggctcaagcctgtaatctcagcactttgggaggccaaggtgcgaggatcgcttgagtctgggagttcagagaccagcctgggcaacatagagagacctcatctccacataaaaagttttaaaaattaaccaggggcggtgtagtcccagctactcaggaggctgaggtgggaggcttcagcccgggaattccagactgcagtgagccatgattgggccactgcactccagcctgggcaacacagtgagaccctgtctcaaaaaaaaaaaaaaaaaaaacaggaaaaaacaaacaaacagaaaagcaggcctggcgcggtagctcatgcctgtaatcccagcgctttggaaggctgagacggggttatctcttgggctcacaagttagagacaagcctgggcgtgggctatattgctagatccaggtctctgcaaaaaacaaaaccactcagtttttagtcatctataacgtcctgcctggaagcatgctattttgggcctctgagcttttgcacttgctaattccttctgcgctggggagagctcaaaccctgcccgaaacttctaaaaatggtgcctggataaatgaaggcattagagctgcgattggacggacggctgttggacggcgccactgctggcacttatcgggagatgctcattggacagtcacgtgacgggaccaaacctcccgagggagcgaggcaggtgcggtcacgtgacccggcggcgctgcggggcagcggccattttgcggggcggccacgtgaaggacgcacgttcagcggggctctcacgtgacccgggcgcgctgcggccgcccgcgcggacccggcgagaggcggcggcgggagcggcggtgatggacgggtccggggagcagcccagaggcgggggtgaggcgggaggcagacgggcgggaggagggcgagccccctcgccggcccgtccgggatccttcctaccggcctggggctgtgcgatctccaagcactgaggggcagaaactcccggatcgggcgctgccagcctccagtcccctccgtcctcggaggttcctggctctctgatccccgtgtcccgatccctgcctctctggcgctctcggaccctcgagaaccaggggatctcggaagccaagcccccgggcaggcccgggcttgtcgcccgcaccacttcctgcctctggcactggtgggaggggcgggtctcgcctctgccccctcaggccaggggtctggatgcatatagcgttcccctagcctctttccccggggagaatgtaggatacaggcccagcctcctggcctttctccatcagggactcagttgtctgggcccccccgtcactttatctgctagggtcccagaagtccagggtccccagctctgtcctccctcaggggccgtgagtctccacagtctcctgatcccctagaacccaagagtccaggtacctcttcccttcctttctcctctagggcccaccagctctgagcagatcatgaagacaggggcccttttgcttcaggggtgagtttgaggtctgattattgtggcacagatttgaggagtgacaccccgttctgattctgcaccctcactccatccccactctagtttcatccaggatcgagcagggcgaatggggggggaggcacccgagctggccctggacccggtgcctcaggatgcgtccaccaagaagctgagcgagtgtctcaagcgcatcggggacgaactggacagtaacatggagctgcagaggtgtgggcccctgaggacccagaagtccagccactgggctccttcaggacacaggactctcagccccgcattctcctcctcccctaagaactaggagtctgggccccacaactcagcgcaaacattccggactcccagccctcctctctgccaggatcttaaaaccctccttcagggagtcatttttcccaccttcctaaatgtctgtcttgtccccttcccttgtcccccgttggcctgttgcttttcatttcagcctggcttggggctcagtctccttatctttagtgtgcggtggatgcgggaattttccaccatcagcctgatgcctgctccccggcactggttctcctctctcctgcaggatgattgccgccgtggacacagactccccccgagaggtc

SEQ ID NO: 67871 - DNA, 8968 bp, Homo sapiens
gccttggcctcccaaagtgctgggattacaggcatgagccgccgcacctggccatgtttacaatttttgaagccgacttcaattgtgggtggcagaaatctttgaggggaggcaaagaattgacaaaggaggtttggggccactatctccaggcagtggggacaaggttcagtccctaacgcccactccactccccacaggccctgtgcaccaaggtgccggaactgatcagaaccatcatgggctggacattggacttcctccgggagcggctgttgggctggatccaagaccagggtggttgggtgagactcctcaagcctcctcacccccaccaccgcgccctcaccaccgcccctgccccaccgtccctgccccccgccactcctctgggaccctgggccttctggagcaggtcacagtggtgccctctccccatcttcagatcatcagatgtggtctataatgcgttttccttacgtgtctgatcaatccccgattcatctaccctgctgacctcccagtgacccctgacctcactgtgaccttgacttgattagtgccttctgccctccctggagcctccactgcctctggaattgctcaagttcattgatgaccctctgaccctagctctttcctttttttttttttccccactgagaaggggtctcgctatgttgcccaggttggtctcgaactcctggcctcaagcgatcctcccgcctcagcctctcaaagtgctgggattacaggtgtgagccaccatgcctggcctgagtccagctctttaatgcccgttcatctcagtcccctgcccgcaatcctgccttctggcctcctccgtccctgatcccgcctctgcctgcccaggggctgcccctggccgagtcactgaagcgactgatgtccctgtctccaggacggcctcctctcctactttgggacgcccacgtggcagaccgtgaccatctttgtggcgggagtgctcaccgcctcactcaccatctggaagaagatgggctgaggcccccagctgccttggactgtgtttttcctccataaattatggcatttttctgggaggggtggggattgggggacgtgggcatttttcttacttttgtaattattggggggtgtggggaagagtggtcttgagggggtaataaacctccttcgggacacacttcggcatctgagtcactgggcctctgccccgctccccggcacgtcaggagagcaggccctgtccgctgccccacgccgggcccgccgtctgctggcctagagatacctgcttgggccactcagggacgtggggctctctgcactcacttgacatctttttctggggtgccctgtggggtctgtgggttagggatgagttggtcctgggcctgacctgcaggagctcacgggaaaggaaaagaagggagctcacgggaaaggaaaagggagctcacgggaaacgagggtgataggtggtacatctgtcgcagcccaggatgatctgtgcgggacagaggcagcggcctgtgaggcccaagcaggcgtgtgggtaagggaagaacagcacggccggctgcagagcaagcctcctcggcccggggaccacagcctggcgtgtcacacgtgggacctcaggaggccatacctttaccgagctggagaatgggagtggggggaggagggatgggaggaccagaggagcaggaagggctctggagcctggtggtgaggtcgctggagggtggcaggctgaggacaccagggcgagggcccacgggagaggcctcctgagctgggctgaggacagagaggaagggacctggctggcgactgagaggctggagggcagggcagaggaggaggaacctggtctggccccacagctgggtggggcccccctggagaggaactgccggaagaaggtgctgagctcagaggcccagtgaccttagacacaggcggagcgaagacaagggggctagaggatgtgggttctcagtcacagggtctctggcacccccctctgggtctttaccccctcccatctctgggtctctgtccccatgctctgggtctttgctttccgagcctctgttcccaccccacctttggccctctttctctgggcctctttccacccctggcacccagacctctggccccctctctctgggtctctgtccccccctctggatctctggccccccatctctctctgggtctgtcccccgaccctgagtttctgtctccctctctctgggtctctgtcctctctctggctgtcactctctcttgggtctctgtacctcccctctctctgggtctctttccctctccccggtctctgtcccccgcccccgggtccctgtccccgcccccccaggtctcagtcctccctagtctctgtccccttctctctgagtccctgtcccccctctctctgggtctctgtacccccttctctggatctctgtccccacctctctctggatctctgtcccccactctggatttctgtcccctcccgccgggtccctctgggtctctatcccccccacccctgggtctctgtacctccctgcctctgtccccccccacctctgtccccccctctctctgggtctcttttcccctccctctgggtctctgccctcctctctctaggtctgtccccctcccctctctctcagggtctctgtacccctctgtctccgggtctgttttcccctctctctgggtctctgtccccctctctctcagggtctctgtctgagtctctttttctctgggcctctgtctccccaccccacgttctctatggtcttcagatcctgtctctctcagcccctcctctccctccacctatgggccccaaggcccctctcggccgactaaaggtctctgggctgaggtatgacatttggtaaatgagtaactcgggccccacagtcaacggggtgctttggacggctgcccctcctccatggactcttcccagagaccccaagtcaggggagagagaggggcagaggatcaatgagtgtacactgagccaccacccagagtgaggggacaatatggccacaggcaggatcccagaaaaaaaaaaattatgggaaccaaaaagacacggagacaaagcacacagccggcttccaacaaggggggaccttggggtagggggcccgatttgggtctgagccaggtctagttctgagggtcccaccaaaaaagtcggggagtgccaaggggatgaggtcagcgagtggccccacccccatccgtccccgcgggggccccttcccgcgctgagctcagcatgactcagcagtcgctgcctgcaacaaggaccccagataccggcctggcggggcatctgcagatcccctcggtcaggggctgccccgcctgggctgttcggagcagctcctctgtagggcagggcctgacctcaccccacaccccagtggcttcagctccctgcccagcgcacgggctgcctccatcagggcacttaagtagagtcaaggtttgcgccgactccgtctcccagaaatcaacgtggaccaggcccacttaaaaaatatgcattagtcgaagacagacgtctcgtccataggtccccagactgtttgtccacaacgcagggcttctctttgtgggcctgaaggagcacacgtcaggcaagacacgagggcaacttcagagacactgttcagggccacggagaattctcgaagtctgtgagttgtctccaaaacagcctccaggaaatgcaatcccagagacaccgcaaagctcaaaacagacttttcattcctccccatttccactcccagaaaaagcctgggcccctgaaagagctccaaggtatccccaaagtcccagcccatctttggagggttccagagggctgtccagggttccagaagtcaccctacctcatacaatgctcctcctgggcttcccgcactgggtgaaacccacggctccagaataactgccctttccaacttgcagagcacctcaagaacctaaagatttccccggggagggctccaaaatatagagagtttgcatcgtgaacccccacccctgtaaatcccaggactccagtccccgcaacactccatcttccagagatctccaggggtccagaaataacacctcacagccttccaagcttcccaaggatccggagactccttatctcgcagcgcaaacctcaggcaactacaggtcctccctgcacctttgaggtgcccctccccccactcaaggttccagaaaaatccatgccctcggaaaccccagaatcttactttcccgaggcaccccaggaccccagggtcatcagttcacagggctgttagtgctcccataaaactctagcctcccagagggaccccagcccccaccctcccgcccacgaacccctgcatttccagaatcagccccagggccccaacccccccaagcccccatttcacaacacgctggcgctacaggcgcgtgacttccccttgctttggggcggggggctgagactcctatgtgctccggattggtcaggcacggccttcggccccgcctcctgccaccgcagattggccgctagccctccccgagcgccctgcctccgagggccggcgcaccataaaagaagccgccctagccacgtcccctcgcagttcggcggtcccgcgggtctgtctcttgcttcaacagtgtttggacggaacagatccggggactctcttccagcctccgaccgccctccgatttcctctccgcttgcaacctccgggaccatcttctcggccatctcctgcttctgggacctgccagcaccgtttttgtggttagctccttcttgccaaccaaccatgagctcccagattcgtcagaattattccaccgacgtggaggcagccgtcaacagcctggtcaatttgtacctgcaggcctcctacacctacctctctctggtgagtccccaggacgcccctggccctaatttcctccagctgcgcacctccggccctcactgcacgcgccagccttctttgtgcggtcgggtaaacagagggcggagtccccttggcctcgcctcccgctaaccattgttgcctccatctcttcccgtagggcttctatttcgaccgcgatgatgtggctctggaaggcgtgagccacttcttccgcgaattggccgaggagaagcgcgagggctacgagcgtctcctgaagatgcaaaaccagcgtggcggccgcgctctcttccaggacatcaaggtaactagtgtgtgggtaatggactacatctcccagcaggccgtgcgcgcgaggagccttgatttgagggcgtaggtgtcgcgtgggcttctgggagattgagttcggtcttgtgagccctcttaaccgctggaaatagaggcgcacctcgtgcagtgcccacaacacgcggcagtccacaccgctgcgtggtcttagggacgtatagctgtaagagctaggacagggtgcggagagtgataaatacaagctgtcacatgtctttgtggcctgggcctctgacccccaacgactcttgggaaatgtaggtttagttctatgtgccgagtgtgtgtattctgagccatttctcccttctatatagaagccagctgaagatgagtggggtaaaaccccagacgccatgaaagctgccatggccctggagaaaaagctgaaccaggcccttttggatcttcatgccctgggttctgcccgcacggacccccatgtacgtacccgctgcatccatggctacccaaccatacccctcaagcctctgctccctttgggcaaatttccttcagagcctcatttcacacctgtcacattttaatctgcaactggctgctctctccccctcttttccagggattgggtttctaatttctccctcttctctctcagctctgtgacttcctggagactcacttcctagatgaggaagtgaagcttatcaagaagatgggtgaccacctgaccaacctccacaggctgggtggcccggaggctgggctgggcgagtatctcttcgaaaggctcactctcaagcacgactaagagccttctgagcccagcgacttctgaagggccccttgcaaagtaatagggcttctgcctaagcctctccctccagccaataggcagctttcttaactatcctaacaagccttggaccaaatggaaataaagctttttgatgcagctggtggttttgtgtgtggtgtggaagatgaggtgggatctgttctcataaagcttctggctgggttgggatgccagtgaaagaggagttggccccatctcccattttcttaactgtcctaagacaagaggctatctgggtagtgttgaacctgagggttctctgcttgcctggctgttaactgtccctcccagatggtagagatagactccagggagttgaattaagacctaggttggtatctagaaacagatgttaggtctcagccagaaacagccctatttaacgagtgattatggggccaggtgggtcgctcacctgatgtcaggagttcgagaccagcctgaccaacatgaagaaaccccgtctctactaaaatacaaaattagctgggtgtggtggctcatacctgtaatcccagctagtcaggaggttgaggtaggagaatcgcttgaatctgggaggcggaggttgcagtgagctgagatggcgtcattgcactccagcctgggcaaaaagagtggaactcccatctcaaacaaaaaacatgtctgcctcacggaagttgcggtgagctgagatggcgccactgtgctccagcttgggcaacagagtaagactctgtctcaaaaaagaaaaaagcctcaattctgggaggcagttggaattattaggccctttatatgggcacattgacgctattgctatgcaacttgcatggcaaccggggggctcactgaggtctttgctccagagtttaagagattatggcccgagcttgagtgatcccaatgtgaggcgcacactgagaggaactggccagtggagctgagcagccaggaacacgtgatgcccaagcaatgctggacaaggggtttagggttcatcacagaaatgggatgtgaaaccttgggccggattctccaaatgggaactgaagaagcttaaaacaggccttaaaaagcacttgctgtgtccaagctgcaaaactgctgtgtcagctctgactcttccccttctccttcccctgggtctggggcagggtggttcaagcctgtaatcccagcactttgggaggccaaggcaggacgatcacttgagcccaggaggttgagaccagcctaagcaacatagggagaccccccaagtctctctagaataagaggatgagctcagaccagggaaggggtggtactggggggacgtcacagccaggcccaccaagtgtcatgtctgaccacacctgggattcttaaatatagatgtatttttttcatctcatctccggacacactccaatcacacccctcctgccctcccctctcaactgcaaaccaagcggtgcagacacagcacagcacacatgaggggccctccctttcaccaaagctgaaggcagggcacagtttggggatggaagagcctcgaggtaaatgtgggggttctagaacccagtgacctcagttctggatcatgggaaagggatcagtatgcagtaacgtggtaaggttccagatctagaagccaggacctagaacctagtggtttcacagtgggcagagcagttgggaataagccaggttaggggtgggggaagacagccagctctgtcctctgcaggcggattccctggagggagatctcagatttagaaaggaagagtaggatctggtccagaaagggccagaaagacaggaaggcatctggactgagactgtgtgtcctccagaaggaatgagcagccaagtggttctaccacctcttgcttggccaaagtgtaggggatgacaggagccggatggagggatcctccaggcagagcctggctctgacatgccagggagggctagaacatccctcccagagccccacttctggagttgaaatggaggaccatctgctctcagttaccttcaaactctgaaagtgccccggctctggacttgatcgccccattcgcagggacaccacgtggtttccagaacttggtggcccgcatgccgggcctgagcgtggcctgctctgtatgctgtagaatttgtaagccacacggggggctctaaaagccccagacctgaaagcaccatgccaggtttcctaaaacctctggcaccaccgcagagtaatggcagattcctggcctctgggaagcggtccaggcccaggggactccagggcgctgattatgcatattctggagccagagaaaggcacggctttgtggattctggagtgcaggaacttggaaactggagctggagggggtggagtgtttggcggactgggtgggggcactgcggggccacacccagtgcagatctggagcgggggtttaggagcagcacccctctgcatcctctctctggagcagagaggcaggacaggcggggagtgtggtggggcggacttagttacgctcctcgcccagggagctggtggggctgaggggctcgctcggggtgctgagtgagctggaggtggccgtgtccacagagttgcgcttgctgccgctggtggaggaggtgcaggacgctcggcgcggccactctggtgcacggatgttgcgccggtccttggcggcctcctcgtcctcatcgtagcgctcgccgtcttcctccagcggcccgttccggggatcctcctcgtcctcactctggtgcgggctggagtgtcgtgacagcgagggcgacggtggca

SEQ ID NO: 67872 - DNA, 1060 bp, Homo sapiens
ctctgcctctcaggttcaagcaattctcctgcctcagcctcctgagtagccgggattacaggcacctgccaccatgcccggctaatttttgtaactttagtagagacggggtttcaccacgttggccaggctggtctcgaactcctgacctctggctggtaattggccacctcggcctcccaaagtgctggaattacaggcatgagctgccgcgcccagctacccttaggtttctaggatagcaaggaaactgaggtgtgagcagggaagccgtgccctggggcctccaggctggaggatggggacccagggggcaggccctggaaggcttaggacccacgtgcctgacatcagctgtgtggtcagggacaggtggccttccctctctgactgcagtgactcatttttcagaggaggatgaaaatagaatcaacctcagaggtttgcgatgaggacccaatgatgtcatgccaaaaagtacacatggcaagccttccagaaatgtcagctattattaggacttgtacttgtcctgcagatggcaatgctaagccccattttatacgaaaagaaagtaagattctgagaaaggaccacttaggcacacaagtaaagctagcagtgtcacacaacagccccacggtcactcctccacttaaaatcctcccatagctctggcctcatttatttttctttctttgtctctttttcttttttcttttctttttttttttttttttttttttttttttttttttttttttgagacagagtcttgctctgtcgcccaggatggcgcaatctcggccactttctaggttcaagaaattctcctgcctcagcctcctgagtagctgcaattacaagcgtgcgccaccacatctggctaatttttatatttttagtaccgatgggatttcaccacgttgaccaggctgatctcgaactcctgacctcaagtgatctgccctcctcagcctcccaaagtgctgggattacaggtgtgagccaccgcgcccagcctctttctttcttttttttttttttttttttgagaccg

SEQ ID NO: 67873 - DNA, 2341 bp, Homo sapiens
cctcagctttctgaagcccaagacacagaaatgcaggctcctagcccctcccatcctagggcccagcctctgactaacttaggacttcccagccttcccctattccagtacgcatgtgtcccaggccatgggctcctctactcctaggaactaatagctcaggccctcagctccttcaaagcccaggcattcattacagtctccagcccgtcccatctttattcttaagcagccagatcctcaggtcctcccaccgccgctcaggcctcctatctcccagtcagctctctctcaaatctggagttttatcccctagaccatgctgttagggtcataggtctgaaaccccggcagcttcccaggtttgcacgcagaaatcccatccccccatccccttccctgttcaggacccaggtatctagtctctcggaagcctgcctccaggacctaggagtctcattttagcgccctcttccctaggacccagaacccgggcttccagcctcctttcatcttaagtcaaacgaaccatccctctcccacccacctccggcttcccagcccctcctcaaggacacagcctccttgcccaggtcacaagggttcccctagtagccccgtcctcctacaactcagagttccgggcccccatccactactgtccttctcgtcaagggccccgacgcctggcgtgctcacccttgttagccacctcccaggccacttcgaagagcactgcgttctccaggtcgaattcatcctcccagtcctccagtcctggcagtgaggacatggacaaagtgcggtttaaaggcatggctggcgcaggaaggggggctccggggatctccaggtagggaccccggaggtgtctagggaatgcaccaggtagggtgcggggccgagtagctggtgcccgacgggaagcttgcaagacgctcggcttcctattgcaagaccgcacccctgccccgaagcgttgggacctaggcagaaggaggccgcagcgtcactgagcccactggcgcccctgcagtgaaacctcgcagccgccaggaggcggtggccgccccccccagccagcgccattggcccacgcccgggggcggggatttccgcgtgtcctcattggtggaacgggttggagtcgctgtgtcccggccccgcctcggccgtgagacctccagggggcggagcttgccgctgcgctttacggaaacgagtggccttcagctctgtcaatctggagctggaggcctcaaagtggggaggaggaggagggtgggataaagaggaaaggagcgtggaggacgtgtggttactcaaagaacagctaagaattttgcaatcggcctgagcggggcggtggtggggctgagcaaaaggaggaggagccaggagacattgggaatggacccaggagttccggacgcccgtcttccagcgcagcctcggtgggagggcggggcataaagtcccgccacgcccccacaatatttacatatttatgaggaaccatcgagatctttgaagaaccagctagcctagaggagccagaacatctcgctcctcgcgcgtttccgtttccgctaggactctggcagttggtgagcatcatggcaaccgttgtaagtgtgggtgcatggagggtgaggagcgagctagcagtctcgagtttgagagaggaggatgctggaggccctgactcctgggtctgagggaggggggatctgggggttcagactcctgggtctgaaagaggaggaagctcggccacccagatctgggggagaaggggacatgggggctggacttctggatctgaggcggggagggggctgggatcccagaatctcgggtctggccccatcatgctataggaactccaactttcaaaatcatcttggcgcaacggccggttccgcagtccttggcgccagtgtgtgatgaggagggttgtaggaccttgcgcttcgagccatttgggagccttggattgttagtggtgccaatggcacttgagttccaagctggaagcacaggcaggtacctgttcagtgtgtctgagagcgcgagggcgcctagtgagcctttagtgggaagaaattgtcgaggaacaagagagtcttagtggagaggactgaaggattagggacccagaaatcgggatcttgtcatgctaccgttttggccattttcatatttccagtatttcacacgggctacgtctcagtgtaaatgctcaataaattatcacttgaatatttgaatgaatgaatacatgtgaatgaaggagaggccaggaaacttggcctggcacctgctcaattacctgaataaa

SEQ ID NO: 67874 - DNA, 1815 bp, Homo sapiens
caggtgatctgcccgcctcagcctcccaaaagttctgggattacaggcgtgatccaccgcgcctggcctcaaattatctttattcagttaaatgcttttattgtctctcccagtacaatgtaagccctagcagcagaagactttgctttaatcacgtgctgtacccccaaagcccagacagtgcctagcacacacgagatgctcgatgaatagttattgattgaatagattagacatcaacgcaatcaggctgttcacctagggactctttgctaggcggcggagaggtacgttacagttctctacgcaaaacgcatgcgcgaaagatccgggaagtgtgatcggaaaggggcggagcatcagggagagtctcgcggacataggcggttcggcgcggaaagcgggaggtggaggggcggcttggggcaagcgcgcgcgcgcagtgcagaagccagccccccgcggctgaggtactcaaggtgcccaaaggcggggtagtgacctcgcgcgtgcgctgtgcccgcggcagcgccgggtcctagtgtgtgggttgttgttggcaccgcacggcgcgtgcgcagtgaggacggcggagggatttgcggccgggacccaccccctgctccagtcgctatcggaggccgcgcgggtggctgagcagcggcctggtgcgctcgcttagcgggcgacggaatcagacggacgtggacgcccccggagtggaagccgaagcaggagttgttgttgctgaggggctgccgcagccgccgcgagcctccggacagacgccagagcgaggagggcgctacgcggtgagtgagtgtgactgagtggcccgacggggtgcggggccgctacccagaagccccagcggtgggcccggtcctcttccccgcggccaggcccctttcccgcgtccccgccacaggtcccttctgcatccctttcccggaccccgaaatctctgggcacccacgcccgcttcccacagcgccctcgtggttccctacccacaggcccttgcggtgtgtggccttttttctttttcgtttgtctatgttgtcctggacccttacccataattcctttcgctttttgcggggtccaggtctgttacccacaagcacttggttttggggcttcgctccttatgtttctctttctttgcttggaaacttccgatccccaggaccctgcaaactgcatctcgtaatttgccctccacggcacgggacgagcagccacagctgctctgggcctccctcctcgggtccttgatttccccagaaattcccagggaacctctccgccccacagctcgtgtcagaggactctgagacttcactcttcaggaacccttttccagccgttatttttgttttctttaccggcctttcacctccacccccaccaagacgtacccttttctccgcaacacaggactgttctctgcccttacagagcctgttttaattccgagacttttctcctgtctttcttattttgagagtcaaggagtaacaggggctttctctgtgcagacccgatctaacctaaggctgtcctgcttctgctctcagacttggcaagatgacccagttcctgccgcccaaccttctggccctctttgccccccgtgaccctattccatacctgccacccctggagaaactgccacatgaaaaacaccacaatcaaccttattgtggcattgcgccgtacattcgagagtttgaggtgagttcactgagcaggccaggaatggtttgggttctggggagcaacgggttggatttgcgagtccagcttctggcc

SEQ ID NO: 67875 - DNA, 1473 bp, Homo sapiens
tggaggagatggaggcccggttcgagaagatgcgctctgcccgccggcgccaacagcatcagagctactcgtgagcccctgggtcaccacacccctggggcctccacgggctccctttaaccccaggctcccaaaccaggccagtgcttcctggatcttccagccctggcccctcctctgggatcctgacccttgacccttggcccaggctctcaccccaggctagtttggccaaatcccctggggagcccttagcttccttccatcccaagatacggaacctactgtggctgggatccctcagcccacttacctgggcccttgcctctgcaaccccagtcctgcccctcttgtctacccggagcctccctgatcccgggtcccttgtccaccccccttgcaggtccttggagtctcgaggttgaaaccacagatctggacgttcacgtgcactctcttcctgtacagtatttattgttcctggcactttatttaaagatatttgaccctcactgagtgtctgtgtgtctgtcctgcatccctgggttggtgtcttgagatgtggagggaatgcgaggagctgaggtcaggccaagccgttgagaagccttttccagagtctgagaacagaggttaagacctctccctaggtctgaaggcggagacaggccggcttccaagagactagtccgagggcggagggcggaggcagggacccagtctgggtctgagtgctggggcagaactgaggacaacgctgcctacccttaagagcgtctgagggcgaaggccaagtcccttcctccagagtcctgaaacgcagccggagccagtgggcggcctctgtgtgggcggggcggagcgaaccattagcctcgtccgccgggggaaccctgcaggccgcactactgtctgcgtgggagtcgcgggtgggggtgccgcgtgcagttcccgaggcgggcgcaggggtgcagaatgaggtgccctcgcccaccgggcgctcactccaccttccaaacacagcgcgtctttccggaagcagcccccgccttgaaatccaacctttagcctcatcccgctgcccgcccagccctcgtgtcccgtgcggcgcgagggctagtgcgcgccactgccgggagccggggtcgcgactcgcgttccacgccgcgcgctactcgctccaggtgacatcatccccctgccgggctccgcctcccgccccagccgcctcacgccgcgtgcctattggtcgacgcgccttatgccccgcctctcgctctccgcccgcgcgacccctcccggccggtgtggaggcggggtctagtcgccggccggcgccgacgctctctcccattggccgctcttcgccgtctgtcagtctcctgttaaaggggccacgaccgcccgggagccgtggggggggagggggagggaggaggaatttttttggggggaaggtgggatttggggggc

SEQ ID NO: 67876 - DNA, 735 bp, Homo sapiens
ctccctaaacatttgcaccatggctgtgtctgtcccccacttctgaatcctcattctgtacctctgtgtgaggtcagcgaggtgacgtcatttgcacagggccacacagcaaaatgcatggcagggtcccaattccaacctgaatttgttcaactccaaagtcacattgcctggtacatggcaggtgccctataataagaatcattccttttctctgttactgcttgccccagaaagcaggagggacataaacgtgtggcccagggccttcaggaggacaccctccttcctctcccccacgcgaagccctctcccaccatccattaacactccctgcccctcagtccacaggaaacgtgtggatgacacacgaggagatggagtcccttacggccacgaccaagcccgtgagtgccccctgccggccgccttgggggtggcactaaccttctttgggggtgggggcggggaccgagtctgtggccatccctaagtccgctccttgcgtcctcctctgcctgccccttaactcaccccttctctcccctcttcctactaacgggtcaggagaccaaggagatcagctgggagcaggtagggggcgcggggcggggcgtgagcgcatgaacaggctgtgcacgacgcatggatgcccctcctccgagccctgcccctgccttcaccagaacatgccatcatccccatgggggggcgctgcgccaagcttggctctgg

SEQ ID NO: 67877 - DNA, 1776 bp, Homo sapiens
ggcctgactattaatggtcacggttggaggcggggccaggagaggggcggggttaaaggagaggtgagacccggagaggggtggagtcaaaggaaggggcggagtcagacaaggcaggagtccctcaccggctgtccggctcctatacctaggacagcgccaagtctttcagccgctccccatcctggcggaagatgttccgggagaaggacctccgaggcgtaactcccgactcagctgagatgttgccccccaactttcgttcggctgcagcgggagccctgggctctccggggctccctctccgcaagctgcagccagaaggtggggggctcccaaatgcgacagcccttcctcgcttccctagggtggggcatggaccacctcagtagtccgggttctggaatggcctagtcctttctcgcccacccctgaggaatggactgctccaacgttccggactcccccgtcaggatgaaatggataaatcccactcccccttcccagggcgggagtgaactcgcccaatgcgagtttgagtccttggctgcggggaagggagggaaacccatgtggagcccggcgatcgttgtgacatcgggaagggaagtccaaagggaggaatcctggagaggaacagggaggagggtgctccaggctgaaccgctgctcgctctccctccaggccagacttctgggagttcccgggcagacggcgtttcggtccggacctattcctgctagtgcaggcctccaggtgaggaccgtgctgggcgaccttgggggtgcggggcggcacggtggatcttcactgctccacgcgctgcccggcgtcatgcaggtgacctcactcggacggaagaatcttcccgaggctgggctgttccctctcctgcccggactgtggcctcgccggggagagcgggcgggggagctcgcgccgaggactggaccatctgtacagaccagcgggagtgcgcgcgcccgcctcgcacagggccggggcctggaccaaaccacatgaactggactgagagggggaagaagcggggaggaagaaatcccgccccaaacgtccgctttccttttctctactttgtaatttattgatcagtttctgttgggagacgggtgtcctttacccgcgggaagggggcggggcttccctcccgggccgcatgcggggagaggctgctccctcccctttttcctgcccagtcgcggggcccaagtcttccttcttcgtccgaaaggaggggaggggggactcgctgctacaagcctcgccccctgtgccactcagctccgccccgccgcgtccggtcgccggtcccccgggtcatctgcgggcgggttcccctctccctcccccgtgtctcgtgtccccggggcctcaccgccccccgtgctgtggccgtgtccgtgccccgggggtagggggcgcagaatggcgcttccccttctcctctggctccggggtttgcatgggagaatcctctttccacgatgccgctgggcgacgtggcgtgggggcagggggacggtgggggagccctcgcccccgactctcggtcggcctccccgccccaggcgtcactcagtgatcacgggtaaagagaactgtttcaaaaagcttccttgttgactgattttttttttgcggggggggggggggctgttcaaccaaccacctcgagccaggagtccaggcccctcatccctcaagtctaggtccaggtctctagaccctacccgcattccccgatgccctgagat

SEQ ID NO: 67878 - DNA, 1107 bp, Homo sapiens
gtctcccctgtgtgtctctctccccccggcccggacctctgcaccccccaggtcgctgtccctctgtccccttatcgcggcctgggacccgccctctccccgcctcccgctttggcgtctccaagactccccgccccccagacctcgccccgccccaggctaggctggaaagtggaggatccggtttgctctgggcgggtctggaagcagagccggcggagggagcgccggggccctgggctgcaggaggttgcggcggccgcggcagcatggtggtgccggagaaggagcaggtgagcgccggaccagggtctgcgggagcgcggagctggggacctcgcctccaggctcccagagaggagggcgctggacacccagattcctgggtcagacggaggagggggatgggagggtccaggttccagggtccagggcatgggggtcgagactcctgagtctggagcgggagggcgctgggggcccggactcctgtgtccgtggggagcgcacggggtgggtggctctgtgtcccataggacagaactgggtgccctctcaccccacttccacccctacatttgttcctgtccccagagctggatccccaagatcttcaagaagaagacctgcacgacgttcatagttgactccacagatccggggtgaggagttcgcccctggactgaccccagagggtccgcggcccgctgaccccgcccgcggatggtcacgccccagccctgctccttccccattcctggactcggggaccttcccaagggcgttccttgccgacgctctccctctaggagcgtttgggtctgtgtagacacccctcattccccattcgccattctcccgctcagggtcagtgtagacgctccagggctcggttctgcttctttcctccccgatgtctcttctatgtgcttctgtctcttcgtgtcactttctgtgtctctgtctttcccttttgggtatttctgtttcattcattcattcattcattcattcattcattcatccatccatgcaagaaaccctcactcagcgctcccaaggtccctttagcctaattcaacggccctgccagggttccaatttccc

SEQ ID NO: 67879 - DNA, 1809 bp, Homo sapiens
attctcctgcctcagcctccccagtagctgggattacaggtgcccaccaccacgcctggctaatttttgtatttttagtagagatggggcttcaccatgttagccaggctggtctcgaactcctgacctgaggtgatccgcccactccggcctcccaaagtgctgggactacaggcgtgaccaaacgcccttggctctaacctgacttctaatcgcatcctgtaacctctgactttagtgatcttgacttctgtctgctgctatagactgaacaattattgcctggcatctaaccttcgtccttgcccctggctgggccctgacctcaagtgacctttgacctctggcctttgcagttacacattcggcaaagtacagggcaacagcgatctctactggaaggcgcagcgttaccgcctcatccgggaattccactctcggcccgcgctggccccgccctttatcgtcatctcccacttgcgcctcctgctcaggcaattgtgcaggcgaccccggagcccccagccgtcctccccggccctcgagcatttccgtaagaacagagcttggcttaaaaaggagaaatataggggaccgggagcctggaaggcgaggggaagggggcatgccccaaatgactaacgggcgtggcttaggtagcgaggggcggggtttaagcaacaaggggcggagcttaagcactgaggggcagtgcttacgggtgaggggcggggcatgttctcgaatcaccaggggctgggtctgggatagcgtgcgtgttctgagggtgtcggaaggggcagctgggattgggaaggggcgtggcctgagccctttgactccgcccgcccctgcaggggtttacctttctaaggaagccgagcggaagctgctaacgtgggaatcggtgcataaggagaactttctgctggcacgcgctagggacaagcgggagagcgactccgagcgtctgaagcgcacgtcccagaagtgagagcggggcctggtcggggatggggcttctggcctggggcggatcctgacttcagctgaaggcagggtcctgggagggagggagagagggaggaggcccgggaagcaggcagagccctgggggtgggtgggctgcgggtgcccccggtaagaggccctcccttctcagggtggacttggcactgaaacagctgggacacatccgcgagtacgaacagcgcctgaaagtgctggagcgggaggtgaggccttggggcctggctgggggactgtggcaggggtcccatctcccgctctgacattcctcccattccgcaggtccagcagtgtagccgcgtcctggggtgggtggccgaggccctgagccgctctgccttgctgcccccaggtgggccgccaccccctgacctgcctgggtccaaaggtcagtgtgtagcatcagcctgtgcatctccagcctctgttcctgtatttttgcgtgtttttctctctcggcacctttccagtgtccctgggtcactctcttggtctcctttgagccttttgtactctcgccttcgtctttcttcttttttgccagtctcccagtttttctgtctctccccttccctgccaatcacctgctctctcttttctctcttcccccagactgagccctgctggcggacttcaaggagaagcccccacaggggattttgctcctagagtaaggctcatctgggcctcggcccccgcacctggtggccttgtccttgaggtgagccccatgtccatctgggccactgtcaggaccacctttgggagtgtcatccttac

SEQ ID NO: 67880 - DNA, 986 bp, Homo sapiens
gtgctgagcgtacagctacagcgcagggcactccgccggaaatgcgagccgcacgtgccgggcgctggggattcgagccccgggcccagcctgatcgctgacggcggcggcgggcacagcggcagtctgtggggtggctggggcatggcgggtgcctgccccaactggggagacaaggcaccgcagggcaagctgcccatggccctggggctctggccgctgtgggttcaagacgaggaccagcctgacactggaagtgcgggcgcagaattagaggaggcacaattagaggctgaggcagagggggaagacagatgagcctccaaaataaaggaccctgggcttgcttccgaccttactccttctcagcctctacccccacttgtagcagctattcccgcctcatcagccagccctgcggcagttcccgtcgagccccgcccttttctacctatccccttctccagccccttcccgcccaattcacggccccacccctgacctttctcgcccgggtgggcatcacccccgtctcgccagcaccccttcgacttctctgacctcatctcctttctctatagctcgggttcatgacgctctcgatattcctgtgcagaaacctggaccacgtctacaaccggctcgctcgataccgttaggccccgccctccccaaagtcccgccccgcccccgtcacgtgcgctgggcacttccctgctgcctgtaaatatttgtttaatccccagttcgcctggagccctccgccttcacattcccctggggacccacgtggctgcgtgcccctgctgctgtcacctctcccacgggacctggggctttcgtccacagcttcctgtccccatctgtcggcctaccaccacccacaagattatttttcacccaaacctcaaataaatcccctgcgtttttggtaaaatagctttatcctctgtcagaacacaaacaaacaaactttgagaggggag

SEQ ID NO: 67881 - DNA, 1525 bp, Homo sapiens
tctcagttctgtccttgccccctggaatctgttcctgccatctgagttctaccccttccccacaggatctatctctgccccctggaatctgtccccacccaccgagttctggcctccgtccctgggatctgtccccgccctctgtgttctacccctgccccatgggatctgtccccgcccacccagttctccccgccccctggatctctccctaccctcccagtcttgccccggccccatgggatctgtccccgccctccgacttctgaccctcgccactgggatctgtcctcgacctcccagtcctgcctccgcccccggaatctgaccccgcccaccgagctctggcctccgcccctgagatctgtccccgccctcccagtcttgcccctgccccatgggatctgtcccccgcccaccgcctccgcctctgggatctgtccctgccctcccagtcctgctcccacccccggaatctgtccccgcccaccgaactctgtctccacgccggaattccagcgccgccccgttgggtagagcccggcccttccctgtcctgggcccgcagacagggtcccgccccgctcctgtcctcagaccagcccatctcccggcgctgagtccacctccagatccaggccccaggagggtgatcctttccccactacctccccgcgtcgggccgcaaatgcatttggtattaaattttcatgatgcggcccgcggtggggtgggaggagcagacggcgcgtcgggcgggcgccaaggacggggtggccgggaagccactgaccgccgcagcctctcgcttccagccttgactggctgtgtctctgggtctcacagctttgagaaacccctgggaccccagaacggaggacgctgcgggtctgaggcaggagggaggtaggaactgggactcgtggggctgaagtagcagcgcgggagccgctcacacgcgccacccagtggctgcagagtccccggcccgggtgcggaggcggtggttgcggcttggggccaggtgtgagggtggagcagatggtgaagaggagggagtgggaagcgggccccgccgctgccaaaacttgggcctttgccgaaaccatcgccatggaaaccgaggaaggaggaaaggactcagccgcacactttttcaggacctgggaatgagttactcggccccctccagcggctcaccgtcccaaccacaagtcccagcggcctctgagcctcagcgctcgtttgagaagggccgcgcactccgagggccgctgggagatgtagttctctgagacgatgggcagggaaaggttgcgccctctggtggacacggcgcccacgttcgctcatccgttccgcggccggaaagaccctacctgaagtcactcccaccctgacctcttccccgtcttttctccccctccctcacaattcaccccattgcagacacattgtgcttgcctgcctgccttttctttccttccttcctcttctttctcttcttttttctttccttccttca

SEQ ID NO: 67882 - DNA, 1355 bp, Homo sapiens
ttttggagacggagtctcactctgtcgcccaggctggagtgcagtgccgaggtctcggctcattgcaagcttcgcctcccgggttcacgccattctcctgcctcagcctctccagtagctaggactacaggtgcccgccaccacgcccggctaattttttgtatttttagtagagacggggtttcaccgtgttagccaggatggtctcgatctcctgacctcgtgatccgcccgcctcggcctcccaaagtggtgggattacaggtgtgagccaccgcgcccggccccccactcccatttcttagcaaacttgaagcccattaacctcaattccccgaggcctggttcccgccttagtgcattctgggaactgcagtcccatctttgagcaccccgccaaaatccccgaatactcaaggatccaggggtccggtcactgcacctgcagcagcagctcctcaaatcgcgccgaatcagcaccgatcgcctccgcctcgcttagccccattcccagcagcttcgggttcgccatggccctgggaaagagatctaggcgtcctcgagaccctcaacgtgggaaactttgcccaggatccgaaccccagtgcctgctctggccctcaatcgactccggatacctactatcctgttcaaaaacctaagactggcctaagactacatttccattcaagaccgaacaccatcgtcaaatccgtggggaatatgtgtctctagacgcactaccctccgtcctacgtgccgaactgtaaacgaagccacacttccggtctatcggtaaacacaggactggagtatgccacacttccgagtaccccagtgttcattcacaagctggtatcgcgttatcgacaagccacgcccctcgcatcaatcaaaaataaaccccaaggcggatccctgagtgccacacttcctgtatctatgaaagccacacttccggctgggcgctgtggctcctaccggtagtcccagcactttggaaggccagggcaagaggatcgcttgaggccaggagttcgaaaccagcttgggcaatacaatgagataacgtcccacaccccatctcttaaaaaaaaaaaaaaagcgccagacttccactctttccacaaccaaaactggcccccttactttgcagtgaaggttgcattttccaaaccttaatctcaatgtccatcctaaaaggtaccctttttatctttgaattatcacttcctgccagctctagatcctaatacgtccagatctagacccgccaggtctagatctagatctagacctctagtcaatataattagaaaagctgcactttgaggctgggaggccgaggtaggagg

SEQ ID NO: 67883 - DNA, 1216 bp, Homo sapiens
ctcagtttggagttggagaagccgaggcttagagaggtcaaggggctggccaagctcccacagtgataaagctagtgctagggcgacacctgccaggcccaatgtgacaagatgcatcctgagtcctgtgtgccaagccttggcggggcaaagttggggcccggaggacggtaagacacagcaactgcgagttcccagagacagatccgggttccagccccagctcaccatgcactgggcgtgccacccagggagtcagccccactgcagcccccgctgcggggcgtccggagaacgcgccatctgcggcgtgagcggccgcctctcaccaccagggggcgcgctccgcctgggcccagattccaccccttgactgtctccccccaaaaatttcctttcactttcggtctctggctgtcacccggcttggccccttccacacccaactggggcaagcctggtgcgtgaggagacttggactctaggtccccaaggggcggagccagggtccccactcctggggcagggggagcagagggtggggggctgggttcccgggtccctaacctggggagggttctggggaccagacgtcgaggttcttagaagtggagatgaagagttttcaccgtaactggggcagacgcaggaagcctgggggaggaaggggcggaaactcagccacatcaatgggacgcgggaggggcggggaggcaaaggggcgggcagggcaggggctggggcatgagggtccgagacttgttcttctgtcccttccaagacccggcgacaggaggcatgaggggcccccggccgaaatgacagtgctggcgccagcctggagcccaacagtgcgtaaaccccagggacaagatcaggggagaggggaggcacaatgtcaggatggggcagagatgaggggagatggacgggagaacagatggacagatgacgaggaaataggaggggagatggacagatgtgaggggagatggataggagaggagacggacagaggagggggagatggacagaggatggggagatggacagaggagggggagatagaggagagggagatagagaggagtgggagatggacaggagcggggagatggacagaggagggggagatggacagaggagagggcagatgaacagaggagagggagataaagaggagggaggtggacaggaggagggagatggacagaga

SEQ ID NO: 67884 - DNA, 2214 bp, Homo sapiens
ctgggcaagggacccagctgaagcaaaggccgacagtccagaaagtgagaagttcctctgaggaacgctcagtggattggtgcagccaggcaactagaagccattccttgatccactcttagagcccctggggaagaccacctccatctgttttacagatggataaactgaggcccagataaggccaagggtttctccaggtcacagtgaagtcgaccagacacaggaatccaaatctctaagcctagaatgggcaaggctccggggctcacgccggtaatcccagcactttgggaggccgaaacgggaggatcgcttgagcccaggagttcgagatcagcctggccaacatgtcagactccccccgttcccgggccacaacaaaatatatatatatatatatattagccaggcatggtggcgcgcccctgtagtccaagttactcgagaggctgaggcaggaggatcccttgagcccaggaagtggaggctgcggtgagccatgatcgccccacagcactctggtgtggacaacacagcgagaccctgtctcacaaaataaagtaagcccggactgagtgcggaaaggcgggcctggcgggtctggtctccccatgcgggccaccagaggccctgcagccttcagtcgcttgaaggggtaatggcgcttccactcacaaacatggcggacagagcgtgtgaacgagatgaacagcccctcaaaaatatggccgccgaggctggacggccgtgccccagcagcaccgcctccgcgccccacgtgatctctcgccgggcacagcgctgaccgcggaggtccaaccggaagaatgtccggattggacattcggaagagggcccgccttccctggggaatctctgcgcacgcgcagaacgcttcgaccaatgaaaacacaggaagccgtccgcgcaaccgcgttgcgtcacttctgccgcccctgtttcaagggataagaaaccctgcgacaaaacctcctccttttccaagcggctgccgaagatggcggaggtgcaggtatgggctccgcgcgggccggggcggcaaggggccgggtgggatccaggccggaatggggtcgcaccctctctgtcttgcatgttttgcggagcttaacatccataatgaagcaaaatggaagtcttttgggataaggggaatctgtaggaaatgccgcggctctctttaggcctagggttggctacaatgtggcatttccttctcgaggcgagggtgatagagcttccagcacaggacaggtattttgcaactagattttgcttaccttgaactcgggtagtgggtgggggccctggggtagagtcttggccgaattggacccttgtgtgtcctcagcgatgaggaacacgcggaagtgtggccgggcggtctcggggcaatgagaaactgagttttggccaaaatggaaggtatttttatcccgctcagtgcgcgggctactttgatttcacgtggaggtgttaatcggggtcccctgcagctccggttcttttaattctcaatgcctttctgcggggggtcgagagctgttggctgcggggcactctggaatgaactcgttttccgtcgttttggggattggcgattgtcctgaggcgtgttactggaagtcgagagctgtgatgaatggttccacaaggatgggacatcttttgggcctgacacctgggggccctttccctggctcctggtgtagctacttaagtataaaggagggattggccctggaaaggtttctttgtgagtagtctgttgttggggcgggtgacatttcagagccaggccgatctaggcaagttgtgttcaccaagcatgtgtctttgtgcctagcacagttcgcaatgttttgcgtagttcagttaaccatattcctgaggcagttactggtatccttgttttacagaggaggaaattaaattggaattggtgattttgggccaaggtcacgacttcaggaagtctgtctggattttagagtctttgtaccaacgcttacaaagcatgtgtaacaaccagtgtgtgcttcatgcttttgcattaaaacaatgaggatttctacttttagtgttttttctgagacggagtctcgctgtgacacccaggctggagtgcaatggtgcgatcttggctcattgcaacctctgcttcccaagttcaagtgattctcctgcctc

SEQ ID NO: 67885 - DNA, 1902 bp, Homo sapiens
ccgttttttgtttgtttgtttgttttgtttgatacggagtcttgctctgtcgcccaggctgtctgtcggccaggctggagtgccatggcgcgatctcagctcactgcaaccttcgcctcccaggttcaagcgattctcctgcctcagccttccaagtagctgggattacaggggcccgccaccacgcccggctaatttttgtatttttagtagagacggggtttcaccatgttggccaggctggtgttgaacccctgacctcaggtgatccgcctgccttagcctcccaaagtgttgggattacaggcgtgagccaccgcgctaggccgagagtaactttcactgcacctctgaaagttcgtgggcagctcctgcccctaacaaagatggcgacgccgccacacatgctcctagcactccccggccgcccacccttcaaaaagatggcagccgcctcatccggtttgaaggctgaacgaacagagccacgcggtatccaaatcccacgggagcctacgccacgccgaaacaggatggactccgtacgactctcgcgataatacgggcgggctgaaggctggtcacatcttccctgcctaaataatcgcgcccggcgttgtggggcctaagactctcgcgagacaccgtctagcacttcccgcccgtcagtccttcacagtgcccgaatcgcccgctggtttaagtgcagcctgtcaatcagagcagctctcgaggccccgcccaaggccgtgctgcgtttctccttacgtcacttcctctccagcccctgcgtaatcgataaggaaacccggacgctgctgcccctttctttttttcaggcggccgggaagatggcggacattcaggtgcggactcggggttggatgccagggtgcggggtccgccttggccttcaggggcgcgtccgggagggcagagcccggcggccaagttcgggggttaattccgggcgtccgtgattattttctagagattaactggagtggagggcgcttgcttttgtttctagatgagtgcttcctaattcctgggggctcctggcgttaatggaggctcaagcgttttaggacttaccttcttaaaaaccaagtttaagaaggtttttttggagttctccggtcttcaggggtaattctgtggaaacggactcctaagggctaatccagggagcctgccgtctggtatttaattctgaatccttatgtactacataaggagtgaatcctgggtgggcgatcttgggtcttggagaatgatcctcgctgaaaggtgtccagggtgtgagagggttgatcctggtttagaggatgaattttgcaatccctgagaggccttctggagtatataaattgaaataacctcgggcttagatctgagtatgaattacaggtaaggtcagggtggtcatgtcttagagggtgattctggggcaccaggccttggacgccggcgctttgcaagtaaatgtagagcatggggtctgggaggttctgggaaggtctctagggctggttggctgccggcttcaaacttagcagctcatcagttttctcctcataatctgtagactgagcgtgcctaccaaaagcagccgaccatctttcaaaacaagaagagggtcctgctgggagaaactggcaaggagaagctcccgcggtactacaagaacatcggtctgggcttcaagacacccaaggaggtgcggggaacctcagaagaaagaaggggaacctggcgttcctgcacgtgtgcccacgacgagttgccctgcctgcatctaagtggcttctggggctgctgggaattgtagttgcttccctgaggccacgcccctggctcttttaaggaaccgcccgcccaaggctcactcctttatctttc

SEQ ID NO: 67886 - DNA, 1647 bp, Homo sapiens
actcctgggtccgagggaggaggggttgggggcccggactcctgggtccgagggtagagcggttgggggcccggactcctgggtccgagggtagagcggttgggggcccggactcctgggtccgagggaagagcggttgggggcctggactccggggtctgagggaggaggggctggggcctgaggggggcggaaggggcgtggcggagctcggggccgggactctcagcctatcaagtgtctgtaattaattaaccaactgagatccagttcaggggtgaaagttcttcaggtacgaggagggcattgttgtcagtctggaccgagcccgcagagcccctcctcggcgtcctggtcccggccgtgcccgcggtgtcccgggaggaaggggcgggccgggggtcgggaggagtcacgtgccccctcccgccccaggtcgtcctctcagcatgggggtcccgcggcctcagccctgggcgctggggctcctgctctttctccttcctgggagcctgggcgcaggtgagggccgctccgggccagggccctgctgcaggcgggcggcgggaggcggccccaggcaggcaggggcgaagccagcgggacccgagttccccgcgagcccctggcgctgccttctccgctcaattaactttctcaacgtctcctgctgggcctgaggctgggaaccacctgtcgcctcttgtgtctgtttccctctctctctctgggtctctgtccccctctctttctgggtctcttgtctctctctctctgggtctctgtccccccccccccgggtttctgtcccctctctctgaatctgtccccctccctccataatagattcttctccctccctgggtatctgtcccactgcagtctagttccccgcccgtgtgctcccttcagctctgtttctgtctgcagaaagccacctctccctcctgtaccaccttaccgcggtgtcctcgcctgccccggggactcctgccttctgggtgtccggctggctgggcccgcagcagtacctgagctacaatagcctgcggggcgaggcggagccctgtggagcttgggtctgggaaaaccaggtgtcctggtattgggagaaagagaccacagatctgaggatcaaggagaagctctttctggaagctttcaaagctttggggggaaaaggtgagattccggtctggaggggcaaggggccgggtccatgctccggggccccgcttacctgtgtttgggcgccccaggtccctacactctgcagggcctgctgggctgtgaactgggccctgacaacacctcggtgcccaccgccaagttcgccctgaacggcgaggagttcatgaatttcgacctcaagcagggcacctggggtggggactggcccgaggccctggctatcagtcagcggtggcagcagcaggacaaggcggccaacaaggagctcaccttcctgctattctcctgcccgcaccgcctgcgggagcacctggagaggggccgcggaaacctggagtggaagggtgagccggatctgcagccgcaggctgttctgtcctctctcccgtcatgcccacctgcctcagttcccctgccaggaccctccatcagcctcccactgcagcccacgctctg

SEQ ID NO: 67887 - DNA, 1952 bp, Homo sapiens
atttgggtgacaggaattcctgtattcttctctcacttttatataagtttgaacattttcgtaagaaaacattaacatcaaactgcctcaaggaccgttcaagccccaagttcacagaattagcagcacaatcagaatgggaatccatgactgcctgaccccgaagctccacacaagaaaacgtgaatccctgcaccaaccccgaaagggaaggggctgtcaaaaaggtgaagagaaggtggcgatggatgactgcacaatctagtatcgcccgccgtcccaccacagtctgagaaactgaggccaggaaaggagttctccctcctcaactcccactccttagacccccagcaatcccagtccactccttcccttgggaccaccagcaaatagccatcatctacagcagaactgtaactctcaggagaactggccgatgctagctaccacttgactgagtttatagtgagagagagagacaaagagagagagaactgcccgatggacggttggccacctccagcagagtgtagttcagcttcaaacttggggcgcccggacagctgtattaataatgattgacagggaatcgggaatccaaaatcttgccccagtctccctcaagaccccaggcctctagcccgcaggaaagcgatcccagcaacactcttcctgcaccgcctcgaactcacctcactaacgactcccagtccctcggtcgcttcttcaactgtgccccgacaccggaaaggagcactattttccccctccgctccgcccacttccgcccagcagaaggcaccggaagtagagctgcccctagttgcggaagtgcctcgcctggcttgctcaagtcctctcttctctttctctctccggaaacgtgagtagctaatcgaaagttccggatattgaaactggtgggaatatggggaacgcttactatgtacgaggcatttcccagggagatcgttttttcctgcttggttcccaggttttgagtctctccaagcccaaatttaaggactaatcacttcccctagagatcgggaagcccactttcccaaatatatcatccacttttcttgctgcatcttaaaacaattgagaagagacaactacgctcccattttacagacagagccattgggaaattgaaaatcaaagccgttcaagtcgctctcaggaaacagggatttactgcggcactgcccagctgtcccagggactaaggcatatcgttcccgctagtttctagatacctagagacctagatattaatttttctagctcggacagacgaactcccaggggagagccagagcgggtaggggtcgggagggaggaggagggtcgaatctaatcccccaggtatcccatggtattcgacaccttggcttcctcatggagctctggcctttaagtcctttatcccaaggtccctttaaatactttgtcccttacctgagtcccgcccagggcaggtaatggcaagttccgcccacctgccagaaacggggatcaggcctggttaccgggagtggggcgcccctcctccttatcccctcccctcttccctgtcccctttcacagctggctgtagctggccaaggagttctcgattaaagaggaaggggcagtgctcacatttctgggcaggtaagtgaatgtccctggaggaagagcctggcttggggacccaggcatcctggctccccgcccctccgagacccagaagtttggggctcctaggcccaggagtccagggcccctgcccacttaggtccctagacccaataatataactaatcccctgcctctgcctctctcgtaatctttgttgtctgtgggtggatgtgacaatgagcacagaaagaggcacaagtggaaattaccaggaagggaagactccagatcaccagtggacatgtttataagcatctgtgtcaggt

SEQ ID NO: 67888 - DNA, 2452 bp, Homo sapiens
acaccaggtatggggcgtggcttctgcccgggggcggggcgcagaggggtgggcacgttggaggaggaacctgggctcaggggcgggacttggaatttgggccttcttacctggggcggggcttggagtgcgggggcggggccccatgcaaaggtctaggggcgtggcccagcgttgtatgtgtggagccgtataggagggtggggcctgtgcccagagggtcctggattggctgagacgccaagggcggtcggagtggtcctggttgaaggggggagaaaaacagccagatctttgactccctagtgtgcctttcctcttgcagcctcaggaggcctcactgaagagctgctttcgagacccggctctccgaaccgtgcccctgattcataccggattccggaagccgctaggcctcatagacgccgaagctggacttggagtggggaatggtgggagtaggggtcatccggcccgaggcctgccctggcacacgcgtttccgccgcgtatggatatacacatgttttcggcaacgtgttcccgtgtcctggcccctcacgggcccccacactctcctgaccgtgagggcactggtcagttccgcccccgtggtaggcagacgcgcggggaaattcggacccaggagcccagccccggctgtgccatcttgtgtatgggcagatatgacctgacagccccctccagtgccacagggtacgcacacgcagagccccgcctgtgcacacgcgtgtcttcgtgcactccccgtgcggtacaggggcacttcgtaacccagggaaagggcggggggcatatttgcaagcgcgctcggtgcgggcaggctcgcattgcacccagggagctggagttgagctgttcccctaaataaaaacccttcggaaaggagaccaaaaaaagcagaaataatgcaaaaaataataatgaaatgaactgcgatcccgggcgcatcggaactggttttctgtgcaaacgcgccctacacccccaggccctgctcgcgctcagtctctctctcactctccctttttttttttttttttttgcatttgcacgggattgtgggaggaagcggagcgcagccagacaccccgccgcccgcccccccttcccctcccccctcccccagccgccttgtgcaaagatggctgcaccgtgagcgcagaggaggaggaggcggcggcggcggcggcgagagagcgagcacccagcgcctgcacccaccccggggccgcccgggacgccccctcccgagcgcgcgcccccccttttctctcgcaagcgccggggcaaaggcggagacagcggggtccctcctccccccttccctcctctagggggaaccccccttcccccttccttggctcagcgactgcaccccctcccttgcccgcccctccgcccctgccccctccctcccccgcccggggccttcccgggccttcggcggctgcaaagaaaaaaagagagagagaaaaggggggaaaaaaaagcagcagcggagggagcggcggcggaggagagcgcgcgcgcgccccctccctccctccctccctccccctccccccaatttccaccgcggccaattcatggacaggaactaccccagcgccggcttcggggacccgctcggcgccggggcgggatggagttacgagaggtcagcgaaagctaggtaaggagctgagggtggcctagagaagggggccaaggggtgggagcccagccgggccgggccgggccgggccgggcccgcccggcgacgcgtgcatcgcaaactcccctccggcttgcaagggagcggccttcctcggtttgtaacaacgccgccgccccagtttgcaaattgcaaactccgccaaagccagctccggcatgcaaagggagaattgcagcgggaaaatgggggtgcaaaacaatttcggacgggaaggccttgggaaggtgggagggactggcgaagcaaggcctggacttccccccatccttggattcccggcttggtgacccctcccccccgcgccccaggcactgctcttgcaaaggtgggaagaagagaagaattagaacgcagatctggggggcgcgaaccccctctcaggtcctattgttccgggactgtgcgaggccgcgccactaggcgcccccccaagaattccgcgcgcagagtgggcacggggccccgcccccttcctaagctggggttgtgtgtgtgtaagggagggggtcaggcgtctgggacacgccccctttaatgcccccacccccaaaggcagagaatcctagttgatcgcaaggagtggagcgtttgccctcttgagtctggccacggactggtgccgttgcatgggaagagtcggatgtttcccgggtgtgtgtttgtgtgtctgagcgtgggccctgtgcgtgcgtggctggcagcgtgttcacct

SEQ ID NO: 67889 - DNA, 3860 bp, Homo sapiens
tgacagagtgagtgagactctgtctcaaaaaaaaaaaaaaagaaaaaaaagaatcgaacgtggtggaatctcaaaggtgctgggcactggcattctcccaggaaggctctcaatggcttagaggggaagttggggactgggatttgggggagatagggctcagggtggtggaaggtggcaccaagggcgtggtgggggtcctgggagtgcttagggtccgaatggggtgagtattttgtatttagcatgctcccaggaggtgctcaaagccaggtcagcaggtaagcggggtcttaggcactgggagagggaatagtgggtctcgggatgcgagtgcagaaggaagggtcccccgtgcaggggatggaggctctccaagagtttaggttacaatctgtggggatcttttaagattagagggccttataggagggtctcagtgatgggtcaagggggaaaaggggtctcggggatccccccaagggctcagttctgggtcccgggggacaccctcccgggtgagggcccactacctggatgaactggatggtcagcgcgctcttgcccacgccgccgccgcccacgaccaccagcttgtgtgtctcgctgggcggggggtccccgggcccaggtcccccgccccggggccgcccccgccctgtcccggacgccgccccgctgctcatgtcgccaccgctgctgctgccttcgctaccgcctgcgggggagccgggcgggacccgggggggcgggctacgctaatgaggctactgcataatcatgagctctggcaaggagggctcgcgtctccggacacttaaggagggggacgggccaaagaaagggaggagctatgttaataagggaaagggaacggcgttcgctgcgaaggggaattccgaatgaggcggggctatgctaatgagagacctgtgctttgccctgagcggcgccacgcgctctcagcgggagggcggtctgtgggcgtggctatgctaataagaatttattctttcagcagacggggcggaaagttcctcaggggaggggctatgcaaataaggacccctgtgacactgctgcttggggcatcgtctccgaggccttagtatggtaggcggagctcgtcgactcgcgcgcgcggccgtatatagggcgctccgaggaagcagcaggttttgaggagtagctccacctccctcctgggatcctagccaagctttcgaccccggcgtctgggttagaagctagagtctccgcccgctaagggacccaggcttccggttcccgctgtcccagccaagcggaagacagactgggaggagagtggggccctagagggggacagcagggtaacggggcagggaggggccgtgagatcactgcattcctaatccatgagccagctcgcccaagtagggatgcctgggtcatgaagagcctggggccaggatttctgggtcttgaaggagaaggaagcagagggcccagactcctgggtccttaggagaaaatggggctggagatgtggactcctgggtcctggggaggagggtgtcagggaggaaggtagacaggttccttcgtactaggttcggtaaaggagggagccgggggcctggactcttaggtccaggaattggagaggctggggacccaggattctggatccgagcgagggcactggcttggggggacccgaattcgtatgtgagagcttgagaccaggactagtctgggagaccgactcttggatccgaggaaggaagaatcagactcctgagtcggagggaggagggaaataggagtctggacactgctctgagtgagaggattcggaattcagacttctctgtactgaacgaggcggctatggggtcgggcttctaggttctaagtttatttttatttgtttatttttgagacggagtttccgtcttgtagcccatgctggagtgcaatggcgcgatcttggcccactgcaacctccgcttcccgggttcaagcgattctcctacctcagcctcccgagtagctgggattacaggcgttagccaccacgccaggctaatttttgtatttttagtagagactgggtttcaccatgttggtcaggctggtcttgaactcctgatatcagatgatccgcctgcttcggcctcccaaagtgctgggattacagacgtgagccaccgcgcctggcctatttttatttttttagaggcggggtctccctatattgcctaggctggcttctaacttctaggctcaagccatccttccgcctcagtctcccgagtgggactacggtgtgcgccactgcatcccgtctggttctaaatttaggggggcctagaggatctggattctgagagccccagaatgtgggcagcacaacatccagcaagtcgtgctcactccgccggactacaattcccttgcgtctgttctgcctggcgcctcttacgtcacctcctgttccgccaccctttccgcgcgcgcgcagggcactgtggggcgtcatcgcgggctaccgcggccccgcccacttcacctctcaccccattagctgtccccgcgcgacagaggcggtgcgcggactacgcctcccggcgtgcatcgcgcggaccccgccccatgtgtcccattggcttctgggaaaccgagtgcggttgccttcccgccggccttcacgtcgccgtgctcggtacttgaaatcccggcaagctcggcggcgctttagctccgcctctctcctcctttgctcacgaaccccgccccagcccgccccgccccgcgccggggccggagccgcagcccgagcggcggggtaagatggcggcggcagtccgggccgcggggctcgggcctattggggtgggcggggcggagttgggtcgctagttgtcccggggtcctccccacaagccacgggtcctagagggcttctcggggcggtctcgggcccggcagctgcggcgaaacctggcgccgagaggggggccttctcagggccccgggacgcatccgtgggttcctgggggcgtctatggggcgtctccgagaggacttggggcgtctctgggcctagaccgagcctaaggcctgccctccatcacacagctggcctggatcgtgtctgtagacactgtagattgtctttttgggctgaccggaggctagggtctggttagagggttctggggccatcttgagatcttgagatatgtcccaggggtgaaggagggtctgcaagacctgaagagtatcttcagagccatctagaggcctggggtatgtcttttagggctggaaagtgtctgcatgggctggcctgaggatgcaactggtctgcataagtctggggccatttatcaggcctagaaggagtgttcaagggctaagaagtcatttagggccccctagggggttgggttatgcccaccagggaagggcgccaaatattgagatgtactgagggtctggggtctccaaggtatgggtagtgtctaataatgggtgacaggaggctgggggcagttagaaggacctggaaccatctagatggctttaatgtgactgcaggaatgcagttttgatgcctggagcaaattcgaatgcctttggggtcagagcagcttgtggcgaataataatacggaaagagaatgaggaaattttgcccagcttagatatacttgcccttcagacagtaattcaaatgaaaaatgttttaagattctgcattaccctgggggttattgagagagttagaattaatctacattagtctggaagagtctggagggtcatctagacccactattacagtgcttttcaaggggaaacctgggccatgtt

SEQ ID NO: 67890 - DNA, 1987 bp, Homo sapiens
gcgcgaccggcctcccccggacccacctggcctggagtttccgcacccagacctccttctcacgggccacggcacaggtccttcacccatattttcgggggtacaaacaggaaacctcctcttcccatcctcccatcctcccgagaggctctctaatcagctagggttccttcccatatccatggcacatccttccccagcgtcttcagtgcagaccctccactccctcaattccgccagtatagacctcctccctcccccacatcatcgaaagtaagtatccccactttcagggtagcatcctctttccctagttatttcagtgcagaatcgattcacgtgtaagcctctacctcctgcacttaccccaatgtagacccccttccacagtccccctacagaagatctcccaaaacatttccaacacagaacttccattcaattcccctccgactgcccgcctccctcctccaggacagagcacgccccaggtttcgagactgaactacccccatctacggagtccacccctccctctctagaaccccctcagtgtagacgcctcctcttttcctctttcctccctactttttctagtttttctgcagccgacctccagcgtcggccactgtagctccttccttgctccactttccccagagtacacagcctgcctttccactctccgtgcagacccatcctctttcccgctcctcgctctcggacgccaccaacgctctcccgggctcttccgcgttacctacgatggaaggtcggggcgtgcgggcagctggaacccacccctgtcttggagctccgggtagctctcaaactcgaggctgcgcaccccctttcccgtcagctgagctctagagcgctggggctttctttttgatcgacttcttgaaataaaaccaactttatcattctttgggtaacagacccaaaagccgatgggacggcccgctgggctgttcccgcccctatgcccttttttgggtttccggccagaggcatgctgggagcgtcacatgcaaattgagcgtgcacccagcgttccgccctttctacgctgggccggttatcgacccggcccagtgcgcaggcgcgggaaagttgaactaataaagtttgtacgagttcagtggaggagaccgcaagttgagtggaggaggcggcggtggggccccggaccaggtcagcggggtgttgacgaggggtggggtgaggagggaagaggagggggccgggatccagtggtgggcaccccagtcccgcttctctgatatccaagggtccagggtcctctagattccagcaggggtcggagatttggaactacacctcacagcaggctgcgcggcgaagaagcgcggacctaggggaagatttgccctgaaacctcttgggattggtagttcccgatgctttaagggtttcaggagtttggcatatgcctcttatagaatccaggagttggggcgctaagcctcttcttcctgggagacctaagggtctggggctccagttcctttttctctaagactcagaagtccaggaccccagctccctcctcctttagacccacgaatctgggcacccagccccaccacctttccttggatcgaagagtctttttcctgatcgctttttcgtctgaggactcaagagtctaggcccccagacccacactctccaaaggacccaggagtccaggccctcagcaccttccttgggactcacaagtcctggtccccaagcctccacttcttgctaaacccttggagtccagtccctaaccctctctctcacaggtgcctccatggcaggctctgaagagctggggctccgggaagacacgctgagggtcctagctgccttccttaggcgtggtgaggctgccgggtctcctgttccaactccacctaggtaagaggagtggcccttctcccccaggggccagcatttgaggctccctcctaactct

SEQ ID NO: 67891 - DNA, 3131 bp, Homo sapiens
ttgagacaagagtctcgctctgtcacccaggctggagtgcagtggcgcgatctcagctcactgcaagctccgcctcccgggttcacgccatcctcctgcctaagcctccacgcccggctaattttttgtatttttagtagagacgggggtttcaccatgttagccaggatggtctcgacctcctgaccttgtgatccgcccgcctcggtctcccaaaatgctgggattacaggcgtgagccaccgcgcccggccgcctggcgtaatttttgtatttttaatagaaatgggggtttcaccatgttgcccagactggtctcgaactcctgatgtcaagtgatccgcctgcctccgcctcctaaagtgctggaattacacccgtgagccatcgcgcccgaaccctattgtaaattttaagtctcaggcgtttgccagcggcacgccagagagtatagcctgcgcggaggcccagaaaccaaagagcgagctcattccgggattggagagaagtgtgagcagagggaagtagagggatcggggagaggaggggcaggacccacgcattcggccctttgcattcagcttcattcaactaggaactttttctgcaaatcaaggaaagcttcccggaggaagtggtgcctaagctgtgctctgattcacgtttagaagctgaccagacaaagagaggtgggcgttcctggcagggggagggacttggcaaaaaccaagtggcttgagaggggttgatggttttaaaaaacttggaatgattatgtcaagggctagggatttaatgtgttgacgacggactcctattcctcacttgcttcgggaccccagctatgcccttcctctctctgggcctctcaccgattccgtttttcccccaggtaatgagcacaagctccctttttcctccagactccccccgggttgggaggatccaccgagtggacgaggagtgataattcctttgagccaatcgttggtgcctgaagccccgccttcttccctacccgtgggccaattgccgtgttctccttgaggccggccgcttggcgagggtgggccaaaggctgcgtgacgtcgcttccggataaaccaatggcagcgattaggaggcgggtcgttttggtgatggacaggtgtttcaagacgcccctttagcgcggggctccccgggaagctttgaggcggtgctgggtgtaaaggggagggcattcctggtggattttgcccaatcaccagtcgcgcttcttgcaatagacgggcagttttccccatcccgggtcgacttgagggggcgggattctggacgccagagttggcaaacccctgacctatgatggacgtattctctagccaattactagacggtattctcagacgggccgcctccattgccaatgaaatcttccagcggggtcgcggtaggcgggccgtggaccctctggtataaggcggtcccgggggagtgaggagaaagggggggtcttggcggccggaggaggagtaggtgcgggtgaagatggcggcagccgaggccgcgaactgcatcatggaggtgagcgcttggagcgccgccgtgggcgggaggcggctttgggtcggtgtttcacgcctctgtggtggggaaagggctctaagttggcgatatggggttggaggtcccccgccgcacacgggggcgccgcacgttccacatccggggatatcgtttgaggtgacggctccctagcttccaagggccttcggcatccggcctagcggagggtcttatcccccctcccacgtggaggagggctgggggcgcttccggccaggcccccacgtggccgctgcgcggtgggtggggagggggtgtgccgagtccagtggcccggcgggctccacgtgcgggacaaaggccccgcccccggccggggaggggcgcccaggggggcggggagggggtccgaccctcctgacgcccccagccctcctccccggggacctgggcacacgccgtggggtgtgatcgacctggggccctccacgatgtggggagtctcttgggaggagcagtgcttctcagccctttaccaacctccttccgagctccgggggcatctgttgggatatcggacccggttttgtgcgttctgggttagggactggaggaaaaccaagaatggggtcccccgccgaccccgtttcccctcccagaattctccccctcgcccagggctttaggagttgggggatggggcatgcccctgtgacctccctctgggtggtggtggggcatctagatagagattttcccattaataggcgccgtgcacccccttgtggccatttctgggtgtgtgggagggacatctttttcatggggcgtgtcctgaagcccacctcccctcggatttcttcctggcgggcggagggaggagggtatgtccgctgggaaggagttgtgggaaatatgtaggctgagagctttaccctactggagccgtttatctcccccgggtctttgtgagggtgcgagatgacctccttcttcctgaagccctgtgcagggtcctgagccctggggtcctgagagtgggtgcctgaaatggtttcgagtgaggtttggttctcgtgcagccatgtgggggaggtttcagtcttgcgtttcaagccctctggggctggggttgtctggcggtagttttcagtggtattgagaaataggcccgagtgggaaaccccctcagcacctttcttcttataggcatccccgctagcttgggagagctggagggagggtgcttggagcctagtaggtcatggcctgtgacgtggcccttcttggagacttggatagtggtcacatctggaagagatgtaatctgatggggcctctgtccttccaccccttacctatggcattggctggaggggcaggtcagctctcagctgtcaggatgcagctcccaggggtcactgtaatgacttcccaccctcttggctgtctcctgcacctggggctctatggatggaggaaataactttcccagaggtggcctcaggcttggccgcacctggaagtcttcagggcctgggatgggtgtctgaatgggggcgatggcctgactccccaagcca

SEQ ID NO: 67892 - DNA, 2704 bp, Homo sapiens
aattagccaggcatggtggcgtgcgcctgtagtcccagctacttgggaggctgaggcaggagaatggcgtgaacccgggaggcggaggttgcagtgagctgagatcgcgccactgcaccccagcctgggcgacagagcgagactccatctcaaaaaaaaaaaaaaagaacttcaagtcctgggattaataatttttcttgtgtttaatggggctgctttatgttcttcaggggcaaacagcacccccctcccatattagaaatggactctccctgtgactaaaacagctgagcaatttctgtcctcctggaatccaaaatggactttcccaggccccattcctggaaacccaaatggacgcatccattgagcctggaaggtgggctcttctcaacctcctttccatctcccaggattcagaatggccattccaaaggtccagaacacacccccaaggctcattccaggaattcttggcttctgagattagaaaaggctgatggggtggagttttgttcctacaggtgacagaaatggactcttccagttccctttgtcccaaatttctcaatctcctggggcgttgggagttctggccgttttgccttccccaaagccagtttaccaaagagtctctggggagctgggggttggggatggaggctggggctgggccaaagcagattcacctatttcttcttttaacaaatgttgttgaaactgttcaaggccaggtcccattcttgcccagaaggagttcccagtctggaggagacaatcaattttggtttgatatctgctacaatggaggctgcccgagagacactgcggttggacaaaaaaaaaaaggcaacatatattgaaaagtaagccaagatacggtttacgtttatttctgctttttcacttccaagctgtgtggccctgggcaagtcattcgccctctcgacctaagttttaacttctgcttaatgggactagccttgaattactgtttttcactctgagattctaggtctcctgacaactcaagtcccgacacgttggctgcagagaaggggggaggggaggaaggcttcctagaagaggatttcagcagtcgggggtgacagtggagggagaaagggaacacggagacgcttgcgcagtaaacaccgcacgctctcttgcctcgcccaaccccttctctgcagcagggaattgcaggcgtcgctccacctatcccagccgagcggagtgacaccctcccctctttccttctctactgatcttcgccttccgcccgccccacagccgcccaatggagggctgaagtaggacagatctcgccaatccgcgacgcctgcggggcaggtctacccgttcattggtcccagtcaacctaagtcccgcctcctaggaccgttccccgccttccttcacgtccctcccttcctccttggagagccgctagatccaatcagtgtttgacctggccgcgcggagggggcgggcccatgatacgcaatcgaaccccgcccgtctctcgggcaacgcctcctcccccccctccccagctcccaaacggaaatagcggaacactgggccaatcgtagcgtcgtgcctttgcttggcggccaatgagagaggaagtgggggagaaacccgcctgtgagcggcaggagctcaagccagtgggcggctcagagctccggaccgcgggcggaggggaggggcagggggcggtgccacggcctgccagcccgcccgcccgcccgccagccagccctccccgcggccggctcggctccttggcgctgcctggggtcctttccgcccggtccccgcttgccagcccccgctgctctgtgccctgtccggccaggcctggagccgacaccaccgccatcatgccggccgtgtccaagggcgatgggatgcgggggctcgcggtgttcatctccgacatccggaactgtgagcgcgcggccgggggacactggagacgcgggggaggggggagcgtgaaattgaggggtttggggatcacagagggacccgggggatcaaaagcctctgcggccgtatagggacagcatagatgggccccaggaagaactttagagtggggggcacgtaggggcttggggtgtcatagagtgcctcttgaggtgacgacacggagtagctagaggggtccgggagggcttgaaaggggaggaagccagtgaggtcccggggatgggagcatagaggtgtcccctgggaaagactgaaaagctgggggatcttacaaacgatggggttagagggattcccaatgtagagaagaagtgaaagaagtgtatggcgggggtgccctgtggagcgatggaatgggaagaggccagaggggacctggaggaagtggaatgccggaagcctaatgaagcagggcttgaggacctgggatagggggtgtcatacaggggaaaggggttagataggtcaccgaggctcctggccagtggtatagaggaggcctgagagtggttgaaagtccatgagtttggggcagggagatgatgggacggggagactataaggacaccctggtgaaggatagaggggcttcagggtgggagattgcctagaagacatggaaggcagtgtggagggggctagaggggcagctgaggggaaaggagggacccaaggaacacagaggaaaagagctgtcggtgta

SEQ ID NO: 67893 - DNA, 549 bp, Homo sapiens
ccaggctggtctcgaactcctgatctcgagtgatctgcctgcttcagcctcacaaaatgctgagattacaggtgtgagccaccgcgcctggccgtatctcgatttttttttaaatggggaaagaatttgcagctgtcctaagcccagtgaggaagagggccatggtgttgagagaatggggattctgtgtggtcagcgagctgcggcctggctttgcttcacaagagacctttggagctgtgtgggcaggaagtaggggagttacctaggctgagggcagtgagaagagctgtgaaggcagaggcggggcaagtgcaaaggtcctgacttccggacgccatggcgggcatctctatctagtcccagctactcaggaggtggaggcagaaggattgcttgaggccaggaatttgagaccagccttggcaacatagcaagaccctgtctctctttcttttttttgacagagtctggctctgtcatcccggctggagtacagtggtgcgatctcagctcgctgcaacctcctcctcctgggatcaagctatc

SEQ ID NO: 67894 - DNA, 1297 bp, Homo sapiens
ttaggacccaagtgtgccagctcccagccccatcctctttccatatgacctggcagtgcctctttggggaaccaggcttattggtccattgcctcctcggtcctacaaattcaacactgaaacttccccagcccctactgccttgaagacccagagtcaaaacaccgaacccccttcggtttagatacaggcgtccaaggccccacctgctgacgggcgggggcgccgccgcgactgctcctgcagaatagggggaccccgctggaggccgcgaggcacagcagatgcacagtgccgcccgtcccctcctcccccatttaggactcccaccgcggtccctcacgtggggactgtcagtgcgggtcttggagcatggcggtaatcagagtaactcggcctgtggtccggagccgccagagggcgagatggggagctgattggaagaggattaacttcccgccttcttcacccaactcaaacagaccctcaaaccctattcaggcacctcccccaaacccattaggttctcttccgccctagccggaagtcacggtacccctaacaaagatggcggcaaattgaatttgcaaagctttctagtttctccgaggaggtaaagagaaccaagaagccggattgaagatgatgactgcgccaaggcgttgcctagccaccatcctgtaggctttgatgatttacattctaaacggaaaaaacagctgtgcccggatcaaagattgcgatggtcccaaagcattgcctagcaaccacattccctgtaggtttccagtatatagtagtaaacaatgtgccctactcaaagatggcgaccgtggcggggcgttgccaagcaaccaccattcagcctgatatccattccaaggctgtaaacagctgtgccctgctcaaagatggcggcacgtcgaagtccgagcaccctccttggggcgaaatcgagaaaaacaccatctcccctacaaccttcgagggtggttgagtccagcgatcgttgcctagtaaccactaaaaaaaaggttgtttttgttattagaaaaaagaaaacaaggaaatcctttattttccagaataataaaaataatatcatttctgtaatgaatttatacatgatagcataccatgtaaaatgtgaaaaatcccttccccaatttttttcctaaaatacagtttaacgtagactattcatacgttttcacaaagatgatcaatatactaacatttccacactttcttttttgccatgaaaaagtatgtctatttcatcttaataatgtatttt

SEQ ID NO: 67895 - DNA, 1607 bp, Homo sapiens
tacccacgtttaaggaacaaaaatcgagggaaaaatcttatacaactactagtaagtagtcattccattttagcagagcgaatgagcgaatccacggaaggccggggagcgacgtgagtggcgagaagcttggagtcgccagggacggcgggcggagcctgggcgccggggctaatgggcggagcctccagggacagctggccccgcccaggccgcgcggggcccgctgggagttggagtcccttgcccacctcgccacgtcaccgactgcaaaccttcagctgtctcaggctcgggtgcaatccgtaccctcagtgggttccctttcagtgggttcctttgtccccaggcccattattccgtcctcccctcttccctgatgtattttggcgcggtctcctggctctgcgggcccagggctccggatgaggtctcccgccgtcccgacccccgcaaggggccagcttggtgtcgccttcgttcttctgccaccccattcggtaggggctcccgttcccgccacgccccctgaagttgtggctcgcgcgtcttcccaggactcccccgcgccggagaggcccgcaggaccgccgagcccacactccgctcccgcccgggccccgctcccccgcgccgccttggtacgctccggccacgccccctcggacgcgcttggtacgcgccgggctcccccgctcgcctcagtggttcggccgcggcgaccccactccggcggcgcgtcccccgagcttggtacggctcagcccgtctcccccgaagccgcgcgcccgcgcccgcgcccctcagtcggtggagcccgcagccccccttgtggcccgcggcagctccccgcccgctcggcccgcgcccgccatggtccgtccgcgccgtgccccgtaccgctccggcgccgggggccccctcgggggtcgcggccgccctccgcggcccctcgtggtgcgcgccgtccgctcgcgctcctggcctgccagcccccgaggcccgcagcctccgcggatccgggcccgctcggcccctcccatggtgagccccccgccctttttccagagccttccacggccccgcccccccagcccctatcccgggctcacgcctttgtccgcagcccccgccgctccggggtgtcccctgtggcccgaagggtggtcccgcccggggccgggttcccccgtggagcacccggtggttcgcgccgcgctctcccctttgttgcgcgttcgggccggggtggggggttgggggacgggggcggggcgggctcatattactgctgactccgcggcccgatttaaacgcgggctgggggcggcagacaggcagccggcacgctcgcttgtttttcctattggagagttgctcgctctccgggcaggaaacctggaaatgggggcggttttgggggacagcggcgagggaggggcccgcgctttgtaccagcgcccccagatgtcgcacccgtgggcgttctcccctggcggccgctccgtgcccgtggagtgcgcacctagaatacgcgcccgcgcccacatgtgggatgctttgatggactgccgtgagcccagaccttaaacgtaaacattcagctt

SEQ ID NO: 67896 - DNA, 1444 bp, Homo sapiens
tttcccgatggcctgagcatcatccgcgcagtgaacatcctccctaaatcggctcgatcccctctcccccaaaggatctagctaattctaaatcaagcacaaactttatcttcctgtactccctagagagcaccttccgacttcggggctggctgcaccactgcaatcccgcgtagcagccaagcgtccctctggattgttcccgcttttgcagcaggccacaccccctccagctcaggccccgctcaccttgagttctggagcacttccggtccgtaacctgggtcaggggtcccctgcccaggaccagggcttgcccgtccgagggcaggaagatggggggcgctcccccaggggggctctcgagccacaagcggcccggggcctccacctcgcccatcctgggtgccggcctggggagcaggtaaacgggcttgagcggcgcacagccccaatttgctgcaggaagtcccgcctcctcccacatccactagaaagtttccccaccattaactgctccggaagtcccacccgctcgccttccgcgggtcgacccgtttcccaggcgacgacgcgtgctccatccctccccgagttgcaatccccactttccagcgtacaggcagagagcctcgcacatgcctccgccccgccccgtactcacccgggaccgcggcttgggctcacggccacttccgaccagggaggtcctgcccgaggtgccccgcctgcaacccggccggcggcggtcggttcctcggcggacggaaatgactcgtcccctcgtgggtggggggcggggcctggcctcctcccacagcagccacgccccttccccgactcccggcccccagggtctctcggcagccctgaccttcatctctcttgctgcaacgcgaggctcaggccggtagcggggactggatcctccgttagcagatttgcctctttccaccttgacttctaattttcatcccagggaggaagatttttttcccatctgatggtcattgtcagtcgaggaaacctccgcccccgacagcgcccctaagtccttctttggcttcaccctcgatgttctagtttcctcatctataaaaaggataatcgtttccgcttcgtggggttaccatgacgattaaaggagctaacacgtgacaaaagctttaaaaaatgggtggtagtgagccctgtttaagtctttttttttttttttttttgagacggagtctcactctgtcgcccaggctggagtgcagtggcgcgatctcggctcacctgcaagctccgcctcccgggttgacgccattctcctgtctcagcctcccgagtagctgggactacaggcgcccgccaccacgcccagctaattttttgtattttgagtagagacggggtttcaccgtgttagccaggacggtctcgatctcctgatctcgtgatc

SEQ ID NO: 67897 - DNA, 1081 bp, Homo sapiens
aaagcggacggtgactatgtagagactggtcaagccctttacaggatttgagccaatcaaaaaaagagctgtccagcgactaggggatggagccaatgccgtgcgagcaaatcccttgtcgctaggcggaaaacaaaggagttgacccatttagagcttagaactcagcgagccaatcccttaatagaaggaatctgtcgctaggcggagagagacgacagacccaatcgggaaacgggacagatgccgctcctcggcgcggcaggtcgtgggctggaaggacggcggggattggcagaggcgggacaatcttgggaatgggagacgcaaggaggccggtcccggatcggcctcagattagcaggccccgggagtggggcgggggcgtagtgtgggacggggcggacgcggcccggggcgctccctccctggacttcaatatttccgcttcagcttctggaagtcgctggtgttaagccgcggccgtggcaggtccccgaagacctgggtgtcctcggcctctcgcagcaccagcgcgcgcatgctcgccgcgatgcggtccaggtcgggcgaagagggctgcggggacggcgacggggcgaggtcagcgccggcagggcaatccccctgcacccacacgcggtccaggggtgcacccgggctccaagcccacttctagcacgtccctgccctgccacctgtgccctgcgatgcccactgccagcagtgcccctccccgtcttgctccacgtaggaacccttctacccggttcagacacctcctccacgaagcctacctgcccctctccctctccccttcttggcctaggacattgcttcctacacagtggaagtgctgttgcctgctagccattaaggctgagtgcaccgtctcatgtctgaggatctgggctggggtttcagtcatgttccaatcagacctctgccgctgacaaactatgagcaagaggttttgcttccctaggcctcagtctccccttctgaaaaatggggcggataacagggtctctgtgagggctgagataatcagctgttactgccttatcatgtggccactgcg

SEQ ID NO: 67898 - DNA, 3238 bp, Homo sapiens
aggagggcagatattctaatccagatggaaaagtgaggctcagagagcttaggacactggcaaaaaagcacacagctacacagggcacaagtggggctgaaactgtgaggctcagagagcttaggacactggcaaaaaagcacacagctacacagggcacaagtggggctgaaactgctgactgcccagccccaaaaccccactgaactggggggtacccggtgtctcaaacacacccatgtccttcccagctgatgagggaggaaactgaggctctaagcaagaaatggctggtccaaagtcaactgcctcgccgtgctaggcctggggctctcacttccacgggcctccagcccctaatgacatgcggagaagagggggagaggaggtcccggaagagaacgtcaggatgaactctccgtgtactcaatcttggagtagccacgggattaaagagtgaaatagggtgagtgagttgtgagggctcccccaactcaggagacatgagcaaaaaggacagggcgacttccacagacctctttgccaaggtccaggggcaccctgtaatgctacccaacaggagagtagccaagacctgggggtcctccttacccttcagcttctagaggaggtcctgtttcctccaaggagctgagagatggaggaagaacccgccccgatagacgagtttcgtgtaagatcagggagagattagaggaaagtgagacgtgttccccacaggagggggagcacgatgtggctgtcctctttggatgcagggaggagggaaaagagctaaggaggagaggggtggaaccacccctcctgtcgaaattttagtaccccacaccccaagatgtgaggaacctgagcatgaacgcggtagccatggggtgagcgcctggggccacgctcagctgccccgagacctcccaacctcgcccggggtccagggaggacccactggtctaggaagaaaacaggaaatcccgcccagacggaggccaggaccggaagtcccgcctttggacgggtgaggggcgccccgaggccccccaaaccatcccccgaccccgtggacgtggtccacggcccaggtagagatcccaggcgctctggaaccgcaaggtgagactgtctacgatttgcctcaggtctgacaggacgattcccacgggcgacccccttccagcgctcagcaaaggatcgctggcagacctctgccctctgatctgtgcaggccatacccctcccgtgagccgctcgccctcccagcgccccgctgcctcaggacggccaaatcctccccacaccgcggttaacaacgccgcctccactcacgtgcccgtagccagcatggccggcccggcgccgtcaccgccctcaaaagacatggcggcgccttgcgtcacgtccgcgcagttgccccgcctcctctccgcacactccgcctcccttatcggggccgcccgagatcaagatggcggccacaggggcttcatccgaaccagttgacaagggtgacgacagcttgcccctaagaaaaatggccccgcctagagcatttccatttgcccccaacaataatggccgtcctcatatgctcaatcatgaccacagtaaacgaaggcaagcgacctgacgtccctgacccacaataaacttcttcgacaaaagtagaggaaatcggtgctcgttaacaacatggcagccaaccgggcttaatcagcccatagtgtatattggctctccctccctccaacctgctcccattcggcacgaaggctggcaaagatccaacacggcagcatttcttgcttcggtttgccaggcttcaaaatggcggctcagcccgctttctcgcgacggtgactcagaaattcgtccggggccgcttcgtttctgggggcactgacggcttcatcccgttatcctgagtccctcagtgcctcttgtggtgtacagctcctctcacctcctcttctcttatccgttcggctcttccagctgtcgcgccccgcagagagatgggacagccccgtattaacatggccttagctgaccggcttaggccatgccctcgagcaaaatggtacctccttggcttcaattccagtatacaatatggagaaggaagtgggcgtttcaaggcgtgcttgccccaggtggtgcagctctcagaccctcccacttgtttacttcgtggcgagagggcgaacactgcgcctgcgcactctccgtagccggatccaccttcagcgtctgcgccacgtgactccgatccaccctcgaggttccagtggaataacccccttctgaaaaatggtttcacccgctccttctctagaacgggtcgggccgctaccactgtccggcccggaggggaactgttttctccggaagtgacaacacgctgactaggaaaaggaggaggcggggcagtggggccttcggcggcgactatggaaggagccggctacagggtaagcactgaggacgcattccctcgcttcagtgtatgcgaaacgccccgtctagtgatcagctcttctctcaggccttggctctcgagaatccggcacggccttggcaaacaccgatctcttataaacgcgccgtcaccctcccgtccaccgccccagggaagaacctcccatggccccgcccccccggctcaggcgactccttgagccctgccccctgtggaacgcacgtcagcatccgaacgcgggctggaccattctccccgccttggtcccggggcaatggccctcccggccccgccccctgagggtggctcctccctgggcccgtccctattggctccccaggctggtcccctcgcttgggccccagccctcgctggttccccccaactcaggtggtgtttgagaagggcggagtgtacctgcacaccagcgctaagaagtatcaggaccgagactctctcatcgctggtgtcatccgtgtcgtggaaaaggtgcgctgggagggagcagggctcggacccgctccgagcgggatgcaggcggtctgggatgcaggcggcagctgtaggagtttggtctggcggtcagcagtgggacctgaagaaggctgggtgtgggaactggaatgaggggcgggactttgaaaggctgagggtagaaactgggaaagtttggaaatttgcaacggaaagttttgggaatgtggtttggggagcgcctctaaccccgcctccctccttaccctagga

SEQ ID NO: 67899 - DNA, 3488 bp, Homo sapiens
tcctccgtgcccaagcaaccctgtaggaaccacatatcctgggccagacgaatgcaggagctgcctcctctggacacagcggtggctctcacctcccttccatcttggcaggatgagtgcatttgctgcgagaaagcagccccgacggcagggccctagggccccaggccaggccaccacgaccacgagggaccaagacaacaagcccactcctgaatcacgcctcaacacagacaacatgatgtccaaaccacagaaacgaccaaacacccctcctgactcagagctgctggctgtttctcaactaaccccggcggcactagctccctttgcttctcaggctctaggtcaaatagatgcgagtcatgggcttgcccctgacacagcccaactcctcaagttagcccaaacgcctccttattgaggtgccctgcgagtccctgtgggggacagtcttcctgccgcaatgagcaatgtgctcctggtggcctctggctgggggcatggggattaggaagagagtaataagacaccagccccacttccagcaggcatcctgaacctcaggaaggattctttaggcctcctcctctgctccccagaaacactgtcctcccctccttcacatgggaccgggctgtgtcggaatgaagccctactccgtctcactgcttgtaaagtccagcacagaggggaccagcctcaatcctcggagactcttggaatgagggctgggttccttttgctctctgctgtggacagagaggatgacagctgtggggaggggaagtcacagagggccagcagcctgagtcctgtccacactggtggtttgctggggttttccaggtttttctgaattacttgcctacctttaaaacttggatctcacagaaaaaaaaaaaactggatttccagcttctcccgtgaaaccagcagctttgcaccaccagcgctgccagtgttgctgcggccccggtgcctttcaggggcccaggtgcttctgggagccacccctccctctgggcctgacacagggcccaaggtggtcagcagttcaccggtccaggcctcttcccatgtcaaccccctgcccctccacactgccccaaggtagttctatgattgtgcccattttactgatgaggtgaccacaggtcggggggtacagtatcttgtcccagaccactaagcggtgagtgatggcatcctgggctctaggacactggtgtcagttgttatcagtttgctgtgtccctttttttttgcataagagctgtgactgcttctactgaagggacaagggcaggcacaagggagggaaggggctctggaggactgtgggccacgtggcagcctgtgctgtctcccagcccccgcgtcatcctctccccaactgagctggccttggcctacctgcccttgtttgccaggactcccaccttcaaccccggcacccctggcctgcgtgacccagttaccctccctggctcctctcagggacctcagtatcacattcgctggcctctgtgctgagcaactcattagaaaatgtattgatgcctacggaaatagcagcacagggcggggggttgtggggaacgtttctgggaatgaggagggccctgactttgccctcgaagcgttcgggggagcagtcacgtaggcagacatctgcacacggcggatctgaaagcagaagcaggcgtggcgagaacagagagaatcacacacagacccgggctctggcagccgccggcttcactgatgccatctccacagcgctcccacaccaggccccagagcaggaactactgctcacagggcatttccctatgccaggccccactctaggtatttcacgcacatttacacatttaatcctcaaaaccaccgtctgcaatggaccatctcatccccattttacggaggggaaactgagtcatagaaagaggatgccacttgctgagggtcacagaagtggtggagttggggtgtgaacccagcaggctggctctagggcccatgctctgacccacgctgcggaaggcagccgaggctcggcagatgagggccctgcctgcactccagtctacaactgagtgctgggctcaggaccagaaccccggtctgtctgatgcaaaactcggagccttttccatcatgccaggaggccaccgtgattgggaaagcagtgaggagttgcggcaatagcagggcgatggcacggtgcaggtgcaggcaggaatcgatagcgtctggcaactgtgagcagcagcaggcctgaggtgagggtcagggcttggagacctcccagagactacaccatgggcctcggggccctggaagctgtgcagcatggtggaggctgaggtcccatctaactggcactgtgattttcacaaccccccttacctctcgggacctcagtcttgactcctgctaacaagcctctgtgatctgaggccccttcttggcaccgagcctcagattctcagggtcctgcacgggtggctgatctccctccctctccacaccacccctactcttgctgtgcgggggttctcccttatccaaggctctgctaaccgggagcggttgccaggtgtgctggggtccccagagaatccccgaactccccgtccccgtcaaacagccagggctgatgcaacctgcctgcaaccaccgcctcactccccaagccaggcccctccgcaccgaaaaagagtccccagtagccccacccttgcttcaagccccagctcaggagttgaaggggagctcgaggctgggggaggccaggacatgagtcctgaaggggccacaggcctgggtcaggaatgtgcacacgaggggactcagggttcgaagatctggggagaagggtcgcaggcaaccactgatgaccggctatgaactagaacaggctgggaggggctggagagctaagggtgccaactggcacccactcaccctgagtccagctgctaagtctggctgggctgaagtgggtgggacccaatagctagagagaaaaggcggcaaaacggtggggaggggaagcagagtccctgcccagacacctctgcagccagcataaaccgcacatagccagcaatgcaattctcctactgaccaagctattaaaaattacccacaccgggccaggcgcggtggttcacgcctgtaataccagcactttgggaggctgaggcgggtggatcgcctgagttcgggagttcgagaccagcctgaccaacatggagaaaccccgtctctactaaaaatacaaaattagccatgtgtggtgacacatgcctgtaatcctagctactcgggaggctgaggcaggagaatctcttgaacccaggaggcagaggttgcggtgagccgagatggcaccattgcactccagcctgggcaacaagagtgaaactccgtctcaaaaaaccaaaaaaattaaaaaacaaaacaaaacaaaaaaccca

SEQ ID NO: 67900 - DNA, 3190 bp, Homo sapiens
agtctatgccaggtatgtataaaatttggcttcctggggccacattgaagaattgtcttaggccacacataacatacactattgatagctgatgaacttaaaaaaaaatcgcaaaaaattcgcatgttttggtaaggtttacaaatttgtgttaggctgcattcaaagctgttctaggccgcatgcaggcccacgggtgggacaagctcagtctatgctcttagctgctactctgtatactgcctcagtgataacacagcccctataggcccaagaaaatatagggcaagtgctcaaaaactggcagagtggacagtaagtgctctaagggaaggtggtcagatcccaagaaggacttcctgcccgcaacaggtaaggaaggagaaagaagcttgtgtgtaccgctcagtatcaggattcctccaccttctctggaccttgattcagtctcctaactgccacagaagggatgaaggttgaactccagctgggatgtcctgatgtggatgggacaaggtgggtttctgcaacagagaaaagacggacatccacctcggctggtggaggagggcccagtgcatgagaaggggcaagatggctaccctgtgactaaacgaaaacggagatcttccatttttggcagggttgggagatagttcctatccagtggaagctgaaggacggtttgaaaggaagccaagggcaagggatggagaaaaggacgcagctggggcctcgatgtctgaatccctgccaggggatggggcctgggcacccatcatttggaatggaagatgaggatagctggaaacagacactttagagggatgagggagacagaagaatgacagcaggtgttggacagtccaacgtctgcggctcttacaagtggtaaggaagaaatgagactgggccccagagttcctattaataaaatatgctgaggccgggagcgatggctcacgcctgtaatcccagcactttgggaggccgaggcgggcggatcacgaggccaggaaattgagaccatcctggctaacacagtgaaaccccgtctctactaaaaatacaaaaaattagccgggcgtggtggcgggcgcctgtagtcccagctactcgggaggctgaggcaggagaatggcgtgaacctgggaggcggagtttgcagtgagccgagatcgcgccactgcactccagcctgggcgacagagacggagagactccgtctcaaaaaaaaaaaacagttgaacaggaatgtatgagttgagctctgtgcataaggcttgccagacatcgtcttatttgagtctcataaacccaccaggcgagttgatttttcttattttacagatagggaaatgaagtaagagaacttaagttatttgcccgaggccatcctggcaggtctgtatttgggagagtgctgtgactcatgctggactctaacccacgagggtttctcagagtcagcagctgggggatgaagaagtgaaaagtgactggcaggaaattctgcaagcaaggaaagggaaagagaaatgaactggtgcaggtctgcgggaagagaatgaggctggatcctcaaaatcacaggaggaagcaggcccagacctcagaggcagaaagagaaagaaaccagagcttagagtcaggaggaggaaaccagaccccggagccacaaggagagggctggatccccggctcagagggaagaggtcggatccccagctgagagggaggagggtcccggaccctaggagtgggaaggaaaggctcggatcccctgatccccaggaggaggggacccggctgcctcccggttggggccgcgcgagggcggggcgcggaaggatccgggagggccgtgctccgccacccagtatatatctgtccccagtccccggggccgcctcattccctgtcctcggatcacagtctcttctcactacagtgtcgccgcctctgcctgcgtagccccggccatggctctgtagcctcgacccctttgtgcccccggcccgtctccgcgctcaccacgcctgcgctctccgctcccaccttctttcttcagccgaggccgccgccgcctctccttgctgcagccatggagtgagtaaccgcttacctcttctccaactgcctttcccgccctttcgcagctcgtggccctctttagggagccctggggggtggggagtcgcgagcggggaatcacggtcgcgcaggcgcagaagtagtacggtgggccgaaggcgcgcggctgcgcatgcgcactgggcccggggccgggtgggagagttctagactcgatgtttgtcagcccgcgtgcagctgggcctgagcactccaggggagggtgtgttttttttttttctaaacgattcttcgtgcttggttgttcctgcgcagtagcccaccagtgccccgtagtgaaagagctgcggaccctgaatggccgcacatgcgcattgatccccaagagggcggaggtgtaaaggcaattggaccgctcgggcgacgtagcatgcgccttggccctcggcgcagagccgcgtgtggacgggtggcgttcgggtagccgttctccgcgtgccccctctaccctcctccaccctccctgccccacgttgctctggctcacagcccagcttccttccttttaaaccaggcacctgctgaggcggggactggcttagattgacagggcagaaggcgggacccagaggcaaccctctaagtgggtggggatagaaccactgtcgtcacgatgggtgggatttcggaagcacattgtgagaaggggcggggctaaaccaaccgttagttgaggggtggggtttcgatgtgacaaagaggcggggcctctggggaatcgggggaggggcggagctaaataaacaatgaggggcggggcttggaggggcagcggcagagcgaggagtgggatttgagtggataacattgctgaagggctgcggcctggggcagttcccctgggaactggtttgggatggaagctaggaaggcagtggggccaaaaggaaatattttagaggaaggggcgtggctggaagaaaatgtccctgggattgagtttttccttgaggcgaaatattctgaggtggatgggaggggcctaaggtaattcccctgggagacctttaggttttttttttctgtattgggggaa

SEQ ID NO: 67901 - DNA, 1344 bp, Homo sapiens
aactggttcattggttgattaatgggttgattggttggttgactgatttatttggttggttgaccgattccctgattgattggtcgactagttcattggttggttggttggttggttggttgactgggtggttagatggttgattgttggttggttcgttgactggtttattggtttcttcactggtttgttggtttattgactggtttgatgattcagtggttagttgttttactgaatgaatgggacagatgcacctgaatgagacgtgagtcagcacccaactacgcagaagaccagcaactcagggaattttgtgtccctccccactttaatcccaggtgatggcttctctgactggatgactgagcgagttgatttcacagctctcctccctctggagcctcccttaccccccggcaccctcccccaaccttccccaaccccacctgacctggaagctatggcctccctcctcaagaaggagctggaacagatggaagacttcttcctagatgccccgcccctcccaccaccctccccgccgccactaccaccaccaccactaccaccagccccctccctccccctgtccctcccctcctttgacctcccccagccccctgtcttggatactctggacttgctggccatctactgccgcaacgaggccgggcaggaggaagtggggatgccgcctctgcccccgccacagcagccccctcctccttctccacctcaaccttctcgcctggccccctacccacatcctgccaccacccgaggggaccgcaagcaaaagaagagagaccagaacaagtcggcggctctgaggtaccgccagcggaagcgggcagagggtgaggccctggagggcgagtgccaggggctggaggcacggaatcgcgagctgaaggaacgggcagagtccgtggagcgcgagatccagtacgtcaaggacctgctcatcgaggtttacaaggcccggagccagaggacccgtagctgctagaagggcaggggtgtggcttctgggggctggtcttcagctctggcgccttcatccccctgcctctaccttcattccaaacccctctcggccgggtgcagtggcttatgcttgtaatcccagcactttgggaggccaaggcaggaggatcgtttgaggccaggaggtcaataccagcctgggcaacatagtaagaccctgtctctattaaaaaaaaaaaatcaacccttcttccccaccaaaccacccaactcctctctactcttatccttttatcctctgtctctgcttatcacctctcttgcgtatttctggatctccttccctcctttctc

SEQ ID NO: 67902 - DNA, 987 bp, Homo sapiens
acatgaaatggtaggtgctgcttaaggatccactgagcaaccgggcacagtgctcacgcctataatcccaacactttgggaggcagaggcaggaggatggcttgaggccaagagtttgagaccagcctggccaacatagtgagatcgtctctactttaaaaaataaataaataaagggactgctgaaggaatggatgactcacacaggctgggcactggggtttgctatttttatcaaacaacctgagtcatataagggaaaaccaaaaccacattggcccagagtagctcctcctgtgcttccactgtgggtttctgggggaggtcaagcgtggtttcttctctcaggagctcctggctctgtgtgttttcctctccttctccctcttccttccccgccctcctgccctctccccaccctgctctctcacctcaatctctttcttactgttggttttcatccttctccctttctcctccctctgtgctcctcggcccctcattccttctcatcatgatcccttctcgctctttctccctgccctctccttctcctttctctccctttcttgggagaagccagagtgcctgcgttcaaatcccagctctactacttccaggctgtgtgcccttgggcaagtagcttcctctctctgtaccccagttgcaggatggggtaatatgggtgcctatctcacagtgtggctggcagcattacatgggtaagacacagagagttcccaaagtgtctggcatgggatcctgcctgtaatcccagcactttaggaggctgaggcgggaggatcgcttgagcccaggagtttgggaccagcctgggcaacacagtgagactgtctctatttaaaaaaaattaaaaaattagcctggcgtggtggcgcctgcctgtagtccaagctactcgggaggctgaggggggagaatcacttgagcctgggaggttgaggctgcagtgagccgtgattgcac

SEQ ID NO: 67903 - DNA, 393 bp, Homo sapiens
aagtcagaccctgtccctcctctactcaaaaccgtatggtggatttcattttagacagaataaatgctgaaattcctaccatggcccaggagccccctgtatgatctgccacttccctgttccctctctgacctctcccacctctccccttgctcacgctgagtcagccacaacagcttcggtgcttttccccaatcgtgacaagaacgtttcttccccaagacctttgcacctgctctcccatctgcctggaacgctgtccccctaagagtgcacacagttaacttcctcatcacattctttagctctctgttcaaatgtcaccttctcagagaccttcttggacacgattttactgtgttttttcttttcttttttttgagatggagtttg

SEQ ID NO: 67904 - DNA, 1720 bp, Homo sapiens
tccatatagtaaacgctcaataaaattggatgtgctgaagtcacctatgcaatggccaggtcaggacttgaaaccctaagactccaaccctcaggccagtctttatcttaatttatttgacttattcaacaaatgtttagggaacagctgctatgcgtcaactactgtatagtgttcctcctagaaagttcaggaaacagcacagcaaaaaggctaaaagtcagaccccacctcagcgcaggtggggcgattgcctaggcgacgacagagcctcccttcggccgcacctccatagaaaccacgggatgacttagacgccaagtttcacagcggaggagctgtcgaacttcccacaagttccgcccatctccgccttagccatgcccaacacggagcccaaggtggcttgggaagctcaagaggaggccagtgaaccccgcgacccggagccgctctcattccgaaccccgacagcaggggcctccgcctcccacaaacggtcgtgctgacgtcacggacgccccggccgagctgcggctagggggtcgggggacgtcccctcgttcgcctcgcttcccctcacctctgtacttggggactggggtgggattctgggcttctgcagcctgaccctcggatcctccgcagttacccggactcaccttctcagttgcccagcgaaaacttccgctgggcggagagcgctgcgcgcgcatcctgaatctgaggcgcccgcgcaggcgccgctgacttcctgacggcccctgggcttcgcctgcctgggaactccgtttcccagatgcctccgcggcaggcccgccctctgattccagacggaatggggattattccctcattgctcatccccctcccctccgttctagccgctttggaacgccttctggttctactgcgcatgtgtcagtgtcagaccaatcggaatgcaccgtgaggtacctctccaccaatcagaggtcacattacctaaacttctgcctcaactccgccccttacttccgcttgttttctcagaaacccgtcacaacgcgtttccatggcaacctaccgcttgctcttcggaaaaggttaacactccctgacttctagtaaaggcaagaagctaattagatgattctttaacaaggtaaaaatctggactacaaactgatgccgcctggtcctgattctctttctactctactcccacagtgctaaggctgaagaagcaggaggagatgggaaggcgaaagaagtcgcccgcacagccctctgggaaatagagtcctggcgctgccgcggaggatcctgggtgcagccgctcagagaagcttctcgcgcacaggaagtcgctgcgaggaggcgcgtgtgcggggagttgaatctcccgctcccttgaggctggggttgcgtctgttgacgcggccgactacaatcccgaggtacggagacgctggggctgagggacttgcgggctcggtccttcctgagaggtgacggaatgcaagtgggggcgacttcggcaaagggtgcgtcgccttgggcggcggttgtcagggtgaaggtgtgaaccgtctttcacagtctgttatgaaaaccgctcaaggtctgggcacggtagatcacgcctgtaatcccagcactttgggaagccttggcgggggggatcacttacagccaggagttcctcgaacccccagtctctactaaaaatacaaaaatt

SEQ ID NO: 67905 - DNA, 840 bp, Homo sapiens
gaggggaagatcagagagagctgggagacccagagagggaagaacagatgctcaggataaggggagccgagaccgagtctgtgcctgtgcagtgctgctttcgggttctggggtcagaatctgggttgcagctctgccagcctgagagaaatcgcggagtctccccgactctcagtttcttcaactgcaaagtgaggaaaggtaggttccccttcctagggatcgcagcagtcccacgctccgccggactcctggcaaacagcagacgcccaattcctgcgcgccgagtcgtctgagccgcactgatactaggtgggactcagggaatgacaagagggggcggggcgtcacccacagcgccctccccactcccaaccagacccaacttgggcccgcccccggagcttctgctagcctgtctggcccggcctgcacccacctgctccggtcgggtccgcgagttccgtgcgtccaggcggattccgctggacagccaggccttcccttcctccgccgggtcccggaacgcgcctgagcagtccctgtctcggaactgtaagtcccggtaccttaaacgcggcatcgcagctggactacatttcccagaaaccattgaggctcttgctcctcccggcctaagggctctgactgcgagggaatgctgggaaatggagtctgggagcaggatacggggcaggagtaagactgtatttagatacatacacaacagcttttggaggaaaactggtatttgggacatgcctgactgtactggcacgcgaatatccctgttttaggcagaggcgatgccattgtccatttaatccaaatttctcatac

SEQ ID NO: 67906 - DNA, 855 bp, Homo sapiens
gagactgaagctcaggacagaataccattgtcctcttctttggtactcttactgtctatagattttgttgttcccttcccgcagttgggaaactgaggctcagggagattaatgatgaagcactgggctggggaactttctgaacgtcgttttattaatttcactggccgcaatgcacagcagggaaagctgaggcccaggaagctccagcggggtttgaatcccgggaatcctcagccttctccgcggcgggccctcgacctttgccctccataagggggaggagcccctggcgccgccgccgccgccgcccacctggcaacaggctcaacccccgccttcccccggcccccgtcagaggccctgaagctccaggcccgccccgttcccagccgggcaggtgctgggtgacatcagagccgggctcccgccctgtgacgcgacggggccccgccctgcgctggaccgcggaggtcgctgcacctgaagagaacggggattcccgcgccctcaccccatctccccgctccggtcggcgcccccaggtagccccgaggatctgcgagttgagggggcggcgacacaggcgcttgggtccaggggaatgggtacggggctctcagactcctggatctgagaaggggccttgggggccggctgtcccaggtctgaggaaggactgcgccgcgagcccgaacttctgggtcctgggggaggaaaggactggggccaggactgcagagctggggtcttaggggaggagggggctgcaagcccggattctggggtctgtaggagcaggggctgggggcctgaactcctgggtctgagacaggagggcattgagtactggga

SEQ ID NO: 67907 - DNA, 1087 bp, Homo sapiens
caagtagttgggatcacaggcgtgtgtgccaccacacccggctaatttttttgtacttttagtagagacagggtttcactaagttggccaggctggtctcgaactgctgacttcaagtgatcctcccgcctccgcctcccaaagtgctgggattacaggcatgagccaccgcacctggcctcctaccctacactggtatgattttatcttaactcgttacatccgtaatgaccctgtttccaatactgtcacattctgaggtcctggggtttagatccccaacatgctttttaggagggggtggtgtagacatgattcaacccgtaacaagtacgtaggtggacctccgccttttcagaggctgcgtaatgtttcattgtttgcgtgaactatgattcttttaaccaagccctccaaagaaagacctttaggtgtttctgggctgagccagggccgcctctgggtctgattgtcttctggtctctggcgctgtgggaggccccaggagctattgttggctccagggccggattggaagtgctggaaatggagcgtagcttggctgtctacccaggctgcaaacagccgggcctcttgtggcctattgacacagggtcttgggcctctcccacccccaccccgccgcatttcccaaccagggttgcataattccccagcctgcatgactccgcagctgggcagctggcacacaaattcagactgtggctgcaatggggacctgggcctcccagcctgtcctcttaggtcctgcctggcctcttgtcaccatgagctcatgtgaccctcctggcagctgccctgctgtgtggcaggcgcaggcagcagctctgatttttggaattcagaaataaaaactttgcagcaacctatgcatgtagtaacataaactgaatgtggctaaaggttgtactgacaaaaccaagccttcccactcttccctggccctagtttcccactgttgagcttcttgtatctccttccagaaatattttaagaatataagaaaagacacatattatttgtctataggaggaggcattctctaaccccacagctgatgttcagc

SEQ ID NO: 67908 - DNA, 507 bp, Homo sapiens
aatcccagctctgccagcctatgtgagctgggtgatcttgggtgagttgattgagtgcctcagttaccctatctgtaacatgggaagcatagaaggacctgccttgttcagtggttatgaagggtacctgaagtcatttgtaagtgtttggaacaggttgtggtatggaggaagtgaaaaataaatcaaggtccatttcagtgcacaaatggtacaaactgttctagaatgaatggttgaccaggcggctgaggggttgcactgacctatggccccaccatgaaagcatcagatgcagccaggcttggtgactcatgcctgtaatcccagcactttaggaggcccaggcgggcggatcacgaggtcaagagattgagaccatcctggccaacacgatgaaaccccgtctctactaaaaatacaaaaattagctgggcgtgttggcatgtgcctgtagtcccagctacttgggaggctgaggcgggagaatcacttgaacccaggagg

SEQ ID NO: 67909 - DNA, 753 bp, Homo sapiens
tggaggagggagggcatggggagttttgctattaatcaggggcacagagcacggggaggccactgctggaccacagagaggaccttggactttggggtgggccaagggccagcactgtccctctgtgcaccccccttcctccacaggggttgggctctgggcttgacttcactgaggtgcagagctgggaagtagtgggtggagagtttcggggccacagagaggaccctggacgttggggtgggctgggggccggcgcaggtcctctctgaactccccccccacccccaccttcgcttctctgcagtggtttaagaggccagaggccttcgcagagcgcatgcctagttccccgccccctccgagccgggcgcgcggcgctagctgcggcaccgcagtgggggcgggccagccgggccggggggcggggcgcacggcggccagtaccgcggacagctcccccgccgcagtgcgcagccgcagcggctaggggccgtcttaaccccttccgggccggagcctattcaacgcgcagccgcagtgttgctgctttccggcgggaggccaagggccaagagtctaattaactccttccctcccagggcacagggaaaggtgggcacccgccgcagtgcgcagctgcagaggctggacggcgtcgggctggtttaaccccttactccagagtgtgtcaaaagcagaaggggtaggagggcatggagtctctgtaagaaggaaaggagtgattacgag

SEQ ID NO: 67910 - DNA, 1121 bp, Homo sapiens
tagtcgaagcgtgccgccgcctcgggctccgtcaggccggccagccgcgtccccggcagggtgcgcagcgtcgagcggtacgtctcatggcgcacgccgcccacgttgatcacgatcttgccgctgtcgccaccgccgccgccgtgccgccccatggccgccgccggcagcccggggcatggctcggcgcgccggtccccgggcccgcggggtgccggggggcccgccggggacgcggcggggccgggctgcgcaggctgctgctgctgcggcggcagcggtggcggcggcggggactcgggcggctgcggcggtggcgccggctgctgcttgctggccccctggcgcccgcggaaggacgagacgcagactgagctcagcattggacggggggcggggcgggaggggcggggacgcaggggcggggacacggggggagagaccgacgggattgggtgggaggaggagcgaggtagcgggggcgtggcttaggggagaggaaccaaactgattggcctgggggaggtggggcggggctgtggctgggaggagtggggcgggcactctaacgcgacccagctggacgagtcggggccgccaatgagacggagcgattggctctttctaagagagcagggaggaggggcggggcggggcgtcaagggaggcgggaccggttactactaattgtgttcggcagcactggtagccaggggaaggcggggctagatacgatagagagagaccttactgaactgaaaaaagtgcgggcggggtagagggaggaggggacacatccaagctatttaaagacgcccgactggcctggaggggcggggccaccatgagagaggccgtcctgattgggctgagaaaggggcggagagaaacaaaacagatcgcacgccctcacctaaaacaccgctaggcaggacctggtggggaggagcattgcttggaagagacagggccgcagaaagtagaaacggtccagatgagactgcatggggcgggaactagagatggaggactttcccgcgcaagggggacaggctggactgaaagaggacacgggaagaacaaagacttagactcggtgagaaggtgttgaaacttgagag

SEQ ID NO: 67911 - DNA, 1674 bp, Homo sapiens
cctcccccattaccccaggccctggaattggggaagggtcttccctccctgacttctacgaccccttccttgttcctctgcccccattcccacccggttccattcggagccttggtctctggacaccaaaggtgaaaatgtgaggactctctgcctacgatccttcgtcccctaaaaccctccaagtaccttggccccgaaagctcagagtcgaggggaatctccccgctataatctttgggtccctggatcccaagtcccccgtctccaaaactaggattcgggctgtcttaccgcccccggaccctgagccttcgccccctcccccgtactcaccccaagtcgaggcgaggtggggatgggggaatccggggctcgagatggggggaggggtgacccagccccggcagctctgggcagcaagaggctgcagaggggggagtgacatcaccgccggaggaggggcagcaccgctcccccaacccaggggcttcaagctccgcctttatggcggaccccggggtcctggaatgccaaggcagagaggagaaacaggagacgaggtccgagggaacggtatccccgccccttagaacaggaactggtaaacccttaccaattacagccacccccgactgccacctgtggctgccgtcgcgacctgtcgcctcccacgcatgttgtggctgcgcccgcccccgtcagggcgtgaccacggcgtggactacaacgaccgtgatgctccacggagccaggagcctttgacgaaaggcagcgtaggcgagggccttcatgggactcgtagtacaaggcccatcacaagggtgcgccgtggagaaaaggggtgatacccttcgcctccctctcttcctcaactccgtgggtccatgcacaaagctttctcttcaaaaagtacgctctgaaaagaagcaacctaggcaggttcgttcaatggaaatattggatttttactgagtagcgctagctctgctacccggtgcgcatgcgcatcacctgggcggcacccgcggtactgcgcctgcgcggtctcgcgccttcccaggtccgctccgcgagggcgagcgcgcgccagtcccactcgtgcgccgctcttcatgtccccgcggtcgaagacggtcacatacgcccccaagaaaacgtcgccgaggatccacacaggtactggaggcgaagcgatgtccaaggcccggaagccggacaagcagaggcggacgtcaccctgagcaaactgcaaggcgacaaggcggcaactgggtgtccaggccgcaggaaccaccatttccctgggagtccgtgctctctccgcccccaaccccggggacaagaaatgtttctgtggccccttccggccctagtgatgtccaactaccagctccaccctctcaactccagtcatattacatcactgtggcgtcattatgacggacacctacctggatgacgtaatcctgggccgtgagattaaaccagacccccccaatgaggagtgagactgcggggagctttgggatttctgagcaccggatgatgtactggtggaggagaggaacaagtgaagatgggagattcctgctctgctcaaatcccgtccgtggctccccagtgccatggagtaatgttcatattgagcacctgggtattcagcaccgtgtg

SEQ ID NO: 67912 - DNA, 1108 bp, Homo sapiens
gaatttttctgaaacagtggacagtgtctctatgataactctcaccaccaccaccaccacccccgctttgttttctcagtcagagcactcgatctgggccctttcaactcgcccctcatgctttccgtctgcagcaccccatccaacttcacccaaagcgcccttaagtagtttctgagaggccgtgcctgcaaattcccaattggccacaaggtggaggtgtgggcctgttttcccagccgccacccgtttctagagctggacccctggaacaccaggctctttctagcttccctgcttccgccctagcggttcccaccggcctggaatgccgacttgctcgctctctgcatcccacgggaaaaggagcagaacagaggcttcctccctgactctcctgcccgagcttactgggacctgaatctccccgtgtttagtagtttagcggtttgtgatcaggtcggcctccaccatcagagcagcacactctcgagatggggctcaggcctgactcttttcggggtccccagaatcgctcaacacaattcttccagaagcctcgggatgcgattaaaggattgccagatttttcgaccggtcgttttgtcgaatcatttagttctgggtagcaagaggctgaggaggggagagtgacgtcacctccgcgggtggggcagcaccgctccccgaacccgggggcctcgagctccccaggggtctaggaatccggagggagagaggagaaacaggagatgagatccgggggaatggtatccttgcccccttgaacaggaactggtaaacccttaccaattacggccaacccccactgccacctgtcgctgccgtcgcaacctgtcgcctcccacccatgttgtggctgcgcccgcccccgtcagggcgtgaccacggcgtggattacaacgaccgtgatgctccacggcgccgggagcttttgacggaaggtagcgtaggcgaggggcttcatgggactcgtattacaaaacccctcaccagggtgcgtcctggagaaaaggggtgatacccttcgcctccctcttcctcaactccatgggtacaggcacaaagttttctattattatttttg

SEQ ID NO: 67913 - DNA, 1482 bp, Homo sapiens
attatctgggcgtaatggcacactcctgtagtcccagctactggggaaggtgaggctggaggataacttgagcctaggaggctgaagctgcagtgagccgtcatcacgccactgcactccatcccaggtgacagagtgagacactgtctcaacagaaataaataaatacataaataatggtaaagatccactttgtgcactccttgctctgggggattttcctgaagcagccgaacgtgtccctgataactgtcaccacccccctttgttttctcagtcagagcactcgatctgggccccttcaactcgccccgcacgctttccgtctgcagcaccccatccaactgcacccaagcgcccttaagtagtttgagaggccgtgcctgcaaattcccaattggccacaaggtggaggtgtgggcctgttttcccagccaagattccccagccgccacccgtttctagagctggacccctggaacaccaggctctctccagctttcctgcttccgccctagcagttcccaccgcctggaatgccgacttgctcgctctctgcaccccacgggaaaaggagcagaacaggcttcctccctgactcccctgcccaagcgtactgggagatctcctgccgaacacggcccggccaatgggacctggatctccccatgtcttgtctctcagggggttgtgaccgagtgggcctccaccatcagaggagcacagtttccagaatcgcccaacacaatctttcccgaatcccctcaggaagtgattaggtaaaggattgccagatttttaaacccgtcattttatttactaaccttgtaagaaaggaattatcgcccacattttaccgggttggggaggggctgctgcggtgcagcaagattaagaggaggcagcccaggtgcacttggaggggaattgaacctggttcttgaagctgcagacaccaagtaatcagcccagatgcctcgcatcgtctttgccaggattacttttgcccctgttccattggtgggaatctgtcacgtggttgctcctggctgcaaggacgacccggaaatgtagtccagttgtgtgtccaagagtgggggaccctttgggtgactctcaggcactgtgggccacatcagaccccacaaggcctcaagttcggacctgcgttccctctatgatcttatatcgcaccttcccgaggtctcgcattagtgttttttttttttttttttttttttttttgaggcagaatctcgctctgttcaggctggagtgcagtggctgtgatctcggctcactgcaacctccgaacccccaggttcaagcgattctcctgccaatttttgtaattttagtagggacggagttttgccatgttggccatgctggtctcgaactcctgacctcaggtgatctgcccgccttggcctcccaaagtgttgggattacaggcatgagccactgcacctggcctactca

SEQ ID NO: 67914 - DNA, 1097 bp, Homo sapiens
agagaatctcttgaacccaggacgcagaggctggagtgagctgagatcacaccactgcactccagtctggggtgacagagtgagacctctccaaataaataaataaaaataaataaaactaacaagcagcacgactccaaaatcagaaaacttgtaacgaccaaaaaagtgcaaacgtgccttaaatcagtcatgtgcgacaagcagctatagctagggtttggccgcaggctcagagaagcgcatgaatgagctaaagccacaaagcgcggggctggaggtttggctcccaagaagcgaggaaatgggttcggaactcttctgccaagtcccagtagatctacccggtaaacttccggtgagtttccaacttccgtgcggggcagcagcttcggctggtcctaagcggaccggaagttcgtcaagtttcacgctccgcccctcttccggacgtgacgcaagggcggggttgccggaagaagtggcgaagttacttttgagggtatttgagtagcggcggtgtgtcaggggctaaagaggaggacgaagaaaagcagagcaagggaacccaggtaggtgcacccgagagtggggagacgcaggaggagccccgaacccggggcttctcggcgctccccgcgtactccgctctgcccccttctctccttccatttcctcccctcggtaattcgcgcctcccgcggctgtttccagggcaacaggagtagttcactccgcgagaggccgtccacgagacccccgcgcgcagccatgagccccgccccccgctgttgcttggagaggggcgggacctggagagaggtgcgagggcggagcatgaatggaggaggcggggcggggcatgatgggaggtgatggggcgggacctgcagcgcggtgcgggggcggggcatgaagggaggaggcggggctgggggcggggcatgatgggaggagatgtggcggggcctggagcgaggttgtgggggtgcagtaggaagggaggaggcggggcgggggcggggcatgatgggaggggatggggacctggagcgaggttgtgggggtgaggcttggagggagggatgcatatgggg

SEQ ID NO: 67915 - DNA, 1093 bp, Homo sapiens
cctctaggcctggctcccctctctcacctgccatcccacctggttccacctcgccagctccacccagggccggcttagggccgcgatcccgcctcattgcaatgtccccgtccgacgggagcggacggaggagcagagggagaaagcgagggggcgggactacgcgcactgtgacgtcatgatgcggagcgggctttatgacgtcacacaagagcgggctcctgatttgtgatgacgtccctggagggggcggctcctggagatcaggccaaaggggcggccccatcctgctgacgtcaggccccaggtgcggacgggtgccagtgcgcaggtgccggggcccagcgcaggcgcacgggcgtcaggatgcggcctgttcctcccggcgtgctccgcggctcttggctcacagccgtcccttcgctggtgggaagaagccgagatggcggcagccagcgctggggcaacccggctgctcctgctcttgctgatggcggtagcagcgcccagtcgagcccggggcagcggctgccgggccgggactggtgcgcgaggggtgagtgctctttagctgtgcatagcgggcgcggtctacggatgtcgcaggtcttgggtctttaggtgagttacagacggaaggaggctgcgcagggctgagagggaagaggtgggagatccctggaaagccaggcctcagtcacgcacgcgcaggaggggcctcgccagtgcaccgggttgcaaggactgggtgggaggacaagcgcacctgtcggaaggctctggctcgggaatatgtatgagggggcggggctgggggtgtggaatcttggagaatccgacgtccgggcggttgaaatgaaagaggcaaggtgaagccgggcgcggtggctcatctgtcatcccaacgcttagggaggccgaggcgggaggattgctctaggccaggagttcaagaccagcctgggcaacatagcgagccctgtctctacaaaaaatactaaaaaaaaaaaaaaaattaggccggtcgcggtggctcatgcttgtaatcccagcacttcgggaagccgaggcgggcggaccacttgaagtcagg

SEQ ID NO: 67916 - DNA, 1917 bp, Homo sapiens
gggcgtggacagcacacagctccaggcgctgccgttcgtggtacacggtgggtgggctcggctgtgctcccggggcctgggacatgccgtcctcggctcctgctgggggttgggagggggagaaggtcctcaggggcccgggatctagaggtccagcctcccagcaggcctttggggcatcgccattgattgagctgggactcggagcagcccaggaagacactgggcccctgaccccgctccctggcagtctcctggcagcacacgtccctccatcccttattcctattcctacgaaaaacgctgtctcttctgctcccctagcaacagaaaaccaccctcaccaggtctctaagtaaaagggtccctatcatggtcacctagcaacagaggaacctgcctccccgtccctaggtaaccagggcgctctgtggttacctagcaacaaagccccctccccaccgcactaggtaacaaagtctgtcctccgagcacctagcaatagagaatcctcctcccctgtctctaggtgatagggtcccctctggtctcctagcaacagaagactccccttccccggtcatgtagcagcgaggctctctgctcttgtcacctggcaacggggccccctccccagtcactaagcaacaggagttcctcttcctatcacccagcaaccaggccccctccccggacaccaaggaatggagcccttcgccgacccgcaccccagccacggcgctcgccctttgcctggcaacgcccctcaccccgcctgcctctccgctccaccgagccaggggtttccgcatccccttcctgggcggcggctctgggctccgagtgcggggcgggcaacaccgcgctgactgggcaggcgggacggactacagctcccggtgatccccgcgcgccggactacgactcccgtggggccccgcgggactcctgctccacacggaacgcccgggccgcgtggccctgaagtcggccgtcgggcctaggaaatgccgcactacaacttccgtcgggctccgcggcaggtcccggaagtgcgcctcagaggcccttctttcgcatacggccgcgcccactactgctcagagattctaggaaacttagtaggtaggctctcgcgatagcttcctggcgccgcgctctcatgggtgctcgcccccggcgatggcgtcatgcgcggtgcgcagacgcagcgtgacgtcacacaagggaaagggatcagagacgccaggcggtgcggggggaggcagcggtgatctttactgagtcagaagggagaccctggggaagtggggcagggcaggggtgggatggtggtggtgagaggccaggcagatgatcttgtctcgggagggaggaggcttctcagcagagatggatccccggcctggaggggagctggcagcaggctgcggggagaggggaatgagcgaatgagacagaggagagatgaggagacagacgcctgggggaggcagtggtgggaggaggggacagggcaggggggcggtggaggaagacccggagagagcgggacagagccctgggggtggacagagacagagagagtctcgatcagaggcgggcacaaatggagacatctacagtgccaggattcaaagtcatggagagaggttaaggaaataaaggtcagaaagaaagaaaggtcaacaaatacagaaccagaactgcagaactagtgagagcccgggacccccaagctctgcagaacacaggagcccagggccgggggagaggggcctggccgcacccaggaggctctgccagaaggccgtgacggtggcggagccggtgaccgcgcctggctcggcagggttctctctgcgggtgtgcacagcaaagcttcggcccgtggggccccggggtccgctcagctct

SEQ ID NO: 67917 - DNA, 1521 bp, Homo sapiens
gtctggtcacttagagctgagggggaccccacctggggtggatgaaggaggggagggttgaggtcagggaaggatatccacttcagggtggggtgagaccaagacagaaggggcagggctctgcgtaaatggttggggtggggcttaccaggagattggcatggcgcaggatttgtgccccagattcatggattattttgggatgggccacttccacaaccagatcagggcgcctgggagaggggaaagagggcggagggtcttggagaggtattaggcctcttctccccaaggttccctccgagtctactgagggctgcccttcttctccctgacctgggaggcgaaatgagatgaatgggttcgtcctgtttcacatttgcttgaaccaaggcccagagagggtcagggaacccctgagatcacacagtggctaagagagccaggacaggagcttcagggagctccactctcccatggcaaggtcactgacctttccccaagggcagcaaggttctggagctgcagggaagggggcacgctccctgccattcgtcctgggtcacgattccagacaaaaacaagttctaggccaagttctggtccctgagccaagaggcgggagacgagggactgtcctggggagagggaaaggagagggctagagatccagagagagggggacagagacccagagagagaggaggtggggacagagacccagagagagaggaggtggggacagactcagattgcggggtagggagacagagatgggggcagggcagagacacagtggggtggacagaggcccagagagaagggagacagagacggagaggacagagacctggggtgggggtgcagtgggcagacccagagacacagccaggggcagatagagagagaaaaaagtgtttgtggagggcagagagtcttgggagctttaggaaggggtttggggaaggaggccaaggatggtcagggactcaccgaggcggccatagcccaccacgcccaccctccacgggcccctgtcggccatggccctgagtgcggtgtctggggcctggctccctgggctgctcgctgcccgctgcacaaggcctgggcagccgctgctctttggacatctgacccttgagcctctgggctcagtcttcccccttccccgcaggcccagcgtgggggcgtgggcctgcgggagtggaggcgggagaacccttccctgtgctctgtccactttcccgggtccagcacagtgagcatggtgaccgggggttctgggaaccctgcgtgcccccctttcccctgcagcacaccctctttctccctgctgatgtggaaagtttcctctgcagtcccctgccccctctctggccggccaggttgtcatggaaactgcatcttgctttgggttgggagaagagatggtgacagggactctgggctctgtctgtcccctcgtgctcacctctcctccttgtcctcaggcggctaaggtctgagggaggcttcagc

SEQ ID NO: 67918 - DNA, 2039 bp, Homo sapiens
tgaatgcatgaaaaaatactttcacttgtgacatgaacaaactcaacgattttctaggtggttgcctgaaggaggtaagtcaagtagagatccttgctggggtcgtggtgggggagataggaaatgggctagctgcttccaggctgagcctcctcggcaggggcatgggccccgctcaagtcaggaaaccgatgttcaagaccttaaaggacctaagccaaaaactaacgttaacaaaaccctctcacgtggcatgaacggtcagaacgactcccgcaggtaagcaaaggcctcgtttgcttccttctatatccattcctacacgactctcaaacccggcaattcacctagaaacttcactctcacttctttggtaactcgataccctatctgtgcccccatggaaccccccaaaaccctctcccgtcccccagtctttgttctaggttgcacaaaaatgccagccatccagaattttaaaagcaagagagaattcctaaggaagcacctgtaggtagcacgaaaatggaaacactcggaaagaactcaatgtcgcctcccagcccgcccacccctctcccccaaccaaatcgacaagatggcggaggcccgcggcgtgcgggcagcacaaggggcgagctccgccgcggggcagacggaggggggtccgccccagcatccccgctcgcgccagctataggagtcgcaaactcccaggcggcccaaacagccaccaccatccccgcagaaaactcccaggctcgccccggagggcgctctctgggtccttgcaaacgccctgaccctttccacgcgactacatggccgctcccgtcgcagcctcgaacccttcaggacacgtgcgtctttccacacagccggaaaaagtaataaacttaagaacctcaccccagcatttctctctccgaagcgggcgcgggttgcagcacgcgccattttatagtgcgcgccgctcgcaaggccggtcctcggcgccagcccgcgctccgcccgaggcgtccaatacacacgcctgtttgggaaaccccatttcatgcttagggaaaggaatactgcctgcttccgctagaatcttcctgaacaagcgaggagacgctgtctctggggctgacaaaaaggggcaaggatatgatggaaacgattgtcttgtcccctgcgtccggcaattctgaagacagcatcaaagatgggccgtgaagagaaaggaccccgagggcggcccgacacgagagagaatccgctgggactatttgcgcggcaggggcttgagctgagtgaggctgcagaggcggggcccaagccgaagggccggacccaaattaagtcccagccactgggctggaggcggggccagtgtggagattgacagggggccgtcctgggaaagcgcccacgtggcgcagaattagaggcggagcctacacggtgacgcaagggccggaaggagggaccctgtgtctggagaagcgggagatgggggcctggacccctgggtctgagggaggaggggctggggtcgtgattcccgtgtttgggagaaaagggggttgggagctgggactcctggggccgagggaggcctttggggctcccactcagttttgacggtctaaggcctgggggcctggattcttggtagggttggagatctcaggagtgtctttccactgataggattatacattctttccacttatatgattattttgaaaattaaaaaatgaaacttctctactccaaactcactttctaggagtttcactgtcaacaatttggtgtggactttatgttttcttttttcagatggagtcttgctctgtcgcccaggctggagtccagtggtgtgatctcagctcacttcatcctccgcttcccgagttcaagcaattctcgtgcctcagcctcccgagtagctgggattacaggtgcctatcaccacgcccagctaatttttttgcatgtttagtagagacagggtttcaccatattggccaggctggtctcgaactcctgacctc

SEQ ID NO: 67919 - DNA, 1059 bp, Homo sapiens
aagggtaactttgaggttctggcctgagcattggagggacggtggggccattttgtgaggtgagaagaccaggaattccatttggccacgtcaggtttgacatgcatgttaagcgtcttccctcaaagactttatggaccctcgtcactgagtcgagcgcctccaccagggccctcagagctgccctgatcctgactagctgtcactggtgacaggtctgtctctctgcttcaaggcagggacagggttggtctggtgccctcgctcccgccgccctgcgcagagtcggtgctcagtaagtatctgtaggatgagggaataataagtgctcccagaagagaggccgcggaccccagggatgcctctggattgcagccttgtcaaaaggacagataatgtgtggcatgggggcggggacaggcagatagtaacataggggcgggggcaagcagatggtcttatcctgtcttggggaagggagtggcccggtaagagacaggccggaccgcagcgttcaaagtgggaatcctggctacaaggcctcagggacacgggcgctgggaaatcacagaggccttacgctcgaagagaccctcaaccctcccacggcaccgcaacaaagagccggagtccacatgccgacccaccgcaggaggaaatactcacccgggcagaactcagtgctgggatgcccacactgcccaccacgcggaagcctggcccggaagtgactccgagactaccactcccataaggtcttggggctttcttgcctagaactcccagaagcccatgcgacacttccgctggatgcgcctacggctccggggtcccgcttggcctacaactcccagaaacacttgcattgctctttctgccgctcccaaaatacactgctccccctccccccgcgtttactttctgcgcctgcgcgcggccgcagggagcggcggagctgcgtgtactgttgtcatggcagcgcgctgtcacccggcaggttgctggatgggcgaagtagttgtattctgattaactgattttgtgggattattataggat

SEQ ID NO: 67920 - DNA, 847 bp, Homo sapiens
gcgcccggccttgttactttttaaaatatcactgctttatctctctgaacacgtgtgaaagtgatggccttcttcctgtgtccagaaaaatacccccatccctgcaccccgccaccatgaggtataggaaaatctttgtcccttttctagtttgaagacagtgaagtcctgcctctttcttggactaaggacgtaccccataccccttcagaattttcgaaggaccaaagaaaaagtctccctcctcctcgagaaacagcaaaaaagccccgcgccctctcacccggcgtgactgtgcaggtacgcgtggccaccaggtggcgagcaaggcaggtgatggggacgccgctgagccgggggtgggcggggacggccgccagcagcacagaggacactggcccggcgcggatgccttcggggagaccctggaactgcagggaggcagcaggggccccgccgggccacgagcagcggaagcggaggctgcggtccccgggacccccttcaactgagcactgtggggccccggggggcaggtctgcggagagaagggagagaatgaagatggagtccctttctcatttcttctccagccccgcctccccgcgcggtgactccacccttcttcactagccccaccccataggcgctcacactccccacttttcctgcgatcccgttcccttttcccattaacttcctcgctaagtgggtagcccgcagccctgctgactgcccaactttcttaagaaaactgcatcttcacacaatgatatttctcttcccaaacgtaactcagccccttcctttccagctccacccacttctgccaggttacttcgccccc

SEQ ID NO: 67921 - DNA, 1852 bp, Homo sapiens
gcccgctttctaaatgacctcgcccctttccctggtgactccgccccccttgccaggtaacttctccctttgctgatcccacttaagcaaattagttctttccttttctaactcccactctttgccatttaactccgcttgtcgactttgtcgagtgttccatgcccaggaatgtccgccctctcagtgctgggccggcccgtcagtcctggtcatccctgccactctatttggctccttcccttatcctctttctggccccgcctcttatcctaggtgtctccgcccctccgcgctggcccgccccaccacgggtatcccagctccttcttggtgacccgccctcccgctggccctgccccacccaccggtatgctgctcctccttgctggccccgcccctttcctctagccccgccctcgttctggccccgcccctctcccaggcattcccctactcccgctccagcctctcacccgccactgtaaggttgagcagcgagcggcggcggcggccggtacgcgggttcgccgccaggcaggcgtaggtgcctgcgtggcccggtccgaccgcgggcagcaggaggcgcgaccccgcgggcaccgcggcctcggccgggtccgccaggctccacgtgatgtcggcgggcggccgcgaggcggcggcgcagcgcaaggtcacgttactgcccgcggtgacaaagcgggcaggcgcggcgtcgcggtccgaggagaccgtgatggtcggcgggtccgggccgtctggagggaggaggggtcgggaccgcgagtgtcagggtcacctgggacgccgctaggactcccggagactgggtccccagcccgcttctccccaaggaccccctgtccccgacccgaggcatcccccactcacagaagacgctgacgtcggcggcagcctccctgtggccgaaggggctgcggacgcggcaagtgtaccgggcgtggtcgctgcgcacagggcgcacgatgagcagctggtcgccctctgagcgcatccggggcgtctcggctccctccgattccgccgcctccagggcgcgtccgtcccggctccagctcagctccccgcgacctggcccccaccccaggcagcgcagccggagctcggccgccccctcctctgtctctggagccttgggctgaaccgacagctggggtaggggctctgggagagggagaatgggctcaggacccacccagtcctggagcccatctttggtccccttagagggaaccccagccgctgctccctctaagcccctggagtctcagcccccatccctctcctctcataaacctatgagtttgagcccccagacacctcctctccgggacccaggagttcgccagaagaggctcctagcctcctcctcctccctcagacctgggagttcaggctcccaggagtctccatcccaggtccacctttgctcagacacccctgccttgacctctagctctttttctcccttcctcaacccagaagtcctcttctcctatccagggaccccacagcaccgtgacttgcccaaagcctggcagagcagagcagcccctgccgcctgcacgccggacgccagggcccacttaccatacacacccaccgtgaactcgtgagtctgctgggagacccctgcccggatgacctcagccgtgtagacccctgcatcgtccagctgggcagaggcgagctccagaaccccccgggcctggtcaaatcgcaggtggtctcggtgagcagggtccaggctgatcagaggtgcccctggccccaggcccccagctgccagcacctttgagccccggcgccagaccaccagagaggtggg

SEQ ID NO: 67922 - DNA, 1153 bp, Homo sapiens
acctgggaggcgaatgtgccctggggagggacagtgtaggaggagagtgggtgaggctaattcaggtccgacccgagcagtctgcttatgccactactgagtacacgcatggactagtgaatgaatgagggagcgaacaatgcagggtcccatgaggtttagaatcgagcttgtacacctgggagagggtctttttcctttccctgagagccacggtgtatgtcctgatgtcccatgtcctgatgctgccagtgaggcctccctgccttcctgacagggaacatgtactgagtgctgagccctgtgctaagcaactgatgtatcaagtcatcgaatcctcgcaggaactttatgaggtaaatgttattatccccactttacagatgagagaaactgaggcagcaagatgctgagttacacgcccactgccacccacagctggtaaatccaaaagctgacaatctggctcccaacggccccccgtgaggcccctccgctgggcagacaacagaactgtgtgtgtccacaccagtccttaaaccaccttctgggaccccgtcctctagccaggtccctttgcctctcagtcctgaatcaacatttcctcccctggtaactgatgccacctacactcctctttgtctaacgacctttgtccctgtccacttattaactggacacatttttcaggtcttagtgtgaacatcacctcccttcattcacaacctcctcctagtgcccttatgaacctgcccctggagacacactgtgaacacgaccagtgaagcaccagcttgggtgggctcatattctgccagggaagacaaccagtcaccagggaaaaacacacacacacaaatgagatcatttccaatcagaaggaataagaagaaaataagacacatgatatgagagcaagaagggcgcacgttggagaagctagtcagacagtggtaaatgctttgaagataaaacaggataatggttttgaatgtgttgtcccatccagtagccactggctgcgtgtggctgtccagccagtgcagctgaggaatgaatttttacattttatttaaatttaaatactgataatttggccaggcgcagtggttcatgcctgtaatcccagcactttgaggggccaaggcgggtg

SEQ ID NO: 67923 - DNA, 2687 bp, Homo sapiens
gtgcagtggcgtgcgatcttgcctcactgtaacctccgcctcccaagttcaagcaattctccctcagccccctgagtagctgagactacaggcgcacgccaccacacccagctaatttttaaatttttagtggagacgaggtttcaacatgttgaccaggctggtctcaaactcctcctgacctcaagtaatccacctgcctcggcctcccaaagtgctgggattacaggcatgactcaccatgcctggccccagcctgcatttctattggactggcagagatggggactggggaacctagagttgagcgggtgggcatgagtatttcacgtaggatggcaaggaaggcccctttgaagaggtgatacctcagcagagacctcaaggaggggaacaagaaagccatgaggcaatccgagggaacagtgttccaggaggagagaacagcaaatgcaaaggccttgaggcagaaatgaagtttgagggatgagggcctggccctcagcaggtgctccccactccagtctcacctgtggccagtcaagaaatccagctgtcatctgccctgtctggttacagtcatcatcgatggcctgaatggggagagacagaagactgtatgacaatcagtggagctcatggaccattcaggcctctgtctagaacaggggttggcaaactttttctttcttttttttctttttgagacggagtcttgctctgtcacccaggctggagtgcaatggtacaatcttggctcactgcaacctccgcctcttgggttcaagcaattctcctgcctcagcctcctgagtagctgggattacaggcacccaacaccacgcccagctaatttttgtattttcagtagagacagggtttcaacatgttggccaggctggtcttgaactgctgacctcagatgatcccccaaagctctgggattacaggcatgagtcaccgcagccagtcgggttggcaaaccttttctatggtggaacagatgtagtaaatatctcaggctctgcaggtcatacggtctctgtcacggtgactcagcgctgctgttgtagcacacaggcagccataaataatatgtaaatgaatgtatgtggtgatgttccaataaagctttatttacaaatcagaggtcgctctgggccatagttcactgacttttggtctagaacgatcccctcacttgggcccagagataagcagccacttgtccagggacatgtggggccacctggcatccctgtcgtcaagtctctgccctctgtataaagcctctcaggagtcccaccctatgtggcccctgggcagctgcatgaacagggtctgggccagcaaggacattctagccccagcccagtgattggttcagggaggggcacatgactcaagctgcaccaaagaagagtcagccctgggagtttgctggggcccttgggaaagatgctcctttctttctgctggggtcactgggctggtgggatctgagcctggagatgcagacagtgaagacaaggtagaggggagcctacagctcatatgtgaccctggatcaagctgtgcctgaagcccctgatttacgtgagataataaattcgctttctggcttaagccagtttgagttgtgaatctgcttcctagaacaaacagcatcctgaccagttcatccggcatttccccagctggaggccctggccccaggaactgtccctggcccaggacaggtaggacatcggagtctgagaacgaccagcaaatgcagggggctgcaaaggccatgcttccagcacctcggcctctgcagccccacccaggccctgcctttttggcctgttctccgggtaggcccttcggccacagttgactgatctgtactctgatgcccctgctgttgataatctctctctgttttcttctgactttctcagggctgggcaggacacccagtgacctacctggacccatcagcctcctctttgtcccagaactgacctggccctgggatccccatctctctccgggggccccagctctacctgagcctgctgtgctctgctgtctccgtgctctgcttgacataccttgcagtctttggccttccttctcagcctcatccctaattccctgcctcttctcactcccatctgcctgtggctcttctgacgtccctcttctgccccttccctggttgaggccatgaggtttgccctcaaatgagatgagctacccctgagcagaggtggtgcccgagggtctcctgggggaacagatgagctccatgtacccctatctcagtggggagcaccagtgtggcagggaaggttctggtcgggtcctcacccagccctaacctccttccctaactcctggcctccaatttcccattccagtccattctcaaagcccaggggggctctttctgcacctagtgctgatcccacccctcttctgctcatagaactcccatagctccccagtgccctccaaaattctcaagtctttgtttcaagcccaggcctgtctcctgaacctgcatcgatgtctcctgggctcttcacactccccttgtaggatcctcctctaacctcctgttcttcctgggtttcctacctgtgttaccaaggcagacccaggcactgtccttgcctcctccctgccctccctccccatgc

SEQ ID NO: 67924 - DNA, 779 bp, Homo sapiens
taaagtataataataaaaaataaataaataaataattttttaaaaaaaaagcttttggaatcaactgtaaaaatggcaacccgcttgggcttccctctcctctgtggagagctttcttcttttgcttattaaactttcgctccaacctcaccttttgggtggtctatgctctttaattctcttggttgtgaaacgagctcggataacaccttagacaacgtgaccagtgaccctgacctatttcacaaatgccactgcagtgtaagggtcagtgaccaatactgaccctgcctacacacacaccatactctgacattttctaccctttttcggaaaaatgccagccctctgcctggatgtcatgatcacacatggtcacaacctaatttggaaaacaccagcatgaaagacctctttgctaaacagacaagggaggtaagggaggtgggtggcaaaccccacccatttgcttctgcacatcatttttgtctctcctgggccccactgtgtgcctggctctgagctggatcctggggacaccatcatgtgccagggagagaggcttccggtgtagaccagggtgtagcgtgaaccactaaccactctcctattagtttctctcggctgccgtaacaaatcaccatatatttggtggcttagaatcttacagctctggaggccagaagtccaaagtcagtgtcaccagggtgagaccaaggggtctgcaggccccgggaggaacacgtttcttgcctcctccagcttctgctgacactccc

SEQ ID NO: 67925 - DNA, 6696 bp, Homo sapiens
atgttagatacacgcacatacccagaaacatacacacagccggacacacatacacacacacacacacacacacacacacacacacacacacacgaatacactctgagcacagcatttgttatgttttgaataaatgactaactaaacatccattactactactcccaataaaaacacttattgcagctggtcacagtggctcacacctgtaatcccagcacgttgggaggctgaggcgggtggattacctgaggtcaggaggtctagaccagcctggctaacatagcaaaacctcgtttctactaaaaatacaaaaattagccaggcgtggtggctcacacgtgtaatcccagctactcaggaggctgaggcagagttgcttgaacctgggaagtggaggttccagtgagctgagatcatgccactgcactccagcctgggcaacagagatagactccgtctcaaaaaataaaacaaaacaaaccactgtgtgccaggcactgttccaagggcttatttaattttcattacaactcaataaagtagatagtaccatcatccccattgtacagagtagaaaaatgaggcttagagtggtgaagcaatttcctcaaggtcacacagcaggaagtggacgcaggcgctgggcttggagtctgaggtctgcactattctagtagtgaacccactgtctcaggaagcagtgaccacatcaaactgtctcccccacacctggagctcaaattccagaaggggcgacagacaccagagcaatcaataagtaaacaacactgtggattacaaagtgtccacaccagcttccctctggggacaagctgggctctcagagggtgcccctgctcccacctccttcatggagaatgtgagtcactccctccactcagttaggttggctccttgaactttcatctctagcaaacatactttcctctccctttctagttgctaagtataggggaaaacacagcaaaacacagggacctggggcctgtgattttaaggaggcaagcagggaagtcctcccagagaaggtgatgtttgaaaaggaggtgaaagaggtcagggagtgagcacgtgattctgggaacagaggtggatcagacatggcccctctctgcagggagctaccagcctggggatgatggagtagggcagtggggaacatggggtaaacagaggatcccaatccagtctggcgagggctgatggaagcaaatctagggactgcagaagcccccagggatataccaaggcaacctgagggtgtagggtcaggggcttcctggaggaggcgatgccagggagaatcactaaattattattattattattttgagactgagtctagctctgtcacccaggctggagtacagggacacaatcctggctcactgcaacctctgcctcccaggttcaagcgattctcctgcctcagcctcccgagtagctgggactacagatacgtgccaccatgcctggctaatttttttatttttaggagagatggggtttcaccatgttggcctggctggtctcaaactcctgacctcaactgatccactcgcctcagcctcacaaagtgcagggattagaggtgtgagccaccgcgcctggccgagaatcactagattttgatataatccatgagttggagttgggcaggacaaaggacagaaagcagaggtaggagggtggtgctggaagaaggcatggaacgggcaagccgcggcctggtctgtcaggacaggaggagcaggtcacagtggcagaagcacaaagggtaagggagggtccaaggagggaagtggacggctgaagcagaccatgaagaggaggctggaccacaaagcatcccaaatgccaggcagaggggctgcgactctgtcctgagggtgctggggagccacaggcaggctgggagcaggggagagcagggtgagctctgggtgcagaaaggcccctaaggctgggtagaggtgggctgagagggagagactgggagtgagggaggacccgggtgagggtccaggtgagacaatgacaccaagagacaatagggcaagaagggtggggggtggagaactgacagctttgggagaagggaaagagggtgggacagtacccaggtctaatctggtgtttaggaagctggcagggtctgaatcatttatttgttctgaaaaggacatcaacagacacatccagtgagacaggatgtaatgcagggagccctggggcactgcgggaggggaaggcagcaccctctggaaaggacagtagctgattcaacgcggccttcacgcttcccctctgttctctccctgagcacaccagagacatccatgtgccaggctctgtgctgagtgatgctgggaccagagctgagtcaaacgtgggcctgcaccatgggggagacggatccaatcccagacatgccaggcgtggaaggccagggctgggatggagagaagaggcccagggagctgtaggactccaaagatgtgacagtaacgaacagtcagagcagggaggaaaccaagtgttgggtcccaggaccccaagaggaatgtgtctcaaaagggctacaggtgacatccctgtcatgtgctgccagaggcatcattaggacagggggcattgagggagatgggagagcagagtctagagccagacttgcccggggtttcgatcgtaactctgccacttactggctgggagatctgacaggcctcagtttcctcatctatccaatggaattaataatacaaagggtcggccaggcacggtggctcacacctgtaatcccagcactttggggggccgaggcaggcgggtggatcacctgaggtctggagtttgagaccagcctgaccaacatggtgaaaccccatctctactaaaaatacaaaaaattagccaggtgtggtggcacatgcctgtaatcccagctacctgggaggctgaggtaggagaattgcttgaactcgggaggctgaggttgcagtgagccaagactgcgccattgcactccagcctgggcaaaaagagcaaaactccgtctcaaaaaataaaaataaataataaataatacaaagggtactgaaaggactgaatgggttaatctctgcaaaggacttggaacgatgcctgccacgtaagtacccgctaaatgctggctgctatcatcactgacactttcatgctcaagtctggctcctgtaccctcttccccagcccactccctaagcaggcaggggcagtatcagtgtcaactttgtgaccctggttttgcccaccctgaggcctccagggtgccaggccctgcgctaggtaatgctggggacacggaggtaagtccccaggctgatgggaaggacagacatggacagacagtcaccatcttcagtccagttcaggccaagcattgagagaaacgggcctgagagaccgtgtctgattcacctctgtccacaccagcttccctctggggacaacaagccaggcgctgagagcaccctcccccacctctttcatggagaatgtgagctacccccagctcagtcaggttggctccttgaactttcatctctagcaaacacacttctctctccctagctagagcctcctggctcaccctgtggctatggagggtggaaagcagcttctggggccccacaggaccctgtctgactccctctatagcacatttcgggtaatataagagtacaatggtaagtaatgcagcctagtgggtgaaagcagtcagaggaacctggatagaactctcggctctgcccttctctagctgggtgacctctctgtgcctcagtttctccgtgcattaaacagggaccgtgacttcttccagtgggtaagaaatagagaaagcaactcactctgaacagttatcaagagagtgaatccagaacgagggaaaagagaacatggccgtgaccccggagggatcggatgttagaacttcactcttggatttttgccctcaggtgactttgacgtttgggggttaaagcggcagaggtcgggggttacgagaagacccccacccagtgtgcgctcgtggccccggaagcacacggctgcgggactcagggatgtgggagaggggggcccgatcaccttcacggcgtagtcgatgaccctcttgacagctacgagcacgcgcagctccgccatcttcccgccgcagccacttacagggtcagcccgcaccctcagcggctcagtccagaagccccaccacccccgccccccgcgcccctctctgcgcctgcgcgcagcacggtcagccagtcaaccgctgcagagcccgcctccccgacagaggaccaatcgagaggccggaaggaagggaggtgtggcaagcaatgcaaaccaatgggaagcggatctcggggagcgagcgggacctggagagagaaggaaaggcctggcggagagggcagggcagagaactaggggaaaggtcgtgcactggagggaagcgcgcccggagtttatagatcctcccggtcctataaacacttcccggtatccccggatctgctctccctctccagatcccccacttcttcccggcctctccaagtcgcggtactcgtattcccacgcctctgaatcctcgcgcgtcggtctctccactctctccatccccgtgttccctgtcccttccatatccgtatcctcccctgtccgtgtctctacttcacctccatgtcgtccccacagcctctccacaccctctccaaaggcccacgtcccctcctggccccgcccctcccacatgtccctgttcccatcccaatccatggagacttgtgtctccatgtctgtgtctccctgtctccacgttccctatgagttcatgtccttatgtcttccctgagcctctatgcaaccccgtgcctgcgtccccacgacccgcagaaaagcacgcggagccgcagcgctaaaaaaagccgttcctttattctgccccaggcaggctgcagtcacagacacacggggaatccactgatggcgtcggtgctctgcatgatcatgtctgccagcagaaagcagaagcctggggggacgggggtgcggagcagggagaggaaggtgggccctggggcggatggccgggagggccccggggactggggtttggggctccaagggggtctctgccgggtctgcgggagtcgttagtgtgttggggagtccccgagaggtccccggggtttcctgggagggcagctggggagcctctggggtgagggtcttctgggcagtctcctccaccctcttcccgctgtccagtttacccgcgagaattgagaagggtaaggccagccacccagaaaaataggaccaagagaagaagacgttgttcttccacgcattcttcacggtgtagcctatcaaggcggtcagcagcagcagtcctgggccccgcccagccgcaagatgagctagctgggcctggtgggggctgcacccaggccacgccccttcagacccgcccccttctatcagaccacgcctatcgcctctcagcccgcccctggcccaggccccttcctgctcctcccgctctgaactctgtctcgagccccgcccacctctctcggcttcttccagccctgcccctcggatcctggccgagtacctcaagcccctcccctggcgaccaggcccctccatcacccagggcccgcccctgcctgcccgcctggggcggtctgcagtctcaccgccgaggaagaggaaggcgctcgtggtctggccccgcagcgactcgccctcgtcgcaccgaatccgcagtcccatcaccatgcccaccacgccgacacccaccgccagcaccatgcacgccacagtcaccgccagcgtggctggggagagcgggcgcatcagcccccgcgggcgccgccccagtcactacgggttcggccgcaaccggaagctctcccgtctcctgcccccaacccggtgtgtggccaggagccgagctccaccgaccgggagtcaggcgtttggattgagacttggaggtcacatcaggacctgcggttactgccgctaccaggacggggagggggtcggggacaagcccacaagtcgaggggcggggttcgtggcggcctcggccgacaagggacagctgcaactgagcccggggtggaaggggtgggcgtctcgccatgggcccagctgtgtgtcccgagccctgggggtctgaaatgccctctgacatctgggcgggcggagcctcactctggcaggggatgctggagcagatgccgtggttgcattcctgccacaggccactgtggccctcttgttggcgggtccagtagttggtggccgtggagagcaccatgaggacgttggccacgaggctgagcagaatgcccccactctggaggctccgcttcacccccatgccactgaggctgcagccgggggccacaagggcaggatgggcccaggcctttcctaccccgaggcccccagctgaggagcccgcttcctccacactcctcccctggtactcctgcctgaggtccctgcttctggggacctggagacccccctccctcaacaaccctgcctgaggatccacaacctcctccctccagacctcgttccccttactggagaccttgagacttc

SEQ ID NO: 67926 - DNA, 550 bp, Homo sapiens
cttgttcttttattgcttctcctattactaagatcaggatctgacgccatttggaaaccagggtctgaccgcttaccacgtacctcgccctttaaggctttttctgtcccgtcccccgtgcccctgcggcgctaggagactggaggcgggaccttgtgtcgctaaggaaatgccctttactcagcttccaaaattgacaggctagttctgaaaactggccaaccaacttctgcttaaggggaagcgagacttccgatttgtaggggaacgcagcggcgattggttagagtcccgcccacttgttaagcgtcgcgagccactattctcggctctgattggccagagaactcgcgccgcttttgaatccccaccctgcggaccccgcgcgcctcgccttctccctctggttggcgagcgcctttctgcgccttcaggcatttttgctgaggcttttgtctgcgcatgtgcgggtaggttccggtagcatccgggagacccggcccaggcctggagatgctgagcggagcttggagggagagaggggactggg

SEQ ID NO: 67927 - DNA, 1271 bp, Homo sapiens
atgtccccattttacaggtgtagaaagcaaagcttagcggagataggaaacttaactgagatcacgtggcaggtaagtggcagcattaggttcaaaccagacagtgtgaccaggaatcccccctcttaaccatggtctttcctcaaacagcctgtacagcctttgacccagcagtcctcagtaatttgggggcagtgcacaagaccatcctcacttctaactccagcttcacactcaggggtcccctgatcaccttcagtttcgacagttcacaagtaggactcacagaactcactgaaagctcttattctcatgttatgtctcattacagcaaaaggatacagattaaagtcagccaaggggagaagagcatggggcagggtccagtgaattccaaatgtgtagtttccagttgtcccctcccagtacaatcacagacagcagtaattcctccttacatgacgtgtgacaacatgcatagagtgtcaccaaccagggacactcacctaagccttgatgcccagggtttttattgtggctttgccatgtagatatggatggctgttcacatggctgatcttagcttcagctgctctagagatagagctgacaacagtgacccaaagtccctaccattagtcatattattagactatttggtggtcatattattagacgaatataactatttagtcatattattatgaatattagtcatattattgggcaaggcactaaggtaaataaagacattcctatcaggtgagatattccaggggcttagagttccctcccagtagctgagagcaaagtccagacctctatttaagtagggttgagttctttcctgtgcaagttcacctctgggattaatcacggatctacaaatgggactaggcaaaagctgttcatgctgctgtgtacaaaaaaaagtgggccaggcatggtggctcacgcctgtaatcccagcactttgggaggccaaggtgggtggatcacgaggtcagagattgagaccattctgaacaacatggggaaaccccatctctactaaaacacaaagaattagccaggcgtggtggtgtgtgcctgtagtcccagctacttgggagggtgagacaggggaatcgcttgaacctgggaggtggaggttgagtgagccgagattgtgccactgcactccagcctggcgacagaggaagactctatctcaaaaaaaaaaaaaaaaaaaaaaagaactctaatataaactgtgggctttgggtgctaat

SEQ ID NO: 67928 - DNA, 1344 bp, Homo sapiens
cagttgggctggctgacattgatctcagtaattgtgtttttttcctttaacttgattatatttttttcattcgcctctctttaaatgaagtgtcccaagagccctaaattctctcttcaggtggtcgcttggtaggttacttcatcaataggttcatccaggtatagagagcaatggtgtaaggataacaaagatacaatttctcagaaagataacattttcaaaagtgctattaaagacagtgagttgttcagcaattcaggaaaaaaaagtctttaaatcagagggaaaaatatagagaaaaagtatttttcagaatacatgtcagtttctcctagaaatatatatacacaagtattgaataggtcccctgccaatgtaggacccaagacttttactctgtgacattccatttgtccttggctgtacggaataaaagccctttgacgatggcggcctccaatatcataatccgtatgggtgcggccatgccgtcctccctaccaagtttctgaagttgaatgaaccgcggaataaaggtacgccgttatacgccatgataactgttggcggagcgtagcttcaaaagtgttagtgggcatgcgcgcggttcaacagcgcctacggaaatcctaacgggaatgtaacccaaaccggaagtggcctagagcgaccatttagcttctgttgttaagtggatctaagcctatgtcgcttactggacgctgaagtgattgggaatattagcagtgggggttctgtagggtcaggaaggggcggctggctttgggggagtgatgaggggcttgttgggggtgggggtgcgtgataaagggatttctcggctgaagacgaggctgtgaggtgagtgacgggcttgttttggctgagcgatgaggggtttctggggtgggtgatgggtgctgtggggtaagtggcgtttgctaattttagttggataattagcctgttaattttccctcttttcttgcttattttctgcttgtagtatttttgtgacttaaattccaagtgtactttaatatcggattttatattggtccacgaaacttgctaacttgaggacagtgaacgtgcatcttaagagcgcctttgcggatggtgctggaggacgttcagggaagggattcactgtccgtgggactaggggagtcagtgattgattggcagccaagagcttcagaggttggaggactttgaggatcacactgtaacactctcaggggaccagtgatgggcaacctataggaatcagtagagtggggttgccaggggtagcctatggcagccagttgactggaggcgtagggggtcaatgatggg

SEQ ID NO: 67929 - DNA, 992 bp, Homo sapiens
agacgattgtgcgtaactgttcaccgcgtccacgtcccgagagttgcgcacgcgtggagatctgcaaaacgctccctttcagctccgcgcatgcacagagaccccaccccgcaagtccttgcccttcggcctgggcaggcgtccactcccatggctgcagggcgcgccgaagagcccactctgcatccccgagacgcggcccaatcctaggaatgtgcttagcgcaggtgctatcttcccttttcacattcccaatctctttctccgccccctcaaactcttgccatactcccacaacagcagaaaatctgaaaaaaaagtccatcccatctttgcactgacagcagtgcacagcagctggcagagaattctggcacggctattgtgcttgcgcaggcgcagacgggaagcgggccggaccggcctagtacactctgggaggcgtgcgcagaatgcgcagcgctgccgcgaggatctctgggaactgtaggcccagtttgtccgagagccgcaagtgtttcgggacgacgcaacgcaggggcacctgggagtcgtaggcggatgggcccaaagccttccgggagtcgtagtccttccgcccgctcctcgtttctttggaggttggcccttccagctccagttctgcccaggtgagcgcccatcccgcggccggccggtcctggccctttgtcgcgatgacgtggcggagttgagggtctctgtatttctctcccccgcgttctggtaggcgtccctggaaagatggcacccttttccgtgatctctcaatccctctctccgggtgggagtgctctaagcagctgttgtacctgctgacccgctttggattctgcggcccagcctgacaccttctcactctcgcccttcaacctgggtgcagtgcgagtgcaccctcctctgtcctggttacaacacagagtggtcagggctggcccagggggtgctcaggaggctgtgggaacacagaggag

SEQ ID NO: 67930 - DNA, 1476 bp, Homo sapiens
aataaggcaaacgccgaatggtaaccaatctcactgtttctggacctcgcttccgattcctgtatgtcactttaccttttttgtctataaatttgttctgaccacgaggcacccctggagtctctgttaatctgctgtgattctgggggctgcccaattcgcgaatcgttcattgctcaaggaaactcctgtaaatttaattcggcttcaatttttcttttatcactgatttgagtaataataaaactccggtctccccgcacagccggctctgcatgaattgctctttctccattgcaatttccctgtcttaacaagtcggctctgtctaggcagccggcaagggtgggcggttatagtttcacaactcaaccccagccaggggcctgggcttgtaaaataccagattttacaagcctctgagccccacatgcctgggcctccccgaaacacttaacacacatccccgattcaccccaaaacctacaccacacaccctcgtacgctgcccagcaccccggcttcatcaccgactttaaactgcagcatttggagtgataataatggcgtcggtgataaagccggcgtgctgggcagcgtccccctagagttctccatccagtgatccagaggcctactaacagagtgaccctcagagaccccaaactctgacgccgagtctcagtcgctgaactcgacagacctttaacgcccgaccacaagaactctcccacgccggaccgcaaaggcaccccaacccaaaggctccaccgcccaggccgccagctctccccacaggctcctcagaagctccctacccctttaacctactccacggagagacccaaacactcacctgattttcttctggctacacctaaattccctgaatgcttcctttcctggcccttaaaccccggcactggcctatggcggcggacgagggcgcgagtcaattctgccgcgctaggacgatgggacatgggcttctcttcgaggaggtaacatgtccgcgccctgagccacggctctctgggcgcggccatcttggtagatctgccgtacagaagggaaacagttgttcttgtgtcattaaaccgggatgactctcctgaaagcaaaaatttgaggcgcaggagcattttctagagtttatctgaacaaacagcaattcatgaattaggaagcatcaaaccaaaagaagtctcgcgcttctatgcttaaagcattagacacaagtattcacagggtgagtgaaggagtaaaacaaagaaattatttgattagttacaattataaaaatgcatttttttaaatttgccttggaaagtccctaatgacataatagcatgtgagttgcctacttttgatcggttgagattgagttttgtccttccctaacacaagcatttaccagaaatgactcaagtgaattgttgcttatgtttgcaggttaagcaaggttaaggctgtttt

SEQ ID NO: 67931 - DNA, 1662 bp, Homo sapiens
gcagcctggaactcctgggctcaagcgatcttcctgccttggtctccccagtagctgggactacacgtgtgcgccatcgcgcccgggcttgcacaacttttcattctcccagagtcgccttatttattccttccagaattttaggcacttggttctccgaaagccccgacgttaagattgactccacctacagcagagggaaggcccttcttctctcttaaggaaaattcccgcctcccgcattggattccttttccggttggctggtggctgctctctttacctgcactgggcggtgaccgtgtccctcaaatgtaaatgaggttccaggggtcgctgttttttcactttccgttgacggggtgaacaatatcctcgtacctcgattgcctctccacacccttttggtcctcaaaaatcttcctcttgtcctccacatgtagctagatgcgttttcgcggtatatgactcagggtgcgattgctctttttcctctgtggagaaagcgttttcacttgtacggacacctaagtgttaagatggccgcgcccattgtgtcattcccgtcattctttgtgcaaagcggatgacttttctccccagcccgctaaggtgcacgtagccataccatgtttgtcttggctaagctcgaccctctgaaaataaatgaaacttgggcgcaggatttaggtgccaaaatatggagttcttcaccgtcccgcgctatccctgaatacttgggcagaaaaggtccactttaccttccgtacgtgcaggattcaaagatggctgcctccagtatccgtgacgagaggacgcgaacttactacctcccagtcgtccgtgctccgtacacctgcaacttcagaccttcctcggccgccgtaggccggcttggaggctgggggagggcccagaagtggaataattcaggaaagtgcaggttctgggaagtctcggtgggttccccgcaaaatcaggtctgtgtgtgggtctgtctgtcaggatgaggggaggagggtgtctgtgggcgtccgtttagtgcggagccgtggagtttgtgggggaagcgggagcaagtgggagtcggggtattggggttggggcgtctccggagtcagccctgagggatcccagtggtcggtggtcagagtctgtccagagcaacacttggaagtccgtgatcagggtttggtgcctttgcgggtcactctgtagggctcggtgattgaggactggagtgaggagtggtttttgtcaaggaaaactgtgtctgcttcggattcggggttttattttttatttttgagacagggtctcgctctgtcacacaggcttgagtgcagtggcgcaatcgtggctcactgcagcctccatctcccggggctcaggtgattttcccacctcagctttcccgagtagctgggactacaggtgagcgccaccacgctatctatctatctatctatctatctaatctgtctaatctaatctatctatctatctatctatctatctaatttatctatctaatctatctgtttattgcagagacgggggtctcactatgttgcccaggctggtctccaactcctggcctcaaacgatcctctcaccttggcctcccaaagtgctgggattacgggcgtgagccttcgctcc

SEQ ID NO: 67932 - DNA, 1347 bp, Homo sapiens
actccgtctcaaaaaataaaaaaaataaataaaaaataaaagaagtgaatgcagaggttggcaacattttcgattttgccggccacgaggtctctgtcacaacaactcaaccgctgcctttgcagccatagacaatatataatcggagggtatgactgaacttgaccccccgatctgtaaatagccaccccaaggatcagaagagtagatatatggtttcgaactaatgctgggggctgtgtcgccttttgccccagtaaccgaggttcgaacctcaacccaggacccagggctccaaagtctcgaaagcttcagccctcacaagcctttgtaccacagacactggccccatgcctcttactcatccgaaccacggaccagacactctacagcgatggacatcctcccagactccaacatcactgagttccaaattaaatcctgaacccgaagcagacgccgcatcgatcctaatcgccacctccatcctttacaagcagagtgatccataccttgacagttaggacacggccgttgatcactacagacccttagtcactgtactcacaccaaaggcacgcggaccacagacagggggatcacagactcccaccaggtacctcccaaatgcctataccccggcgctccccagtcttcctgccaaaaactatgtggtccagggtacaccacgtcctcagatctcccaaaccttccactgagacaaaacctgaactaggacaaaaaactttcagggacaaaaccacacactgacctctattttctccagatacacaagaagggcctcaacgttacacttccgtaaactgctcctacttctggagtcctcgcacgggtttatggtccacctacggcggccgaggagaacctaaaatgtttaaaagagcaaggacaagcgcatttacggcatttcctactctgtaaaatggccgcgcccatagccgtggctcctgacggcagccatgtttgaaaattggacgcacagaaggcagtggcaggtttttgagccaggagccagggaagaagagaagtcactgaaatcgcctcgtttcctggcacttaaagtcttgcgaaagggggcagattttcagagactcaggctttatcaggcaaatatggggcaagctaaattgcctttagcgcttttccatccactttgttaaatttaaaaaaaaaggttttgaaaaagacaagtaacagtgcagccaggtgtaggtatcccagagaatgaattggaaatggaaaaggtaacagatcaggtagaaagggaaaaggcaacacatcaggtaggcagacacccacgggaaagcgtctggcgaaaattagctt

SEQ ID NO: 67933 - DNA, 1289 bp, Homo sapiens
gacaacaccaaagacaccagaatgtgacttgggcactcagtagcggatctctagagatctttaaccacaaactacacgaggaccctgtgactggtcccagaggtaccccgatcacacacacacacaccctatcacggacctcttgtagttcccctgcgataggaatcggacccacgctaagctcctgaaagaattccactggcgtcgccaaacgctggcgccgacagataccagtccatcaccactgtccacgaacacgcccagccacggacagaatttcctcccccgtcaccacagcgaccacccagtgactgaacttacttcccagaacttggtgggctccggcctcatctctcggcctcctcagtgcctgacggcgactatccagggtcggaggcgttcccagcgtttgcgcagatgcaagatggccgcgccctcgtcgccttggctccatgggggccgccatctttgagtatctgacgtacacaaggcaaagggcgcgttttggcgctggtgaccgggggtgaccgggggtgaccggggatggccgggaagatgaaagagcactgaaactgtcccatttcctggcacctcaacccttcataaatacgggtccatatacagaggctccagtttacacaagacaaaaatggcgtggaggtaaatccctttcagcagctgaatagaaggctaagatggccgcgacgtttacactttgtacaaaggttaggaaacagttccttgtgagggaaaaggagaaccggccgagaggggacacttcggccaaagccagatttctaacaaagtagcttgaagcgccttttgaacgcagaagagggctgttagctacgctgacggaacaggggtagcagtcacagactaggtaatgaaaacggttggaacgtgccaaaattatgttgggtgaaaggcatggggaaaagccagtaaaagccagaaagtatagttcccaaggcggaggggagagcctgggacccaggtggagccaaatatgagggctggactcaggagaagtggccagaaattaagggaacaggaccacttcagtgagaaaaaaaaggttgggaaagaggccgggcgcggtggctcacgcctgtaatcccagcactttgggaggccgaggtgggcggatcacctgagagcgggagttcgagaccagcctgaccaacatggagaaaccctgtctctactaaaaatacaaaattagccaggcatggtggcgcatgcctgtaatcccagctactcgggaggctgaggcaggagaatcgctt

SEQ ID NO: 67934 - DNA, 1563 bp, Homo sapiens
taataatataagggtgtatatataagaatatgataatttaaaaacgtatgaagcaaaacagaatgagagaggattagacaattcaacaataataattgaagactacattaccctacttgcaataataaagaaaacaaatagaaactcagcaaggataccgaaaacttgaacaacattatcaaccaactagacttaacgaacatttaacactgcactcaacagcagtaaaataaacatttttttcaagagcacatgttatattcttcaggaaagataatatcccatgtgatagcctgagatagggcctcatgggaagggaaagacctgaccgtcccccagcccaacacccgtaaagggtgactcacaagggccccagacccagacagagtcggactcgtcgctgatttcctcagactcttcatccctacagccaaaggacccgtcattaacgccccgcttcctcagcgactgcgttcaaatacagccccaatcaggacgctccacgcaccatcggtacacagacccacaggccgcgagtccatgcccagaactcgactcacccgagcccgaacctctccagacaccactggcagcgacaaaacgccgcatccacgtccgaaaacgcttcctattcagacgcgctcctgcgcggactccgggaagctgagcggtaaagaccgtgaagcgaggcgaggaccacggagcctgcccgggatcgcgagttcagactgcgggcgccgctctatgaggtcacagggctgcgcccatcgcagcgtttctgacaggagcggccataatggctgtgggaatcactcttagtcacctcagtgcctttctctcttcgttgcaagggacactcaagagtcgggtgcccagccaaggccaacacggcgcagtggcattctattcagcctgctgtggaaaaaagatggcggcgccctttgtgcccattatagctgagagtggagccttagctggagcaccatgggcacggccatcttagaggaaggcagcagccgtacggcagagaagatgctcatatccaggacaatttggaaaaataaacaaggtttgaagaagtcacggtgctggccaggaagcggtcacagagttgccaaaaccagtggtcactgaaagtgttagatttggggatagggcgggggttctgggctgggtaaggcttttgtgggttagattagactctgactgaatggacgaagccgagaacaggagtgatgctccattaaatgctaatacccacatggggcttgctattaaaaccactgccagtggggaaggggatgaggaggtgaaggtgcaactgtgttaatatctacatgtttccttccagaagtaaaggaagatgacagtggggcacttaagaatatgaaattattagaatgcgatcatcctactttgcaatgtttccagattttttaaaaagtcacacttaaaaaatattagttctatttttgcagatgttggcgttgtaactgtagaagatttaagtaaatattgtatttttggaaggcaacctagagccaatttaattttttcgttttc

SEQ ID NO: 67935 - DNA, 1656 bp, Homo sapiens
acacacacacacacacacacacacacacacacacacacacacacacacaaaaccagccagggctcttgtgaaaagacttcggctttcacttgtctctagacaaaagaccaccaccccgccagataaaataggaaaacctggaatagacacacacgtacactggattcccttaatgattcatcaatcactaagcctcagattaatccagaatgtgaaacagaagtcacattcgttgacaaaagccaccccatcgattctcaatcactgagccccactggggagtgacccgcgaggaccacaatccctgacctcagtactcttggtcgttgatctattcaggcctttaatcactgaccaccagagcctccatgagggaccccaaagatatcctatcacagacacccaccagggactcctaccagctcccctccaaaaggaaacacccgcccccgcctcccccaacccccgcgctacctccaccatatagcgccaccaacaacgcagacgccctcagaaagctccctcccaccacgtttccacgccctgacccacacactgacctgactctccttggaatcgccgcgacctcttaaaagctgaacttacttccctaaacttcttccacttctgggcccctcgcccaactccctccccctctaaacctccagagacggtcagccgcgtttccatggagagcggaatgcggccttccggcttttcctcaggaggagacgcgtccgcgccggcgtcgcctcgccgctctgggggcggccatctttgagtacgtgacgtacagaaggcacagcggccgggagacgcggtggacggaggcctcttaaactgtccgatttccagacacctcagccctggcagaaaatggagagcttatcagaggcttgagttcacacaggcagacacggcgtgggggtaaagtcctctgaacagacacggaacagaaataagttagtcttctcctcgcaggggacagtgaacggcgcaaacttctcaaaggccagaacccattattaccacaaaggcgcggcatcccttcttagcggttatgatggctgtgacgtctcagctcaatggaaaattaaagtcacctctgggcacctcagtcactattgtaaatgcgaagcgttttagaagccgtataaaaactgaagcaagagagactagaacaaaaaataagcgagcggtgcgttgcaggtaacggagccagagcccttaggggagagcatcatgggggcggccatcttaggggacgttcggtgtccgtacggcagaacatattctctctgagaagcttgcggtggaactggcccatggaaatgtctttagaagagaagaaccacctggctctgttcttgactctggaaaagaatccttttctagaattatttaggttgttgccagattaatttcctttagagagtttccttgcccccacgacttcctatctttaaagccaacaatagtatgtgaaatccctttcatatttgaaaccactgactattgctgctgcatctctccggtttctcctattcttaagtgcttgggcaatccagaataatctcccaatgctaaagtcagctgattaataaacttaattacaatgcagagtcctttttgccatgtaacataaccatgggaatt

SEQ ID NO: 67936 - DNA, 1352 bp, Homo sapiens
gtggttctccctctactctgcttgtcacccactgccctctctccctctctttcagtcccagcaccacgtagctctgtcagccgcggctccaactctttcaccttctccccactgtctgtctgtctgcagtgcctcctcctttgccgccccactctattttgctgcccttcatctctctgaaggtcccctttttttctaaatttctctgtgtgcttttctccccctgctactttttccatccgttctctttcactcttgctctctttgcaagtccctaaagtatcatccattttgccgtgtatttatgggtctccctcattcttttctcctcagtttttccttttgctccgtcgttccccgtcttttcctctcctgatccctctcacccacacattcgggaggaaaggggaggaataggatgcccacctcccggaagagcacattttccagtggagtaaaatttgggaaggaagaacactgggtgtcacaagacagactcaggtaacctgtcccaacggggagtcaagaaaagcagtggctgtgaaggggaagcctggggagcggaaggacccggcgtgaggacgacacgaggtggcgcggagaacgatgtctcacgacagggagggtctgcagaatcccaggacgtgggaggagaagcggctccttcaggagccggacagtgggcgctcccctccaggggcagacgacggaggagctcggggatcgcgaagggcgctagtccacatcccgaatgaggactcgacttggcgcggggcccaagcagagggttttaagcgggaacactacctgaatggggttgtctacatggtcctaaggaagaaaggcagagagcaaggaacggcctcagagagattttaaaccgaaagggaagcaattctcctacttacttgggacgaaggggctgttgcgggtattttaaggtccgtagcgatccccaggtcacgggtatggagaaccgaggactgcgaagtgcacgtttaatcaaggtagacgaagagaagcaaacgtttaatccaggtagactgaaacacactcatagcgacgtggcctttccccagcgcgatctgcttccgggtgtgcaggaaactgggcgcggaaagaaaaactgggcggcctgggggcggggcctaggcggggcgcgactaggaaagggctgggcggaaagactggcctgacttgggagtggcccgaaagggtggtgggaggcccagggcggtagggggcgtgactaggtggggcttggctggaccgaaaactgggatgaagcggggcctccaggggtgggcggggccgaggcggggcctgttctccactccgcctctcacccagca

SEQ ID NO: 67937 - DNA, 1803 bp, Homo sapiens
ttctcccctttctttattccctcttttatgtctattctgcccaatgcttcgaaatttatttcacctcttgttgctctttctccccaaactttcccattgtccccagccgccacgtattcctgcctcttttcccccatctgagctccctgtctgctctccctgttaaaatccctcttccctgttaaattcccttttccctgttacatctcctttgttcccactctctagcacccccaacttcctaggcttcctccttgctgtggttctccctctactctcctttgttacccactcccctctccttcagtcccagcaccacgtggctctgtcagccgcggctccgactcttaccttttccgccccccgcgtctgactgcagtgcctcctcctttgccgcccctctctattttgctgcccttcagctccctgaagctctcccttttccctaatttctttatgtgcttttctccccgtgctactttctccatgcgtcctcttgcactcttgctctctttgccagtacctaaattatcatccattttgccgtgtactcattcttttctccccagtttttctttctgtcccgtcgctccccctcttttcctctcctgatccctctcacccacacattcaggaggaaaggggaggaatacgatgcccacctcccggaagagcacattttccagtggagtaaaaatttgggaaggaacgacagtgggtgtcacaagacagactcgggtgacctcctgcaacgcggagtcaggaaaagcagtggctgtgaaggggcagcctggggaggggaaggacccggcgtgaggaggacactaggtggcgcgcggaggacactaggtggcgcgggggacggtgtctcaggacagggagggtctgcagaatcccaggacctgggagaagaagcggctccttcaggagctgggcagcgggcgctcccctccaggcgtcgacaagggcgaagctcgggggtctcgactggtgggaatccacctcgcgagggaggacttgacttcgcccggggccgaagcaggggtcaatgagagttttaagcaggaacacgacctgaatggggttatcgacatggttatctacatggcagaaaggcagggggcaaggaacagcctgagagagattttaaaccgacagggaagcaattctcggacttacgtggggagaagtgcctgttgcaggggcgaaggggctatgggtattttaaggtccgtagcgatccccagatcactggtacggagaagtgaggactgcaaagtgcacgtttaatccaggcagacggagcgaagtaatgtttaatccacgtagactgaaacacacacacagcgataaggcctttccctggcgcaatctgcttccgggagtgacggaaactgctagcggagagaaaaaactgggaggccagggggcggggcctgggcgagccgcgaccagcaaggggcgggtcggaaagaggggcctgactcggggagggaccctgagagggtggagccgggccggagcggcagtgggcgtggctaggtggggcgggacggagccgcggcggaggatggggcggggtttcatggggtaagcggggccgaaatagagcctgttatttactctggttcacaggcagcatgtctttggttttctgactacttcttgtcctgtgaagcagcgttgctgcctgcctattttaagttaatgtttcaaaatttaaggttaaagcttaaagttgtggtccacttatattagaaactaagatgatttcttaacaagttgaactaagtcaaaaccgat

SEQ ID NO: 67938 - DNA, 1290 bp, Homo sapiens
tgctgtctctttgcaaatccctaaattatcatccattttgccgtgtatttatgggtctccctcattctcttctattcggtctttccttttgctccgtcgctccccttcttttcctctcctgatccctctcacccacacattcagtaagaaaggggaggaataggatgcccacctcccggaaaagcatattttccagtggagtaaaatttgggaaggaagaacactgggtgtcacaagactcaggtgacctcccccaagggggggatcgagaaaagcagtggctgtgaaggggaagcctggggagcgaaaggacccggcgtgaggaggacacaaggtggcagggggtacggtgtctcaggacagggagggtctgcagaatcccaggacctgggaggagaagcgactccttcaggagccggacggcgggcgctcccctccaggggctgacgacggagaagctccggggtcgcaacgggcgggaatccacctcccgagtgaggactcgacttggcgcagggccgaagcagaggtcagtaagggttttaagcaggaacacgacctgagtggggttgtctacatggtcctaaggcagaaaggcagggagcaaggaacagcctcagagagatttttaaaccgaaagggaagcaattatcagacttacttggggcgaaggggctgttgctggtattttaaggtccgtagcgatccccaggaaacgggtatggacaagggaagactgccaagtgcacgttcgattcaggcagacggggcgaagcaaatgtttagtccaggtagacggaaactgacgcgcagcgctgtgatcttttccccgcgcgatctgcttccgggtgtgcaggaagctacacgccctgagaaaaaagactgagagacctggggcgggagaggggcctgggcggggtgcgacccgcaagggaaagggcagaaagactggccagatttgggaaccctgaaagggtggggcaaggctgatgcggtagtgggcggggccaggtgggctaagcgggacgggcggtgtgggcgggacctgtttggtgggcggggcctgttattcgctctgccttccacccagcaagtctttgttctcccgatttaggagtatttgtgactatttcttgtcctgtgaagcagcgttgcttcctgcctattttaagttaatgttttagactttaaggtcaaagcttaaagttgtggtccacttctgttggaaactaagatgttttcttcttgtcaagttgaactgatttaagtcaaaatcgatttttgcgagcc

SEQ ID NO: 67939 - DNA, 2704 bp, Homo sapiens
ggaaacaaattcgaatacatagtcacagcccaggctctgggattgagagacagagagagagattggattggagagagagagagagagagatgggattggagagacagagagatagatgggactggagagacagagagaggggttctgtggctctggaagcctagagaacagagcctgaagacagagaggaaagggagtaaaggggaggcatttatgcagagatctcagaagtgaatatgaaaggcacccctagcagaacgcacagcttgggcaaggaggcttgctggcatgaaaacgcaagaagtgctcaggcagctgtaattctccaggacatcagataaaaggtaaaaaacagatgggagacgcgcctagacagggtattgaataccagcccgaggggcttgggtttcatccaaacagcaaggcaactgagctcaacacagtgagactcggtctccacaaacatttttttaaaaattggccgggcctagcggcgcgcgccgatagtcccagctatttctgcaggctgaggcgagaggatcatttgagctcggggaggtccaggcggcagtgagccaagatcctgccactgcactacagtctgggcaacagagcgagaccctgtctttaaaaaagtaaaaaaaaaaaaaaaaaaaaaagaaagaaaaagaaaaaagagagaagggcaagtcgctcccttctctgggccttggcataaatcaagcacaaatcaaagtctcactccctcctcctgccgcgcaacggcgcggagagccagccagccagccagcggaaccacggcctggtaacccaaaacctgcacaccctccagctccccacaggacgtcacgtattaccaccgacgcacgcgcagaagccttcccggggactcaagaaagggcaggcttagcctcctccccatgtcgcccctcattggctagaaactactgctcgtctcggtcgttgttagcagcgaccagggcgggtacaatcttggtcgctaggacacggctaacttccgctttcttccccctctcctaggctcaaactagtcaaatcttgttcactcgaccaatggcaaatcggaagtgggcgggacttcacaagtccggaccaaagaaacgcgagcttagccctgggtagcgcggccaatggccgtggagcagcccctgtaaactggctcgggcgcccccacgcccgcccttccttcttctcccagcattgccccccccacgtttcagcacagcgctggccgcagtctgacaggaaagggacggagccaagatggcggcggccgacggcgacgactcgctgtaccccatcgcggtgctcatagacgaactccgcaatgaggacgttcaggtccggaggctacgggggacttggggaagacgcggaggggtacctgggggcacgggcggccctcgcggagaagactcagcgttcgctgggagtggcggaagggggcgacggccaatcagcgtgcgtctcttatctccccggttgcccggactccttgagacggcgctcccgattgggtgtcggcccagtggagggcgggggccagcgctagcctcgagggtcccgggcctgccctgtgcgcgcggcggtccgcggtcctgggaggttgtggccagggctggggtctgcggactgggtctgggagagaggaggactccgtgattggcggcggcctctgaatggcctcttggggatgtggggcgcgcatgacttgctccaagtaggggagggccgccgggtgggtcgggacctgggaaggtttttttgttttctgggtttcgactgctgggccaagtggggaccgagaggcgaaggcctgccatcctaattcctgctcttcctccgcctctcattttggtttaggtgtcctaagaggacggggacgcaaaaacacccccccaccaaaggtggggactagccaagtttaggagcgaattaggttgtagaaacccgcctccccatctccccggatcctcccattgaccaggataggggttgagggatttgctaagcagatgaacatttatttatttcttttttttgagacagtctctgtgtcgcccaggctggggctggggagcagtggcgcgatctcggctcagtgcaacctctgcataccgggttcaaaccatcctcgcccctcagctccctaattagctgcgattaccggcgcgagccaccacgcccgactaatttttgtatttttagcagagacggggtttcaccatgttggccaggcttggtcgggaactcttgacctcaagcgatccacccgcctcggcctcccaaagtgttggaattacaggcgtgagccaccgcgcccagcccggatgaacattcctggttatgggatgaggtgacccaaggctctgagccgggctggtgtgggattgagaacagttagaactgcaagtccacctcccacctgctgtgtgaccttgtgcaaattacttcaccgctttgggtctctgtgttccataaaatatgggctaattgtagtcctggtcttgctggagggacttgtgagggactgaacgaattatgacacaaataaaaagtagaatggtgtcaggcctgttgtaagggctcgataaatattagctgtaattattgggagtggtgattaaagaggtcccatcctccctttaggtctgttttcccatttataaaattggacaaggtg

SEQ ID NO: 67940 - DNA, 1630 bp, Homo sapiens
tctgtggggcgtcagcgtgaaattacacattctgcacaggttgagtttgcatattgtattttagtttgcattcctttcacagacaatttaagggattttcaattaaatttctaaattttaattgaattccttaattttaattgtgggaactttcctggatccaaacaacagacgttgaccctcctagtgagatcccaggtcacaaaccgtggagcggctccagcctgactggcaagtgtggcttgcaaaacgcggaaaaccgagacacgcccagagataggaggagggaagtgcaggccccgtccaataagtattcaggccccgcccgccacgtcgctggccacgccccggcccggcctctccgttcgcgcgcagccgcctgcagacccggaagtggatggcgtggagatatggcgcaactgcggcgcgtgagttttcctttgtttagattaagtgttcgcttagcggtgccctcacgcttctgtacccgggatgtggggggcggtacagaccttgaaatccccgcaccgctctctccaccccgagtaaattcatgcgtcccgtcagagtgttaaaatcgccctagggctggttctgtctccggtcgttctgccgtagggctgcgtaggcagctgctttcgcgccgttttcctgcttaaaacccttcagtgacccctccgccagccccgcgccacgtaaagtccccgcctgcgaggcggatccacgccctccgggtcccaagcctcgtccttgtcggcccctggggcgcagcgccgcagccgccattcgggaggggccgcgtcctctgcctggtctggggattctgcagaccccacccctgatctgcctgccgccgtagtcctccttgggccgttcccttctgtccccaggccttttcgcagtcacggcttctccggatcctgtgttgggggaggtggccgggacctatctcagggcacccagtgttcttccgtcccaaattcctcccattggaaactgtgctcttgaggaggtgggtattttattccagtcccctccctgtgaatgtgaagtgaaagagagatggagagcgaggtagaggaaacagaaaaatttagagagaaaataatgaggaagatccataacaagacggcaacgcagagggagggtgagagatttgcaaagtgaaagaagcaccccaggaagtagcagggagagaaaagcaactcgagaaatgtagagaaaagttctatttctagacagatgaaggacagcaaggtagggagaggggcagcaaagcgggaggctcctcagacaaagttggggagaggaggagggatttggagccagggcagaccgagcagcgtggtgctggcacagcaagagggggcagccggtgacaaggagggcaaagggagaaccaccccagagatctggggttgccagacagtagggacaagggggcgtgacagagaagagggaatttaacaggaggagcacagatgggagaagaaagaggcagaaatatatggagattggagacaatcaaaagattggagagaaagagcaacaagaggaaaaaaattgcaagatggagcagatgaagtggaaaagaaggaatagagggaagaaggggagaaactgcgggaga

SEQ ID NO: 67941 - DNA, 1900 bp, Homo sapiens
cctcgcccggttaatgcttttttaaaaccaacaattggtgacctaaattctcactggccttagccctccatgcccctggtgctgtcactagaaaactctctggagctgagcacagggttacctctgtccctcccgaaagaacagggaatagaaaaggagaggatttctattctgctttgtgggccgtcagcatgaaattgcacattctgcccaggcagggctttgcagttcatgtattaacttgcgtcgctttcacagacaatcccagggcttaattaaattgctaaatttagttttttatgtatttatttgagagactgagtctctgtcgcccaagctggagtgcagtggccgtcataactcagtgtaaactcgaactcctgggctcaagcgatcctcccgcctcagtcttcggggtagccgggactacaggtgcccgaccgcacggtcggcttaagattaactttaatagcaggaattttcctggatctaatcattagccgactttgctcagtcccggcaagagtacagttccgagacagctgagttgctccagtctccttgacaggtctccccggcaaaacccggaaaacagaggcactggaagcgaggcggagggaagcgcaagccccactccgccccgcccccgcccccgcccccgcccccgcccccgcccccgcccccgcccccgcccccgcccccgcccccgcccccgcccccgcccccgccccgctcggacccctccgctgcgcgcgcagtttcccacaaacccggaagcggatcgcgtggagtgaaggtcacgccgcggcgcgtgagtttccctttgtgtaaattaatctgcgcttcccaactcccccgcgcttctgtacccgggatctgaggggccacacagaccttgaaatcctcgcaccgctccctctaccccgaccaaattcaggcgtctccgtgagagtcaggcggtcgcttccctgtgtgtttaaatcgctcggcggcgggtcctgtcccccgtccttctgccacagggccatgtagtcacctcctgtcgcggagttttcctgtttcaagtccttcagtgatgcttacatccgccccgcacagcgtaaagtcctcccccgctaggcggattccggtctatgcggtcccccaagcctcgcctttgttggccctggagcacagcgctccaatctcaatccaggagaagccgcgtcttctgcccagtgctgggattctgcagacgccacccatctcttgatccagaccctacctttaccctccttgatacggggccccgctactccccaggcctcctcttcccagacaccgcttctcctaaccctgcgtgtggggaggtgacttactctgtctcttgacatccagtgttcttgcgggccaaataacaccccactgaaaaggtgttctgcttgtggacatcggatcccaattccttccatgtgaatgtgtgcagaaagagagacggagagcgagggagaagaaagagaaaaattttgaaggagaaaagaagattgagggagagccgtaagcagatggcaaagtagagagtggatggaggatttgcagagacagcgaatgaagccgagaaagtagcagggggaaaaaagcaactggagaaatgcagagaaaagttccatctccggagagatgaaggacagcaagatagtgagaggggcagcaaagtgggaagttcctcagtttgagagtgggggagagggggagggatttggagccagggcagacagagcagcgtggtgctgggacagcaagaggagtcagctggtgacaacgagagcagagggagaaccacagcaggtggaggcctgggatctcagggtgccagagagtggggacaagggggtgtaacagaaaagaagggatttaacag

SEQ ID NO: 67942 - DNA, 1221 bp, Homo sapiens
tgcatttcacattttagcttgcatcatccccttcacagacaattccaaagtgtgttaattcaattcctaaagcttcccttcccttcctcccttcccttccctccttacttttctttcttgtccatttattttcggtttttttctctttctttcttggttttctttctctttttcaacttctctttcttttctctttctctttactctctctcttctctctctttctgcttccagggtaggtgggacttgaaattcattttaatagaaggaattttcgtggatataatctacaaccgattttgctctgcgcaggtaagatccgttttcagaccaaaaccctgaaaacaagcgcagccagtcaagcgaacggaagcgcaggcccggcccaggctttgtcccggcccgccctggtcccagccagtccggcctctaggatgcgcgcgcaatttcgtgcaaacccggaagcggaccgcggggggcgaacgcctagagcgcagtttccggtagacccggaagccgattgcagggagaaactgttttcgcagcagtgcgtgagtttccctttgtctatgttaagtctaggctagccagttcttctctgcttctatacccgggagctgaggggcatgcagaccttgaaatcccggcaccgctccctccaccccgagtaaattcagacatcctttgagagtctgggagtcgctttctgcgtgttaaaatcgcttggaggctggtcgtgtgcccggtctttttgtcatttacccacgtagacacctcctatcgtggggtttacctgcttcaaatcctttagtaacccctacacacgccccgcaccacgtaaaatcctcactctccgttcccctagcctcgcccttctttgcccctagagctcagcgccccaacagggcacgagaggcctcgtcctctgcccagacctggtttctgcagactccacccctctcctgacccactcctgcctttttgctccttaatctggaccctctgttccccaggcctcccttttccagccaccggttctcctgaccccgagtgtggggggtgacttcagtctcctgacatccagtgttctctcgagccagtttccagcccacagaaaatgagctcttccggaagtgggcatcttattccaatcccctccctgtgaatgtgtggagaaaaagagatgggaacgaggcagaggaaatagagaaattttgaaag

SEQ ID NO: 67943 - DNA, 1020 bp, Homo sapiens
gaaagagagagagagagactaggaagggagacctgccgcagtgggtgttactttgtcgcccaggctggcttgggaccccaggctcagcaattctctccgttgcttcctgagtagctgggacctgaggctcccgcccccgcgcctctgctgtgtttaagcagcaggtggtgacctcactccttcctggcctaagcactccgtcccgcacccctggcggtggctttaaggaagtctctgaagctgagctcagggtggactctccctccctagtgaatggagatagaaagggagaggacatctattctgttccgtgggccgtcaccatgacatcgtacatgccgcccaggcagggctttgcatttcacattctagtttgcatcccggttccagacaattccagggctttggaatcatgcctcagactttctggcgctctcgcctccacaacctaaaaacagagacgctaggagagaggctgaaagacgcgcaagtcccgccccggccccgccccggccccgccctctgccggttctaaagggcaaggtctcagcgcctcgcgccccgccgctacctcgcccaggccccgcccacctcctcccacctcccgcccaggcctggcttccgtcctgcgcgcggagattaacgcaaacccggaagcggatcgggtggagtgaaggtcacgtcgccatggtgagttttgctctgtgttgcattaagtctccgcttcccaggtccccgccgcttctgtccctgggacgtggggtccccacagacctggaaattctcgcccgtcttccttcgcccagagcaaattgagacagcccagtgagaggccgggtgtcgcttcctttcgggtttaaagtcgtctggaggctggtcccgtcccgggtctgtctgctatagggcaatgtatacactttctattgcgtagtttttctgctcaaaaccttcttctgactcttccctcctcgcgctatttaaagtcttcacccacgaggtggattcttgcccggggcgcac

SEQ ID NO: 67944 - DNA, 1326 bp, Homo sapiens
gtctccctcatttttcttttctctttcttggtttttccatctcctctcagtggctctttgtctctctttctcctgattcccttgggccacacattcactggagggtttgtagtaagatgtctgcatgttggaggagtacattttccagggggtggagctgggcaggcaaaaacaccgggtgtcacaggacgggccccgggcacctccccaacgagggctcaagggaagcggtgactgcgaaggggaggcctggggagcagcagggcccggcacgaggaggagggaggtggggggcgacggcgccttaggacaggggtgggatgtgcaggatcccaggaccaggcggaggcgcggcctccccgggactgggtcggcggcgctgcgctccaggggccgacgagagcgaggctgggaggcgcccagggcaggcggtgaggactttaagcgatgcggggcgggaggaggagtcagtaaaggattttaagcaggaaaatcctgcttaaacgtttaaaaaaccgggaaaggccgtgtttacttggcccaaggcagaaagaccgggggcagggaccagcctcagggcgactttaacccaaaaggaagcgtctccgggcccacacagcaaggcctatttacctgaggtggagggtgcggtgcggagattttaagtccgtagcgacccccgggcatcgggtgtgcgaatgggggacggcgaggcgcaggttgagtctacacagaggaacactcatacgccatggtgtgatgcttgctccgcacgatccacttccgggtctgtgggcaactgcgcgaaggaaagcgaccgagcggcccggggcggggtccgagatgggcggaaccggaaaagggcggggcgttgagagagccgggctgaagcaggggccgccaggcagggaccccagggaaggaacggggaggagccaccggggaggggtggggagtgaccaagtggagggacccgggggcgggccggggaggagccgccggggaagggcggggaggaaccgcgggaagggaccgcgggggaggaaggcgaagggaccgcgggggagggaggcagagggaccgccaggaagggacccgggggagaggcggggctggacgggacacgttagggtctgcgatttcgtgtgatgcccacagcccagcgcccagagccatctgtagtgtcttgtggaacggcgtagatgtttcaaacggtttcaagttaaaagcacagttgtgtaggttattttggaaaccaaactgctttcctcttagaatggaggcggtttatgttgaaagcattttttgctagcgcgtttacccagt

SEQ ID NO: 67945 - DNA, 590 bp, Homo sapiens
ccccgccccctgccggtctctccctggccaggccccgccccttccccgcccccagaccgcccagtctccgctgcgagcggttttctgtagacccggaagcggatcgcggggagtgaaggctgcgccgccgagcctgagtttcgctctctctagattaaatctgcgcttcgcagtcccccttcttccatcccccgggtctggaggggtccctacagatcttaaaatgaccacaccgcgccctccaccccaggtaaattctgacgttgctgtgagaatgcggagatcgctttccctttgggttaaagtcgctctaagcctacttcctgaatctggtctttctgctttgcgctaggtaaacatggcctttcgtgtcttttgctgcctaaaatcctttaccgatttttcttcccgccacgcgggagggcacttttttttttaagacggagtctcgctgtgtcgcccaggctggagcgcagtggcgcgatctcggctcactgcaagctctgcttcccgggttcacgccattttcctgcctcagccttccaagtagctgggactacaggcgcccgccaccacgcccagctaatttt

SEQ ID NO: 67946 - DNA, 673 bp, Homo sapiens
cagggaatgctatgatgccatgtggtagatcagatgaccactctgaggatctggatcagcctccttccctggcatcctcagggcttgctccataggttcaggagcaaagtggccgaggtggactacaccacctacgtcactgatgaatgcccacctagctggcagtagcaagtgctgatcccccagtgtggtacagtttcctaggaagaccaaaaagccaaatacctgggcccgtgaggattacactggagccctttcatcctgggctgggcagggagtttttcctccctcgagtaaacaactctgggcttgttatttgcttttcttgccctttgcacttctgccaacagcagcatctgtgtatgcactgaatggccctattcaccctcatgttaacccgcacagtattgcttctgatcaaggagctccatatattaggaagtcagtggggggcagtccatgtaccccattaccccaaagcagccagcctcatggaacagcacggcctgtttgagactgggttacagggccagtttggagtcatcatctttggggtcggggtgctgttacaggatgggtaaccactctgaaccaggggtacatgccagatgatcccagattacaaagacctgtgaactcaagagtgccatttctttcttttatttttctctct

SEQ ID NO: 67947 - DNA, 2998 bp, Homo sapiens
cctaaagcccaggaatactgctctcaattctgctctccctcagggctccaagagacagagatcctagcccccccattgaactgaggggcctggtcccccaatccgctgcgacccaggtgtctaaggtttcatccggcaaggaaggggtgggggcggaacagaccaggaaggagggggtaggaagggagcggaagaaaggagtgaggtgagacgggggcggggacctgagctggggggctctgcactaaacaaaccctaaacatgcggggtttctatggtaacggtcttccctggcctacccgggagactcctctagggctgtgtcgaggagggcagcccccaggagtctccacgccgccagctgttgtgtcttcctgttttgtcaccacggcaaccgtgacctcagccctccaccctgctcactggggtggggcgggagctccacgctacttttactctggggggcgtggtctgctcttggccccgcctcggggcggggctgggatagcccagactcggggaagtccctgtccaccgccctagccggagctgcgccccgccccggccccgcccccgtcccgcccgcgctggctccccagccctccaaccccacccagccctcagacccttccagctgccgctgtcgtctttgcttcagccgcagtcgccactggctgcctgaggtgaggttgtggggaccccagagggcataagcaacagtctagggtctttatggccagagagaggaatgggctgggtctcagaatgtctgggtccctagaaagactggggctgggccaggattcttggggttctgcagaggagagggctgaggacctggactgtggaggtcatacgtctggaagagtggggaaggggacctggactccggggtctgagggaggaggggctgggggtctggactcccgggtccgaggcaggaggggctggggggtctggactcctgggtccgagggaggaggggctgagggcctggactcctgggtctgagggaggaggagctgggcctggactcctgagtctgagggaggaggggctgggtctgcgggagtagagagatggggactcgtaggtgccctagttggaggctggaatctggtacgtggaggtcctttaggaggggaagcgcttagggttaggtgtcctgggtttgggaatgagaatggaaggaattcagaattactgacccctccccatccaggggacagacagaatcggaactttgggctcctgaaaggccgagggaggggggtgttaagatccagccccgtgcttccgaagtgcagaaggagctgggaaaggaggagaagacagggctgcgtcccgcacctctgggtgccgagagccgaagctggggttccggggcccgattctcagcgtgagcgatgggtgtggcgtctggagtggacgagggaggacactgaggggctgggtgtggcccggagagtcgggtgcgctgcgaggaatcccggaggggtgtttcctcaccctccagggtctggctgcgcattcctgagctctgatctcgggcgatggctggaggccctaagggcggggtggacccctcccctcccctcccctcggcgcgcccccctcccctgcgcgcccccctccgcggctagcccaccttccgcgggggacagaatgagtgacgccctcgctcgtcctcctcccctgcttgggacggggcagtagcccgccttctagagcacgggacgctgggccagtcccgatttccttctccttcgagggtcctggaggggcgtgggggcaggcagtgtctggctccgggtggagcctcccaggtgctcccgcaagccccgaatggcgattagggaggccgtgggaggcgtagctgggcctcgggcctgacgccagcaccgcgtgcagtttccggcctggagcctgagcccctcagaggcccgggtccctgcccactccggtcttagagatgctcttgggggggctctcagcccatgtttatagggatccagaaatgcaggcctccaaccctgagagtcggggtccccaccccccggaaatccgggagagggcgggcagccccggaggcgggcgggggtccgggcaccgcctcctggtccctgacacattccagatgcctgggccgactcgaagcccttataaggcgcggagacaccggctctggctgggccgcccgcctccacagccgccgcccagggttctcccgccactgccgcccgcacccccgcccccgcggggttaagatcacacacgcgcccacgccggcccgcggggcgtgcactttcgctgggttccgtccgccgcagcccaaacagttaactgaacggggaggggagggggcggggcttacccggggtcaccgccagggccctgctgggttccacgccacgttcctgtctccgcagggcgttcgatccctagagggaggagcctgtccaaacggacgctaacggcctacctccccctcaggtgctcttacagcctgttccaagtgtggcttaatccgtctccaccaccagatctttctccgtggattcctctgctaagaccgctggtgagtaggcagcgggcctggactccggggtccgagggaggaggggctgggggcctggactccggggtccgagggaggaggggctgggggcctgggctcctcggtccgagggaggaggggctgggggcctgggggcctgggctcctgggtccgagggaggaggggctgggggcctgggctcctgggtccgagggaggaggggctgggggtctggactccggggtccgagggaggaggggctggggtctggactcctgggtccgaggaaggaggggctggggtctggactcctgggtccgaggaaggaggggctgggggcctgggctcctgggtccgagggaggaggggctggggtctggactcctgggtccgagggaggaggggctggggtctggactcctgggtccgagggaggagggg

SEQ ID NO: 67948 - DNA, 1584 bp, Homo sapiens
gcagtggtgtgatctcggctcactgcaagctccgcctcccgggttcacgccattctcctgccttagcctccccagtagctgggactacgggcgcccaccaccacgcccggctaatttgtgttgtatttttaagtagagacagggtttcaccatgttagccaggatggtctagatctcctgacctcgtgatccgcccgcctcggcctcccaaagtgctgggattacaggcgtgagccaccgcgcccggcccagaccaggtcagtttcttaagtgatctgagctataatggcggtaacagagcactgtgagagcccgcagaaagctcctaacccatctgggatgagacctagcgcttccaggacgagccgatgttgagctgagacctcgaaggacaggttagtcattcaccttctcccgggctcagtttcttcgtctgtaaaatgggctttcatacataaactataaaatggggactattttgttccgccttaggtgggtcgcagcaggaggactagtcactccggagcgacttctaggctgagactaaggagattccacgcaggtccgcaaagtcaggcttgcgcttgctcctgacaccacttcctttacctccacggctccatctttgttctgcgcgagtgcgcacgcgcaggctccgaaagcgggccgtcgcacagagggaccacaactcccagagtgctccgcgtccttgctttcgcctctacttgtgctccagggcgcacgcgcagccctgggagcgggttctcgcgcatagggaccacaactcccagggtgctccgcgtcctcgccgctgtcgccgccgcggagacaaagatggctgcgagtaagtgcaggttccggtggcgcacggggctcgggtagttctgggaacctctgggcggtcctgggactgaggtgcggcagggcaggggtggaagcgatggggtccgtgctggaggggaacgcagaagtcacgagggggctcctccagggcaggggtggcacgagagggttagaggtcaccgggggcagctacttgcaggggtgacgcttcttgccaccccttcaggagtcggcgccttcctcaagaatgcctgggacaaggagccagtgctggtcgtgtccttcgtcgtcgggggcctcggtgcgtgagtgctccaggcgcaaacttgcatcgtccacccccgtccccctacatccctccatcttgtacccctaaagccctatcgccgccctcgggtcccctctagtgtgtctgcacccccacggcatccccttatctatccccatacccattataacctctccaccatcgccccccgcgttcctctccacctacccaatacgctcttaacccctctaaatgagacgttctcaaccctgcttatgccttaacacctgagcaccaaaaaaaagtccagatcctcctcctccttttcatctttcctctcccccattctgaattgagttggcttgggtggaggtgggactggggaatctgtgtcttgtgaaaatccccgtatgatcccaatgtgccttgctgattgaaaatctctgccctctgccctggaactgccctactca

SEQ ID NO: 67949 - DNA, 1481 bp, Homo sapiens
ctggcgccgccgccgaccccgggctgcctcttcctcttcatctcgctcccggagccctgagccgcccagaccacctgacacaaactccacttccgtctccagctcgctctccaggatgtggccaccaaataggggaggcaacgccaactctgagcctggcggcgctgagaactcctcaaagcccacggctgccatggtcctgagaggcagggaaaggctcaggggccctggatcctggacccccagccccttctcccactgaaccaggagcccagaccccaacccctcctccctgagatcctagaatccaggcccccagcccctcctccctcagaccgtagaatccagctcccagccctcctccctcagacccagaagtccaagtccgcaacccacccttcgcagcacccacagggttcaagccctgaccccctcctcccaggatgcaagagtccagacctccagactttttctctccaaggacccagggagtccaagccccaaccctcaaccagacgcaagagtcctggcttccaacctcctagtctgtcagatccagcagtccaaacccctaaccttctcctccctcaggatgaccccagtccataaaagggttctaaggtaaagcagttgcatgaactacaacccccatcagacctcagcgtaaaagctcatatggttgcacacaatgcagctgcactgttttctgggattcgcactttttcacaagggctcagccacatacccttctctctgctccaattccatctccgcgacctccggaagccccgggcctcagagcttccgacctcttcaatctgtaggttaagccgttcgcaaaactacttgtcccatcaggctcagcagccgaggacggcgggacgtggccctaggccttgtgggagttgtagtttcctgtttccggcttcgcttcggcccacccccacgtccaccccgaatccctgcttaaaggccttgctttcttgtctaacgccgcaaccagtcctctgagttgccaacgtctttcttcttgtctcgacgccccgtcgtccggccacagcgattctctgcttagcaggatcggtccacagcgggacgtgagtccctttcctcctcgcggcttaccgcctctctccgcctagtgccaggtgctaataaagttgttgtttcaaatgcggccaggaacatcgcgagcggggaccaatcagagagtagctttgcctctataacggcgcgagagtgagacgtcatcggtgagcgactaacgctagaaacagtggtgcgcggagaggagaggtgagtgtgatggagaccacggggagcgggaggctgggctcctgggtctgggagaagaagtgtgtgaggaaaaaggcgggtctttacagcttggtttttgtttttttgttgtttgtttgttttgagacggagtctcgttctgttgcccaggttggagagcagtggcgcgatctcggctcattgca

SEQ ID NO: 67950 - DNA, 2417 bp, Homo sapiens
aggaaggggcgaatctggcttcccatctcggttgtgtgaccctgggcaaatgcctcccagttcgtggaagtctcagtgtctagtaagttttcaatcacaagtcattcctcacattcattcatctattcctttgacaaatggttactgactacttcctgcgtgctaagtgctggagatgcaaaatccagacagggaaaccgaataattacgaaaatgacggtagacgtacaaaaataaatcctaacgaacaaggcgcgcaggagcgctccgcccgggagggaggtcagggaagttttctctccaagaagacaacagagctgagacctgaaacgagcaggcattagggagccacccgtctcctctgtaccttctgcagcgtcctcaacacactaaggaagcggagacgcagaggagaatgactgtcctaccatctggtcgcctaaccaggcaggggcaggacaaaaactccatgcctcacgcttcccaaccaattctgctatgcacggtgccagagacttaaagcagtgtctctggtccctttcttctttcactcagcaaataatgaatttcagagatgtgccaacatagaggcacttggagaaagacgaggcagctgagagggaagctgcttacctggccgggacgcaacggttgcgaccaagtcccacttctgccagctacatacaccctctttcacacgctctacgagcagctaccgcccactcgccacgctattggtcaaactagcatgaatgataacttttagggccaacgaagaaaaaggggtggactttcttgcccagctcctcccacttggccctgtggctgttttgattggcagatgacttcggctcggcccccgctttaaaggcacctgtctgtctcccattaggtacgcggcccctaacgcccacactccatgccttcctccgctttccccacccacttccaggaccaaccaatgacttcaaggcagaatatgcccccgcaaccaattaaaaagagctctaaacttgacggacgacttcccgcccctggactgtcgtagctcctcccccagaccaattgttttaagagaggggggcggatacatccaatcagcacgacacaggtctcttgattgacgttcgggtcctcgcgctggcgtgttgtgccctgaggcgggaggaggaggaggagcggggaggaaaacctgagccaatcctagcagcctgcgcgggaggccaatcgaacgccgcgccttggagcgatcacccaatccgcgaaagggggcagggcgcatccctgccaggaaccaatagaaagcctccaagggtcaggagcgacgttcagcaggagcaatgactggcctatattcgggactcgggggcgggtcggcgccagagacgagaagagaggaggggaggcctcctccgccgccgccatcttggaccgggcccggtcagcttccgcggagccatcggcagacgccgcggcctcccttgagccccgacccccgtcgtcagaacaaccccgggcccactcccccaaccccacttccgcttcgcgccgctatcgcgatagcgcccgggcccggggcgcgagaaaaaggcggcgggcgctcgcctcccccgcctgtcgcgatacgctcctcagcggcggcgccagctcctgtggtgagagcgtcaggctcgactgggccggaccccttcccttcctccccccggcgccatcggccgccctccccgccgcctcccgccctggcgacaccgccgtctgtcgcgacatggcctcccctcgcctgccccctgccgccgcctctgcagcgcggggctcccggcggggggcggctccctccctctcgccctcccgttcctgcgcctctttcacgttcctcagcgcctcccgggggtccttccgcgacccggaccccgggccccgcccgccgccgcctccccgcgtggcatcgcgtcgggccccccggtaggggtgtgagggtgcgaagcctcccgggcgcgaggtgcccgcccctctccgcgtcggtattggctcctggctggaaggatggaggcgcccctggtcccaggtgcccgccctctcggggctcaggtgcctgcccccctcggcctcggtccttcgcgttgtggggcagcctccgcgccggggcttctccctcgacggtggcggggagggggggtggtggtcgggacgaggaccccagctgggtgggggagtcacccttcccaggaccgaggccgccctccgcatccctcctcactgctcccgggagcgcagcctcccctggatctcaggttccagctgcccgtctgtatcggatgggagcctcttgggagaggagtggaggagaaactccccgttagttggagcctttgccgaagtttccacctctgtagtctgcagctcttccctctcatagc

SEQ ID NO: 67951 - DNA, 1318 bp, Homo sapiens
aggaaatgaaagttgggtgtacaccaaacagatttaaagagccatacggaaagcccgtgtttgtgtgtatgtgtctagggggcggtgcacgaaagggctcgcccgatggcgtggagcctggctgtccgcctctccttaaaatgtgccttcccctcactgaagccatctcacttcgtgcaacagagatgacagtgcccctctaagaacgaacagtgcttattggggattccgcaagtcaggtgcacggcatgtagttagcatacagtagatgctcaataaataggctgtgcaggcaaactaaaaagtgatccgaatttccttgaactgtccaagggttcacggattcattaaatgttaagcttctcttttgtgctagacactgttccagccatgtgaaatacatcagtgggggaaaaactaagacgagggcgagatcaaggaaggtttcgtggaagtgggcacaaggtttgcggggcaacgtcctcgaaagtgggatcggcgcctggtcccgaatttcacacggggcacattgagcctgcgcaacgcctccgcttccggcccccaaccgcggcgcctgcgcgctgggccccggagcgccgccctgccggcttccgagcttacctcttgctgagccagcagcaccctccgctcacgctccttctcctcctcccgggcctgggcctcgtcacgccgcacgcgggcgacattgtccttgttccggacgtgccagctcttcttgggcaagatattcatggcgtcgtagctgtccagggactggcacgcccgcctctttgcacttccgattggcgagaggatgcccccctttttcttgtccctacttcgaccgcggattggttccgaattagttggtacggccccctggcctgtagcgacaggtgattggctgagacgccctttatcacagcgaatgctaggcgttcggctcgtggtatcccctagcaaccgcctcttgtcacagatctgaaccaatcataagttggcccgcccctgatgctaccagatgcggccgtcgattggccgacatgaccgacaagtctccttgcggaagagcgctctgcaccgacaaacatgcccgtacatttgattggctcctgccccgctgtagccctgcccccaccttcaggacgcagatttcaaagcgcgctcagcaacctcggctgtatttattgatacaaggaagatcacccgagagtcaggacgtggcggcgaggggccctggaaatctccagataccaaagctggaagggcgtggagtcttctccagttctcctagtttacagatgttgtgacctaggct

SEQ ID NO: 67952 - DNA, 647 bp, Homo sapiens
tgaaggacggggcggggccgggccggagtcaggggagtggcggcctggagtttccccgcctccaccgccccgcccgccaataggaagcatgcgtattggttgggggggggggggcgggactttcaggactccacgtggagggggtgtgtccagagggcgggtcctgaggactagaagggacccagatgtcgccgccgtcggggccagagggaagtaacccactaaaacaagggcggggagcggggagatctgcggacctagggcaagcaaagggagcaggcagaggcgggaatggtaaaaaggtgcgcggtgaaaagaacagcgcgatggggcacggcctcgtcctagaggggcggggccacagcaaggggcggggctctcactttctaggaaactggatgagcagcgcgactgccaagacagtcagcagatcaaagagcagaagtttgtacatttcctggcccaggacagtctcccagcactgaagaaggaagaaatatatcagaaagaactcgggacccgggcacctggaggcccacgcgtccgagtctccacatcgcaagcctatgagaccctgtcaatactttctctgggggtcctcgtttttcaaactttcatacccttgggagagtgttccagcaccccaa

SEQ ID NO: 67953 - DNA, 2021 bp, Homo sapiens
cctgagctgctcgccgggcaggaggcggccgagcagtcccagcccgcttgccgccgcagctccggccacgcctcccccgcccagcgcgcccccgcgccgcctgctccttctgggcgcccgccgggctgcgcagatcaggccggggaagaagccacggtcagggccccgggcgggcagggaagaagccccggagcagaagccgagagcgcgagtcggcaacgggattcgagtccaggtccacactgggatccgagctccgagtacgtgaaggggcgggccttcgggctcggaacaaggaggagccaaaagctttggacccgaaggggaacagacgggctccggaaaggaggcggggtctggagctcgccgtgaggaatgaggcggggtctcccttcgggttccttcgggcacaatcgggagcttgagttctccggaagcggggccacaaacttcggctcacttcggcaatagtcgagaacggagagctgaggccagtgtgggcggagccacatgtttcggctttcttcggaggtagtcgagtccttagggtcactgttccgatgtgggcggggccacagactcggccggatgtgggtggggccacaagcttcggtttacttcgtagatagttgggtacaagtgacgctaggatgataggcggagtcaacaggttcgccagatacccatgagtatttacaagggggcggggcgaaagcgacttgccctcaaaggggcggaaccccgagggccggcgtgcgcctacgggaccgggccagggtgacgatcctcaagttcccaagtagaggagaggaagcggcagagggaggtgcgctcagtggggcggagccaaggtggcccccgcgggaggagggcggggcttcggtcctgcgaggggcgggacctgacttcccgcggcgctgatggggcgggatgacgaagttgacgagggtgtcggcatgagggggtggagcaaggagcgcgtggcgcggtgcgcagtgggtggctccacctcgactgcgaattactgtttatgaggtgactcgctggttctatcggtggacagtgggacattctgaagggaggcaaggaggcggactgagcgctcccaattggggtgagcccgcccgagcggagagtggacggcgggtgtccagggggcggggctttcggctgtggggttcggtcgtagggcgggaactccccaactggggtgcgctggcgctcggagggggcggggccacaggccgcgaggctgccgggagccgatgacgcccgaacgccgaacctattgcgtccgggaggaggcggggctacggattcggccgagccgagaacacccgaacgtcaaattgctggcgttcgggaagggggcggggctgcggattcggtggagccgaggacgcccgaacgccgaacttcctgtgctcgggagggggcagggttttgtactgtgggagtctgagagcgaggaggtccgaaagccgaatcacagtcgttcggaaagaggaggagcgaaggctcgagcgtccggaagagggtgtggcctcggcggtgccttagcctccagagcttctgaccgctgacgggaacacccgaagggggacgcccactttgcaagagggtggtgccaaaatggacctttgtaagggggcgtgtcgccgcgcttgcggaggtttgtttttcacgctccaaggcgcaatggtaggtacggcagtgcgggcacagagcgggtgccgaccgcagggtcacaagggtagagcgggaccctgggggcttggcgaggggcgagggtcgggggcttgtctccggcgtctcgtctccggcggccgcgaggcctggtgggatcgcccgggggcggggcctggcgctcgggcccagcaggtggtgaacggcggctgagcgaggccccgccccctgaggcctaggggcggggcttcgccgagaccccggaggctttgggtgcgctgcagcggtctgcggcgcgcagctgtttcggtaactgctttgcctcccggctcccg

SEQ ID NO: 67954 - DNA, 2181 bp, Homo sapiens
ccaggagttcaaaaccccgtctctactaaaaatttaaaaattagccgggcatggtggtgggcgcctgtagtcccagcttctcgggaggctgaggcacgagaatcgattgaacccgggaagcggaggttgcagtgagccgagatcgcaccactgcactccagcctgggtgacgagagcgaaaaactccgtctcaaaaataaaataaattactgataatagtactaataccccttaagtggctattgataataatagtaccatgggtgggggggcaacttctctgagagtgctctgtaagtatgtattgaagattgagtaaatacatttaaaattcttagaacagtatgtggcacatagcgttccagaatgccacattattgttagtgacagaaataatctcggctgggcgcggtggctcacgcctgtaatcccagcactttgggggggccacggcgggaggctctctcgaggccgggagttcaagaccagcctgggcaacatggcaagacgccgactgttaaaaaaaaaaaaatgctacccgggcgtcgtggcgtgtgcctgtaatcccagctactggggaggaggtgggaggatcgctcgagcccgagaggttggtcggggcctcagtgagccgaaatcacgccactgcactccagcctgggcgacggagcgagaccctgtctcagaaagaaaaagaaaaaccaccgtccaggggcggagaaggaaggttctccctacttctcaggtttccactccctggccggaaaaaacctagtcctcccaggttagcacgccgctctagcccagcctcacgtctccactgcttctcagccagccaacgcctcttctgattggctctgacgtgcgtggtgcgtgaaaacgtcacgagacgccggcgttactataagagcgcagccgtggcgcttgcgcgcctctttctcagtgaccgggtggtttgcttaggtgaggtgcggcggtgtgctttttctctagggtttgggttggatggtggcccgggccttccgagtttccatgagtaagctaaagacgttaggaaacagagcagggtggttgaacgggagtgcagcacggttgtgggggcagatactgactatgagagcgttggaggttattctcgcgagatcggatctgggctccgcgaggttttggcgtagttgtgggactgcgcaggcgccgtttggagcccttacgctcacacttctctcccgcgcaggcgcagacggggaagcggagccaacatgccagtggcccggagctgggtttgtcgcaaaacttatgtgaccccgcggagacccttcgagaaatctcgtctcgaccaagagctgaagctgatcggtgagtggccaaggcttccgggaagtggttcggcttccgggaggcggttagcacgtggatgaaggtgcccatgtactctatctagtccgtcccctaaatttggtactattcgtggtttaggaaggttttgtgattccaaagctgccagtctagttgttgtgccagtacgtgggactacacttgtccacccccttctccccaccaggcgagtatgggctccggaacaaacgtgaggtctggagggtcaaatttaccctggccaagatccgcaaggccgcccgggaactgctgacgcttgatgagaaggacccacggcgtctgttcgaaggtgcgtatgggagtccacagcagagggatggggtgcagggcttgtgaggttcattctcccttctgttgcctctgttccagtgatgagagttgtgtcattggataaatggaaccagccttctaacttttagtggcacttgtgaagtaggaaaagtgtatctggatcagtctttgccctgtttcttaggtgtgtggcttttttgcccagttattggaccttcagtttagtaatgaccagagctaaagataggcctggcacacctgggcacccgtctatatctttatattctgtttatgtggcctgtttgctagtggatgagagtagactatgaagtggaatttctgggctaagtgatggtgataacagggtttgcacatttgcttggtttattgtttttttaattaagttttctcgttttatttagtcttttgagacggagtcttgctctgttgcccaggctggagtgccgtggcgccatttcggcttactgcaacccc

SEQ ID NO: 67955 - DNA, 865 bp, Homo sapiens
ggtgggaattcatcccagggttctgtggggagtgggctatagctggttctggttttagggaggactttctggacatagatcctaattgcaatgaaacttacagtcatgtgagaaagcggtgcaggtgtctgagggttatttgtggttttccaaggcagaagtgaaaattcccaaggggtacacagttgttcaggtgagtacactttctagtaaatgaagccatctagcctagtcagggacaggaaggaggagcttggatgtttgctctttggtgtaatcctgccttgattcagatccagcctttcccactaagatgtgtgactagcgagattctgagtctcgtctgttaagactgaacagccgccaacatttggctggcagttaataatcaacagatagaggccaggcgtggtggctcatgcctgtaatcccagcactttgggagaccgaggtggtcggatcacttgaggtcaggagacctcaagtcagagaccagcctggccaacgtggtgaaattccatctctacgaaaaatacaaaaattagccgagcatggtggtgtgcctataatcccagctactcgggaggctgaggcaggagaattgattgaacctgggagacagagactgcagtgagccgagatccgcggcactgcactgggtgacagcgagacacaaaacaacacgaactccccccccaccccccagcacaactgtgaagaaatgtaggagtcatgtccatttttcagatcagaaatgaaggcattgtaatacctaactgccttgtatgatgacaaggacctgtttcccactgaggtcctccctggtttgcatttttaaagcattttaaattctcttggtgcattg

SEQ ID NO: 67956 - DNA, 766 bp, Homo sapiens
gggaacacttcacagaatttgcttgctagtttcaaagcttgtgatgcggttgatgttgggcaagttcccagttttgtcttcacatgtaggggaagtgggttagcgtaggagaaggggcgttgagggaagtctgttcctcctctccgcgttcagtgcttctgtggactcacggtcaagaggttggcaggcttcccttttctcagccttgttgatcatctgtgttgggaaggggtttggtttctgaggaagtgagaaacctgaaattgtgcaaccccctcaggctgcaggctgtagttgattgggtccttatctggaggccttcagggtttgaggtcagggcagggacagttctggaacacagctaagttactgtaaaccacgtggagaagtccattgcggcttactcaagctaggtggttggcccttccttccctcagcgttgctacttgggaaatgacggtggtcttgtgtccatggggccagctgctgcaccatctgggctcactgtggtctccttccttggagcgtggggtctgggctagtggatggccggggcagcgtactcactgggctcctgggagctcccctgggaggaagagactgcagttgtctctggtctgagaggtggtggctcacctgggtgtagctcacaattgcggagctccacggcagcctggagggaggggagagtgggagttgaggtatgcggttctggggagaagcctacgggcttggaaaggaaaagggtcttcagggctctgtctac

SEQ ID NO: 67957 - DNA, 1330 bp, Homo sapiens
cattctctctctcgaccctgagcccagggtccagagcagagaacgggatggggtctgggtaggggcccctcacttgcaaccaggatgttgggtgggggcgacgggggaccgaccttgggcaggaggcattgtgtccaccgcagcatctgtgctggcccccaggggggtggctcgcatggcccagggggacgtccaggaggtgctgcccatctaggcgctggcgggctgggagccccttgtcctggtcaatgcagagctgtcaaaaccggcctctgagtgatgctgaggggtcaggctgtctccagagagcaccggcgatcccggctgtgctgagagggagggctgagggctgcctggacgcccctgagatgaggcgactggtatttaggggatgcgtactctctggggcccgctggggcctgcagggagagctctcaccggtctcaactccatgccttctgccttgtgcttctggcccaagaggtcggggtcactgaccaccccgtgtccacctaaggcttccctggacacacagcagggagatgggcaatgagggtgggggttgtggccctgcctgtcacggtccccagcagtgcagatgaattagaccattgagccacagagcctggagggcagatgggtgtgctggtataaggagccccgggctctgtgttacaggtcatgtgttctcaccagtggccttgcaggaggggaacagccccttccccagggcctcgctctgctccccctgaaggatggggctgaggggacagcaggctctgggggcctttcagaccacatttgagtcaaaatttgacttccccatactctgcctgcttccacctcacccaactctcatccaggggtgacccttgttctagcacatgaggctgaggccagagagggcagggccttaggacacagcccagtcactgttctaattctagaggcaagccccttccatgtcctgagctctgtaatgcatcttttctttcatgagccttgcgatcaggcgatgtttattcagtggttaccacatccaggcatgctgccaggaggaggggagtcgtgggtgaagctgataggattcctgctggactcacagagcctgggttaatgacacattacccatgtttagataggaggtaattctgctccggtttcgacaagttgtaggaaaggaggaaaacatgctcatagcaggtgagcagcgtacacctgtcatgggagtgaggggtccttctgggggatggagagaccaagacgtgaacagtgagtgtggcacgcagagtgtcctccaccagaaacagtgtgggctgttctcagacct

SEQ ID NO: 67958 - DNA, 2876 bp, Homo sapiens
cgtgagccagcgcgcccggtctttgcaacgttttgaataaatccaaaattattccagaacaaaaagcttagtaccaaaaagaaaacaaaaacaaaaacaaaacaaacccccccccccccacagagtaaaataacggaaaaagatctactatgctagcactaacaaaataatacgtagttatgaaaatggtatgtatttttcaagctagacgttcataatggtagaacatgaggaggaaaactgcctcttaaatcccaccacttactgtgacgcagtgaccggtccctgcagcggactggatagttgtatcagagtcctggacggaaacagatggcactcaaaaggtggcgcgcagttcagagaaatgcctatgtacggatttggtccaatgcctcagcctgacctcagggaccttcgggggtctgctccgcgcccacccttacacatctgtgaccccacacacttccaccccagcgccactgccaacagctacacccatccccctccaaccgcgtcagcttccagcctcggtccatctgaactcgccgtgccccctcccctgcgcccttccagattcatttgctagggaagcccgctcttccgggtggagctgttcctcatcccctttctttatcattctctccccagggcttccacatcaccgtgctgtggacaatcccggaactcctgtcacgccagtttacatttaggaacagtaatggctcccactgactcagtcaaaacaaggctgcggccgggcacggtggctcacgcccgtaatcccagcactttgggaagccgagacggagggatcacgaggtcaggagttcgagaacagcctggccgacatggtgaaaccccgtctttactaaaaacacaaaaattagccgggcatagtggcgcgcgcctgtaatcccagctactccggaggctgaggcagaattgtttgaacccaggaggcggaggttgcagtgagcagagatcacgccactgtactctatcgtgggcgacgacagagcaagagcaagactccgtctccgagaacaacaacaacagcaacaagaaaacaacaataaaaaaaataaggctgcgtgggaggcagaaagagctaatgcggccacgcttgtcccctcggggccaccgtccccacccagacttccggtctgccttaaaatgttcatgcgtaagtgcgtgggcaggaaggcgggctcaagcgcagctcgtggcgttcattggctgtgcagggccgagggaggcggtgcaaggccgccgcgtgacgtcaggacgccgcggtcaggacgtcgaagccaaagaagaccagagccagccgggtggcacagcggtgtcgtggccgtgttgctgatcgcctgggtggttgttggcgtgtccctgcagcgaaggatcctggttggtaaggggagcggcgggcgagcaggcgggcggggatagcatctccttttggtcttgcgccccgcgagccccgaggccttctcggccgtcgcagcagcagacgccgcgcgcgagcgtcgacagggtgtggcggcgcaggggcagccactgcgcctgcgcaccgggcctggggccgcgcgttcgggcactagcgcgcgtgcgccgtcgtcttctactttccgttcctctcccttggagttctcggggccccggggcgcccctcactcgccgttgaccgggtgttgccccgggcgacgggcggctcctgcgcgtctttctggggcgtggtgcgcaggcgcggcctgggcagtggctccgtggctagtcgtggggatccgagcggcctcctccacccggcgtcctcctttgccttcgcccagcctgcgggacggccaggtgctcccgggacctcaggcctcgcgtctgatgcctgtctctgttcttgagacccgtctgggagtcctctgtccagcccccaactcctgaccttacctctaatctcccttctgccctggggctcctcttcctgtgtccccgccacgatccctcgtctccacccacgccctgtgtcctgtttaagttaagcctttgcgtttctagggcttttccccagctccagactcccgttcctatcccgtcaactcgtgagaattccggttctcctgcgggattaattatcctacttatcagttactctctctcgggagtttaggctcctgaatccttgctccggagacactccacttttcttccaattctctctgtaccccactcttaattcgttgaacatgttttgggtcttctttggcattcccaaagctttatgtccagacacccaaccaaggtgatcccttttctctcccagccctacccctgcttccgggaacctcccgtggaagcaggcaggggtagtcccactgaggactcccacgtaggtctctttactgcccttcggagacctttttgaaatcagtctgtcagtgctaagaacccatttcttcacgttggggttcacgttggcattctcaggagcgctcaacgaccacttgcttccagggttaacttccggaaaatccccttttcctctcaaaattttcttctcttctccaatattcttccagccccctcgatgctccctgaaaggcctcccttttcacagagttctcggaaacctttccaccctctcagccttaagggttccctcagactcttctcattatagcatccatcctcttggttcaggttcctttcacaacccgtactccttagcttttttttttttttttttttgagacagagtttcgctcttgttgcccaggctggagagcaatggcgcagtctcagcttaccgccctccacctcccgtgttcaagcgattctcctgcctcggcctccctagtagctgggattacaggcatatgccacca

SEQ ID NO: 67959 - DNA, 3689 bp, Homo sapiens
tgtgtgtttatttaagttatttttcttcctcctctcccttttctttttggccctccctccctccctcttctgccatgtaactggaggatgtgctatgagtttgcaaacagctggactgtcaggctgctttttttccagatgttcctcctctgcctccccttcccctcctctcccctccttttccttccttccttcctttccttggagcactgagcaccatttggaagcttgagagaaaccaaaattaaagagagaaagagagagcgtgcacgctcctgctttgtctttcctgtgtgggctgtttgcatccattgtctcctccagaggtctgggggtgtcactccaggcggatctcagccaggggctggaaaggcccccctgtcctccctatacggcacagccagagtgtctgcaggggctggcaccccacttcctggctgagggtgaactccagcttggggaggtggacctgggaaccatggggcaccttggccacggtgaggtgggggtgcagctgccctggagactgtagtgtactcagcccctcggcttccagcctctggctcagcacttgtgccatgctttccagtgtgggagagggtggggcacacagcacatgcgggcccaggaggaccagctttctaaagctcagccgagggggtgcatttagccccggggccaagagggcccgtctcagagctccaatggcagcggcctcctccccagcgcctgccagtcgcagcagggccagggtcaggtgtaggttctgagagggcactaggaagttggcgcagtgtggggccacgtggaccaggtattcctgggccttggtcacttctgcttgtagcccaggctcggtcaccatgagggccacaaaatgtgtggggcgcggttggcaaggggctgcaacactaaggcgggcccttttgtcctcgggccaggccgcaggaccccactcggcttctgtcgtctcagcggagccccccgggactcccagggcctgtgcttccttgccccccagcaatgtggtcctggtggctgctgttggcttcagtgcctcctcagtcactccggcgaggcgtcctcttggggccagtgttcccaaatcagcagctgtgcccagcgccctctcctgggccgcctccagctctccgggttcctccacgcctggttcctggtgccctgtgcagagcggccttgtgctccctcgcttgggggcagcctgggcctcctgacctgtccccgccagtgtccactcggcaccctctgccccgtgggcgccctcggtgttcggtgcgtccaggatggtgggcccgcgtcccgccgccgagccagagccaaagacgaggtcggtgcgcgaggcgcggtcccacacaaggcggccatggaagcggaagaagcgcacgcggtgctggggcactgccagcacgcccggcccgagcgccgccagcggctggtcccagcaaaaggcgctgaagggctcctcgcgcacacccagaaagcggtcgacgtagcccaccgagaagtcggcggggtcgaggcgcgggtcccagcggatgcgctggatgacgtccgcggctgtgcgcagcggcggcttcttggccccggcctccggctgcgcctcgcggccaggcggcgccggcgccccagggtggggctggcggcagcgggcgccgaagcggcagcggccttccaggaagaagcggcaggccggcgggggcgcgggttccgtggcgggggcttcctgcggcaactccggctctctggccgctgccatgggtgcggggaactggcacgcccgccgcgcagacgaggtcgccccgcacggagggcggctccccatggatgcaccgagcctcacccgacagtggcgtcagcggcccgcgctccggcctagctctggggaccacgccgcgtgccctcgcgaggactctggcccagtccctccttggtggagagcctgacaccgctgctctgggacttcccggctgcgccctcccccagcgccaggaaagcaagctgcgtaaaggctgcggcagtctcggtctcccggagctcttgggagcctggccccgcccctttcccggtgattgatgtgtgctgcctctttctgggtgatttacatgtaatgccccgcccctttcgggatgattacgtgtgcctcgacctttaggtgatttacatgtagtgccccgccccgttcccggtgatttacatgtggtgccccgcccctttcctggtgatttacgagtgccccaccccttttaggtgattttttttttttttttatgtgtgcctctccccttcccaagtgatttacatatgttccccgctcctttcagggtaatttacatgtaatgccccgcccctttccgggtgatttacgagtgcctctccccttctcaagtgatttacatgtgtcccgccccgttccgggtgatttacatgcgtgccctggccctttcccagtgatacttttgtgctgcctctttccgggtgatttacgtgtgtgcctctccccaagtgatttacatgtgtgccctgtccgttttaaggtgatttacatgtggtgccccgcccctttccgggtgatttacctgtgtcccatccctttcccggtgatttacatgtggtgccccgcccctttcccggtgatacctgtgtgccccgcccatgaggggacgtctttaaagaacctggacccgccctcagtccaagtgatttacatttgcggccccgcccctctgggaaacttacgagaacctggcccctcagtccaaatcatttgcatgttcggccccatccctcgggggccttaaagaaccaagatgcctgcggacccttcccccacggagaccaggcccctactgctctaaaagtgttctcagacacttccctctgcagccgctcccagagtaaacggcggctccgccgggtcggagtccacctgaggcgttcagggccagaaggactcctggggctgcagcactctgcagccccgcctcggctggccccgcggtggctgagtctggcccggccccaggaccacgtccggccggcggtggcgcacagtatttgacgaatgggactgcgggagccgccgcctctgcaaggggcaccgcctggccacgccctcgggctctcttaaaggagccgcacccccaccccagggcaatcatcggacccggaccaggcctccgggtgacacatccggctctcagaggcgccaggaccctatcattcatccctttccacgtgcaaagtgaaaagtcagagcccgggcacacaccttggccgtttatgtatacagaagtggggtgccgggcgggaagggcgcggggaatgagggaacctagaggccgatgacgtcgttcagctcgaggtccgcgttggggcggcagcgggcctgggggggctgcgtcccggggcggggttccgcgtcgggcttggcggcagccgcctccgggcgcgccgcgtccatgacgcccagcaccgcgtccagcatggagggccccagatccaggtggaaggacagcagcgggtcggcaggcgagggcgctgcggactgcgggacggcgggcggcggcggggagcgcggggcccccgcggggggcgcccggggctcggggggcggcccgccgccgtggcggctcaggaacgaggtgtccccgaaggcgtcgccgccgcgc

SEQ ID NO: 67960 - DNA, 1051 bp, Homo sapiens
caggtgtttgagaccagcctggccaacatggcaaaaccccgtctctgcgaaaaatacaaaaattagccgggcgtggtggcgcacgtgtgatctcagctcctggggacgccaaggtgggaggatcacctgagcccaggaggtcaaggctgcagtgagccaagatcgcgccactgcactccagcctgggcgacagagccagattctgcctttaaaaataaacgaacaaataaataatacaaaacaacaaaataaagagtttaaaagtctggaaggaaagcaacatttacaagggcccaggctcgcccttccctccgagtgaccttgggccggtgacctggccggccagagcgcaggtttgccccactccgggcgggcactgcgggtcgggagctacggggcctggacccgggtgcgaggggcgggggtctccgccgccttcccggcccctgcgctgggggcccgccttgaccgcgcacgcggggctagaatgtactcacttgagcagcacggcggcgcctgctaccgtgcccagcgccgacagcggcagcaggtagcggctcatgccgggccggggacaggcgtcaggcgtcaggggtcggcgcggagcttgctgcacaccagccgcctgggtagctccgaggaagagcgcgcgacgcagccacaggcgagcggaggcgcaggcgcggctgggcccgcgtccggaactgggctgcgaggggcggggcgcgggcggagggggcggggatcctagggacgggacctatgagcatcggtcctgagcgctgtcacagctgggattggtggtttcaggagcctgtgggcgtggctagtccgggggcggggcctatggtttgttcgaatgacgtcacacttgccgcagcgtataaggcgctacgcagttctggagtgaaataggttcgaatcccaccactgtcaattccagactgtgaccctctgtgtgtctttcaactatatcagcctattccctcatctggaaatgtgtgtttaccttcttcatagacttttggagataatttgagaatttccatgc

SEQ ID NO: 67961 - DNA, 2626 bp, Homo sapiens
agcaaggggaagagggagtggaggaagacggaacctgaaggaggcggcagggaaggatctgggccagccgtagaggtgacccaggccacaagctgcagacagaaagcggcacaggcccaggggagagaatgcaggtcagagaaagcaggacctgcctgggaaggggaaacagtgggccagaggcggcgcagaagccagtagagctcaaagtggtccggactcaggagagagacggcagcgttagagggcagagttccggcggcacagcaagggcactcgggggcgagaggagggcagcgcaaagtgacaatggccagggccaggcagatagaccagactgagctatgggagctggctcaggttcaggagagggcagggcagggaaggagacaaagtccaggaccggctggaggggctcaacatcggaagaggggaagtcgagggagggatggtaaggaggactgcatgggtcagcacaggctgccaaagccagggccagttaaagcgactccaatgcggaagagagtaggtcgaaggggaatggtaaggaggcctggggcagagtggtcagcacagagtggctaagcccagggccagttgaagcggctccaattcggaagtggggtggtcgaaggggaatggtaagggggactgggacggggtgtcagcatagggtggcaaagcccagggccaggaacgacggggcggatcgagactggcaacggggaaggaggatgccccaggtggcgcagcagagggtggacctggccccgggagacgccgggcggggggcgctgacctggtgcagggcgctgataccgtcggcgttggtggagtccagcacggcgcgggcgggcggcggcgcggcggggtcgagctcggcgccggggccagggtcggcggcgcgcagcatcagacgcgcctcgtccaggtcgccgcccgcacaggccgccaggaactcggcggcgcgctcgaagcggacggtgcgggcgcggcgctctccggggccaggctcggcgcccgcccgcgccccccactgccgcagctgctcccgtcgccgctcccgggcagccgccgccgccgcccccgggccagccgccgggccatcctctccggacatcgcaccgcccgcccgcccagcgagcgagcgagcgccgagccccaaccgccgccaccacccgcccgcccgcccgccccgggggccgccgggaactgccgctggccccccaccgccccaaggatctcccggtccccgcccggcgtgctgacgtcacggcgctgccccagggtgtgctgggcaggtcgcggggagcgctgggaaatggagtccattagcagaagtggcccttggccacttccaggagtcgctgtgccccgatgcacactgggaagtccgcagctccgaggcgcccagtggaaatcgccagatgagggcctcctccggggaatgctgggaaatggagtctacaggccggaggggtgccccacggcatactaggaagtgtgtagcaccgggtaaaggggatgaatagcagactgccccggggcagttaggaattcgactggacagccgcgtgggagggagtgcggggagaggcagagttgttttgttattgttgttttattttgttttctttgttttgagacggagtctcgctctgtcgccacgctggagttcagtggcgcgatatcggctcgctgcaacctccgcttcccaggttcaagcaattctggctcagtccccagagtagctgggataacaggcgcgcgccaccccgccctgctaatttttatatttttagtagagacgggatttcaccatgttggccatgatggtcttgatctcttgacctcatgatccgcccgcctcggcctgtaatcctgctgggatgacgagcgtaagccaccatgcccagctgggttttatttattttggtttttttcctgaccccttaactagaaataagctccacgagagcgggatcttttgtcttctgtgcactacttgtcctcggttcttagaacagaacctgagagaacctgatcgcaaatatttttggaatgaatgaatgaatgggttcaccagggcaccatgggaaactgagtccgcaacctagaagccatgaaagacagtccacttccaagcttccctgggtgacctcgcagggcatgctgggaaatgaaatttgcggtgaaaaggtcaggaccacgatcctagggcacgctgggaaatgtagcccacagggccacacccctaaaagcacagtggggtgcaaggcagggccccaaggcatttagggctcggggcaagagaaatccacactccactccctaatggtaatccctgagccacaccgagtaaaggaacccaagacacagtgtccacagggacagggctctcagagctttcactggcccgcgcttctcctgcgcccacccggacctcctgggaaccgcccaggccctcgcgcgctctcaaggcatgctgggattggtggtcccgggcaaggagttccagcaggtggggggcgaatcacctttcagcgggcccaagcgatgagcacaccttgatcttcaccttacggatcccgcgcccaactcaagattgggaaggtggctggcactt

SEQ ID NO: 67962 - DNA, 1593 bp, Homo sapiens
cctctcacctcagcctcccgagtagatgggaccacgggaacacgccaccacagctactttttaatttttttgtagagacaggctgaccagtttctttttacttatttttatgtggctgatagaaaattgaaattctcacgtgtggcttccactgtgtttctatccaactaaagaacctgtcgcattttgtcagctctcaaccaccccctaccactgtccttataaaagaaataaaaataaagcagtggctgcctcttacctgtggcagtagtgacagtccccacagagctatttactccgtctttctccacccacacagaacacgtatacaatgacccgggtccaaggccatccacggtgacgttggtggctgttgtgtttcgagtctctgttgtgccgccgtctccagtacactgaacccagtagttggagttctgtgagtctaggccatcggggacctcccagctcagggagatggagctggtggtctgagtctccactgtcaggttcctccctgggttgggggctgagaattgggaaggaaggtctgacaaaaagggaaccaggtcagtacaatccctcccaacccctgagctcacgccccaagtccagaaacaacggcgctcataaacccctaccatggaccactggaccccacggggaccccccagaggctcacggcagttgcggtcccacctcttcgagtgggcagtgagttcaggcaggggtcactcaccaggcgccctggcccctgtccagctgcacaggccctggagggaacccagagaaaacggagtcagcctctcaaccactcctccgcccagtgaggccgaggggctgggaggagcggctggtccccgccccatgagtcacccttgcatgggaaggaggggccggtgttaggctgggctgtcacgacctcgaccgtctttcctgggtcgaggagagaagggggagcatggcaggagcagagcttagggagctggggttggctccacccgataaggctgagagataaaattaatgatttcatttcctgaaatatatgtccttggaaaaccgagggcagagagcaatgaacagactgggaagggagaaaaaaaccaaggttggggatcaggaaccttggcctgagggtggagggcctgggggcctgggggcctgggtctgagggaggaggggctgggggtctcgacctctggtttgagggaggagaggttgggggcctggactcctgagtctgagggaggaggggctggggtctggactcctgggtctgagggaggaggggctgggggtctcgacctctggtttgagggaggagaggttgggggcctggactcctgagtctgagggaggaggggctgggggtctggattcctgggtctgagggaggaggggctgggggtctcgacctctggtttgagggaggagaggttgggggcctggactcctgagtctgagggaggaggggctggggtctggactcctgggtctgagggagtaggggctgggggtctggattcctgggtctgagggaggaggggctgggggtctggactcctgggtctgagggaggaggggctgggggtc

SEQ ID NO: 67963 - DNA, 1819 bp, Homo sapiens
tctgagggaagaggggctgggggtctggactcctgagtctgagggaggaggggttgggggcctggactcttggtttgagggaggaagggctgggggcctggactcccgggtctgagggaggaggggctggggtctggactcctgggtctgagggaggaggggctgggggcctggactcctgggtctgagggaggaggggctggggtctggactcttggtttgagggaggaggggctgcttcctgtccgtgagcacagctgtgtgttgcctgaagccagtgtcccccgcagcagacacgacagtgtctaagggcccgggtgaagctggtgtcccccacaacagacacgacaatgtctaagggcccgggtgaagctggtgtcccccgcagcagacacgacagtatctaagagcccaggtgtaagactctcctacagtctctgccaagcctgaagccctcttccttctccaggggatcttcagcacctacttcctcaagatcgaggtgcaggcacccagctccttctccctcagacctgggagtccctgccttgggagcccgctctgggcggggagcacttaccagcagcaccaggttcccccagaccccgaggcccccgccagccccagccatgcctccagacactgccggggacccaggagtcccaggcctagtccttccacctgctggactttacactcaagaatttcccctttaccagatcattggtgaagccagaggccagggcgggaaggggaggaggaggaagtggaacccagctcccaaccctgccccgctggccctcaccttcctccctcaccgctgcctctagctctgacactggagatgcctcccatcctttctccagcccccagcccactccactttgtcccccgaaatctccctctgcaccccaggtaccgggtgccgcgccccactgctgcacggatgcgggacgtggggcagaggatgagagcagggggtgctgagagaaaggccagctgactccctcgcctccctggtgggtgatcacacatcaagagcagcctggggcttagacctcatgcccctcgtccctggagcacgctcttccattcagcctctgacgcctttcccctctccgtctcccacaagcccctgcagctctcacaaaatgagcccagcgggctcctgcctcttggcctttgcctagactgtctcccccaccagatgcacctgcctactttccccctaacagtctcctacccactgctccattaggattcagcttggaaatgacccatgccgggcctggggcctttctagcctggtcaggaccctgtgcactgtcttccacaccccagactctctaatttgcatatccatctgtgaccctgagcaaatgacttaaatccacagtgactcagattcctcatctctaaagaatgggcacccttgtaaatatgctaagagaaatagatgagttactacgtggaaagtcttggaacaatgcctggcccattttaaacagttgataaatattagtcatgtttatttttagttcatccctaggccacctgtgctcagaaggggcctgacacccagggcttttcaaggtgtttttgttgacttactatgtgcacacgtggactgccttcatctcacatatagtgcggaaatgaagaatagaaaccccagccgggcatattggtgtgtgcccagctactcaggaggctgaagtgggaggatcacttgagcccaggagtttgagaccagcccgggcaatatacaaaaccccatctttacaaagaaaaacaaaaagagagaaaaaattacccaggc

SEQ ID NO: 67964 - DNA, 1318 bp, Homo sapiens
tagatttttttttttcttttaaatggaatctcattctgtcacccaggctggagtgcagtggcaccgtctcggctcactgcaacctctgcctcctgggttcaagcgattctcctgccttggccaccacgcctggctaatttttgtatttttagtagagacgaggttttgccatgttgactacgctgttctcgaactcctgacttcatgtgatccacccgcgtcagcctcccaaactgctgggattacaagcatgagccaccacgcctgccgcgattagatcattgatctcattgcaggtgaaccagtccagacccccatccaggttttccagcttgctcgctcctcacgctgtggctgtgtcctgtgttgccgtgtttccgctgaatccagcccttgttttcgctcttcctggccttgcgggcagccaggattgaaagatccaggaagtgacaggggcctgactcatcaacttgtaagagagctggggttctcctagatccatgctcgcactgaggtgagaaatgagaagccagggccgggagcctcctgggggttggctgccaacgccaggcaggcggggaatggtgattttcgcttgtatcgtggaggatgccacgcacagacgtgaatagaaagagcctggaccgtgtcctgaggtcagcgactgaggtcctgggtggggccagccaggacctgcccgggggctactgccctctgaatcaatacctccagggaccctacgttgacacccatggcctcccactctccacccctcagtcctgcgtgcggcacgtagtgctcactgggcgtctgtgtagggggttgaaggctgaggctggaacaagggcgtggcggtcgcaggctccagggcacgacggtccttcctcttccccttctcagccacatctggggctccgtccctgcagccaaggctccctggcgctgtccttggtgctgacgcggttctggaagtgcggtgccagggtggctggtgcggctcccgatggaaaagccccaccaaccccacaaagcagactcgggagagaacacgccaccgtctttagcgaatcttaccaacccagggccaaagcgccctgcaccccagagcagcactcgtggtgggaacacaggctgatgtaataaacagaaaagtgactgcgggggatggggaaggcgggatgtccttagcgtcccatggaaaaaacatatttcctccagatgggatcatcgataacttttttgagtcttgagtaaataacttcgggcggggcgcggtggctcacgcctgtaatcccagcactttgggaggccgaggcgg

SEQ ID NO: 67965 - DNA, 699 bp, Homo sapiens
aggagaggatgaaggggctcagccacctgcagacatctgggcgctttggggagtggggagctactgagccgaaacccagcccagcccccattcttgggactcagatctcatggctcctgtcccacccccacctgggaccccagctgtacaggctggacccattcagggaccaggctgccagaacccagcttcccagggcccaaccaactcaaggacagcagctcccagacccgccggctgctggggttccagggccctgtccccccagccccaggcacagctcagaaggctctcacctgggctgagcagtgagtcttcagggtctgccccgctttgccagcgtccatgctggcctgatagccccagagcgacctaatctgggagcgagtggcttcagggggtggaggggagggctcatggttacacgttaacccaaggagcgtcctgtggactctgtgactgataacagggcccagggagatgttgtcctcaccctggggatggccctgcctggcgcccgctgataaagcactgttggcactgggggtccctctgccctagcctgctgggacatggcttcctcctcctatctgcctggggaggttaggcccacaaatgcctgtccccttgtcctgggccccaacaatcagaagagatggggtgcagaattccaacagccaccccatcatgggaagcggg

SEQ ID NO: 67966 - DNA, 2763 bp, Homo sapiens
ggtcccattcgaggcctggataagcacgccgggcggaactactctgcccctcaccctcccaatacatctgcactcaggactccgaccttccttccttgacatatctgcacgtgctgctccttccccccccggaaggcccttcttcccactctccatctgtcacctcctactcatccttcctagacagaaaaagccgtccgtccagtcagtctcaccagtgcctcccgctctgtggccccctgcagctccctaagtcacctcgatcacgacacgcaggaattgtgactgtccggctctgcctttgtaccccctccagggaccggccccacctccagggcagggcctagggctgatgccccctcctcggtgcccagcgccaggctccctgcctgccctcagcaggcttcatctcactgaagcaggcccgagtggtggctgctccagagaagccccgctcccaggtccctcgcacaagaagccggaggcgggagagggtcggtcaaggtgaaaacaagccccgctcctccagtcctgagctccggggatctaaggaggctgcgccacggaagaggtggcggggcagagatcggggcgagagggaagggtgtaagcaggcaaagtccagggtaaccagggagaaagactcctggggggccggggaaccggccagagaggcaagagagcggagctgaggctcagggactggggagcgcagctgcagagagcgagtgggaaaaggccgagagcaagagactgagactagggtggcggcggagctgaggtgaagagattaagagactggggagggtcgagggggaagaaacggggtgccgtggagaggaaacccgaaggaaggagggaaaggatccgaagcagaaaagacccgcgggggtcccgagagggaaaagcctgaggggacgcggagaggggaagacgtgggcgcctggccctggagagagagggtcgggcgacgcgggccgctcacctgcgagggggggcggcggctcctcgcactcggggctcatcggggcgcccccccccgccccgccgccggcggctccggcccctgctgcggggcccggtgagtgggggcgggggcggcgtcggggactcgcgcaggcgccggggctcgcggggtccgcgcaggcgcccgcgggtcgtggggtcctcgcgcgccgggtcctgcagagttgagggggtcagcgccgggtggagttgccgacgggcggggggcgtcactagtccgcgtaggcacctccggggtccgcaggcgaggtgggcgtgcgggccgaggcgggttggcgagccgggtcgcgaggcccacgcaggcgcctcagccgggaagacgggggaagttgccccggtttccacagtccaaccgagcgccccacgggaggggaaggcgacctcctccgcggtccaaacgggccgcagagccgagcagcgaccgacggaagccgaggcctacttccttaaccaccccttccccaaagccgctcaatctccgggctctgcggccggcctcagggcctccgacgcccggctccctccgccactatcccacaatccccctagcgcaggacgacgcaggaggccccgccctcccgcggctgtgttggtgcgcaggtgcggggggcggggtgcacgcctgggcggtgcagtgcgcgtgcgcccgggcgctcccgacaccgcccactcttgaaccccgccgccgcagacgcgcttgcgcccgttggtgccaacggtctgccccggaataaacccagacagctcagtgagccgcagctgcgcaccggctccgttccaaggccccgtgaatattccgctccaggatttcccttcccactcgctccgtttggaaatccgttcgctgttctgtctcctctaatcatagtggagctttggctccagggtcgggctcttgcgaaatccagacctggttttcgctccagccaaagccaggcgccttcgttccgtccggctctcgcgcttagccgcctccgagcctcagaggccctcagtcgtttccgtctgctggcgatagtcccggccgggtcgctggtgttgccagttccgcccaaagcagcttctaatagcatcaactgaaagagacctcctagaccttgtgtctagattgatgaaggtccctctggctttgagcctcggtttccccaactttaatagctcccctctctacccatgttagaggcctactgtaaaaatcgtgtgggcgcgaggaacttttttgtttttgtttttgttttaagactccgaattggccgggcgcggtggcttacgcttgtaatcacaacactttaggaggcccgaggccggaggatggcatgagaccaggagttggagaccagcctgggcaacctagggagacccccgtctctacaaaagaaaatttaaaaaattagttgggcctggtggcccgcgcctgtggtctcagctattcgggaggctaaggcaggagaatcgcttgagccgaggctgcagtgagccggattgcaccactgcactccatcctaggagacagagcgagaacctgtctcaaaaacaaagggcccagcgtggtggctcacgcctgcctgtacttgagctcaggagttcaagaccccacgcctataatcccagcactttgggaggccgaggtgggcggattgcctgagctcaggagtttgagaccagcctgggcaacacagtgaaaccacgtgtctactaaaatacaaaaaatagccggacgtggcggtgtgcgcctgt

SEQ ID NO: 67967 - DNA, 1343 bp, Homo sapiens
tcaatttgtaaatgaagaacttgagattcagaaagatgaagtaatatacccaaggtcacacagctggaaatgctgaatccaggttagtctggctctggagaggatatgtcccctcagactctcttgagatctgaccttcagtcaacgataaccccatctagcacaatttatagcccacaatgcctccacacctggttttctgcctcccacccaagaagaccctagtcttcttgtggctccccaagtcacacttcccaaggcaactctatctgtccccaggcccctcaccccagcttcttgggtccccatcctttacctcctcactcatcggttctggaggagggtctggctcttcagagcccgcggtgatggccatctgcagcaagccttggaggttgcgtgggggccgggaattgcccgagcccccagccgaggagccgccgccgccgccccctgaagagcaaccctgggaggccgggggcagcgccaggggcaggcggctcccccttgagccttcgtctgacatgggccgtttgtgaagaagggaagaatgtgttagagggagaaggtggtcaccgctgaagcagctctggcgtcctgatgggtcgattcttgagggtctgctgagaaggcggcgtttcaggggagctcggcgaccccccatgaccccaaaccactctgcccccagcccacttaaccacagccccttttccttccttcatacccacaggacccttccccaaagtcataagcctctcctttctccctagcaacaggccccacccactctccctggcaacaaccccccttccccatctccactgcgtgcgtcccgtctcttagcaacctcactgctccgcctccgtagcaacaagcccgccctttggtctccttagcaacaagtcttctccctcctctccgaagaggggcgccggaataaggcggatctcacctccccgggtcctcaagccgccgctgctcctacagacaaagtcgtccgcacctgactctgctgggcgccgccatcttaaccggaaatacgcacggtttcacccggaagtgccaggcgtacccacccaacttcgtgccgtggttgcggctgaagctgcttgcccgactcttatccccttctcacctggcgggatactgcactcggccccgcccctcccatccgggccccgcctccaagctgggacgccccttcgtgcgggcgccgccccttcacgctcaagtagctggtcaaagccctgcccctggcccagttttcgcacctcagcgagtcccgcccccgatacttttgcaagctccacccctcttctaacgtgtgccccgcccccaggtct

SEQ ID NO: 67968 - DNA, 500 bp, Homo sapiens
atgtttagtagagatgaggttccactgtgttattcaggatggtcttgatctcctgacctcgtgatccgcccgcctcggcctcccaaagtgttgggattacaggtgagagccaccgcgcctggccaaaaagttaaatttaataaataaataaataaacactttagcacattgactttagaggtgtccacattgggcagaaacggccaggctctgctccccaccccatgcttagtcatcggtcaaggctgcataaaaagaatgtaatagcaatccaaatcaaacactgctgaaggtgctactgctggaggctggagaccagctgaagtcctccctgctaatcaagttctttcaggaagggtgagccacctggctaccgtacttgcccaatgtcactcagctaccgagtggagcagcttgggtctgtctggctgtaaagtttggttccttcctatgtgccatgcaatgcccttgaatatccctccttatcttcacccatccaa

SEQ ID NO: 67969 - DNA, 405 bp, Homo sapiens
tttgctttgtgtctctatggatttacctactctggatatttcatagaaatggcgtcgtaccgaatgtggcctttcatctccggctcccttcacctagcatgatgttttcacgggccatcggtgtcccagcatgagtcattccttcttattttattatgccacctgaagtctgagacccaccccgccagctttcagcagctggtttctttctgggcagtgcggccgggagcttgagagtgcaaagtgcactagactctggagtcccatgacttggatgttaactctgggccggttacatcatctctgtaagcctcactttgcttatccgtaaaatgagcattataacagcccctccctcacagggctatttgcaaagtggctgctgtgtggtaagagttcagtaac

SEQ ID NO: 67970 - DNA, 2368 bp, Homo sapiens
tctctctctctctctctctctctctcacacacacacacacacacacacacacacacaccaaaacaccaaaaacagcacaccaaaacagcacctactctgtggcatgcattgttttaagtgcccacgatctatagctgtacagtggagcgcatgtctgacagtgatcctatatgtgtagacacacaagcgcctacattgtgttaccggacagtaacatgctgcacagctgtgtggcccaggagccgccggccaccttacagcccaggtgccagcagccctgccacgtaggtgtgagtgatgttgctctaggatgctggcaggatgacgacatcgcctgagcacgcactgcccagatggtatcagtgtcgttaagggaagaatggctgtggcgaaacaaacaaacaagcaaacaaagaccgcctgttctgagtgtggagcttattattctcggcgtaattatgatgaattgttagttacgtttgcctctaggattgaggtagggggggtgatcccaattagggggtgccccaggggagcgccccaggagtcagggcttgtctcaaaagtccccactcctccctcagcctcccctccctccatccgaccccgttcatatcgcgggaaggtcccacagagtgcgtgtggatactcccaaaacgcaacggtgtaaacggggagggagggagagagactgaggagccctttgtagccaggcagagctgtcaataaagtttcgtcgccttggtaaccgcaggcctcgcggggcgggaggggagagggatggcggtgcgcgcgcattcaccgcctccctcccgccgggtctggctttctccctcctgtggccgaagctttcctcggagaaatagaagagggaggccgcgactctatggtgatggacggaggccttacccaatggaaagaggagctgtcccaaggccaggcaatcatatacgactactggagctggcagagcccgccctctttccacttggacctgaataacccgacccaaaccgagtttcgcccggagagactgcgctttcggccaatgagtgcgtcgatttcgagccccagtgtgagcgaaggcgggacaagtctccatggcagcgactaaaggacagcgatgtgaaccactgacaacagttcgcggcgtttgacggcggcgggggcgtggcggggttttatctgtgtattgacgagagccgggcgcggagggaaagagtggggcttggccaatgggagcgccgtgagcttcgtagcaacggaggagtggcggtggctgtggccaatagaaagcctcagtggccttggcggggctggcccggagagcagatgggaggtgcggcgacagtgtttgacgagagccgaaggaggctgtgggaggtgttggcggcggcggcgcgggcgcctgaggaggaggaggagaagcgggtgaggggcggcgcggggcccgatctctgagccccttcacggccccagccccgcgccgccttggctccccagtcgccccctgccccgactgccccccaccccgcccggcccctcctcgtgtccaggcgcccacgtctcccggcccctcgccgggcctcgggctccgcggcactgcagcctccttcctgtgcttcctcacccgggccctgacccccttcttacgtccacggccctccctgcatcctcagggcctctccctgacctcttgtcactctccaggcctctccctgcaccccccagggcctttccctgacctcaccctccaggcctctccctgcacccccaggtctctccctgcaccctcagggcctctccctgacccttctctcacccccgggacctccctgcactcccagggccaatccccgacctcctctcaccctccaggcctccttctggaccctctaggtctttctgtgccctagaacctctccctgacccctctgtccctctcctggcactccctggaccctgaggtcggcctctgaccctccaggtcccttgccctgggctctcaccgcctacccaggcgcctccctgggtccccaggcccttccctagggtctccctttcctggatcccccaggaccccaccaagcccgtttggatccctgggcccctgtccgccctctcaggcccttcactcactggacacccaggatcttctccgccatccctggaccgccccccgacccaggtctcccgtctggctcctccctgagtccctaggccattccccgctctctgtcctccctggcacccccatcccttcctcacacccctctgagcgcccccaggcccggctgcagccttctccctcccacagccccctgccgtgcccaccgctgtgcgtttctctccttgcccccagccccct

SEQ ID NO: 67971 - DNA, 3555 bp, Homo sapiens
tggggctctccccgtgcggggggcctaactgtgtgactcgacccccacacttcccatctccaggggcagggtctcacagcctcccccacgtatgcacctgtgcttgctgtgtctgcggttctccgccagagccttcccgtccctgtctccaccccgccctgggactctacctccccatggccgctctctgtctccatctgtccatcgctcccccgtctgtctccattcccgtccctccctcggtccctccgtctccccgccctgccccgcccgcccctcacctgggcctcactcgctgcccgcgcccgccgccccgggcccggcctcgagcgtggcgagctgcaggcgcacgcggcgggagccggcggcgggcggcgggggcgcgcgggcggctcggcgcgctctccgggagccgggcgcggggcgctggcccgcggcggcgggcgccgaccagcggcgggagagcttgcgcgccaggcgggcgagcgccgagggccgcaggccgtagtcgcgctccagctcctggcgcgagatctcgatgttgccggtgtaccagaggatccagcccagcaggctcaggaacaccagcagcgcgcccgagtagatgagcaggtccccgaagtcgcggccgcgcacctgcagctgcgcgaacacgccggtcagcagcgccgccatgcccgccacatccagcgccacggccagcagcagcgccatccggcagcggcccaggccggccgcgggtgctggcgcggccgccggcgcggacggtgcacccggcgggctcccctgcgaggcgcacaccgctggcgccgccgccatggccctgcaccgccgccgctggcgcccagagagagcgttccggggtgcggcccggtccggggcggggtcaggggacggcgccaggtgtgccaagctcccgcctggtcacctgaaccgggctgggcgcgaaccggcgcggccggggttaccctggtcgtggtttccgtgcaggggctattgctcagaggcctgagctggtggtagccaggcgcacagccacgggtgcctagggcccgtgccacccagggaggtcacatatggccaaaaatcagggcattttagtggtggcagcatgggacactcggagccgggcgtggcgttgtttctgctcagtgtccgcctcccgaagcctgtgcagatcagacagtgcagatcagacaaggcctttagacaccaaggagctctgggacgcgagaaccagtagtcggggtgatctaagaggggaagctccgggttccgcggaagctgagtttccttcactcagcgcgtgtcttctggggtctcctgtgttcagcgaatgaagccacgggcacaaggacggacgagacccatcaggtccagagcgcacccgtggaggaagctgggcgaaccccgactgtcctatggaggatagtcctatggaccagacgaagcccctgccccaaggagtgcccgggtgtaaccgcaagttaaggagccctggggaggtgacacaggcaccctcattccttttgttcagtaggagtctctgaggcctccccagcaccatgccgcgtgggtgaggccgaggacacagagaaatatcaggcaaggctcctgcccccttagggtggccctgacaacggatcataacctcccagggagctgatggggtgtgacaggcacaccataggctggaggcacaggtggagggcagggaagaggaccggcaaatctatagaatcctaaagggagccaagagaagccacatgcaaatctccctccctccaaacaattctcccttagagggcatccgcgctcccctggggtggcagtcagcgagaagtttccgtgtaggttctccccaggcttaaacagtttaagagttttatttcaagaaaaccctggggagggcgaactgcaagagggctgccaggattagccgagggattccgaatgaagacggagtatttccgaacatacacacctctcccaagagcgtttccggagggttccgaaaatacccgagcgggcctcggcgccctcattggccatcaccgcgagggcttacgaagaccggaaatatccaaaggtgccggggctaggcttatatagttcacgcattcaccagttcattcataaaacaaatgtttgttgagcgcccatcatatgccaatcacagtgacaagtgctgggtgagcaatactggagagataacgctgaggtatgggtcccaggacctctcgaattggagccactcggaaatccagcggtagagtttcgaaaacttccgaacggttcccggaatacgctctcggccctctaaccgaagagttccgaatattcccgagcgttgagcgaattttcggcggaagcagccgaacatcatcgagccgcctcggaggtggggaccgacaactcctgtcgtgcccgcccggagaggaagcggaaatgcgtgtacggtattaaaggcgtcgcctcgcccctcgccttcctctttccgtctcaggtcgccgctgcgaagggaggtgagcgttcgtcttcctcgcgtggtcgccatctccggcccgccgcgcactccctctcagtcctctgcctgccttctccccttgcgcctcaagggtcattggcggaccccaacccctccccgtgaagtcgttgtgaattttcaagttattttcccctcactctcattcgccgcagctagtctcggctgcctgaattcggtcccgccgccttaggtcactcagtcccgcctgacaagagttctaggtcgctgtctgccctcaggggtctcccattcacccaagttcccagtcgctctcttcctctgctgtccgagcgtggcccgtggcctaacgctgctttagttctctgtgtctgacgctttccctgtgcccgtttccccgcagccgccgccatgtctgcgcatctgcaatggatggtcgtgcggaactgctccagtttcctgatcaagaggaataagcagacctacagcactgtaagtggggcccggatgcgtggctcctgcgggaggagggtcctgagtctcttgactctgggtcagagggcgggaccttcgcatgtctccgggtcccttattcacgatgccttgtgccgcctccttcccaggagcccaataacttgaaggcccgcaattccttccgctacaacggactgattcaccgcaagactgtgggcgtggagccggcagccgacggcaaaggtgtcgtggtggtcattaagcggagatccggtgagttttgtctggtttgggccagagagcggcccctttcccgggtctgggagctgtgattttttactgtcaggcaggaagagcggtaactgccatcgcggcgggcatccctggcgccagggtgttggtctgggtaccggcttccctctcggccgacttgtcagctctgtgagccgcgcgcgtctgagcccgtgtcctcacctgtaaagtggagaaatgaaaaaggacctgaacttcctcggtggttgttgagagttaaggcacggggttgatgttttcagatgaaattctcaaagcaagtc

SEQ ID NO: 67972 - DNA, 1467 bp, Homo sapiens
cccccgaccaccttcatgggcctcatcgcccgtgctcaccatggctgcggccggccgggggcgggtccccccggcccccttcctgcgttcttcggtccgccggccggggcggggggcccaactgctgccgctgcggccctggagaggccccggcggccccgctccgctccccgctgcctccgacgtccgccgcgcacagcgtagaccaacccgccgccccggtgcccggcagcactgagccggccgcgcgcgcaccactgcctctttataaccgcccgcaggccacgccctccgcggcccctcagctccgagcctcaaccgtgacgtcagcgcgcacgttccttggttttcgacgcgctcgctcccttccccgcaaactatggtcagaagcgagggaagtggcggagagggctgggtagcgggccggccaatgggggcccgcgggggtcgggagggttctcaaagaacggaggggctgaaaaggggaagaagagaggaagggggacggggaaggcgacgcggccgctgattggaccgtttgaatgagacgccgccacggcccggcatacgcgcgggcgcgccctgacgctgaggaagtcgcgcacgcgactaacggtcttcctgggggccggagcgtggcgaggggaggcgggactcggggttttaaacgcgtgatggaaggcgctcgggccaatagggatgcgctttagtgactggtgggtcacgagactcgcatgggccaatgactgatagagaccggtcagagggcgacccagtttcgtgcagatcaaaccgctgccagccaacgaaatccgttgatttttgtatatgcaaatgaagtgtgcgctgccgcccgcgccccctcctttgagccgtggtggaggtgggcgctggaactccgactacatttttctatgaggcgccattttgtgctggaaatgctcttggacccacgtcctgtattgctaaggctcaaagatcagtcagaatgaccttgaaggcttggacagccttgcactccgtgtgtgacccccactcctgccaggcttcatcgaagacgccagcctcagtttccttatgtgacaaatgggcactgggatccgttgtattgccagggaaagaagtcagagagtgccaagacggttattcacggcatggttatgcctatgactgacccatggcctccagccacacccgccttctctgggactcagtttccctctctaggaaatggacacatagctgcctggaaaagggaccatctccagccctcagtgtcagtaaaaacgtcaggcaattgcttgagaacggtggccagagctccctgagcaggccttttggaggggcttagagaggaggagggaatgctgaagttggccttcctttgctcatctgtgcagtgcggtcgcagtgccctctcggtgtctctgccagtctgtgcgtccacagctcttcttagtttcttgg

SEQ ID NO: 67973 - DNA, 2610 bp, Homo sapiens
tctggcctggtaggagtgtgggtcacaacaactcctagggacagccgagcagctgcatttctcaaaatgatggatacacaaaccctctgacctcaaaagctgctcctaagcatttatcctacagacattcatgtgaaacgacacaggattattcattacaggactcttccccagagcaaaggagcagaagttaagtatcaatgtccacaatgagggtactggttacgtaagtcatgccataactatactctgttattcctcgcagccagaaaaaattacgaggaagctctttaagtaacaatacgaaaacatgtttgagagaagtgaaaaagaagcagaacagtgtgtatggaatgctcctttttgtgccaaagaaaaaagggagaggaaaatgtgtctgtgttgcctatatctatatctgctatctctggcaaacaagcaagaaacgggagactcaggcgggtgaaccaggcaccggggaagtctgtaggagccttttcactgggtcctattctgtttcttctgaattctggacaatgtgcaacaagttgtctagtcaatactatatacaataaagggttggcataaagccaaaacccggcaaaactgatctatggcgtcagaagccaggacagtgactgcccttggaccacagtgatggaaacgacgacggcgggagatcctgggatgtggcgcatgtttgacttttttctttggatacttgtttacaccagggtgctccctttataaatatttatttaagctgtgtatttgcaaaccgttcgattttctgcgtttgtggtattattccagaaaaagtgttcaaaatgcaaaatacaaagatggcttcaggcccccgccgtgcggttgaactggaggcaaaaggccagagagcaggaggtcggcgctggggcccagtgggacaggggagagtcaggaaggggcagctgggacggtggggaaagtcggggagaaaggcccccagtttctggtcgagcgaggggcatgatctgaagattcataggggatcccggggaggggaactggtttttgggagatgaaaaattggggtgagggtgggtgtgtgagagagagagatgtgaaggggaggtctgggctggagagggttgggcgtgtcctgcggaacgaggagagattcagcctgggtggagggtacccaaggccaaagggggcgtggctggaggtgggcggcaacagggggcggggtagggccgttgatttccccacccggtctcggaaacccggccttggagcccggacttcctggctgtgtgaccttgggcaagtttctctttgtcttagcctcagttttctcgtcggagaaatggggattaaacctgcccaccccccagcgctgttacagaggcggcaggcgcgacccggggacgcttccaatctctggccagccaattctggcggggccaggtggagtcctccttctggtcctgtgaccttggcccgggacgcccaggcagagcctcagtttccccatctgctaggcggtaaggtcggtctccaaatagcgccagcagcgagagaggacttacccggaaggtgccgggttcgagcccggaacggcccctctgcaggtgaggcgggggcaccctcacctctcggctctcggacggccaccgctgaggcctcttgcgggcttcccagggctggttaccgtttcgttagggctggacacgtggcccaccccctgcaccgtccgttttccgcccacttgggcccagccgtccaatcgacactcatcatgctctgcctcgccgctctctccggccaatccgcatgtgccactgcctctgcccgcaatcggcgctcaccaactcaccccgccccctgcctctcaaccaatccgcatatgcagctgctttgctcccgccccagggggggcggtgccggcaaggctgtcagtctcaagaaaatgattagctcgcaaaggcgccgtgggggcggggcagcaggtcgttctgccaatggagagccgtagagggcgtgagtggcggccgacggggcggagtcgcgcggtggtctccgaaggctcagactctggctggagagagggcgtctcggccggccccattgcacagagcagaccgccgaggccgggagagagagagaggggtcttacctagagtagaggcatgtctgcggttcgaaacctggccctctctcaagaaacggaggcttacaaagatacccaagcactttccaggaaggggctggctgagggagcgatcaagtgaggaatttgacgcccccctgtcctttgcgctctgtgctgcctcagtttccccatctgtacagcacctgcctcctcgggtggtgtttagaataatttagactctgtgcttggaaatggaggttgagagaaagagagaatttcctatctgtcttggaataaatccaaactcctcccaattcatggtcggccttcctggtccgtgcagacctcgcctctcaccactccccctgctcactccgctccagccacaggggtctcctcttgctcttccctcaatgtcccaccgcagggcctttgcacgtgtgctgcctcagcctggaatcctaggactccccatggcc

SEQ ID NO: 67974 - DNA, 801 bp, Homo sapiens
gcttaagctaacctatgtccaacggtccccttcgccccccgaatttctctgctattctcctgcctcaagatgtccgtgagtctggttcacgcctgtggtattgggggtggcctgaaggtgaaggtttcctgtcctgttctgctccaggtctcaggtacagagggaagggtccagggtcccttggcaagaggccgaagggagaagacccctgggtctctggaggatgggaagggaaggattggctctgagggccgggaaggggcccgccgccacgtggctggggtatgacctttgctaccttgatacacactttatcgtgtgtattcacatctggtagctcttatttcaaaatttgcattccacagtccaggggccaagagcaacatccgccggccagctctgtcccactcaggccggccagcaatgcacagggcggccgcctgcaggctgcggcctcgggactgtccaccagggggcgcccacccggccggtgctgggcggcccggctcaaggggtgcggcccgagaacttggggccctctcctgtctcctgtcattgagaacaatcaaccacagcagggagctggcttcatggggtctttgttgaggacctgcacttccaggtgctggaaggtcttccccagcctcctctcccctatcccagcccttgaaattctgtgtgtgttgggggtggatttagtcattcaacaaacatttattgagcaccttgctttactgagcagtggaggaggtgaagtcagagaagccgagggggcgcggggagcagacctgccgggctttg

SEQ ID NO: 67975 - DNA, 1856 bp, Homo sapiens
acgatcttggctcactgcaacctccgactcctgggctcaagcgatcctcttgcctcagcctcctgagtagctggggttacaggtgcctgccaccatgcccggctaatttttgtatttttagtagagacggggtttcaccatgttggccaggctggtcttgaactcttgacctcaagtgatctgcctgcctcagcctcccaaagtgctgggattacaggtgtgagccaccgcgaaaatctctatctggagatattctgagctctcctacggggtgtgtggagcggggctggggatgctacctgcatctagtgagtgggggccctagagtgtgtaggacagtccccgctgcaatgaatccatcccaaatggcactagtgctctggttgagaaactgcgtttaatgaccctcagaaaagccagtgtggctggaacgctgggttgggcgggggttgagcgtggagaggggctttggagcagctcggtctcccactaaaaccctaggccccacaaggagtctgtggattccagcctcccagaacagacctttgcccagcaggaaccaggtttctgcagcgtctggatgagcgtgcacgaagcacacgcccgaaaatcctgagcacgtggctctaccgagggactggaagcgctccaggcctcgttttcccgctggagcgattacaccctgggggcggggcccgcttcacgggagggatttttgtacaaccgtggtgcatggaaggatttttttgcagatgagagggaatcgggattaataaggggaacttgcgaccccgcgtctcgagctggccgtccctggccttgggctcaccggggcctcggcccccaagacctgacaactggagtccgcgaccacaactgggagaactacaactcccaggatgccgcgcaccgcctgcgcccgagctcgacgaggcctcgcacagccaatgggagggtccgggggcgggaactcggagtacgtgcgttgtgacgcaccgacggcgacgtcggggtttgtgtgcgcgagaggccgccgataaaggttgggtgcctcgcgccgggggccgttgggagggagtgcgcccctgccccccctccccggtccccacagctgcaccgccgctgccggggccccaccttcccgtcgacccccgcgggaaggtcctggggctgccaccctcgttcccccgattggggccgcaggtgagagaccggagggggtgggggtggggggagggaccggagggcggagaagttgcagggggtggggcgggggggggggcgtgaaaccggaaggggtaccttaaaggggagtcactatttcacctccgacatttgccagctaggccgggtccgccctcttaaagggcaaggggccacattgagagggcgggtcaggctttgcatttttacagaagctttctgacttaaaacaatgtttttcccctaaaaggcggttatctcattaaaggccagtgaccgtttcccagacattgaagcaaaaactcctgagtcctggttgcttcaaagcgatccctggtttagctcaacaaaagtggagatggggctccagtggcagcatccccttaaaggggaggtccagcctgctgaacgggtgtggcgcggccttttaaaggggatgtcttcttgttaaatgggaccccgctctttcagggcacggatatctcttttaaggagatgctggggcttctcaaaggcacgtgcagcttcttagcatcagtaggtttgttttttttttttttttttttttctggagacggagtcttgctccgttgcccaggctggagtgcagtggcgcgatctaacctgcttacatattaaagggtacacttatc

SEQ ID NO: 67976 - DNA, 538 bp, Homo sapiens
cctggtgaggctgggcaaggagcacgcggccgtaggagccggagcccagcttccggatgaggtggtactggtcccgaaggctcctcaccggggtcaccctgctggtcgtcagctccaccagccgttggagggctgtggctgtgtcctcctacgggagaggggcagggtgaggagggggcgcgtctggggtccactgagagtggtgggggaggaggtcacggcgcagccccaggatggagggtggggcaggggacaggggtcactgtccccagagaggaggatgagtcacagtgactcacccggactcgggccacctgtttttgtgtcctggagaggttaggggtcactgccacagaggccccgcctgcccctgtctgtgggagcaggccaggagcccccagccccgagtgggggtgcatcctcagcccacacagtccccctgcccaccctggtctctctctccaccgtcctcttcccctgtgcatcccgctgtgtgtttctgagtccaattctctgggggccttggtctcgctgtgtg

SEQ ID NO: 67977 - DNA, 426 bp, Homo sapiens
tgagaaagaaagaaaagaaagaaagaaggaaggagggagggagggagggagagagagagggaaagaaagaaaaagaaagaaagaaagagtccatgtgtgtcagatgaacttcattcaggtatgagctgtactcctgctggcggtgagttcaatgacaatgaatcaacaacgtgtctgtaaaagatgtctttaaacagaaaggcaaagtcagtgaggtattgattgtttgatgaagatgttgtaaccagcggcctgcaggaatctaaccctgtatttcccccagtggcaatggcttggtatttgccagtttggtgttctcagcaacttcaaggaagatagccaccatgaataaggagaatcgagtgtgtcgagtgaaatgaaacatatcatcaggactattttcaccttgtttgcatttacttttgt

SEQ ID NO: 67978 - DNA, 2550 bp, Homo sapiens
agaagagacagaggagagtgaggaacacccagcagagagacagagacacagagaagaggaaacaaagagacttggagaaccagaggcagagatagtgcaagagcagagatcagaagagcagtggcgggttgggggccggagagacagggagacagagacacagagggagtgaactgggcagaggcacggagggggacaaagtcagcgaaccgcttctgctccaggtcccccggccaggctgaacgttttgggaggggctgggacacagcccatggggcctgagtggagggggtgggatttgaagccggtaggccccggaaatagagtgtgttctcagatgccaggggctgggagaggtcggggagtaggagggttcagacttctggtctgagttgggagggggctaggggcccagactcttgggactgatggggatgggagctggggattgagactcctgggtccaggtcatgacggattggggaatctggactctggtatggaggaggtgtggattcctgggtcccggtggaggaggggctggggagggggctgggctcccaggacaagggggaggcgggggctggggacccagctgccgggaatccccagggaggaggcgactgagggccggacccctggactcgggagggaggctggtgggggtcgggggtcccaggtcctagaggggggccgatctcctccgggccaagcctgcagctccccgaaggcatgatcagcagaattggggccgggtcgaggccttgaggatttctcagccctgggcctggggcttggtcctggtcgctggggctgggttcttacctcgcctccttggctcctttcttccttccccacggccggccaaacgcggacggtggtggcggggagggaggggggcctgagcgtggtggggggtggaggaggaggctgggctcggtgtcactgcctaagccttccccccggaaacctggcctttcctcggagcctgaaagaggaaagactggctgggaagccggaagcgggaggacgggggacctggagaggggagggaaggcagcttgcactacagggtcctgtgaggggagggggctgggggcctgtcccccgggctcccagagggcggagggtgctgagggcctggaacactgggtccagctactcccggctccccaacatgcacacacacatattcattcattccttcaacaaatacacatttatcaggtcctgtctgtgccaggcactgtgtcaggccaggggagtggccgggggaggaagatgaatgaatcagtgacagaggcttcaggaagtactggcactctggatcagaacctggctccagccttcccttggctgtctgggtgaaggattctcccacttcgagcctcggtttccccctttgtgaaagcccctgcatatactcattcaaccctaagcgaccaatatttactgaatatctactacgggccagcctgcatatatttgtctacatatacgcatattcactgggaccttagcagccaatgtttactgagcacctactatgggctggtgctgtccttggtgctggagtcacagtggcaaaaaccggagctcactgtctgatggggaaggcagatagatacggatcaatcacgctggagtgcatgtgggggaacgtgtgctccgaggcagggaactgctatgggaatgcagagaacagaaggcactgagctgagctcacactgggaggaggtgattcctgaggtcttcctggaggcagcaatgtttcagctgaaattggcagaatgaaaccaacctggcgacatctcagaaacctattctggagcagaaaaggcattttgcaggagtatacccacagcttgacgctgtttgtttaaggttacattcctgccaaacagtgctaatgagagtgcgagcaaacaggtcctttcatacacggctggggcaagtagaacctggaacattcttaccgagccagcaattccaggaatttattcttcagaggcatctactcggaactgcacaaaataatgtctgcaccaggttaatcattgcagtactgcacatcactgcaaacagctgaaaccaatctaaacacccatctgtaggagagctgagtaataaatcatgactgatccacccagtggaatactaggtgtccatagaaaagaacaaagaagctcaccgtgtgcatatatggtaagtctccaagtgataacctgtagaagagaaaaatggaaggtcaagtacagcctgcagcctgttctgggtttgtgtgtgttctgggattgtgtccagatgaactggaacaagagagaagaaactgaaactggcaacatagtctaacttccaggacagaaatttactacactctatccttgtttttttgtttgtttgtttttttttgttttgttttgttttcttttgagatgagatctccttctgttgcccaggctggctggaggaagtgcagtggtgtgatctcggctcactgcagcctcgacctcccgggctcaagcaatcctcccacctcagcctcctgag

SEQ ID NO: 67979 - DNA, 2905 bp, Homo sapiens
tgcttcctgggctccctttacccaaccagcctcaatgagtttccttccacccctcaatccagggcctacccaccattccttctgagccacgcccctttatcaaaccccacctctttgcctaagaccctcccattttctatccagactctccctcctccacgcccctcccacttccactctaagctccgcccaactcaggctcctcccagcccttgctccgccccagcagccactaggccccgcctcctcctccaccccgcagcctgaggagcgggcccccccacttgcccagtctgctccaggccccaggccccgagagccggccttttgtgcccctccccctgcccctaaaaggtgcagccctgggcgcccggttggggggcaggtcgggcaggccccggggccaggcgagtccacctcgctcgtacggagcgttggtcctggagacccggggcggccccgggaggccggggaagtccgtcggctttcctctttaattacttacacctccctctgggcgccgacattttgggcagcgggggcagcgtcacttccacccggggggcccctcgacttccgcctcagctcccttcccccgccgtactccccctttctcccgccctcttggctccccttcctcatccccgcccttctccctctttccctttcctttcccagccctggaggttgaagaagccaggcccgcgccatcttgggtgagggcagcgggaaggggcggggcttagggacacccacggcgccatacagactaagggcaaggagctgagagcgagggggcttctccgtggcgacactaggcgatgctaacgtaaatgagagcagatactatttctttttcacagcctcggactcctccgattaggatgtacagttggactagggaaaaaaaaagaaagcgaagtgcgccaactgcaatacagagctggaaaagaccggcaccatcttatccacttagcactccatgggcttcgaagcctgtccggtgccatgttaattacgggcactgggcagccattttcccgctcctcatcattcggtatctgtctttgggtcacccgactgtgggctttgtgagaggaaaggcgtttcgaggtggttggggatgtggtgctgggttatttcccactggggacacaccagggccgccggtgcgcaggcgcggcttccgggcgtggccgcgaccggtcgttaggacccagcgagtcccctttgtttcccgcgggcgcgcaggcgggcgggaagggcaggaagggaggggcccggcgcttctccgaggggcggggccggcaccgcgcgccgccgcccccgcctcgccgccgccgaggggcagggccccctcaccccctccccttcccacgcgccggccccgttgcccccgcgcgcgcgcacactcgcgagccccggcgacatgcaaatgaggtacccgagaggcggggggcgcaggcgggagggggggtgtgggggtaggggaggccgggccgcgcgctcccggagcgcgcctccaacacctgttcctgctcccgcgctcgcgccccgcgaagccgtccgggcgcgcgcgcgcagacccccttcctggcagcccccgccgcccgcttacccggcgccgctcattggccgtcgcccccgcagggcccgccccgcgcttgggcttcgcagctcgggggccgatgggcgcgtcagtaccggggcgaggggacggggagggtcgggggaccagtctccccctttccaccgttccaaagaccagactcctagactaggctaccccgtgggagcgaaccgtatggaaaggtggttgctcctctctggacagcagtctatgtggctgttaaaggggaggggggggtgcaggggggcacctgcagcacctgcttccagctgcacctgtgcctccccttcccctccgttacaccccaatcccatgctcccagtatctgagtgggcgccgggaagatggtggtggcgttggtgaagtttattgagtgcttactgtgcaccaggcagtgttcgaggggcattttaaagcccactgtcttattcgattctcctgacaaccctggtttattcacttttcagaggaggaaactggcaaagtcaattgctagttataggcagagctgaattcaaacccaggactgagccctcgtaatgtcccctttcctccttgggtttatttgttctccattctctgggacattcgggtcacaagacctgtttccagttttggccctgccatttactggcagaggaacttaggcaactgacttggctttcctgtgcctcagtttccccatctgcaaaatgggacagatatgccctattcagagggttgatgtgaggcttagctgctcctgataacaatggctaatgtgtcctgaaagcttctgtgtatgaacactttgtgggtattatgctcatggcatgtctgggcaagtacgtagaactatgtgtcccattttgcaaaagtcttgattaaggcttagagaagcgaacaccttgcccaaggccacgcagagagtaaagatttgaacgaatgatgtcttgactccagggcccaggctcttaacatcgcagatatgtttcctcatccaggaatcagggtcaaatatcacctgggaccagtcccttttttccactctggaaccccttccccacttctgccagtcagcagggagggatgagagcattcgtgaggcctctatggctctggagtttgatgggctctccgtttcaaggatcacaatactggtctgcactctcagttggactctatcctctctggaaggtttttttttgtggggaggtggggaggggtgttgctcatgttgatcttgaacttctagatccagaaggagagttagggaggcatagggatgtctggtgg

SEQ ID NO: 67980 - DNA, 1270 bp, Homo sapiens
ctgtgagatgggcgtggttcagggccagggggcggggcttcagtgtgagacccgagccggaggtgtggcttaaccggacgcccagagcgtgtcgcggggttcccgtagaagaggcgggcattcaaagcgcaggcgcacctggctcagttcgcccaccggaatcggcccgggctttcactgctcgcgtccccgagtcagtgcgcaagcgcatttcccccctcctggtccccgccaccgcctcctctttccgatcctccacgccggcgcctcgggaacgggcgcgacttccgcttccgggcgggcgggcaggcgggcggtgcggggctgccggggaggggggagggggcggcacttccggtcgggccctcgggtctccccggagcggcggcgcctcctccgcctcctcggcctcctcccggcggagaccccggcgccggtgagtgacggggtgcgtggcccgggggcccgggtgcagcgggggcggggggccccgccctggcccgctgtggtccccagaacgtcccccaacccctagcaagtcagtgcagctcccgccgggcccttgccaagggacccccaatcactgctccccggtaggatcactgcagatagctcccccatgaacgcccccagctaggatggctgccaaagcgctttcattcgtggcgatcccctaaacggctgccagggcccccaaatgatacctcctcgtaggatcccctccacatagcgctccccgtcattgcttcctccaggtcagcctccagatgccatcagcattgcccctccccatgtagggcagctgctcgtgaaccctcttattagtatcctctatataattctccccagagtgtttccttagtgccttgcagcagaactgtcccccgttatctctgtccatacagcaacagcccccaatggccctgaccacctccctccccagcagaacgccccttcgtgggtgtgaaaatactttctattctggtcagcaccaagaatgcctttttcccttctgcaggtcctccagtgattccccttaagaatgcccctttcaaagccacccccccatcgcagcggcacagctccctctagagttccttcacactcacatcctctcccgcctcaggtagaaatatccgcctgcttagctccaggctcccatgacatactcccgtacctcctctcaccccaccctcatcgcggtcagcccgtcttcattacttctgccacagaacagtgtcccgcagtgaggcggtgaagccttccttcc

SEQ ID NO: 67981 - DNA, 631 bp, Homo sapiens
ccacccaaattatgcaaattatccctggtaagcccccttccctggacccaaacccgtcccacaagacaacaccgtcctcagactccgcccccatccaggccccgcccaccacccataggtccctcccccaccccgcccaccatgacatagtctcctcccctgccccgcccctcgcgaaaccacaagaagccccacccccagggccatagcactaaatacctccctcgcccaccccctcataggccacgccccggacccgccccccacactacgacctcctcccacctcgagccccacgcccaggccccttccttgcccgcaccaggtccagtggctcctgggatcgcgactccggagtcggtgagctccgactctgggcctctgggcgcgcagcggccatcttgtgcccaagccccgcccccaaggccaatgttcgctctgaaagggggtggggctcgaactggcgtaagagctactgcgcaggcgcagtgcggggctgcgagggggcgtggtgcagcagggggcgtggcggggcggggcgtggcggctgagcccgggagaatgtgagttgttccctctctaattacctgtctgtccctccgagggtacgctctgtgtggcgctaggatgc

SEQ ID NO: 67982 - DNA, 2069 bp, Homo sapiens
gccctgagacttttaaaataaaagtctttacatcctactagccagctttgactagcagtgtgatccagggccaatgactgcccctctatggccttggcgttaccacctaaccaatagggatacggtactccattttcttgccatggagcaaatcaagagttagggcctgactgtcttcaactgtctcatgagttgaagaatttcagccctctgcctttgctctgtagcaacagacaaatcactagacctttctgatttcaggtcctatttgtagaaagactttgtactgtctttcctactctagaaagtctttcctggccgggtacggtggcacacgcctgtaatcccagcactttgggaggccgaggtgggtggatcacttgaggtcaggagttcaagaccagcctggccaacatggtgaaatccccatctctactaaaagtacaaaaattagccgagggtggtggtgtgtacctgtaatcccagctactcgggaggctgaggcaggagaatagcttgaacccgggaggtggaggttgcagcgagccgagatcacacactgcactccagcctgggcaacagagcgtgactccgtctcaaaaaaaaaaaaaaaaaaaaaaaagaaagaaaagtccttttttttttttttttttgacaaaagccatctctgttgtattccctccctcagcatccggcacggcgccaaatagtgatttcattttaacttttgtgtagtgtgtgtgtggagtagcaaggtgcgcgacgcaggaacctttctcttgtgggtgcgtttctggcccgagtgctttcctgctgctctccgaatccggaagctgctggagaagtcggagcatcccggaagtcgtcactgcggccgcttccggacgtgaaagtttgctgcgtagggatagggagaccgggccggattgcggggagtgagcaggttcagcagtgacggcattcttaagagtcctgcccaagtgagggacttggggtgtgggacagagtggcccccagggcagtgggcgttggaaactgagaggccctgcgaaggaggcttggggaggggctacggtgaccaggggacgaggtataggaagaggagggcggaaagccttgagggtgggcttcttggatcccaattgccccagaggcacaggcctgggcatcactgtattatttcccgaggggagaaggggctatttcccatgggaagacaaagtgggatgaatagtggaccttgagaagagggggtggccaggaaaaggttcctgaaggaggcaggacccagactgcaggctggggagggtttgggcagccagagggaggtgagggtgctggagcgggggtcaatcggtcactccggccggagatctgagtggcctctgccccctctgcgctgtggagtgcatctgattgccagcctcgctggaccgttgagaggattcatcgagaccctggatatgaatatgcagtgtgaactgaagtttggggacatgagtaatcagtcacagtggcccaagatttgaggtgtaaatggagaagtcagaatgattcgctgcagctgtctggaacaggttgggtgagggcaagggtgggaaaggtggctgaggccaggttgtgagaggcctttcatggcaggctgagggggttatactatagggaggattttaaaaagaggagctggtggactggtgagcagggcatataggtgacacctagccaacttgagaggtcagaatacatgattccagaaggctaaggagaaggctgccagtagaggaaaggggaagaattcccagggcgaggaaaacacataagcctttgcgtgtggagctgtgtaaattcaaggtctggccagggggctgtgagatgccgtgtgtgcttggagcacaggaatgagaagtgaggtgaggaagtggctgggccacctcacaaagggcctcaaattctaggctgagaaactcggacttggtcctgagggtaaagggggccgggagaatgttatgcatggtgctgaagttgcattcaacacagctgtgagaagcatctgtcagggtcaggccagt

SEQ ID NO: 67983 - DNA, 4697 bp, Homo sapiens
ttaaaattcaggtcctctgatacaccagccacatttcaagagtgtaagagtcccacgtggctagtgactgtcatagaactttccaccattgcagaaagttctgatggacagtgctctaggatgtagctgtggcaccccagggtcttggggctcgctgtgacagttactcctcttctgtcccccactctcagctgcacctgcagatgctgctgctgccgccctcctgcgaggccgtggcgccacgtggctggaggaggagctgcagctgccccgagtgctgccgcgtgtgcagctctccagtgcggctgcagcgccaccgcgcgttgctttcgacgccggagtccttcgcatgcgcagccagcgcccgggcctcaagtgccccaggacctggcgcagcccgcgagcccgcatcaggcttccagtgggccccgtgggcagtgccagcctttcccacctccgcatctggcaaagcctggccttcgctgcgcttcggtgtcgccacatgccttctggaaatatcacacctccccacctgcgcatgcagccgtctggccctctgtgggcctcggttcccgcatgtgccccgtggaaagaacataccttccccaactatctggcagcgtctggccttctccgggcctcggcctccccatttgctgggtggagaatcacggcccggccacatcggagccaatggctggtctctggacctcggtctccacatttgctcagccggcaggaacatcccttctcccgccctctacctcggtgggtggccacggccgagcaggcagcgacggcccagtggaaagaggacaaacccttgtgggccttagggcgaagacgtaactttgcttagtctcggtttattggccgatctcttgtcaagcggcggaatcgttccgttcgggaggtgggaggggagcggggccgccgggggcgggcgtcttcagtggaccccacgcctccggtcccctccccgcagggcgctccgcagaggcgaggggtgggagcgccggctccaggcggcggaacctccgcactgggctcgcgcgcttccggccggcgccttttcccagggactccgccaacccctcgcacccccgcgcccccagtccccgcgtccccggcgccgccggcccggagctgcccggaagtctcggttccgccgccggcgctcgccaggggaagcccggggccgcccgggacctcggcccgttcctccggacccgagaggccgccgcacggggtacgggggccgggatggagggaggagcctggccctgggacgacgccggggccaggcaggctgggggagtgcgctggagccacccgggatgggggtgggggtcgggagcggcaggatcgggcggagggacgggaggggaagtcgaggcgccagggctccttggggaagtgaaggcaataggaggggccccagggccaggggacaggcggtgtgtagcgggatgggggcgaaaacgcccgggcgctggggttcccataaacaaggggagcagagcaaaagaacgggcgggggaccacgctgtgtgtaacagggagagggatggggctcctggaagaggtgaacacgaggagaaagagagatgccagacgtacacagaaaggaggggaaagtgggcttgggagaggtgctgtgggaagcggagtcccggagcctggtgtgcataacggggtttgggagaaggcccctgatgggtacagaaagaagtaacgatgtcaccgccatatatggggggcgagagaaaagggggcctttggggagaatgtagcaggtagccaggttgggggggcggggtatacagaaggaaggcatttgagccattttggggtgtatagatgtagtaagacgatgggttccgtagtggggagaggtgactagacttcgaggtgctaagtgtaggaacaggatggaaaagccctagtgaaatgtggggaattgggttagtggggctctggggaggtacctagagaggaagtgagggaggccacggaatatgaagatggggaggccctgcggcatgtagtggggacggagggccaggaggccgatacgggggccggtgggggggtagggggcggcaaagggaggggaagtaaactgaactggggctgggcaacaggaaaaaagaagaaaccacagattagagaaatctcggcggtcaggaggcccggggtctaagatgtaaagaggtaaacagatttagggattgattgtctgctggggtgggttgagaggagaaaagggaagaaaagtcgggggactacgtcctcagacctgacctgagtggtgagaggtggacccaggaggagtggcaggtggtggcggggttttgcagagctcagttggaggccctctccgaggcagcttgatggaacgtgggagagccgggctggagtcacagtttttattttgctagggaggtagtcagtggcgcacaaagggtaacaagcagtgatagtggggatgctttccattttaggaaacttttcctaaaaggaagtggcaattttaactaatctcccctccgccgctcccagctgccgctccagatgctgctgctgccgccgcggccaccccaccctcggtcctcctctccggaggccatggacccaccgccccccaaggctccccctttccccaaggcggaaggcccctcctccactccttcctcggcggcggggccccgacccccgcggctgggccgccacctcctcatcgacgccaatggggtcccctacacatacacggtgcagctggaggaggagccccggggcccgccccagcgcgaggcgcccccaggagagcccggccctcgcaagggctacagctgcccggagtgcgcccgtgtctttgccagccctctgcggctgcagagccaccgcgtgtcgcactcggacctcaagcccttcacgtgcggcgcctgcggcaaggccttcaagcgctccagccacctgtcgcggcatcgcgccacgcaccgcgcccgcgccgggccgccgcacacctgcccgctctgcccacgccgcttccaggacgccgcggagctggcgcagcacgtgcgcctccactaagctcgagacccggcctgtgctgccctgcccgtctcagggccaccaagtctgacccacacagcgtcactcactcccacacacaccccctggctctgctgaggttactgccttaccctgggcctcagtttccccaccttccaaagggaggagcatcattccttccttaccccctttctagctgtgtgatgtagaccaaagtcgttgcccctccctgggcctgggaaccagtcggaactgggttccagtccagctgtgctgtgtgagcctgtgcaagtgacatgacctctctaaaccttggttttctgctctctggagcggtgaaccggtggttgtctgcggggaagagatgataaagagcacgggcacggtctggttcatttctgtatctaccccccttccgcccacgcccccgaccctttgctcaataaacattccgcactccattttcaggctcttccttgcgtgtgcgtgcacgttgggtgctggggggtggagaccggatcttcctcgcttgggtactttcctctcggtgtgtgtttctggccggagccgtttcgcgacggcccgggcgccccgccccaaccttccttccctagaccctcttctctcccttcggcttctctctttcggccggcgccgccagttcctggggcacacccagaggtccccttctcgccgccgcctgcaactgcgagggtagcccggggccgcttggagtcgcccggacctgagaggctgctgcactgggtacgggggccgggaggaggaagggggctgggggcgggcggcgggaggggctggaccgcgtggagggtacctgggccggggcgggagtggggcagacgccggagggggctgttctggagcttggagggggcgagaacttacacagaaaggcccagaaagcgagggctgcggccccgggggtggaaccccggagagcgctgggacctagaacgagcctggtggaggccgggcgaggactagagagaacctgaggtgggtggacgggtgggagcacggagttgttcagacacgtggctggagagagggccggaacctgggggtcctaacgtcggagcccctgtgaataggcttggcttgtatggagggggtcaggaaaggcttgagtatgtagcataggccaacacgcagaccctggaaagggctagaaggaggggagggagaggcctggaggcctgcggggtggggcacccagtgacctgggagggcacaaagaggaaggttagagcgaggtccaggttgtgcagaggaggtcaagagatcctgtgagtacagtgtatggtggagcaccgaggctaggagaggttttccaaggaggaagaccctggggaccttttagggggccacagactccagctgtgagcgggactggaaaagagggactgaggggcagcaggatgcagaggtcctgggccgggtatagggagggaaaaggatggagcctgtggtgctgagctgccctcttctatataaccttcttatcccatctcccatccaccaggcctcagccagccctccggatgctggtgctgccatccccctgccctcagcctctggcattttcctccgttgagaccatg

SEQ ID NO: 67984 - DNA, 1494 bp, Homo sapiens
tctagctttgctccaaagccagctcttaattaccaacatggggatgggggtggcgtgttcctggccctcattttccgggagaggggtaactcccccgattttggcccccacatccctgagaaccttggggtctggctgtaggaggtaggggagctctgaggggtccgcgctggctagttcctgagagagcgttaaaagtagattctcctttcgctccaactttctcggtgtctcaaacactctcctgccttctgggcccattgggcacaccgccacccaatccggggacccccggagactcgccagctctccaggatgggaatttcgtgatgttccctgcctgagcttcggggagggcgggggagtgctgtaaggggctatcgcgcaagtgcagaccctctgcttctgccgcaaacggcgggcctcacctggacccggggactcttcaacgaggggcgctagcctggcccgactgggcgagtccccgcgtccctgcccgttccgtcgctcagttccacgacacgctcccctgccgccccgcctgttcgcgggtgggtgggcgcttccctcggctccccgtgacactttgcagacgctccccggcgccgggcatgggcgccgccgccgtcggtccccgagccggattccgcgagcgggtgggtgagcgcggggggcctcggcccctcggaccccgggcacccgcgggcgggggatggtggccgcgtttgcacccccgccctagtgcatgttcccgctggaatcgttccacgaccgctccccctcccacccgcgggacaaagggcgggggcggggggggcgcacccccacgcgtgacctttccccgtactgcgcacgcgcccagcccccaccaccgggggacggtccgcccgcccacgcgagtgcgggggaggggtgtgggggccccgaaggtagaggaggcagcgcgcacgggctggacctcctcctaccctgggaagttggggcagtttccccctgcacctgcctcttccttaggcctggcagtggcccgcgatgagagagggtccttccccttcaggctaggtgtccctggtcaggcgaccccttggggcacccagcaatttagggcttcagcttccttttccttcgatacccaggagcccacgtccccagctcacttctcccccaggacctaggcggctgggccccctgcccctgactccaggagcccaggagtttgaagcccaggcgcgttttgcctcagtcctggggtccaggctccctcctccctcagaccaggggtccaggccagaaggtccctcctgtctcacttcacctcccccaggatggaccctccagtccatctgcgtctctccatttgtggctgccgtttctgtccagtgcccctgaggccctcggctgctggggtccgtaggaagccgcgccatgaatgaccggagcagtcggaggcggacaagtgaggaagctgggtccccttccctaccctgggtccca

SEQ ID NO: 67985 - DNA, 2940 bp, Homo sapiens
caggcgaaggttccagtgagccgagatcgcgccactgcactccagcctgggcgacagagactccgtctcaaaaaaaaaaaaaaaaaagtaaaaagaagcgtggacactacccgctgggctacccagaccggagcgcggcgcgagaggcgtgagtcgatgacctctagcgagggaggccacctagcggccaggccaagtctggaggatacttccgttgggccgccagggggcagtaacgccagatcatctgtctcccggaagtaatgccagatgatccgtctgccgcgcctgcgcggcgggaagagccggagcgcgttgatgtggttgccgagacaaccaagagggtggccggatttaacggctggggattaagcactttcaccgttgtaagggaaatctcgcgcacgcgcaatggggactgaaacctggtccccgcaacccccttcacgggagcagtgggagagcgcgccacagaacgacttttacgcaggcgcagaagcctgtttcccctcacccgcggcttccaccctgcgcaggcgcaaaaagccgcgctggcaacctccgcagcggtcgcgcgcacccttcatccctcttgctgcttttgtctggcacaaccttctcaggccctccgcgaggccggccctttttttctttcactttccccacccggagagccaggtgccgagaactaggacctcgtccccttctctatcccttcccctgatccatctcgtctctgttctccttcccttttccgttcccgaagccggaaggagccgaggtacccacggaaaaagtcgaagctgtccccggagagtgaggccttcacgaagcggtggcggaaggagccgaagttctctgatcggaggcgtgagcaagtggcatctccggaaagagccgaaacacggactcgagcttaatcccaggaggggcccgagggcgagatccggaaatctccggaaagagccgaaggccgggacggttaggattgtcggaagtggccgattgcttggacagggccggcggagaagatcggagcaagtccgtggaagaagccaaagactgggacggattgaattgttggaagaacccgaactcgcagaggggactgggcgcagtggcacacgaggacacacggaaacctccgaacgttgaggagataatctcggaaaagttacggaaacctgggaagtcggcgaaaccctacgttcgggtgttttcggaagcagccgaagcggccgcctgcttcgccttcgtccagtatccggagatagccgaggcgcttcggagccaggctcggggggaggggcaagctcgcgggcgggcgggcgggtgagggggcggagcccgggcggggcggggagggctgccggaggcttgattaggtaggaggtggcgaagcgccggcggcggccggaagtagccgaagccagcggcggaagtagccgaagcggctggagcgggcggcaaggcgaggcgaaagctgcacagggccctacgcggccgcctcagcatgtcggacttcgacgagttcgagcggcagctcaacgagaataaacaaggtgagggcaccggggtcgcggggcggaggtgtgggcggctcctcgcgtcgctctttgcccccccgccattttctccctcgcttccccccacttcacggccgcgcggcgccccccaaccctggttccgtggcgcgcgcctcgttcacgtgacgtccccagcgttccgccgcgcgctaggcgaggggaagggggcggcggggcgcgggcccgtgacgcatgcgcacggcggctgtccctgcgccccacgtggtcctggcggaggtggcgcgggggacgcggcacgagcgcgccagatgcctcgacgtgaacttttgttttttaaaatctttttggtttctctgaaaaggagattatgttagtccccgtaatctcttttctcccgctgccttggcacttccgcttccggtcgggcccacggcagcgtctccacgccccctttgtttccaaaatggcggttgtgagaacttggtgggggggcccctttccttccttcacgtggatgagggcagagccgtttcggcggatgcttggaggccacgggcccctcgcgtaccccttttcctttttgctgatttgctctgatctctcccgccaggtggtttctgccccgtctgttggtagtggggcgcctcatattaacgtgtttggcacatgttgcctaaaagcatctgcattctttgagtgtccgcacgcacacatcctgcatatgcggggcttttggcggtcccgagaatcgcgatatggagtgtttgagacaaacctcaaatcatttacaatcccaatctcagggcacctgataatactcagtctcagatctcaatatagagataagaaaacaggttctgagggaggaagagggatctggcccactgcgctaaactcttcacttacggggaaggtgggaggcaggttcccttcagggtatcgaaaattgtgatgggttagaacaaaaagcctggggccctgatcttagggattccaataatattagaagtgggagagttgttaagacgctttaaaaatcctccgtgtttcagtttgtgaagaaatacaggaccagggaagattggagacttgtttcttttcaggcttcagctgcccatgttcctagctcgttcggaggacgaaatgagggctgaggaattttcctttgaacccgggctagagttgggtaggggctgtattaggaaacagtgtcctggggaagcaataacgtttactgagggtctgactctgtcttagttgatggactgctcaagagcataggctttggagttgagcacatcaggaagtttagatacctgctttgtcgtttagtaactgcttttaatacgtttatatatttttttccatttgtagactgattattattttcttg

SEQ ID NO: 67986 - DNA, 1680 bp, Homo sapiens
ctaagacgaatttgctcattaaacattttgttgtattttactttatggagcggctgtgtgtccagtatgtccgaccctcttcctcggttctgggctcgggtgggggttcccttggcaaactgcgggcccctggctgggacgcccctgctgccggcgccggcagcctcgaggccttccctgcttgcgcggtgcccttctcggggtcggcacaggcacagccccgggggacgtgaggttcccgagtgctctcccaccccgccgacaggagggatggtggccgagcgggccggggcgggcgtggcgtgggtgtgccaggagctccgcggttgccgccaagcgagctggagctgactctcggcgttccgtgagcaccgcgcggatcccccgctgcagcgggcggaagtgacgtagaggcgcctagcaacggggcccagcgcgccggaagtgatgccttccaggttggcttggctgcggaagcgactcctgccagggcggggtgcggcacgggagggcggggagcgcggcaatttccgcttccggtccgtcgcctccttctgttgcttcccgtctcctcggcggctcccctcccccgcccggctctccgcgccccttctgggcggcggggcggcggagccgtcggcgtgcggccctccttgcgttcgtgcgtgcgcccgtggcccggcgcacgtcccgcgacaccgaggccgagcggggcagggggctgaccgccatgaccccccagagcccggcgtgagggggccgaggtgagcgcggggcggagcgcgggggacgctggcccgcctgctccgggtgttcgggcctgggccgcggcgcgcgcgggctcgcgtctggccagttctgggtgtctctggcggcctttgtgtctctgctcctgtgtcggccttgactgcccccgtgtcggttgtctgtgtctgtctctctcgtgtctgtgtgtctgtcagcgtctgtttcctgtgggcctctgcctgtgcctgtttcagtgaacttagaaaagggtttggagataggagtgtgtttgtgtgtctgtcccgggtctctctctcctctgtctgtcgtgtctgtgtctgtcaggatttgttcgtgtctcgttgagtttccgagtcttcttttccctaggtgtctctagcccttccctgcgggcttttctgcctatggtgcaaatcttacccccgccccgtcttcgcatctgagttttgcccccatacctatcacctccaatcctgaagtttctttccaggagtctgttaacttgatctagaatctgccccttttccccagttttctgagtctctggtgtgatggtgaagagccccagccttggattcagaagcccggctgcctgctaagctgtgtaattgccaggtgatagtctctgtgtcaaaacctcagtttcctagtcgtaggaaatccatagttcgtaggcattcgtagttcctacatcatagggtccttgtgcatgtaagttgaggtgatgcttgtaaagtgcctgacggtatctgacacatagcaagtgtgtaattactgggagctctggtttttattattacagtgcttagagatttttacacagtaagtgttagatatcggtcggttattggagtactccttggagaactttgccatatcctttgtattctttttaatgtaagaattctcttt

SEQ ID NO: 67987 - DNA, 789 bp, Homo sapiens
ctgggattacaggtgtgcaccgccacacctggccagttgttttgtgtttttagtagaaacaggtttcatcatgttggccaggctggtctcgaacccctgacctcgggtggtccacctgcctcagcctcccatagtgccgggattataggcgtgagccaccacacctggcctcatttctcttttatttcagtgtatgtggtagtcccgctgtgtgagcgtgccatagttgatgtatgcatttcactgtgcgtgggtattcgcactatttcctgcttcacaatctttttagctgcgataccaaagtccagagagctctggaaacgaaagtgtttcatgatccgttcggcacaaagtctgacccagactgaagtgaggtcgttcacatggtgtctgttggtcccacagtagtgtggctgttggcacgactctgcccagcgcgttctcttatgtgttgtatgtgcgttattttcctggtctgaactcaggaaaattctgaattccaaaacacaagggccccaggagttgtggacctgggactgcctcttggcttggggtgtgatcaggcatagcaatggcttacctgctttcctttctttcgtgtaaataccttgagggccggttaaagactaatctctgattacactgtaaatactgttaacacacctttgaaaggccttgccagagctaggtccagctgcctcagagggtgaggagatatgaatggccctggcatctttcctggcagatttctccttggttcagacggagcttagctgtgatagctgactc

SEQ ID NO: 67988 - DNA, 431 bp, Homo sapiens
tataatttttgtccatttaaaattttttaattaaaaaaatataaacattttgaagaaaacacaaaagcaaatgggtgtggctgtgttctcatgaaattttattttcagaaacaggcggctggctccatttggcctttggggcattttgctgacccctgctggagatgaggatcttgcagaccagcttgtctgtgtttcctgtttgtcctggactgactgttcctctgttacctgcatttctgtaagggttatgagctgggtgccagggatcagtggtgcaatcctggaaaggagcctcctggcagcttgaacggttgagggtacacaggaccgctcaggttaaggccctagcccaacctcttgccaaacccgccacacactggacctgcttgtctgtgatagtaggttttatatatcaacatgcctgagcc

SEQ ID NO: 67989 - DNA, 480 bp, Homo sapiens
tgactacctgagtgcatgaatcagtaacggacagcgtgtgacaccaaagcacaggtcaggtgttgggtccggtgcaggctgatgtcaaggtggtcatgtgagctcgctcagttctgtattacaaagtgggatgagtagtgcagagctgggatttgagcctggctcctcgcccctgcatctttgctcatgcctgggagggcagctccagtgagttaacacatggcttggggattcccccctccacacacagtcatacaaggcaggcaggcaagctctcctttccacagggcaggaagccaagggtcagagaggttagtccacttgcccagggtcacacagccttaaggggcagggtggaaacttgccctgaatctttcttgctataggtgtcagctcctgccaccatatactggagcaggtagaagaggctgacccgagactcagtgtgcccgacttatggggcaccgagctgccaattct

SEQ ID NO: 67990 - DNA, 586 bp, Homo sapiens
acccaggaggcagaggttgcagtgaggagagatcacactccagcctgggcgacagagcaagactctgtctcaaaaattaaatttaaaataaaataaaataaataaataataaaaaaataaaatgaaacaggctctgaggcagccctcccagcccttctcccaccctcctgcaggcgcggctggaacctgaaccctcgcacagatcagggaagggcagggccgccaggtggagctgtggcaaacgtgccctcccagctttccacatgctggggtttcataaaccaggagcgcctcagcgaaactccacggggaggacacagggctgccaacttcgacagccgaataagggcaatttaaaaaaacgtcctgccggcctgagtgcagcggtgtttacaactaactgccagttacggatctctttgttccttctccatgccaactgcttcacttgactagccttagaacaaaaaaacctcctacctcccacggtagagatttggggcttggctccccgaatcccccggcacctgcaggaggcaggggctgtaaccacccagcttctcgggggaagcctccagcaggagcc

SEQ ID NO: 67991 - DNA, 615 bp, Homo sapiens
tattagaaagtaaacaaacttttaaaaattgtacaggctttctaattacaacaccctagacattaaaaatgcgtaagactcagcactgtaggaaaggttaaaaaaaaaaaaagcacaggaaaaaaagggaagagagcagtttgcaacttggggctgaggaggtggtgggggctgctcctcacctcctcttcttggctgaaacctgtttgccaagtggtgataatgtacttccagtgaaactctatcacataactcaataaaagcagggacttcccagctcagagccttcccctggcctccacctccggccagcttcctgcagggtgaaggccttgaccaggctatggatgggggaggcgggagagtccaccctccacacccctcctctccaccgcacagcagcctgcccagaggccagcagagatcacctctcactcagcagggatctgccgcgagccaggaggcctgcactgcccagctaggcacaaggcatgattcctgctgtggttatagctgggtaggggggtagtgaggcagcctatagaggtggaggggctgaccccgggcggggagcgctgggcctcaaactgccccccagatactaataccttttac

SEQ ID NO: 67992 - DNA, 3129 bp, Homo sapiens
tctaccttgtgcttgcacagaagggccttgagatccctctcttcacccaggctgggccaggcacctcatctgggccctcacaggacagtgctgtgccaagaccatgtgtgacctcatgcccagcacagggcctggcctgtgcagccgcctggatggattacatttactcagggaattgtgaacttgctctcgtttttagacaactgaagggaaattgaacctgggaaaagggaagtgacatgtccaaggtcacagaagtggaagagacagtgccaaggccaaggcccaggaaagggcctggctccagagccctttccatttactttacacccatctgttgaggtctgctctggctctaaaatgaaagcattaagagccttcccgctgaggtcaatactattattaccactcccactctgtcctggtggaaagtaaggcactgaagttactcgtctaaggccacgaaggtgagtggtggggctgggacttgaacccaggcctgcccagtcccagagctcttggggaatacaacccagtgcctgcacacactctggcagtgcaccagggaggggccaggccgggtgcccggatggatggataagacatgagataagcaagcaggaatctgatctggatgttctctgaggccgtgcgtggccggaggaccacagggactgcgcagaggcaggcaggtgaatgtcagcagcgtttagccaaagaggcttacggtcttcagaggagctaagccaggatcaacgcaactgtgcttcccggcgctggggtcaatcggatccccagatgggttctaagcactgcgcaacatgggacctgggagcaggacaccgcaaagagcagaccaagccattccttccctaaagccctgaccatcccccggactgggctgggtcaaaatgccttccctggctcccacagcccccagacctctccatcaggggtctggtcaccttggatggcgactctgtcgcccgggtctcagtctctgccttccacccagactccaagcccttgttcatctccctgctccctgtctctagtgcccggcacagggcctggcactggaaaaacttctgcctccactcactcctgccttctgtgtctgtgggtcacttttctgtgcgactctgcaggtcccagagcactcatccacatgaattggggtcagctccctggactgggggtcggggtggggtgtcaggagggcggggctccactctgatccactcggcacaggggagggaggcctcaggagtcgccacccgatccagtccccgccttcgccctgccccgtgggccacgcggtggctgaccttggcccagtcacttcccccgctggggacgcgcttcctccccgcctgccgagcaaggacgaatgaatgggcctcctgccggccagaatccccgtaattacccgcctgatcaaaggccacgcgcagcccgcccggggcagcaacgggacccgggctgactcgaaaaggggaaggaagggctgggggggccgagggctgagaccgtgccctcggggccgcggtatccggccaggccagcccaaccgcgcggccccttcccccacctgggcctcaacttccccccgaagtcgccaccacttccggccacgaccggcggagttggaacttcggggggacggacagcggccccacccccgacggcccgcagcagagggacccccaccgaggcccccgctcctgcccccgccacgcgcacgcgcgcgccctggacccggacccgcgcacgcgcaccccccctccagccccgctcgccgcccgcgggccgcccgggcgcgcgtcccctcccacagctcttcggcgcgcacgcgcactccccccgcccgcgtcaccccggccgcgcgcccactcacgcccccccagcagcgcgcacgcgcgcccgccgcccagtcgcgctcgccctccagtctccccacccacccccagcccaagcccagcttcccgaagcgcgcgcccacctggcccccagcgcacggcccccgcccccacccctcacctccttggtcccggggccgccgcgccgcactcctcctcctctctcctgcctcgcggatggtggcagcggcggcagcggcgactcagaccctggggtcagggggacgggcgcccaggccggaagtgaccttcccggccgcttccgcccgcgccgctcccccccttctccctactccctgccccccgggccgccaccctgtcctcgccgctctaggaaggcgagcccgctatcccggccaccgcccccagctctgtggtgcccggcgggcgcctgagggagccacttccggaagtgtctaggacgcaggtcctccgtccatgctctatggcgccccgcgccgaggggcttcggccccgcccccttcccggacaggaggtgcgggctgggcccgttaggcggagacttccgggtgtctagggcggtgcccccccgacaacccgggctcctcgcgcctgcgcggccgggtccccgggcccgccgtgaggagagtgaagtggtggagagggacgctcgtgccaccccgggtcctcctaccgtctctatcatggtaaccccttctctgccgctgcacctcccagtggcccgagtccaggtgccttagttactggacagagaccccgggttccttagttactggacagagagtgctgcgcttcaggtgccatggcctcagtttcctcctttctgaagtgatgaaaatacattgtgcgcctccaagtgcttcacacgcactaggtcctagtcctaactagggcctcatggtaggtcctatccctatgttgcaggtgaggagtcaaatcacctaccaaaagtcacacacccggaatgccagagcctcggcccgaacccatggagtttggctctaaattcgtgtatttaacccttgactgtacacactgcctcgtgtcatagccctgagaatccactacttcccccgcgttaggtaggcacctagtaaggacgcactgggtgttagctgttactgttggtattcttgcaaaaaacacatattttaaaataattgtccaaaccatagtgtccttgtaggctggtccttctggtccttcctctgttctgtacttggctgac

SEQ ID NO: 67993 - DNA, 1274 bp, Homo sapiens
agaaaaaaaaagtggccaatgagttgaaacatagtgatgaagaaggaaacggtgttggatcgagagcctgtgtgaaccctgtatatgacatgcaggcacctggccaaccaggaagaggtggctggaatattcctccggatctgcctgccaagctgtgtgccccggctcagttctgcagtgcttctgagggccatgcttttctaacacacacaaaggcactctataagctaaaggagctctgggtctgaaggcacatcatgtgggactgtgcaggctagcgacaagggtttgcaatggagggttttaagcaaaagtgacatgaccctatttaagtttaaataagatccctctgggaccagtttcggtggctcacgcctgtaatcccagcactttgggaggccgaggcgggtggatgacctgaggtcaggagtttgtgaccagcctggccaacatggtgaaaccccgtctctattaaaattacaaaaaaattagctgggtgtggtggcgggcgcctgtaatcccagctacttaggaggctgaggtaggagaatcgcttgaaccctcgaggtggaggttgcagtgagctgagatggaaccattgcactccagcctgggtgacgagaaggaaaactccatcttaaaaaacaaaattcctctgataaatgggtaaacaaaatatggtctgtgtatgcaacagaatattaggcaatctttaaaaggaaggagattttgacatacactacaacatggattaaccttgaggacattctgccaagttaaataagtcagtcacaaaaaacaaatacggtatgattccacttacatgaagtattaatgtggtcaaaatcacagaaactgggctgggcatggtggctcacacctgtaatcccaacactttgggaggctgaggcaggtggatcacttgagaccaggagtttaaacccagcctgggtaacatggcaaaacgctgtccctacaaaaaaaagaaaaaaaaaaattagctgggcgtggttgtgtgcacctgtagtctcagctactcgggaggccaatgtgggagaatcccttgagcctgggaagcagaagtcacagtgagccaagactgagccactggactccagtctggccaacagattcagaccctgtctcaaataaataaattacagaaactgataacagaatggtggttggccaggagctcgggggagagaggaatgggtggttcacatttaatgggtacaatttcaatttgggaagatgaaaaattcgggaaatgg

SEQ ID NO: 67994 - DNA, 2674 bp, Homo sapiens
tggggaaagttgttcatttatgaatataagacgaacaacttccatgtaatgaatgcttgttatgggtaagccactgtcttcgtttttatggcgcggagtcttcagatcagccggggaggtggaggatgggagggggattctcttatccttgttgtacggaggaggaaatacgctgcgggctggggtagggcttgtatgagccataatcaggtctggaactgtctagataaaaacttcagctgatctcttaggatgtctgtctgctctaaaatccaaatatgcttcttcacagttctgagatgcagaaactgaggcctcaggacggggcagtagtctgtccaataggggcacagcgaggacgcgtggcaggtagcgctgtcccccaattcaccccaggggaaactgaggctaaagagagggcggtgtcctgtccaggttcacacacaggaagagccaaaccgaggcccccgcgctggccccctcctgagccactgcccaccccggaacaggagggcagcctgctcacgtcctgattcctggcaccgacatcggcccttaagttctgcccgggtggagagggaggacaaaaaaaaatgcgatccgtagtcaaggagacgtagcctgcactcctgattggcgcagaactctagcctggtctcctcctcctcctcctcttcgcttgccagcttctagagctccggaggccccacctcccaaatgcccggcggtgcccggcctcccctgatctccacaacaacgccgccatggctcctcctcctcctccctctttttttcccggcacttctgcgcatgtccagggcccgcgcgcagaccactgggaagcctcctcgtgcattctgggaaatgtagtccaaagcctgtcgcgctcagacagcccgcgacatttgcgccgtcaaggccaaataggctgcagacgacgctttcgcgtatcttgggaaatgtagttccagtgttggcgaagacgccacgcggtgacaaacaggagtaaggcggtccccaggcgagggccaattggcagccgcctttgccgcgatgcttcctgggagttgtagttcggggtgaggccggggcttcatggggagttgttgggctgaacgagcggctcggagtatgggattgggggagggggacgggggagtttggcgcaaagcctgctggggcatggagtcccggcgagctttgtgcgcatgtgcggggaggtgagggggcttggggggcctcgcctgagagagtgaggtgagcgaggggggaaggagggagggattgggtgggggcggttggacgagggagggaccagaggttggatgggaagaggggcgccgggggcctcaggagggaaagatgggagacttgcggggaggggaggagaagggggctgagtgatggggaaggggctgggagagggaactagagggggagggacttggagagggggaggggtggatagtgggagggggtcgtggatcctcgaggtcctgaacgcgggagagaaatgctgagggagaggacgggggaggggcgcctgggggagggggaggggcgggacgggggagggacaggtgggggaggggaaggggaccctagcagagggtgggctgtgagatgaaagctgagtgggaagctggaccctacaaaggagtctgggggcgccgggaccggaccccttcggaaaggtttgcgggaaggggcttccggggacgatggttattgttgtaacgtagatacggcgcaggtggctcgttttgcgcgctgcttctacaagtgcaacttttacagagttgtgagattcctgaagataagaatcgttgctctgttttgctgctttctcagtgcggagcatctgcctttttagcttgttgcaaggcattattaccttcggtaatatgtgtaaagtgcttagaaactctgtttattgtcaaatgaagttgacccccgccacctctaccccagtcaggatggagtcaccctcctctatatccgattttaacgcctattccaatgtatacttagtattttaatctgcgtgcgtgttcatagcagtgtcccctgggcacctcgcagggaaacttcgacaaagtaaccctaagtctgactggacacttactagccaggtgtggttctcagcatttttgttctccttctatcactttacagtcaacgaaatggagatacagggtattacaaaaggtgccttgtacctcgtccaaggacacagagctggtaggaggcagagctggaatttgccccagagcctttgtgccgtaggtaaatatttgtccagtgggccagcggctctcaaccaggagtggttttgtcccccaggggacatgtggcaatgtctggagactttttttttggtttttccaacttgggaagtgctactggcatctcatgaaaagaggcagagatgctggtagacatcgtatgttgcacaggatagcccgccacgacacaagtgccattaatgtcgaggttgggaacctagagtagacaaaccggtctttgtcgagcacttagcctttggaggctgcttctaactcctgctcccagcagcctcttgagaggaaggagctcttgttagtcctgtgtctcaggtggagaaatgaagcacagagggggtaagtcacacgtccacagtcacactgctgatgag

SEQ ID NO: 67995 - DNA, 1208 bp, Homo sapiens
ggaaatctttcacctccttagttaaatttacttccagggttttggggtgtcttttgctcttgtaaatgagattgctttcttgatttttttcttgccactagttcgttgttggtgtataaaaacactactgatttttgcatatcgacttagtatctggccaccttactgaattggtttatcaattctaagagttttactggtggaggtttcagggattcttatagatgacatcatgttgttggcaaagagagacaattcgacttcctccttctgaatttggatgccctttgttcgttgctctggttgagactttcccaacacattattattaacgaaggtcaccaggctgaagtttggaaacaggtatatattgtgatgcaatcgccaggaccaagctagttaacatctccctcaactcacatagataccacgttctttccttcttcttatttgtttaattctcaattattgggctcaagcaatcctgcttcagcctccctagcagctaagactacaggcacgagccacatctggctttcttttgatatcgttttttttttttctttttgagatggagtctcattccatcacccaggctgcagttgcagtggtgcgatcttggctcactgcaacctctggcaggaggattgcttgacccaggaattatggacataaatagataatgaaaagaaaatagtcactatgtgagttgacgaatacattaattagcttgattgtagtgataattacaccatgaatagggatatgtaaacaccagcatggtgaccttagtcaccaaggacggatagaggccaggaattggagagcagcctgggcaacatagcgatacccccatctttacaaaaaagtttgttaattagcccagtgtggtggtgcttgcctgtaactccagatactcaggaggctggagcaggaggctctcttgagcccaggggttcaaggctgcagtgagctatgagttttccattgcacccagccaaggtgacacagtgagaccttggctctaaaaataaatcaatcaataaacaaatttatccacacaggtaggagatctctacaagaaaaactataaaatactgatgagaggaaatgaagagggcacacaaatggaaagatagtccatcttcataaatcggaagaattcacattgtgaaaatgaccacactattaaatagagatctacagat

SEQ ID NO: 67996 - DNA, 2254 bp, Homo sapiens
attaggaggtttcatacgctaaccagatgattatatgtccaggtgcttgatgttagttttttgtaacttctcctggataccattaatggcctttgtacatttaattatcccttccctttgatgatgggagtgctcttaaatttgatgtaaaatgaagttaatgtgtcagatcatgtccagacattcatatcagatttcaatcatctggtgagagtttactgggtgaccaagttatgggaaggtatagaagagtgttcaggaaaacttttagggcagcagttctcagtaggctgacttcagcccccaggggacatttggcaatgtctggagacatttttggttgtcacgaccaggagctaggggctggagagaatttttcctggcatccagtgggtgaggtgagggaagatcctcaatatcctaccacgcacagggcagccccccacaacaaagcaatgtctgtccccagtgtcaataaccctggtattgagaaactcggtaaggtctgaggccattcagctgttgagctcactgctgtctccttggccactagcacttattcggctctcagtgaatgaatgaatgcacagcacgaacctgtaatcaaggaccaagcgaactgcgggaggcagggttgctcctgagagcaaacagtgacctagttaacctggcgacaggcgtgaaaggaagtctgggtttccaatcaaaaatcgggagggaaggaaaaaagagtgaatcaattcttgcgaaaagtctctgcgcacttactagaaagcacgcggccaggaatcatgcagggcgcctgcacgcatattattatttaaataaagctgtccctcagcacaaacagcccgcaaggtcacggaaactcctccagtcccatccccgggctcggtcctcccacgaatctccccctcctcccacgtccccgccccaggcgcatgcgccctccctctccccaacccaccccagtccggcctccgccagtgacgtcaccgcaagggcggaagggaagctaaagtcgttaccatggtgaccgcgacacactcagaaacgtctactagtgacggtcaagccacctacaaccggtcccaaagccgcaaacgagtcaggcatcgtggtaggacctggcgagtggggccggggagagcgggacgcctggatcgggaacttgtcgcattcacattggctgctaggaggcctcggcgaccacttccggatccggggcgggggtcgcaactcccagcccttgctcagagggctgaactagaattcccagaagcctctgcggccgccttcctgctccttcactcctgcttcccccacaaataacagtgagtgaaagcatctaacaagcgtttccaactcgccgaatcattactagtgcaggcattttattctaagctgctttttactaaaacgtgctcttgtcgctctgaacctttaggactacaatacccagaagtctctgggagtcgccgagccctgtagtttagggttgttttgcggccagcgagacgccggaagtctgggaataaggcgggaccagggaaaaagcaggattccgattggtgaagaggccacatggccttctttaaaggacgggatagagttgcacacgcgcattgaggcgtgtcttccctggttctgcgtccgtgaagcctagagattcccgagcctgggtcacccgggcggtgtcgcatgtcgtctgcggggaggttggggctgctcgcgcgaggcgctctgggtctcatttccgaggccgaaaatgctggctccaaagtggtgccctgggagatgagggcgactcgcagattccaccctattctctgaatgggcttcgagtctccatggtaacggcccctcccagttcccctgtgacttcatagctgcccacgggaggggagaaagctgatgtgaaggggctgtgggttctcagccaagctctgtctttgaggccacctaccctataccactcgtcccggaaagggtgagccggtgacctttcaccctctctgggcctcagtttccctttttgtgaaataatgtctggtacccctgctgtgctcccttactatttcagggccccgggcaagagacacactctgtgtctcagtttccgcataggtaaagtgaggatgatgttagaatttgatgttaaaatttaggtggtggttgtgagaattaagggaacctcagagcaatggccagcacacaatgacccttcaaatgtcagcggctttgatgatcacca

SEQ ID NO: 67997 - DNA, 1115 bp, Homo sapiens
ataggcccttccccccctcttaaagcctcccacgaagtctgaacctggtactgatatacgcttcagccctcagaaggcaaccgcttgattctctgcgcaggcgcagcgttctcaacaccgccaacgggcacaaagccacgcccccacggccgaactcacgcctacgtactcagtcaccagcggaaccctctccaccaggctccgcgtcgaggccctacggggcgtcaatacgcacgcgtactttgtgtcccaggtagctcgtctcttagccatgtacgcctctgcattccggtcactgggagcggggccgtgggggctgcacatgcgcactgcgagtcctcgcctactcccagaaaccacccgggcgcatacgcggtgcggccgctgcttcaggtcggcgggctccagggagacctgggtgggcagcgtcgccgtttctcctttcttgggcagtatttttcccagcgccacgcggaggctgggccattatgaggtttgtgttgcgtcggggcggtccgtctcagaggcgctccggggaggagtgggcggctgaatggccagaggcccagggatccgttcaggtcagcgctggcgtccgggcctgagtttggaggtggcgggtgccttacaagaatgctcgcgtgatcagtgtgttggcgtttgtgtacacagaggacattattaaaattactctttgtgtgaatggttctatcccagagtaggccactggggcattgaaaaaagcccagttacatttttaggaaccagagctgcacgctaaactgttttcttttgacagtgaaatctgtcgtttttggagtttgttaggaacatggttgaaaatgggtggcagtgggttcgagaatctcgtctttgaagttttcttccttctccttagctctgcatttccaggacctggtcactattcaggacacggttccagcgcagtgcgcgttagccatgtctcaggtaagtttttgtcctgcaacatcataggttttaagtcctgggcacatctaattttgcttacttgggtggtaaagactgacaccggtacaaggctcaggtcttttcattcagcaacacgtgggactatagcaacctctcttctcaga

SEQ ID NO: 67998 - DNA, 1188 bp, Homo sapiens
taaaatgttcccaagtataagtttttctaaactagcggttctaagtcttctggggtcttgtaactctctgagaacctcatgaaacaagatttcctctcagattaaaaaaaaaaaaaggcacgcataacagtgaatgcaaaacatccgcaatttcagggggtcggagacccctgcgcacccacctaaggggtccatgcacctgggctatgaggctggaagcagaaagggggcgccagaaagcgcacgccgcgagggccggcgggaaatgtagtctcacgccggtaaagccacagagcgacgatgaggcgagacgtctgcgttcttctcaggcctgagacccaaccggcccgggcaccagctcctgctggaccccagagcgcctggaaagctccggaacctctcacctgccgcctcctcgggtccaagtgccaccgcggccgcgcccccggcagcccagggcgcgcttccaccacggtaccggtggattcgccgtgcgcagccggaagatggcgcagacgcacaaagcacaccgatgctgcgccatgatagggccggcgccgcagtgtcttccgggaaacatagtctttaggcgtaaaggcagcagcccggccttgaagccggatctcgcgatgtttcagggtgagccggacgcaggcgtgcctgcgcagtgcgcggaggagtgctgttcgtgtgttcgagtccctgggttgcttcctggggtctgtggtgctgggtgtgctatctgcgtgtgattctctagcgagagattgtgggcgagtgaccgagtgggcaaggggccgtcactgtgtgtgcgtgattttgacagtgtgtggtggtagcttctgactccgcgtgggtcgttgaatgtatgactgggaccgtttagcggtggatacacaactgtgtgcggctgtggaagattgcctcatccgttacgttcccatttccgtggaacaacagttttaccagaaggtttcgaaggaaccttaaagtttggaagcgtaagagtttatctggtaactaattttaaacattacatctatggtgagttaaatgtgggttatgaaggagaacgcaaaataaaaacgttataaagatgtaaaggagttttatggggcggcatctcttgggcaaatatcagaccgccgtaggtagttgttaattctctcttgtttttaggcggctttg

SEQ ID NO: 67999 - DNA, 1461 bp, Homo sapiens
acacccagctggtgcccgctgcagaactcactgaactcattgcttgcttgagatgtgtgggaaactcccctatatttggtcagaaaagtcttctgttatgattagttgtcgttgagataatagaaaaaaatgcaccttgcgttttttccactgattcagagggcataactgaaagaatgaagaactgaaagaatgatcttaatactctgcttcgcttttcttgataatacgcattacttcccaatatgcatcagtgtcctttattattaattttttcctattgaattcctcccgcattagaatgctgctccatgaggtggggattttgtctgcttgttcactgctgtgtgcccagggcccacgacagtgcccgatacagcaggcgctcaataagtggcgaatgaaagacagggcaaggcggagagagaagaaacagaaagggaaagagaaagcccgggccgccagagcgcttaatcacacgtacatcctaccgggcccctctccagctggctcaggctccacactggtcctccagctcccttttctcagcgatggactcacagccccacccggagcgctggagcgcggacgcggtcactgcgcgtgcgcctcaccgcgctggcaccccggcctggcagcctttggggacctgaaccagctgcgcctgcgcaggtggaacgggtggaacgggtgggggagcggacagtcgaacggcctgagagggctcagctggtccgggtgggattctgaaggccagcggaggtgggcttactagggaaaggggcgcagcagtaactacccgcaactgagcggcgggatctgcggccgcccggggccctcggccaacatcccagcatcctctgcgccgcgccggccccggactccatttcccagcggcccctgcggcctgccctagggctgcggcgcctttgtgagcgcggccgccggccaggatcgagccctggcccgggccctggcccagccccggcctccaaggaccgcgccgaaggaggtgcccactggagggaggaggcggtgaggagcgcgggatggagctgacgccgggagcggccatgccaccatgtgtgggaccgtgtgtgacagtgtgtgagaatgtgtgagacattaaggaaccgtgtgtgacaatgtgtttgacagtgtggaatcgtgtgtgagaccatgtgtgactgtgtgagaatttgagaccgtgtgtgacagtgtgagaatgtgaggccgtgtgtgaatatgtgtgtcagtgtgagaccatgtgggacaaatgtgggactatgtgtgacagtatgagactgggtgtgagaatgtgtgcgacagtatgagaccgttgccccggtgtatgcgggagcctttgacagtatatgggaccgtgtgggactgtgtgacactgtatgtgcttaagaccacgtcaccatgtgtgagactgggaatgtgtgacagtgttaaact

SEQ ID NO: 68000 - DNA, 1671 bp, Homo sapiens
aaataaaaaactaagcacctactatgtgctgttttagtcactgagaatataaccctgaacaggacggaagctgtgtgccttcttggaaccctccttccagcagggagagataaaatggggtggggggaggtgaggggcgtaccgtatatcagagagcagtaactagtaggcatgaaataaaacaggttccacacgcgcaccatcagaaagtcacaagtgtgcaaagcagacaaatcccaatctcctcacttttctatcgcgtaggccccgcccgcgccccaagccccgccctgtcatggttttcctctccagagggtagccgctacgccttaccgactgcgtttcagtgctgtcccactgctcctgcacaccccacgcctgcgaccctacccaccacggacaggcgctcctgcgagctggaagccagttctctgcgtcctgagcctggcagctgcatctgaacactcggagcctggcgatggcttccagaaacccctgcgccgtgggtcgcttcagtgaaggggcctgtacttcggcgacccagactccgggctgagaggcctcctaatccaaccaggaggaccaggagaggcccaaaaggggacacagggcagtgaccgccaggcttggagaggagccgctcctggcaaagccagcgccctatttctgaacgccgcctccgttccggactacacttcccaggggctattgcagcggaggacacgcccacttccggaaaggacccaaagccgggcgagtgcacgtcccgccggttgctgaggagaagggaggtctgggcggggcagcggccgaggctggactggggcgcggcgggggcggtgtcctggttcctgtgtgggcggcgggcgtgagcgtgcgcgtgtggcctggtggctgtgagtgcccatacgtggtgagcgtgcggtgctgtgctgaggaggggcgagcgcgcgcggggatggcggcccggtgtgtgactgtccggtgcgtggccgcgaatctgcgcctgcgtgcatggcccggcggcgtgcggaaggcggtgtgtgttggaatgagtgaagcactttaagtggccaagagcaggaaacccggccggaggaggcttaccccgttctcccctgtatcgactgcgtagagcccagtgtgggcaaagtcctagagcccggggaagttgcccgggcggggcagcctcggctgaagcatttcctgtcagccctatctggaaggggcagagcccaggacagggctccatgtccacaggacggcgaggagcgaagaccatggggactgagtacacaggtaagagtgacagatgacggatgtggctgccggagtggacattgaggttttgggtgctgtctttcggggttcaggtgctggaggaggatgtcccccgtttctaaggctagtggacctggaagtcgaaagatttggagggtcaccttgggtcagagtggagctgggtttagttagggagggaccttgacttggccagagacacctaaccagataacctgactcaggtccttggtatatcactaagggcccatgggagagaacactacccgtaatattacccattatagcattacttctgggtactctgctgctgttgaaggaatagctcagcatttagatttttacccgtcagagccttgtcccatctatcac

SEQ ID NO: 68001 - DNA, 2679 bp, Homo sapiens
ccatgcactgcccctctcaggaccacccgcagccctgaatttttccacctccagctgtacgattttgagtgaaaatccttcaccaacagagtctccaaatcacctagaccccaaatcttacacccacagcccacttcctccattttctcacttaaaatcccacctttccccaaatctcttaaaacgtctgagtttggccttggattccacttttctgctcactgacccaaggctgcacagctgaacccgcccgcttcccgaggcctggctttggcgccccctggaggaagtaaggcgccaccagccatgagggcacgctgcccaagatagcgggggtagggctcagctggcacgccagtgcagcccgcggtcactcaggaaggctccagtgcaggccccacccatgaaccggcaaagatggcacagaatgaatgaacacggctctacggccctgcctaccttgaaatcccctcagccccctccaacagccctgctgtcactcaagatggcgcctgcgcagtacacctctgctgcccccgccaccggccaacacacgtggtactaggatggacggggctcacgctcactcctacagcgcagctgtcattcagtaatggtgcctccgcactgcacccgccacattgaatgccggctgctctatcagacaagacacacatgctatggcccccctcagtcactcaagacaaagcagaccctccctcagaaccgcacctgcagccagcccagctgtcattcaggatggcacctgcacagtacaccgtggctgccacctaatggccagcaaagatgatgccacagagtgggcggggccatgcagaccccgtcagtcactcagtcctctgcacccggccctacagccaacccagcagtcattcaaaccagtgcctgtgtaactgccctcacgtgccccattacagccaaagattgcaccacagtggaccaggctcggcagcccctagtcactgagaaagccctccctcatgcccgcccctggggccgacccaggtgtcactcaagatggcgcctgcgcaatcaacctcgggcgccaccctgtggctagcacagacagtaccgtagaggcggtgaggggcagtggaggtgagggtgctctcagccctatcagtcccgaggaacggtcccgggccccagcccttagccccgccagcagggcgcctgcacaacccgcctcgcagctcccccactaagccgcccccatacacaagatggaaccacacgcatcctgtggtgaacaaagtcttggtcaggcaacaacaggggaaggggtgagcctctgccaccgttagccaaaaacacagcgagcgcggtgataacccgtcaccctgtccttaagcataaatggctccgcggccgctaaggcaaactctttaggcacgtctcccggctcccccagatgcggggactgagccagtcccactggcaaaacagcctggcgaccagcacacacagcccaaggagcgcggcactccacagctttccatcaccgcaaggcaggcaagcacagcaaccgtggccccgcccctccctgtggacaaccccacacctatgcggcaaaccgcagccgccccgatcaaagatggcacccaggtgggcggggcttgaacagaccgtcccgcccatgccacctgcagccacttcagccttgccccgccgcatctgccgccaaccaatccgggcaacgcctgcgcggcaaacctcagctgcccccatcaaagatggcgcccaggcgggcgggccttgtctcgcccaaccaactaggacagcgcctgcgcagcaaatctcaagcactttcattaaagatggcgcccaggtgggtggggcttgaacaaaccactaggtccaatgccaccctgtcacttcagccttgccccgccccatctgccaccaaccaaccaggacagcacctgcgcagcaaactccagcagcccccatcaaacatggcatctaggtgggcggggcctgagcagatcgtcatatccaatgctacacagtcacttcagccttgccccgccccctctgctaccaaccaaccagggcagcacctgcacagcaaacctcagcagcccccatcaaacatggcgtccaagcgggcagggcctgaacagatcgtcacatctaatgctacccagtcacttcagccttgccccgccccatatgccaccaaccaaccaggggagcacctgcgcagcaaacctcagcagcccccatcaaacatggcgtcaaagcgggcggggcctgagtggatagttacccaatcacttcagccttgccccgccccacttgccgccaatcaactagaacagcgcctactcggcaaacctcagccaccctcataaaagatggcacccaatgggtggggctggaacagaccattacatccaatgcaacccacagtcattcagctttgcctcgccccatctgccaccaatcaaccagaacagcgcctgcgcggcaaacctcagccaccctcataaaagatggcacccagtgggtggggcttgagcagacgattacgtccaatgccacccagtcacttgagccttgccccgccccatctgccgccaaccaaccaaggcagctcctgcgcagcaagcctcagccgcccttatttaagataccgcccgagagggcggggaaaga

SEQ ID NO: 68002 - DNA, 1352 bp, Homo sapiens
gggatgtgaaagggggtcagtcgccaggcgagctgaggacccagttctgcgcctttgcctgtgccctgacctgaaggaaagtccctgtctcccgagctccgattttcccgagagaagaatgcaatgtaacccttgcccctcggttccctccctccatccttcccctcgagttgtgcccaccgtaaagaggtgggtctggagcgtctcctcgggtcctggagtgcctttccctgggaggaaaacttgcgccgtgaagcgttcctcccgttgttgaacacatgaggaaaactacactacttagaaggctgtgcattatgcgtacggcgggagctgggccaacgacggcctaggacggggacgtttccgacggctcacgccggtgggggcgggacttccgggttgctcgctgcggacgccattttcttctgcacttctgtctggagaggtctgtagccactgagggccccggtcggggccgctttgcaggtccctagtcaggaccgagcaggggagtaggataggaatccccgccgcacctttgtacgagcctgaccccttccgtgggtttgttcctgggtcgccgtcaagctgcggtctctcctcccccgcccttcagccccgcggtctccaggggcggcgccctgggtctggaacgcggttgccaccgaggaggcggcggccctgcgtctggaacgccgttgccaccgaggaggcggcggccccgagcgcgcctggaagccccgggcaaccggccagggtcgggcacaggtggggtccgtcaggccgcccggggctcctctgtcccagctctgcggcccagggggtgacgtgatggcggcagcggtgctgacggaccgggcccaggtgagtggacggtggcttcgcggttgccgcttccttgccagcgctgaggcggtttccgaagtgggtgggagcccaggtatcccctggatttgtcttcgcagtcgtcgttcgctttggtgtgtggagctggtttgccacttaatttatacctggccgtaaggagtgttgggcctactggaaggagctccgtaggttgttgagtgaatgatgcttcctctggggactcccatcatccttggcctgcaagcattctctggtggaccaggtctcattccagcatgaattgggggcctgaggggggaaggggagggcagggcagtagcaagccgacaaatgcgcgagcagagacaaggtatgttgtatgtttaaggaggctcaggagggtgtgtaaggttgccatggttttcctgcggccgctgagacgtggagggcaacagtgtgtggtcttttcctggatgttctagccatccgcaactactgcagacatt

SEQ ID NO: 68003 - DNA, 2023 bp, Homo sapiens
ttcttttctttttcttttttttttttttttggtaccaatgaggtctcgctctgtcgcccagactgttctcaaactcctgtcctcaagcgatcctcctgccacagacttctgggaccacaggtgtgcgccagcacactcagcttattttaaaaaaattttttttttttttggtagtctccctatgttgctcaagctggtcttgagctcctgggctcaagcgatccgccccccttggcctcccaatgcgctgggatcccaggcctgaggcatcgcgccgcccgacgtccccctttggttactctgactgcccgctgatctgtataagaggatccggaggggaaataatgcaaggtggaagtcagagtccggagcctggtccagggtctctgcactggccctgaccctggcaaatgtccctgactcctggggctcgatttcctccggccaagaatggacggtctcgcgcttggtccctggcctccgagttgtgcccccaggacagaggcaggtctgagccgggctgtaggcccgctgcgacttttacaccgaggcctgccggctcaggatctgtcccctttgcaggtggtttgtagagaaaaactacattaactacaaggcattgccaggtgcgacggcgggccctggggccaatgatggtccaggacaggggcgtttcctgtgggttgcgaagcttggggcgggacttccggcatttggatgggacgtaatttgggagcgacggttccgtccacgccggctctagggagggggcggtgttccgtggccgcctccctggcggcgctggggaaatgagcaggtaggaggccgacagcgacctccgcgtctcggagcgaaccgtgagcctccccgtaacgagagagtttgactgtcagccaaggtcaccgggcccggcgcagggaaggggtggggctcggctgagcccgcgagacccgccctgctcgccgcagcccccgccccgctagggccacagggtcccggtatggcgatggctttgacggacccggcgcaggtgagtggacaaggtttcggccttgctgcttttctgctagttcggggaagcctcctgggcaggccggaagccaagacagccacaggattcctctttgtagttttgtttgtttacgaaacgtggagcaggctcgtcacttagtttatctcctgtcgtggtagtacctgagagactgaatattgaagcggacagtaggcagactatacatcgattatagggctgtgacgtacaatttttttgtagcaacctgcccaggaaaccagcctcctgttctgcaataaactactctggaagccagtctgccttaagttagtcttgcaaggagctagattactctctggtgacatttcaggaggctaaacggtaactcctggaacagtaggccccaaataggacttgatttgtaactgactgttctaatttttgcctccgcctccaaaagaggaccaagcagagaaagccatacgtgctcagcctaaccaatcacatacgatgccccacttctagttagcccttctgcagctttccactgctaaagtgtcaggcctctgaaagctgcttaataattgcttgaaggatggatgaagttccactccagggactcccgtcacacacatcatccgaactcagccttggcctgcaagtccctacccggtccactatggctgaccacctctgtccttgtttccttcctttcctccctggctcagcgcttcagacacaggtccactatggctgaccacctctgtccttgtttccttcctttcctccctggctcagcccttcagacatatcaatctgatcacgcagagttctttcctacccctcagccttcacctttacagttcattcagcctcagacactatcctcagatctctgcaagaccctttcacatcttgttggctctgctcaaatgtcacttctttaaagcggcctttcatggcagttcagactaaagtagtccccttctcacctgcccttggtctagcgtt

SEQ ID NO: 68004 - DNA, 2484 bp, Homo sapiens
ggcggaggttgcagtgagtggagactgtgccactgctctccagcctgggcaacaagagtgaaactccatctcaaaaaaaaaaaaaaaaaaaaaaaatttaagagtcacaaatatgtgaaaaagagaatgatgtctttatcaattttcaaaaattactattgccagtgatgaataacagtgttccttgcacactaatttagccaaaaatatttctccaaaagtaccgcatcgtgtaggaaattgactccatctccattccttgactattttcaatctcaaaattaaatctcttggagagtactttctgcacacctttctatttccttaaccatatatatcgtcaaaccattgaaagctggactttattctctcactttcatagtcatgaaaagaaaaaaaaaaagttactgatggggactcctaagacttcgcataatataatctttgcatagtctaggattgttaaaattcctaacaagactttataaactctcctgtctgcaaccagttaatgctgggttgggccagggttcccctctttcccgtcacttatccatctacgctcattcttttcatagcctcacccaatatcatgacttgaagtaacagtttacagtaataactcccaaatttatatatccacgctcgaaccctctgccaatgttgaatcataggttgagtatatggcactacgctttgtggtcttactgacgtttcaaactgatcatgcttgaaatgggagtactgggcttcccggcaagcctgctccactagcagcctccccacctcagggtacgggaagtccacacgtggcgaacgcgaagcctattacatcacccggaagtccctgcatcctacgaaggctgggcccggccaaaggaggcccaatagagggcggtctgtcctttcccagcaggctgggcacactgtcaggcgtcctcctttgggtggctattttaactgctcatttatccttttcttctatgaaaagatccagaaaagaggcaaagcaagcgagaagtcgcgggcccagcccacagcagggtaagcacctttgttcggggtctgaatcggggcgaatatccccgcctcctgacctcgattttcctgagctagaagggacctttcgaccctccgacttgtgcctatactaaggcggtggccctaagacgacgcgggggttctggtgcgcacttacgtgcagtcggatgcgctgggtgagttcccacacccggtagatgtaagggaaaaactgcattacccagaaggcactgccccttgcgtcggccgcggactctgggccattgacgacccaggacaggagagttttctgcgggccagggcggcggaggcgggacttccgcttcttcgtgtgacgtcatctccgtgggccggtttggccctgaaacagtgtggggcctagagcgctgggtgggcgcgttctgcggcctgagcagggacgggtagtgaagcggttacgccccttcttcgcgtcttggcgggagcctgacgccccgcttctcccctaacgaggtgtcccaccggcgcccgccgaggcctaggcctccgcagccgccctccgtctcctcagccccgacgctgcgccttgggccttgtgcgcatttttttcgggggaaaactgaggctcggagtgcgaaagtcagccgaggtcgccccgcccaggacagagaagggctgtggtcggctgatccgcggcattcccgggatggcggcggcgtggatggctccggcgcaggtgagtggacgaggtttcggccttgctgctgctgtgctatttctagaggcctcgtgggcaggctggaagccaagacagccacaggatttttctttgtcgccatcgtttatttaagagaaatggccgtggcttgtcatttcctttatccgcagtcctgcaacagtgttggcctctgataggtgttcagtccgtggttgaaggagtgatgcttccttctagggatctcatcacacttcccctaaatccaaccttctctgttgcctgccagcccgtaccccatccacctggccaaccacccctgaccttgtctgtttgcatttttccctggtcctttgctcttcagagccaccaacctgaccgtgcagtcctcttccattttccaggctttctccttgcacttccttttacttcgaacactgcccctgtaactttgcagggcctccctttcacatccttttggcatctgtccaggtgtcacctatttggaggtgccttttttggcaattccggctaaagtggcaccttacacccttgcccagagtctggtatttttgtgtagataatctgatggtattaaagaagcttgtggatttgagtttgtcaaggatgtaatgggaacaaagaaaaataattgcaaagaatgatattaactgtcattgagtccttgctgtgggctgatcggtgagtattatttaaccctcagttcgtttaaccctgaaatttttttt

SEQ ID NO: 68005 - DNA, 1274 bp, Homo sapiens
gtgtctaggactacaggtgtacaccatcatgccttgctcttttttttttttttggtagatataacatcttactatattgcccagggtggtctcaaactcctgacctcagcaattattttgtgttggcatcccaaagcactgagattacatatatgagctacctccctaaaataagggaagtgagccagaagctctgggcccagcccatgatctcaatcggggcgaatatccccgcctcctgacctcaattttcctaagctagaaaggacctttcgaccctccgacttgtgcccatagtaaagcggcggccctaagacgacgcgggggtccttgtgcgcacttaaatggagtcggctgcgcttggtgagttcccacacccggtagatgtgagggaaaaactgccttactcagaaggcaccaccccttgcgtcggccgcggactctaggccaatgacgggccaggacacgggcgatttctgcgggccagggcggcggaggtgggacttccgcttcgtcgcgtgacgtcatctccgtgagcaggattggccctggaacagtgtggggcctggaccgctgggtaggcgcgtccagcggcctgagcaggggagggtaatgaggctgttacgcgccttctccgcatcttggcgggagcctgacgccccgcttcttccctaacggggtgttccaccggcgcctgccgaggcctaggcctccgcagccgccctccgtctcctcagccccgacgctgcgcccgctttgtgcgcatttttctctggggaaactgaggctccgagtgcgaaagtcagccgaggtcgccccgcccaggacagagaagggctgggggtcggctgagccgcggcattcccgggccccgctagggctgcagggtctcaggatggcagcctcggcgcaggtgagtggacgaggttttggccttgctgctgctctgctacttctggaggcctcgtgggcaggcagaagccaagacagccacaggatgtttctttgtcgccgtcgtttatttaagagaagtggccgtagcttgtcatttcctttatccgcagtcctgcaatagtgttggcctccgacaggtgctcagtccttggtagaaggatgaatgatgcttccttcatggatctcatcacacttcccttaaatccaacctcctctgttgcctgccagcccctaccccatccacctggccaaccacccctgaccttgtctctccatttttcccttgtcctttgctcttcagagccaccaacctgaccgtg

SEQ ID NO: 68006 - DNA, 1398 bp, Homo sapiens
gtggcctcaccagaagcagatacgggcaccatgcttcctgtacagccagcagaaaggtagctaattacatctcttttctttatatgttagaaaaattagaaggacattcaatgttttacaaaaaggcccacaaacgaaatacagacaacgttcaatttattaatacgtttcaatccccaaatctgagagaggtgaagcaggtttcccagggcctcagaagcaggattgaagaatgggtcccttgctggcgacttcagtggcgtggcattgtcccaggtggccatggaaatcagggtgcataccctttaaaagcagctgtggcctccgagatatcgttttcccagtcttttctccccctccctgcacgacgcctcttggcagacatccgggagaacccgaaaggcgctcgttgcctggttggatgcagggtacaaactacgttacccagaaatctgtgcccagctcattgttagccggcgtgcagccaatgacagcccagaaactgggcgtttcctgctgctctgggctgcaggggcgagacttctggcgtcgccgtcgtgacgtatttttcctatgcccggtccgtgcattctggttgtgaaggctgagttctagagatcgggtcggctttctacgcggctctcgtggaacctagcaaagaaagacagtgaagactgcaggaccttccttcgcgcttttgttacaatccatgacccctgtcgtgggacgggcggcctctcgcggaggtgtctgccggggctgggctcttaccgaggcctccacacacgtcctcttgtccttgtctcccccagaagcagccgccttagtcttgtgagcgtttttacaccgggtagattgagacttggagtgctacactcagcccgagggcgtccagcgcggtggaggcgtggggtttcggctgagcccacagggcacagactgttcatccgcttctcatggcagcggcggtgctgatggaccgggttcaggtgagtgggggcatccctcaagcgcaccccggcctggttggtgtgtcctgggatgttcgctctcatcgcgcacttcagggtgctcactccgtcgcattatgtggaggggttccgctcccctcatcagtggcataaggtgtggaacggactcgaaggcgcaggggcagttcgtacaaatgcatgcatggagaggagaatgagtttggggagttccgggaactctctgtgcctggtgagaacagggactagggggtcagaggtaggcctggaatggccgcccgaggagctggtcctctcttctgagggtgctgggagtcatgcaaggtttggtacagagaagggaggtcctctgacgcagttcttaaaaggctccctctggctgcagagtgggtagactagggattatagg

SEQ ID NO: 68007 - DNA, 1385 bp, Homo sapiens
ttgtggtatagtgtgtccctttggcggtgtagccgttgagaacttgctgtgcttcacaatccgatatcataggtccctcacatttctgtgagtatcctagaccttacttcaagaaaatctggttatgtcgcctttaagagcaacccaagccccgtcctgtccgtggagtccggcactctgtttaccagctcccctgacggtgccactgagcctctatccgccatataaggactgaccaacgctctaaggcaagtccagaagcggtgtcgaaacttcataacccagaagacactgcggttctcggcagcgcgactgacccaatgaatgtgcaggaaggaacctttgcgtgcgtgcgtgcgtgcgtgcgtccgtcctcgtgctcgcgcatcgtaggagggcgggacttccggcgtcctcttgccgtggttgatttgattttctctggtgttttcactagttccggcctttggcgctctatgacgtcaccgaagtgacggagcggaaaagcgcgagaagcggcttggttccttgtacgcagaggcggtagtgacacaggcacaactgacagtggcagaagctcagctgacaaggactggggacggcggtgtccttgtcttgcctttgtcgcccccgcccctctcttccctggctggacttgcggagtccccgccgaagaacccgaggtgggtgccccgtcccaggcccccccccacctccgcccgacccctccttccagtgctgaagcccatagaaggggccctgcaggtcaggccccttgtctcgaagagaggggcgttcctgtgtggggtccccgtatcagctggtttgatgcagcctcagagctcccttcggggatctcaggttcagagcatggaggtgctgccaagtgggccgcgtcggggagcccggagtgtgggttgtttctgcgggaaagagagggttttgtgaattttctcttggaatggcagcctgagcagccggtataaccatggaaggttgtcaagggaagaccagtgggaggggcaggtccagagttagaacgagcaggatggggaattgacacagagagacccagaagaggccactgcagtggatcccagaggctgcaccagagccgtggtataagagggacaatgtgatgggattctggatagacctggaagatagagccaacaggttttcctgccgtatcagatatgtctgtgagcaaaaatagggagtgaagggtcatttttttttttttgcccgaacatctgaaagaatgaagttggggaagtcagcagcatgagaagtaggtttcatggagaagatcatgggttggagtttggccagtgtgattctcaggcgtctcaagttgaaaatgtcacatgggtagggggacagaa

SEQ ID NO: 68008 - DNA, 1427 bp, Homo sapiens
atgagtagaggcagactgcctttatggtatggggtgtctctttggacctgtagttattgggaattagctgtgcttaatagagtcttaagtaataagttgctaacatttctgtaaatatcctatactacaatccaaaaaaataccgtatgttgcctttaagagcaagccaagccccctcctgtctttggagtcggggactccgtttcccagctcccctgacagtgccactgggcctttatctgccatataaggactgatcaacgctctaagacaagtccggaagcggtgtcgaaacttcataacccagaagacactgcagctctcggcggcacgacttacccaataaaggcttagaaggggacgtttgcgtgcgtgcgcaccgtcggagggcgggacttccgccgtcctcctggtggtggtcgttttggttctgtgtggtgtttcaccaacttcggcctatggctctgtctgacgtcaccgaagtgacggaacggaaaagcgcgagaagcggctcggttcccaccacggagaggcgggagtgagtcaactgacaagcgctggggacagtggcgtccttgtcttgcctttgtcgctcccgccccgctcttccctggctgggctggcggaggccttgctgatgaacctgactgaggtgggtgtcccgtcccaggctcccccgcccgaccggtcctcccagtgctgaagccccctgaaggggccctgcaggtcaggccccttgtcccgaagagaggggcgttcctgtgtggggtccccgtatcagccgatttgatgcagcctcagagctcccgttagggacctcaggttcagagcatggaggcgctgccgagtgggctgtgttggggcgtcaggggtgtgtgttgtttctgcgggaaagagagggttttgtgaattctcgcttggaatggcaacctgagcagccagtaaccatggaaggttgtcaagggagggacagttggagggggcaggtccagagttcgaagtttcaagttaggaaaaccaggttaggaatggacacagggagacgcgaaaaggccctgaggccactgcagtagacccaggagaattatggttggggctggaccagtgacagtagagggagatgtgatgagattcttcataggcctgaaagatagggcccgtaggttttcctggtgcttcagttatgtctgaacaaaggcagtgaagaaccgtttcaagtgtttgttttgttttttgttttctgtttgaacgtttggaagaatggagttggggaagtcagcataaagagcagatttccgggagaagatcacaggttggattttggacatggtgattctcaaatgtctcaagatggatatgtcacacagacaggtggacataaaggtgtggagtctgaggaaggggattgggttggcgataccagacgg

SEQ ID NO: 68009 - DNA, 1307 bp, Homo sapiens
agcacaaaagagctgaccgctatgcgtggaagaccagttctttatggttggccatgttccttcggatgttcgtcttttgggaacttgctgtgctttacagaatctgaaaggacaggtctctgaaacatttctctgacttgttctagactgccttccgggaaaatctggatgcttgccgtttaaaagccaatgaagcccctccacgtccttggagccccgcaactgcatttctcaaagcctcaggaggatcctcctggctttcatcctgaacgcgagttaacttaagttcagaagcggggcaggcagtggcctgggaactacattacccaaaagacacagcggcggacacaagcagcgagtgtagccaatgaaggcctagcagagcggcgtctacgggggttcgcaatgcgtgtgggcgggacttcctgcaacgcctcctggggttgtcaatatggctgcgttgggatctgttcaccttcaggctgagtcgagactgaggtgaaaaagcggaaaaacgcgagaaaaggtttccccgttgtacagaggctagagtgaggctcggttgaatcggttgcaggcgttggtgcctctgtcagcgtccaggtcactgccgctcccgccccgctcttccctggctgtgctggcggaggctgcgccgatgaacctgactgaggtgggtgccgcgtcccagggcgccccgcccgatccctcctccgagtgccgaagccccgaggaggggccctgcaggtcaggcccctgtgtcccaaagagaggagcgttcttgtgtggggtaccggtgtccgcggtgctgtgaggcgggggagctcctgtcagggacctgcacgtgcgaggcttagaggtgctgcagagcgggcggcactggggagcccgagcgtctttgtctccacggagctgagggtgaggcggagtctcgcctgggagggcagcggagctgctgaaagccgtagaaggctgtgcaggaagggttatgcccagaggtagacgtttaaagttgggaaaaacaggatgttaaaccaggacaaggggaccgctgaggagaccccttgagttatggtagggatgggccagaggggttgcagtagaggggaagtgtgatgagattctggatggatctcagagatagagtcgacaggatttcctgctgcatcaaatgtagcagtgagggtagtgaagggtctattccatggattttgttttggcctgaaaatctgaaagaatggagttggagaagtcagcttagggagcaggtttcagagaggattatgagttgcattttggagggctga

SEQ ID NO: 68010 - DNA, 1774 bp, Homo sapiens
agacaaccatttctactgattccaggtctttagatacaaactctttcaaccaattgccaatcggaaaatctttgaacccacctgacctggaagccccgcccctcccttccagttgcgcctttccagaggaatccaatgtacattttacatgtattgattgatgtcttacgtcttcctaaattgttaaaaccaagctgtagatgggccaccctgggcatatgttcttaggatatcttggagccgtgtcatgggccattagtcactcatatttgtctcagaataaatctcttcaactatttcacaaagttccacccttttcgtcgacagaaagatattcctccttcaactctccatcacatcctgtgtgggtcttttctttcttgtcccaacagaagcacactaacgatcaaaaaaaagtctccagagcctcagtatgtgtgtacttgacaagcacaaaagagctgaccgctatgaatggaggaccagttcattatggtcagccatgtcgcttctgatgttcttcctttcgggacttgctgtgcttcagagaatctgaaacgacaggtctctgaaatatttctcagacttgtcctagactgctctccgggaaaatctggttacttgcagtttaggagtcagcaaagcccctccacgtccttaagagccccggaactgcatttcttaacgctcctccaggagcctccagcttttttccgtaaggtccgcgcgcccagcattgtgaggcgaggcaggcagcagcgtgggaactacattacccagaagacactgcgggcgacacaggcagcaacgtgagaactacattacccagaagacactgcgggggcagggcagcgagtgtagccattggtctagcagagagacgactaatgaggtctcaattgtgtgggcgggacttctggcggcgccctcatggttgcgttagcatggctacctagggatctgttcactgatttagagggtcccagagctctgggtcgggactgaggtgaaagagcggaaaaacgcgagaagcggtgttccttctacacagaggctagagtgcggatcggctgagtcggctgcaggcgcccctgcctccgtcagcgtccaggtgaccgccgttcccgccccgctcttccctgggtggactggaggaggccgcgccgatgaacctgaccgaggtgcgtgcagcgtcccaggccgccccgcccaacccctcctcccagtgctgaagtcccaaggagccgccctgcaggttaggcccttgtgtctctaagagaggggcgttcttgtgtggggtgcccgggactgggactgcggtgcgatgaggcgggggagctcccgtcggagaccgacacgtctctggggcttggaggcactgcagaacgggcggcactggggagcccgagcgtctttgtctccaaggagcagaggttgaggcggagtctcccctggaagggcagtggagccgcagagagccatagagggctgtgcagggaggacgaatgggagggtcacgcccagagttagaagtttaaagttggggaaaacaggatgttgaacgggggcagggggaccgctgaggagaccccttgagttatggtagggctgggccagaggggttgcagtagaggggagatgtgatgagactctggatggatctcagagatagggtcaacaggatttcctgctgcatcaaacatagctgtgagggaaagtcggtagtgaatggtgtcttccataggttttgttttggcctgaaaaatctgaaaga

SEQ ID NO: 68011 - DNA, 1125 bp, Homo sapiens
gtggaagctccatgggctgatgcctccttgtttccctgcgcagccctggagccaggtgacttggtgatgactaaattattattgctcctcagttccgtgtgactcttacctgctgtgggaccttgcacaaggactcaacttccctgtgcctcggtgttatcccccttccaggctgttccaactctgagtaactttagaaaaaatttgaaaagtctaactcagaccatgtgcctcgtctgttcacaaccacccatggctctcagcgtcttgaaaagaaagagcctcattttaccattcgggcgtgaacgttactggctcaatcgtcccagcaagattcacagaaaccggcccctccgcctgccacaccctccacagcccacgacaccaggcttgtaaatgggagccccacccgcgagggcctcatagtcctggactctagggtcgggctgcagggacgcaagcaggcgcccctcatgcagggtgttggatttccggcggagagggcaggtgaggcccgggagacgcagcactcaccgaagtcgaatccctaagcacggccgccgccatcggattgtgagcggagcggggccgggagcggcgggcgacccggggcgggaacccaggcacggctgccaccagcgccagcgacccaccggctgatgcgcagcggggcgacccccgctctgtgccggaggcagcgtttctaactcaggcggcgtgggccgaggtagagaaccaccaaaattaccatctcggagcggtgccggaagtcccgccttaccgtatgcaacaaacggagacaggtccgttcctgaacgttgattggctccgcgtctttgcagcttggcgctcggcattatgggtaatgtagttctcagaagcccagggttccggtgccctccctgagattcacccggaacaagggctaagcggcccgcggagggcgctaggaaaaggcgcgacaccaagagcgagacagggacttgctgctccttaaaggggccgctggccgatttccgcagtcccatacccactgaagggagtgtctgggttaagataagaggttgtagagaccaaggttcttattaagcagatgaagctttcacgcagcaggcttcagaggga

SEQ ID NO: 68012 - DNA, 933 bp, Homo sapiens
gactagttgtacacaataccctccaaaaatctctgtatggtaccttaaaaaagcagcgaagctcctcccttgtccaaggaggctggagacaccacctctcagccttcccctccacctttctccatagcaacggggtcattcctccctgaggtccaggagaagggcgacctctgccagcccaagaagcggtgagaactacattacccagaggcccgtgagccaggttcttggcgtggagccaatgaggctcaggggagggacatttccgctctgtccaacttgtcggagcggaacttccggcgtcctccctgtggcgggcactttggcttgtgtcagttccatccgcgggtgccggatctggacctaggtgctgacagcgagaaggcgcgaggagagtcgttttctcagctgcacagccggggcctgacggtcgccggcggtggtgacagctttgctcttgtctccgcccggatcgtccaccgctcccggcccgctccgcccagagtccgatggcggcggcactgagggccccgacccaggtgagcgctgcgtcctcccggcctcctctgccctccccacccgaaactgagggacgcgtgaagggttttctgcagcccggaccgcactgtccggcacagtgaggcgctggtgctggatctcgtttctggtagtgtggcagggagcgggagagcgacacggtcagggggctgcgcgggcaacagcttggagctgcgcctgagccgggaggctggggagacccaggccggcctcacgcgtgcaggtagcagagggtggggcagcgccgcgctgcattggccccactgagtttcaccagcacactgagggccacagcgcgtaggacagaagaggggcacggccccagtcacgcttctaaaagtttcacaaaagctgttcagaggaacgcgctggaag

SEQ ID NO: 68013 - DNA, 1119 bp, Homo sapiens
agggaacatctgtaagaatatatcccaatatttcggggatccctgcagacctcactacacaagacctggttgagggtcctttaaaaggagcgaagccacgccctgacctcagagtctcagggcataatttctcagcgcccctcgcagtaccatttggcctttgcccagcgtgcaggggagttagccgtcaccacggccaagtgcacatgagaactgcattgcccagaaacctgtgcgccgcccggcggcggcactcttaggggcgtctccctgcggacggaagctctctgggcgggacttccggtatcttcctcgcggtggacatcttgtcggctcttaggtggaaccatcggagcagaagctcggggttgctgggcggttccgaggtgacggaagcgggagggtgcgggagaagtcgctgttcgctctgcggagtggctcgccagcgaagaccccgcctgcgcccccggggacggacgaccgcggtgccagggtcccgcgacctgggaccccctcgcggctccgggtggtctacgaactgtgatggcggcggccgcggtgatgggcccggcgcaggtgggtgctgcctttcccagactttcgcccgccccaaatcctgaagttccaaatgaggagcgcctgtctgagtccctgcagcgcaggccccagtgtccaaggcagcggggcgctggtgggtgggggcgagtgtgactggcagaggggcagcctgagcataggtttggagctggactgagcccgtagcagtcgggagcgtgtgtgaaccgtagtcaggcctgcaatgtcgaggggagaagttgctccttcattgcgaggacgataggagccatggcgggttttgaatggtggagggaagggatccgaaaaaggatttttaaagtattccaatgtttgctgaggaggaaaccgactacagtgaggtagaaacgatgaggatggaggcaaggagacgtttgaggaggtccctgcaacaaactccagaagtgttgcggtggtggctgggccagagcagtggcaggaggggttgggtggggaagtcatgagattctgggtagatttttaaagatggaaccaatggggtttcctgccgcatcagatgtg

SEQ ID NO: 68014 - DNA, 825 bp, Homo sapiens
ctcagtcgccctggaaggcagcagacgcagcttcctagcgctcccagctgtctgcacacaaggcgccctccgtcgcagcctgggggagactacattacccagaaagccttgcgtcgagcggcagtactttgatccaatgaaaatccaagacaggggcatttccgtgtgggtctacccccgccccccccagggcgggacttgtggcgtcttcgcagcggtcattttggctgccctcccggaggtccgttctgtctgtcagccgctttggtacgctgcatcgggatcgaagtgacggaccgtgaaggcgcgagagtcaggtctgagggtcgggggcagagccgcccgcgaggccggcctggggatagcgatgctcgggttccccccgggtcgcccgcagctcccggtccagctccgcccacagactcggatggcgaccgcactgagggacccggcttcggtgagcgctgcgatctccgggcctcccccggccgagattcttaagtcccaagtgagaggcaccagctcacgtctctgtagcacagggtcggggacactgaggctcgtgggtggggcccctatttctgacatccgatgtggtgggcagggggacaagggacaggaccggcgcgtgcagggcttggacgggcaaccgagaagggggcattcaggaacctgggctccacattgttactgcagggaacaaagtttgagagagatctacctttattcttagggccgtgggagccatagagagcttgcgcaaacgagagacaccatctgagttaaatttgaaaaatcctctgcaggctgttcagtggaagaaaa

SEQ ID NO: 68015 - DNA, 1199 bp, Homo sapiens
gccttctaaagtgctgggattacaggcgtgagccaccgcgcccaaccccctgaaataatatttgtttgcctctaggggcaccctgagcttcgtggagtctgaaataatgtctctaaacacttaagtgatcagttacggaaaacacttcccagaaatctgggaaaagcccctttaagaaggagtaaatacctccttctcccctagaggccgaagtcgccatttccctgcacggggcacagcacctcagaatacaagttcgcagaggtcaaagcagtggacacactccgaagagctccgtggagttttggaaactacattatccagagtgcagagcgcaaaacggcggcggagttgagccaatgacagcccaggatagcaacacttccgcgcacgcgcagcgcgacgggccggaacttccggcgtcctcctcgtggcggtcattttggcctctgtcctgtttgtccagcccgccagtttctgcagtggaggtcgcgactgagggacgggacagagaagtcgcgaaagtgggccagaggttctgcgacaccacctcgggtgagctgcgccaggcccgggatagggactgttgtgttcgaatgcccgccccggtcggccgccgctccccgcctagtccacggagctcaatggcggcagtcgcgctgagggactcggctcaggtgagttgtgcgtcctccgggtctcgcctacctcccccagcagaagccttaaggcccagtgagggatgcctgctcacagccctgcagcccaggccccagtaccctggacaagaaggcgcttgtggattggacccgtttgtgacgcccagtgtgtacggaaatgtgacgggcagttgactggcgcgtgcagaacttggagctgcgactaagctgggggggattcaggagcctggggtccgtctcgggtctgcaggaacatagagtgaggcagagttgcacctgacgaatttgacgattctgaggacactggcagccttcgagatttgtgaacagatagggacactgggctaggatttcctaaagctatccaaaagttgctcaggggaagaacaggctgaagagaggtaatagtagttaggcataggaagactgagttcttgtccaagctcacgcagctggtaaagtcagcactgagaactgaggtgcggagatagtgcagccagcccaggccacctggctcca

SEQ ID NO: 68016 - DNA, 1248 bp, Homo sapiens
cagaagtatagtcaaattgagggaagatgacacttaggccagagtagtgtttattcaccactctgtgcaatcaagcgcctctgagaaggccttctttaccgccttggaactgtcttggaacctgaggaaactacataacccagaaatctctgcgtcgaatgacagcgcgtcagagccaatgagggctcaaaataaaggcgtttccgcggaaacagtataaaggtgggacttccggcgtcctctactagtggccattttgattggtgttgggtgtattttccagtgagagaccgcggagtgttgggtcgtgtagaagtgactgaacccagaaggtggagacgagacgttgtcccgactgcacagaggctgctctgcagctccttaaaggcgctaggcgtgacccgcaccaaggccgggatcgggaccaccgtgcccgggtacctgcactgctcgccccctcctttcgaccccgctttccccacccagtcggatggcggcggccgcgctgaggcccccggctcaggtaattgtggcgtcttccgtgccctcaggtcacctcatctttacctaagtccaaaagcagagaggaagcggcgcctgctcaaggttttacaccctgaacccggcgtcgggacactgaggcgctctctatgggcccccgtttttgacacccgcgggatgcgctcaggagagctacaggcacagggagcggtgcaggcaaaggcctggagatgaactgagccgagaggatcgtaacctagggtccacaggcacctgtcgggagcaaagtgtgaggcagagctcctcctggaagagcaggctgaggaccgtgtattcaccctgagaacgctggaagccatggacagcttccaacaaaggaaggaaaagatcaatgtccaggctttaaaggtttcccaaagtccagtcgaaaaagaacacaggggatgacttttgggccctgggaggttgaattcttgttcaacctctacagatcagataggtgctaagagatgacattttgtactgaggcgctcagttcagacaaccaactcgcgtttacctagttacagggccaagaaagagttcagggaggcctgagcttatcaaatctcatcagggatacattcttgtagcttgtgcctctcctctcaggaactcctggctgcagaagcacttgcagaacctccgcagggaagcggagggtgttattccctcactggccctaactcctatccacatgctctttag

SEQ ID NO: 68017 - DNA, 1420 bp, Homo sapiens
gaagaagccgagcatcacaaattctgaaataagaagtctccaaacacgcgggcaatcagttgcacacagtacccccagaaatgtgcgtatggcctcttctaagatgggagaccctcctccgcatctggacctggagtcgccatttcctagcgcccctcgcagtggagcttgcccctttcttcggaaagtcggaagaaagccaccttaagcgctgcccatgtctgggaactacattacccagaatccgccctgcgaaatggtaacgtggctgagccaatgaagcttcagagaagccgtgccattgccggggcacgtaaagtcaagccaggacttccggcgtcctagccgtggcagccattttggcctgtcaggtccatccggcgatgctgggtctggacgagctcgggaggagtggttgtggccattgcacacaggcggatctgaggttcggcgacgccgctggtcgcgacccgggacaggacaacgacaggaacaccgccgagcccgcgttccccccccgcccagagtcatggcggcagcagccgctctgagggcgcctgctcaggtgagcgctgcgacctccgggccttacccaccctacccacccagaccctgaggcccctgatcgtgagggccgcctcctcgcgtccctgcagcccaggcctctgtcagggacggagaggcgccggcgggtgggatccctgtttccgacacccagttgatgcggtcggcagagcgagactggcggagggcaaaggcctgcaggcgcgactgaggcaggaggatgcggaacacggggacatcgtgtgtctactgggaaagaagtgtgatacggagttatttctttttttttttttttttgagacggagtctcactctgtcgcccaggctggagtgcagtggcgcgatctcggctcactgcaagctccacctccccggttcaagcgattctcctgcctcagcctcccgagtagctgggattacaggcatgcgccaccacggggtttcaccatgttggctaggctggcctcgaactcctgaccttaggtgatccgcccacctcggcctcccaaagtgctgggaatacaggcgtgagccaccgcgcctggccgaggcggagttgtttcttcagtaccaggctgagggttgaactttgactgtgaggacgctaaaagccatggacagttttgaacaaaggaggaaatctgtgttagagttgcgattcccaaaagatgttcgaaggaagaacagagttgaaggcagtgatgaggacattgagaggttgaatcattgagaggtgacattgagcactgggccacaagattagagactcagtctgaagtcatctggctgcagggccaaaaaaagcttacagagaagcctgagtctatcaaatccgagcacagacacatttgtgaaa

SEQ ID NO: 68018 - DNA, 296 bp, Homo sapiens
ccgcaagcagggctgggccaccgcacaggccccgcccccgaccccgcgctgctgtttttcttttttttccccctgatttcccctcttacttttttttttttccttttctttttacacttagtttcttgggctgagtgggatttgcgtggctgcagtctgggccccgggcagtcactagcctagaggcttggcagatatgcctgccgcaaattgcaagaattacgccttttcacctcctctgctctcctcccggagccggtgcccaccctctttttcacaaaccgcagggctgggga

SEQ ID NO: 68019 - DNA, 1273 bp, Homo sapiens
ccaagtagctgggattacaggcatgcgccaccacgcctggctaattttgtatttttagtagagacagggtttctccatggttggtcaggctggtctctacctccggaccaacccgcctaggcctcccaaagtgctgggattacaggagtgagccactgcacccggccccaccctccactttcttgtatgcgttccttaaatgcttctacagccataaaggcctgagggaagaggctgactttacaggactgtgtccctgataggatctggtaagctcaggcctccctgaacgcttttgtgtccacggagccaggtgaccttggactattgtctaacctgcgtgtctcagcacaaagtgtcatctctaccacctatatgatctacaaggattcaatctcaaagggccccaacgtcatcccctctctactctgttatttatttggcctttaggaaactttaaaagcctggactttgatccagtcccttctttcttggaaattctcctatttctagtgtcctcgcaatgatttcacagcccccagcctccttgcttttccaggaggagttccgcctcacaggttgttccctacaggcgcctgtggaccccaggttccatcctcccggatccgtccatctccaggccattgcccgcgcccctccctgtacctgtcgctctccccaccgcatcccacgggtgtctgaaacagggatccctcccgagagcgcctcagtgtcccgacgccgggtccgggttgcagagccgtaaacaggtgccgctccctcgctgctttaggacttgtgtgactaggaggtgaccggagagcacggaaggcgccacaattacctgaacggggaaccttagcgcggccgccgccatgggaccacgtggggtaagctgggttgagagcagcgggcgccgttaaagagctgcagagtcacgtctgtgcaaagagaagaacgactctcgacctcctggatccagtcaccaccacggtcccaacacagcgctccaaggactccctaacgccaatggaaatggtcgctactaaagggcgccgggagtcccgcctctaccttacttgcgcacacggaaacgccttcaatgtgaactctcactggctctgccgtgctgtcatttgacgcagagctttctgggtaatgtagtttcccaggttccaaggccgtaaagagagagattcccaggggcgcttcggaaggaaaagcccagctccacctccggggccctcagggaagcctcctgacccgcacggtg

SEQ ID NO: 68020 - DNA, 1176 bp, Homo sapiens
agctcactgcaaggaggttcacgccattctcctccagcctcagcctccagagtagctgtgactataggcgcccgccaccacgcccagctaactttttttttttgaatttttagtagacacggggtttcaccgtgttagccaggatggtctcgatctcctgacctcgcgatccgcccgcctcagcctccaaaagtgctgggattactggcgtgagccaccgcgcccggcctcagggcgcgcttttaaggagagttcctgacatgacggtgggcttttcctgcagatgcacctctgggtagcgccctctttacagccttgaaacctggtcaactacattactcagaaagctctgcgttgaatgaatgccgtcagagccaatgagggctcggaaagaagcatttccgtgtgtgcgcctaatgtagggccgagacttccggggtcctcttgtagcggccacgttgatctgcgatacgcgtgtttgcccagtgagtggccccggactgctacgtgggactgcggtgaatgaacccagaaggtggagaggaaccgttctcggtgcacagaggcggctctgcagcccggtgagggcgcctgctgctcccgggcagtgctttccccaagtagtccgatggctgcggctgcgccgaggcgccctactcaggtaattgtggcgttttctgtgccctcaggtcacctcatcgtcacccaggtcctaaaccagcgagggagaggctcctgctcacgggtctgtagccggtacccggcgtagggacactgaggcgctggcaggaggggtccctgtgtaaacgtccagtggattcaccttgccagctgcctagagagagccgatttgtgaagacaggggaattgtaaggagaaatagtaattcacgcagagccggctgttcgggagacaggagttttattattattcaaatcagtctccccgagcatttctggatcagagttttcaaagttaatttggcgggtaggggcttgggaagtggggagtgctgaacggtcaggttggagatggatttatagagggttgaagtgagtttttcatgctgttttctgttgtgggtgggatggcagaactgattgacccagattaccggtctgtgtgttgtcagctgatccatccagtgtaggatctccaaaatacctcaagcactga

SEQ ID NO: 68021 - DNA, 1840 bp, Homo sapiens
aatgttctaaaattagataatggggatgattgcacaactttattaatatacaataaaaccggtgaattgcacacttttaagtgcttaaagtgaacattatgttatgcaaatttaatcccacctccaaaaaaaattcacctccaagatttactaagcctaagcttgtgtgtgtgtggaggacttagagatgggcctggcgcccagacccctaactcctcaggttccagatctttgtacaagtcagcaacctctcgaatggattcctgggtatgtgtataaagcactagaacacacagtgggcctcaggagcaccggaatcagcgcgaaaacgcagaatgcaaaccgtactttgcaccattatttgcaacttgacagtgaccgccgccgtcactgcatgtttaagggaacccggagctgtttccaacccaggtctgacgtccttcacagtgctttgtgtgaactggcagggggagaaacgacggctggggaacgaacggggttattcgtcccatcaatggcctcagaagcatccttatcacctgcttccagagctcccgacccaaatttcctcctcaagaccgacgcggccgcgacgctgcaaaagctcgtcccggcctcacctggctcgcggccggcggtcccccttgaaggcggcgcagcaggatcggggtctgcccgcctggggcgtttggcttttgtcccgcgccgaggtccggcccaggagtgcgcttgggagctcccggcgcggcctcggggacaaaggcccgcggagccgacgtgcagcagagttcacccaggcccgtccgaccagaaaacgaagaacgcccggaggcgggaggccggaggcaggctgctggctggagaaccgacggcaacgacggcgcaaagccggcgcggaaagggcaggcgcaggacccaccctgacgccgcctctcccagccggctctcctgaccccccaagccccgcagctacggcggccccacagcctgagcaaaggcctcacctcagccgcggacaatggcggctgcttccccggcgtcgaccggagcgcgccgcggggtctgctgggagctgtagttccaggcgggcacttccggcgtcgggcagcggcgccgccatgacaggttcctgggccgcgccgcctcgccctgcctgggcggggttgggacctttctggcacctgcgtcgaagccggcggcaggatggactttgttgtcccggtcccagaccaccctcctccaccgtcgcctcccactgcaaaaaggcctgggtaagtcgcggccccgcgggcctcggtttgcccatccgcaaaatggcgcctcgtggtaccgggtttcccgggaggagctcggcgagttctcagcgctctcgagggatccttccatttggcgttcgcaagattgtgagaaagtgactgctgttattctctttaagataaggaacctaattcgagctacccttctctgtgaagctcgacggctgagaacgtcagggctcgttcccaagtctctttccagaggccaggctttatgggagcatgggttaccagcgacgcaccctgtgagttttcctctatcgatatgcatggagcggttcgggagcggtggctcattcctgtagtcccagcacttcgggaagctgtggcgggaggatcagttgagttcaggagttcgacaccaccctgggcaacatagcgagaccacatctctacaaaaaaaatacaaaaattagcccggtgtgatggcgcgcgcctgtagtccccgctacttaggaggttgcggtggaaggattgcttgagcctgggaggtcaaggttgcagtgagctatgatcgcaccact

SEQ ID NO: 68022 - DNA, 1460 bp, Homo sapiens
ggtaagcatagtgaggtgtttgagggagaagtgttgtgatatctgcaacttactttgaaatgtttccaaaaataggtggattaatgaatggctgaaaggatggacagaaggaaagataagggatacagtaagttcagcagacgttaaccgggtcgttcactgcacaagtctttcagcttctctatctaaaccaacattttatgtcataaaatattgagactggaagactgcacaaaggaaatatgccactaaaccaagggaaaagacagcaaaatggtcactaaacacgtgcaaaaatgcggccctcactgagaattgcagtaaaacatgattttgcaaatatcaaatggaaaaacacacaggtgatctaacaccttcgagactcaaggggaagcggctcagcccactggctcacggccgccaattcagccggaggccgacccaagcctacactgcccctcacacctgacagaaaagctgcagactcgggggttacccccggagacggaccaggacacccagcaggcgtggcaaaacagtctctatgggagggcgggctagagatgcgagcgcggaactcacgggtgacgctaaggaaagagcgggggcgtccagaccagccccggagcgacctcgtcctcagaggagtgaccccaatcgccacggagcgtccccacccaccaggagaactacgcccctggccagaccctcgccctagcgggcccgacatgcccaccacccaggtgaaacccacccgcggacgcgcccctcgccgccccacaaggacccggcggacctccacccgccaagacttccctccgcaggaaacggaggcagcgcagggctcagggatgcgtcggcacttacggttggcggccggcggcagccatgttccgggcgattgcgcttgcgcggctgccgggacaaggatgtgcgcgtgcgcggagtccccgagcttcccccgcccaacgctggggcggccgcgggtaccgggttattcattaccctggcgtggacttgcctcggggcggacgcgcaggcatttactttctcctatggtctcctctgatttttaacccgatgctatcattcttttgttatagagccttccttttatttactgcataatttcctaaaatatttctttatctataatctttttttgagataataatgttaaaattcagaataagtacactcattattcattggcaatataattatttactgggtgcgtggctcacgcctgtaatcccagcattttgggaggcctaatttgttaaaatgactagatctaagaaatgtaaacaaagccagtaactttcctctgtagtaacaatagccggttgaaaatgaaaactacacattttcattctttcagtggttctcttaaactttagcatggggaagcctaaatatttactgacagggaagagagaaactgtggtatgtgcaacgga

SEQ ID NO: 68023 - DNA, 1476 bp, Homo sapiens
gctcactgcagcctccaaactctgcatccccggttcaagcgattctcctgtttcagcctcccaagtagcagggattacaggcacgtgccaccacgcgcggctaatttttgtatttttagtagagacggggtttcaccatgttggccaggctggtctacaacccctgagctcaggcaatccgcccgcttgggccacccaaagtgccgggattacaggcgtcagccacagctgtaacttatttaatggggcactcaaggccttttgctgctggctcaacatccctttcaggccttcactgacctatgccacacagcacttgcgcccagggataaagagccggatcagcttctgctcaccccagtcctcttgccagaaaggccctctggcctttgtccagttgctggacgctgcctcttctttctggttggtctcctcctccaggaggcattcgcgaacgccccagtggagccacacggtccatgcctcttccacttatttccccagggctcacattccacaactactaaatcaacaccgacacactcataagcagccccttcctcgtcctttttttccttctgagctcgggaacgtctgctgggggtgagggggactcgcagaccacccccccccccgccccaggcggaggtcgggggccgtcacctggccaggtgtccggggaacggctcgggcggctgacaccgcagtccgcgagaggcgaggaggatccttggactgtgggcaggatcgcaggcagcggaggccctgcccggaaggcgggatctggggacgatccccattcctcccagccgcagacgcggagcccacaggagtccccgcagccctagcccgtgcacccacggcggagccgaggccgcgactccgggcctgttggctggaacccgcagccgtgtctcgggccgccccggtagcggccacccctgagagcactcggccccgttctatcccgcagtggtttggggagtgcaggtcatcactcccacccgccaaggcggacgccggaccctccattgcgcatgagcgcccactgcggcgccgttgctgcgcatgagtgtgcttccaccgcctacatctcccagaaaaccccgcggcgcggcgctccaccgcttccgccctcgggttgcgttagccgcgacgatggcgccccccagtggcagcagggaggctgtgggggtgctgggcgttgcggtgtgcaggttttctgggaggatacctggcgccgaccttgaagggaccccaacgtgagagggaaagacgcccgtgatgccaaggcttgggcagcggacagccaaaatcctgaaaccccgcggtgctccctgtgattcactttccagaggcccctcagtgccccgacgctggcccggagggcggtcgctgactgtcttgagactgaagctcactttcggatcctgggcgttcttgccaggttttttttattaatacagagaaaaccag

SEQ ID NO: 68024 - DNA, 2524 bp, Homo sapiens
ctgagtaaatactcctatgccaaaatcaacacactaacagcaacaattaaacaatgtgtagcctgaggttggatcctccacagtgaccaaaaaaaccaacaacccgtggaacaagtttagcaggcagtgtacacgaccaccagagggaggcagagggctgctgagacctgccaggaaatatcaagaaagaggacacagggtcctgagcactgagagagatcattagggccctcaggtcccaagaagacaagaccatactgggacctgggacctaaggaagataagaaaacaccagatgtcggtccttgaggaagccaagagaatacctccttgtcctgagctcccaaggaagatgagagcaccctgggcccaaggatgggtggcacacaccaggtcctggacagctacagacttaggtttcctctccctagacatgagcacctcagcttccaggagcaaactggaccacagggggacactaggcagaggatcctgctcctcctccccaatgcctggggtacagttagccctgatcatctctccagaactagggtagacgtttggcctcattcccatcacacttgtggtccacctagtcttccctccttccccttgcacacccctgaccttcctactcccttcctctaatccccagaactagggtggacgtttggccacgttcccatcacacttccggtcctccgagtttccctcccctccctgaccttgagtggacacttggccctgtccaccctcactttcaggcaggacccatctcccagaaacataagtgccgtcagtcccaactcctgcacacttccggctctcccagtcctccccttctttctcgactttgaaactggtggaacttcagtacctctccccactccccccgcgacttccgtcttccagtccccctccttccccaaaagttgcgtggactctagccccgcctcctacattctccccgccctccctgtccccgcccctccacccagatggacggccagttaggcccgccccctgcacttccggccctacccgcccttcctcttcccaagggacgtcataattaatcccgcccccaccgccacccaaccaagcatcacccattccagcacttccggcctgacccctgtccagcgcctttcctttctccagcttctgctctgccccaagagtggtcgccttcgtggcagggcacgactctctcccagctcgggtcgccgcccacattagtgtggggccctgcggcctagcgtccctcaccagaggcctccccttgcctagctggaccgccgagggacatcgacgagtatcctcctcctgctgtccccggcttcgcctgccgcccctaaccggccagtcaagatggccgccgctgggtgaggcaagctggcgcgccgcgggggcgtctgggagttgtagttcgggacggcgggctgacgcacttcgccgccggccgacgggcgccattgtgcggcgcgcgccgggtgagtgccgcgcgaaacctgcgtccgtcgggggctgcgctgggcgggtccagaaccgttagttgggggcgagcgcggcctctgcattttccgccgagctcgggtaccctgagccggccgtgcctgcagtcctcccgccgctctgtgggatggggtcggtgacccggaaccccgaggggagacagtgctttcggggcgccgcggtggagagaacagatcgcctccggaagcgtggggtctgggccagggaggcgatcccctccgatgcgcgggacagaggaggctcggtgtcctctcggggaggggaaaactggtcctatccagtcctgtgggagtcctatgactcactctgggcgttttccagtttgggtggacttgtcatttcccgctgagggagccgttcctgggcggaggctgcggtagctccccagcggacaccttaagcctctccctcccctcccaacttcggtttcctcaggactctgcccacttccaccagagacacattgagaaggaggaaactatggcctccaggcttccgacggcctggtcctgtgtgagtagaggcttccttcagcttttgagtccgctactgcacctgggaggatgcggatggtggtgagataccaccttccctgagatacccccatcctccagagcacctcggggagggggtagagattggttgggcatgagagatcctgcgtgatggtggaaccgcaggttgcttggttttccaagggtgtagttagaatagagaccagattgtaggggcttctgaaggccaggttaaggctcttgcttgtatcctttatattgggaagagtaattgacaggtcttttgtttgtttgttttttgttttttgagatggagtctccctctgtcgcccaggctggagtgcagtggcgcgatcttggctcactgcaacctccgcctcctgggttcaagtgattctcctgcctcagcctccccgagtagctgggactacaggcgtgtgccaccatacccagctaattttttttttattttt

SEQ ID NO: 68025 - DNA, 1559 bp, Homo sapiens
ctgagggtgcctgagccacagtggttcccgcctacctggccttcgtaggaaagtttcctgtggtctccctcattgaagagccaggacgggtcaggcggtggtgggtctcagacattgagccccacaacgcactgagactgaacatcagaccatttataataacagaactctgtcccacaacttctgcagcaataggtacaaaacagaacttggtcactgccagcctccctatttttttccctgtcccacttaggagctaccacagaaagccaaataggctcgactgagcgatcacctaggacgaatcgcctccagttagcgtgcttccaccttccactcggaatgctccaagcagggcactcccggggctttgtttctatcactaggacgcgtccccacgcccaggctgtccctgagtccctgccacaggcgcagatgttggcgggcgcccttgcccctgagctcccggttaacggccttggactgttctcatggctcagtcttggtctctctccccagcagggcaaggcgccgggaaggcacccgagatgacagcgccgagccccataggcgctagtcccgccctggacgccgaccgccgcctccacagtctcggcttcggttgctggatgagaaccagcgtggcccgtttaagggggaggggacaggcgctgcaaggagcagagccgcgggaagcaactccctaagccacaatgctagtcgcgaacacaggaaaaagctcatcccgccgccgcggggccccatgctcccgccggcaatgactatgcctgtgggagcaacggctaccggcgcgcggccttctgggagttgtttgttgcgcggagcgcgggcacgtccgccggccaccggaagcaccgccattggccggtgcgtgcaggtgagtctggcggcctcaaggttggctcggaggtttcactgttagccgggtgcggccggagcgcaggaccaggccagagccgccccaagtgatctgggcgtgccggagaaacgagcagggcctgcgggggtccctcatgcggcgaggccgagcaagggcaggggcctgatgggatcgggatctctccggcctcagggacggggaaggccggtccagtcaggtttcccctgcaggagcgcccggctgggtctgagcttgtcgggaggctctcctgctgcagagctgggagggaacttatagtacctcgcaggtacgggcaggggtggaactgggtgggactgggtgggactgggtgggactgggtgggactgggtgggccctcccgacagagggtgcctgggtcgagggctgcaggggcgggggattcaggctggcgtctggagctctggggctgccgacccagcgggcctctcccggctcctttttcctccctcaactcatcttctgcggcttatccacaggtggcagccaagagcctcctggcacagcggcaccaggcaggtgacgcctattggaccccagaggtcatcccagctccagacgtggacacattttcttccaatggtacgtgaagcttgaaccttgcagagaacatgtgtat

SEQ ID NO: 68026 - DNA, 1966 bp, Homo sapiens
attttaatggactacaacagacccacagaaaaagacacatcacaaagtgaacacccacagggagaagcaatagggctgtcagaggcattcgacccagagcgactccattttgagtgagggctaggaaaatgaggctgggctgcattcccagaaaagtaggtattcctaacctctagatgtttacggttaagggaacaaattaataatgggtactaaaacagacccagacttgggagtgtccagatatcccggtatctagagaacaaaggcattcctaattttgctttaaaaataatatcgattcttgaaaaatacagtaagaaaattaatcctttttcacaaacccttgtagcagagcacatctccccaaaatctatttttagcccaaatatacacaagcattgtacctagggtgcatacgttcctcttactttcaggaacgtcctactgtctatggggtagctgtttcacaactttactttctcaacaaacttgcttttactttgcactgcggactcgccctgaattttttcttgcgcgagatccaagaaccctcccttggggtctgaatcggacccctttcctgtaacacaaccaccgctcccagcctccccgcttccagccgctaagcccaaagtcttttatatgaacaaacctctaactcgtcctgtgactttgatgcgtgtgcgttttaggcaccggggagcagagggtaaagcggcgcagctccgggcctcctcccgcgcaagttcccgagaagagcaggtccggcccgcgcagacgtgcacggtccccagccattaggaggagcagacggtccccacccccacaatcagtcatctctcggggtccgcccttgcttcctgcccacgagtgaggcctctggttgcccgcaacctaaggggcatcgcagccccgagcaacaccgcccccaccagccttagctgagtgctcccattggccagaggccagcgggtgggggctcccattggccatcggccataatgcttccattggtcgaaggccagaccagcggagactcccattggccgagggctgtggttcgccgcacggcctactgggagttgtagtcgccgcgtcgccggtgcggccgccattgtccggcgttcggcgagtcgggtggtccctttggctggagtgcctctctggtctggggatcacctcaggcgctgtccttcactgggcgatccagcatggaccccgaggacgaaggggtagcgggagtgatgtctgtggggccgccggcggcccggcttcaggtaacaataacaacaataacgacggcggcgggctccgggcaagcgtctcccgcgcagactgaccctttcacctcgcggcgcgatgagagcggcaccgctgttaatgcccttgacacgtggggaaactcagacgcgggtcggggcgtggtgaccgtcctggctggtcagagagggggccgggattccaaccaggcgcctggcccccgaatgcgcatgctccacgcggctctgtcctccccagggctggggtcggtcattcccgagagaatcgagcaggcccatctcctgcgttctgctccgccccgccgacacccttgcccattccaggaaggtctgtcctcgtgttgactgataacagtaattgtagcgttggccgggtgcccagatggcaagaatcatcgaatagagatgctttaacgcgtggagtcagcggacacccaccgggaccccagcaccgcggagcccctgccctggggcttgggcacaacctcttgggggcaatgatgggtcaccacgcactgagtgtgatgagagtgaccaccagggtcgtcccctgcgagactgtgggagaactgcagtgcagggcggtcagtgtttgcagggccatctggccatcagagctccactttctagacaaagtggttgcggcctgtgttctccataaagctgcctcgcgtggcaggaaa

SEQ ID NO: 68027 - DNA, 749 bp, Homo sapiens
tggggattgggtacaggcttcaatgtcgttacttgggtgagttgaagaatgtacgtgttcttaggggacatctgcttaaggatatacaaggttcaggggggaaaaatatctccaaacgatatacttttatatctatgtgtgtacatgtgtgcgcgtagagaaagaaaaaagtacatacgctgtatatttcaaagaacatataaaaccatggatgtcaatatacttcccttccggtgcgctgcctgcgcagaaccgagaggttctgacgatccgcagctcccacgctccccttccggccccgcagcgctgtgaactccatttcccagaaggccttgtatcccgtgcatggccgtttccaggcaggaaggcgaagggccttctgggaggtgaggtcctgggcggccgctggccaccaggcggaagtgcgtaccggaagtgccggcggcagtgtgtaagacgctcacgggcgcgcggactatcgggcggctaggctctctgaggaggctgccacagtggtgagtggtgtgtggaggagaggcgagggtgattgtgagggatggagaggcgcccgtggcctaagtgtgctgatggtgggagtgaatgagtggacgggtgggacctgtgaggggaacgcgaccccgggtcggcgcgggcagagaggcgcgcggtgcgtgagggcgcgacctgccatgtcctgccgggtgtcaccgcttatgcgcccgtgggaggggagcattctgtgttggagg

SEQ ID NO: 68028 - DNA, 2044 bp, Homo sapiens
ttccatttgatttacttctaggaagtccttaggttccctgcctccagacccgattttcttgcctcacccttacccctcacccctcacacaaacaccctcagccctcccaaagccaccctcagcctcacacagccgccctcaccctcagcctcacacaggcaccctcagctctcacacaggcaccctcagccctcacacagccgccctcaccctcagcctcacacaggcaccctcagcctcacacaggcaccctcagctctcacacaggcaccctcagccctcagccctcacacagccgccctcaccctcaccctcacacaggcaccctcagcctcacacaggcactctcaccctcagccttcacatttccctcacctccaagtcccgcctttcgcgcatcgcctgctgctctcccactcagcgccacctcagtcccacaaaggccgggctgggatcctgtggcctccgtgctgaccaacgtcaactacaattcccagcaggcaccgcgcctgggtacacttgagcttccggaggacgccgggaattgtagtcctggcgggcgtgggcccttgaggtgtgctgggagctgtggtccgggtcggcgggcgcgcaagttggctagtctctgcggccacctccggaagggtccgccggctgtgctggtgaggtgggtttcgggggtgttctccgtcctgatccaggctggagaggggcacagcaggtccagaagccgcgaacctctggggcggccagagcgagatgcggggtaccgcccagcgggtagagagtgagaggctgactaggggacgtgagtagacggactgcgagtgccggacacacgcgcagaggatgtgacggactgacggaccaggcgtggacggaccgtgtgtgcacggactgacggacccggtgtggacagactcacggaccgaatgtggtgcggaatgacacactgagtgccggacggaccgacggagaatgtgtcggactgacggagtgtgtgtcggatggactgattgaccgggtgtggggcggacgaagtgtggagcgggcggacagataacagataaaatgtaggaccagtggcctgggagggtgtggggcggacccgtttatgtgtctgataggcggttctgtgtctgacacctcttgggtgtgtgtatctgacgggttggagtgtgtgattctgataggttgagtgtaacactaaccatggagtgtgtgactgacagagatggttgccgtttgagacttcctacgtgggttgtgagatactgtgagagggtgagcgtgtgacggtgggatttcaagtgtgactgattttctttgtgtgtccttgagatggtgactaagattatgaatgactgtgatcagaataatactgtgtgatggaaatgctgcgagggcctgtgtttatttttgagacggagtcttgctctgttgcccaggctggagtgcagtggcgcaatctcggctcactgcaacctccatctcccgggttcaagcgattatcctgcgtcagcctcccgagtagctgggattacaggcaccggccaccacacttggctaatttttgtatttttggtagagacgggctttcaccatgttggttaggctggcccggaactcctgacctcaggtgatccacctgcctaggcctcccaaagtgctgggattataggcatgagccaccatgcctggccaggcctgtgtttatttgactgattataggtgacattgagatatttcctgtgtctgggtattttgaaggctgtggctgacagactgtacctgagataatatgtgttaatatctgattgactgagatttttatcagggagactaaaacttgggtgatccacaaacagtttaccaagcatatgagagaggatttgtgctttgccatgtctgcagctgaaactgagtgactagtggtcattcagctgggcttatggatatgtcccccagtgtttgcttacgtgtagcagggggctatggtatccatacatctactgcatgtttactgtgcaccaggcctgtgctg

SEQ ID NO: 68029 - DNA, 1492 bp, Homo sapiens
agagatggggttggggggcagagatgagagagagagaaagaagaaaaaagaagaaagaaaagagagaaagaaggaaggaagaaagaaagaaggaaagagaaagaaagaaagaggaaggaaggcaggaaagaaaagaaagaaagtgaaagaaaagagaaaacggtgctcccagcaaagggtacgacctcaagatctggaggtcagacctgtgccctcacgctctgctgggctctgagtcctggagacgtcgatgaggaaatcagagggacaaacagagctggggacggcggggatggggagaaggacacatcagccgtgcgcctgcgggaccggggccggggcggggggtccagtatgacgactgacatggccagtaataaaacaaggcagccacagagctgcagggatctgaacaagaaaacctggggccagcctccctgctgccgaccaccacgctacacgtgacctacgggcttgcgtccgtgggaaataagccgaaattccaggcgtccccagaccctcgaccaccgatcgcctgctccccgccggggtaggcgatgggggctgaaccaaggcccagagcgccgccgtcggacgcccaaggaaagaggggaaagacaggaggccccgaggggcactgaacccgcgcccgccctcgctggtgccccgccagctcaccgtccacgtgcagctccaagcgctcgctgggcgcggagcccccgaaaggcggcttcaggtccacgtagacgcagctgtagttggcggagtcagccacggaaatgttgtgcagctcgaagagcgcctcggtcccagcggggctctggaaacggtgcacgcggcgcccgcccctgtcctcgcgcaccagggcgaagcgcgcgccctccaggggcgccaggcaccgcagccgcaaggccctgccggactccggctccggggagaactccggcgcgggcagcgtctctgcggagcagcacacgggctgacccgggcgcccagcggctggctcggccctaacgcgtggtctggcctcgcgctctttgccttggctgagtcttctgcccgcaatgacctggccagcttcctccctcgcctcctccgggcccgccccacctttgcatcccagtccttggatatctcacacgcaccctttcactgtttcttagtaatttgtttgtctacagacacagacgggaagcggggacggggacatgttttgtgcatggcttgatgcctggtgcacgatgccgctcagtagtggatttgctccacgagcgtcttctgagcaccgccccaatgcccgccccacggaggggcccctgtggtccgctgggcatggggttcgctgtccggtgctcagagtttgctaaataccatcaggtccaaggcaagcgagcggaggagctgcctcagcagaggccctcagtgctcacctagacctggcagctgggatgggacctgccaggtggtgccccctgtggcctgggccagacct

SEQ ID NO: 68030 - DNA, 1641 bp, Homo sapiens
tccccatcggtccggtagctgcagctgtagttgccaggctgatggactggaaaggtggcctccacatcctcctgggcctcaggcacctccagaaactcatggtcgccctcccgcctcagcagaaaagtcacaccccgcagcacacctcggcacactgctgttgttttcaggccgggggtgatccaggacactggcgccatcgagagccagggagcaggcaaggactctgtgggtggggtggagttgaagagtgcttctgcataacaggagacgtgggaagcccagcagaacctgggccccacactcataagactgtgaaggagacagggatggagggcattgctgggaaaaggcaggcaggcaccagtggaaacaaggcatacggcaagagaaaaagagtgtgtgggagctgtacggcatgccgggcctgctggggacacaaccatgtattccttacaacacagacatcatccccatttgacagatgggaagattggggcttggggctcagagacatcgggtgacttggaggaagggagaccccccagtcaacaacctacccactgcctcctggcccccaattcatgccccggctcacttggccctgtcagctccaggagcttgctcagctgggtccatcctgtggacaagcccgagcggcagcggtagcggccctgggtgtcacccgtcagcaggaactggtgcttgatggcaggtgagtcaaggtgcacaggctcctgggccaccccattcttgaacagctggaagtctggagtctccaggtgggcctggcacgtcagcgtcacattggccaagggtttcagcagtgattcggactctgcccacaggctgggctgcgtctcataaactgcaaggggtggctgggatcagctcagtgccacagagacagggctcccccccggcctgggcccaccattcccagacctcacccctgcactcacatatggctgcttctgtcactgggccccaggtgacacctgcggagacagcccccgtaaggctcctgttcccgccccctcccgccccagggacccagaccccaggaggcctcaccccacagcaagagaaagaccacgagcatggacatgatggtcgcgctcactccggtgcagtgagtgtctggggtgagcgtctgcagcaatgaggccccaagggagggcggtggggtggctcgggcactgacctcttcccgtgtttgtccttcccggaaggcgggggcagggcccccatggggtcagggcaaagggtgaacttctgaggcctcaggatgcccagcaacaattataatcaataatcatgtatgattaataaactaaatcaagagtgataaaatgatgttaaaaccacctcatcctcatttcagtgatggatcctagaacctgttctagaaggagacgctgagttctccccactctacctggagctgctgaggtcaagtggagagtgccggggctgaagcccagcgagcccctccctgtcacaccacactgcacatgtgacaccaaaggtggggttcacctcttttcagactttctgcggttgccctcacatgggctgtctggaggtgcaccctcactcttcctgaggactgtggttccttctccatcactggttcattct

SEQ ID NO: 68031 - DNA, 1714 bp, Homo sapiens
ccgagtagctgggattacaggcaccagcctccacacccgcctaatttttgtgttttcagtacagatggggtttcaccatgttgctcaggctggtctttaactcctgagctcaagggatccacccgccttggcctcccaaagtgctgggattacagacatgagccaccgcacctggcctctagtttttcaagatgccacctttaggggaattgggtaaagcgtacatagggtatgcattacttgttactgcatgtgaatttataattacctcaaatcaaaagttaaattttaaaaaaacgacatctgatttcaataaaaatccatatttgtgtattgaagtatcagaaatccgggtcccccaagggcccatgtttcttaaggcggagccaggcaccgctgcccctccatcctgtggtgtgcgaccccgacccgccagcccccagccgcatctatcagggctgccgtcctgagtccgtcctcgtcgtgggatagcatgtgagccccgtaaggtccttcctgtcggcctcactgctccagcctccccgacgtcctcacgtccacgctgcgtgccctttctgagcctcaacgcctcctcctcacctcgacatgatcagagccacctcccgcgtcagtcccagcgcccacgcccccaacaacgggcacttgtccgaccagtcacgggtacttgtgtctcccccacaacccccaaggcctaggctggacaaacaaatacggagtggataaaggggaggaagctgcggccaggtggcgcgaggcctgtgcgggcagctccggaggctgggaggcgagcccagcctggtgagctccgaaactacccggggctggggactgatgaacgaataaatgaatgtgggaagaaatgatggcgcggcagggcatgagtgaatgagtgaaagaataaacgagcaggaggaacgatgccacagaactgatcgccataaggctcgcgttcaccgagagaacagcaaacgggagccatttccgtcccgaccacggtcgcctctggcccgtgcagggccacttccgggccgctctggacggcgcggaggcctatctctcggtggtcccagagggcccagctcagggccgaggcccgtcctgccccgcgcggcgggagtggttggagccggagggcggatctgtgcctggccgagggtgtccgtcggcgtcactcaccgtcctcggcccgcctctgcgtccactaggagcggcctgaaagaggcccgcacgcgggctcgagccgcgtggaatggtaggagggcgggcaccgggtctcctgggggcgcggttgcattcggcagagcggcccaaggcgtcgcgtttctccccactgcgcctgcgtaactatgccgcggctgcgggcgcgcgccttctggttcccatggggacggcgccacagccaagctactcgggcgtcctgcgttgccatggatgcgctccgccccttcctgcacccggccagcctctgcggcacacacccaacagctacacaggcgcctggggctgcccgggtcgcggacgcaagtcgggccaacgtagcttctccctggcggtcctcctccggccccaggccgtctttaccacccctggaaccttgctgagttgacgccactgagctgcgtctcacacccacgcgctgtggaacacccaccaagctggaatccacgcggtttttaaaatagagtcgggggcc

SEQ ID NO: 68032 - DNA, 489 bp, Homo sapiens
atatccatttattaaatgtctcagagggccgggtgtggtggctcatgcctgtaatcccaacacttggggagtccggggggggcggatcacgaggtcaagagatcgagaccatccttgccaacatggtgagacgtccttgacctgatgtcactttttctgtctgttttgcagatttctaacaggcagttgccctgggccacctggtggcctgaaataacttgaccgggaactaaaaggactcacgaagcatttaaccaagactctacatgttgacttttcagccaaggacacttcagagcgactggctgcagttctccaaaggaagctgctgccagttgcccctggggggttatttccttcttggacatcatgaccacaatggcagaaatgcattgatggccagcactctggggatgaatgtttttgagtggaaatgaaacataccaaactggttaaagacaaaaatgcagagttggacaagttctgcag

SEQ ID NO: 68033 - DNA, 1229 bp, Homo sapiens
tggaggacacaggctagtgcccagctcagcgtggctccacctctctgagccacagaccaacctcacccacactgacagtcccaggggacacagactctagcccctatgtccaattctacactgtgcacgcaatgggaagaacagtgcatcatgcactgtacagcagaagaaatgtcctctgagtgcaggcacagctcccttctgtgtctgtcctcccgacagtgcctccaccctcaaggattagcaagcttcaaccctcgcaggacatccactgtgtcagggccaaacggtgctgcatcctgctctaatagtgagtgaaggaggggaccgcagacaagaagaaatgaacaagagaccgtttaagagagaaaaagacgtgaagaacatcagacagggagcagcgcgagggcgccagggagggaggcagcggattcttcgggcctctgtgaagagggggcatgaaaccggtctgcagacaaggaaagagcaaagtgcaaaggccaggatgcgggggcagagacggtagggaggccggcgtcggcctcggctagcaggtgggcttgactccgagagccgcaggccgccaggatgggtcccgggcctggagcctcccctcgcgggcttcaatgacacccagcacggaaacgcgggggccagaactacagaagcccgtcccgcccggaactcaaggtcgcgagtgctgtgtggccggtccggacccggagcgcgaggaccggaagtgcgcggcgtcacgcctctgccccggaccccgcgcgcggaggtggagaggggactggggtggtggccgcgctatgcgccgggaggtccccgcctcgcaggccgaggttgcgggtccgcgcagaatgccacttactctctggaggcggcccgcacgggtccctggtccccgccccgcatgcagcgcggagccgtcctcccgccacctccgggccgccgcggcactgagggacccgggccacagcaagcgcaggcgggaacccgcgcggggactgctgggaaacgtagtcccgtcatgtcccgctttgacgctgcggagaaagcggtgtagggagaggcttgggcttcggttatcatagaaacagaggccggctacacctaaaaggcggggcgtggacctaagtcgtcgccaaagaaacggcgttctggacggggacgtagggtcccgcccattccttctcgtgaaagcgggtgactggtcatgattatga

SEQ ID NO: 68034 - DNA, 2674 bp, Homo sapiens
ctgaccccttgaccagcccagcttcagggcatgtgtcctttcatgagctgtgactgaccacagtccaagggcccactgtggggagtcctcagcatatttggacagaaacgccccagaattggggtaagaagagcctttacagtcaggcagtgaagaaacacagctgctgggcacctgctatgtgcacgcctcagggatgggagtagggggcaggcccagccctgggacctgggtcaggtggctgggcccttcggatcccgagttggagggataaccccttggaggcagagatgggcatcagagacagggcggccccaggtggtcctggagtcgcctcgtaaaggttatgtctatgcctgctgcaggcagagacacagtcaaagtagttgctacctctggaaagtcccagttctgctcatgagcctagatctaagaggctgggacaggcagaggggtatgaaggggtcatgggcaggcagactgtccacactggctgccagggtggccaagtgagtagagtgagctggggcactcactaccgtgccaaccccacgcacggatgaggaccccgggtcgaaggcccacatcctcaatcccacgcaatagttcaggccctgtgagagggttcgctgtctgctcccagccagggctgagctgttcagaggccctacctgttcagaggcagctgggggaagggacagaagttggggggcaggggattgtgtgctggcgggaataatctccttcatctcatggctaaatcttccatccctcctttcaacctttggccagaaacctacgtttctgacccttggagaggtcggccagttcaagaggcacccctgagagccacgtctgcagacacgagggcctcgtgacgtgagccctgagggcagggggctgcaacccctcgcgcgggctccccggccgtggaggacacaaggacaaacacgaagggtccccgacctgccgaccccctcctcccggacaccgcgcgtagcctgtaggctacctccgcgctccacccagagacgggtcgcgctgctcccgccgccgcaaccccgggccctcgtgccggcggtctcccctcttccacgggcgagattactgcatagcagaggtgaagggcgcggaggctgtgggggaacccagcgtggtatggcaggaaaggtcgagcagggaaacaggcccagccagaggctcgggatccggggctcgcgagcgtggtgctcctgggccgggcggtgggggaggggccgcgtgtggcaggcacatgcgcacggcaacctggacctgcggagggcggcggtgaccactgggcctcactccgctaacccaggtccgcatcaggcgcgtgccggtgaggcggctgtggccgcggcgaggagtcagagggaactgaactggctactcccgcggcaggtgggatttaaggtcagcagctgaacaaagaagcgagcgctggccagacttttttctttattagacatggctgcgttggtctcacggaaatctctgcgcttttgcaggcgcccacaagacagggcaactacggggtagcggacatccgccaggcacgcttctagggccgcttctgcaactgcgcatgcgcttgggctgcacccattccgtctagcccaaaaggttcctctacaaccttcctccggattggtctatagggacacgatggccttttacgcaagcgtcacccgtgctgacccggaagttttcttcccagttaaaagtgttggcccgcggcgcgcggcctcttcctgtctgtaccagggcggcgcgtggtctacgccgagtgacagagacgctcaggctgtgttctcaggtgagaccgccgcggggccggggatcctagggacggttcatggtctttcggggatagtgccccgcggcctgggccttttctcattaggtctcatttctgtctctggaaaagaaaatgtagaagaaacgggcgcgggccgagttactcttgacttctttctggtgctccgccgcttctagcttttccccatagcggggcttggggaacttggtttgaactatgcggttgtactctgagataggaagtttccatttcttagggacacgatgccctcttttgctctgtgtaactttccccccgtaatagcagcccctagagccttcatactgtcggtcaagaatcgaaacctttgggttgattgtgccacacggtacctaccgtggtccttgatgtcatataacggtcccgcctcacggccaaagaaacagtccgagacggaacgttgacttgggtcaaagaccatgtaaatcgcgagattgtggtttgaattacagcccatgcagtgtgaggacgtatggcatctgctgagccattataccttggtcccagtgcagcagctgttgactggtggctgccaagtcttgggcccaggggttctaggtgaaagacagatgcttcttgctgacagctgagtaatttttctagtgcttgaaaacacgttcacggcctttcttggtcctttgcgaccccccagttcatcactagatggcggctagcctcagagttgggaatgagtgcgcctttgctccatgctagctgagctctgacgtttttttcctgtcatcaccctgtcccaggatgaccgagtgggagacagcagcaccagcggtggcagag

SEQ ID NO: 68035 - DNA, 875 bp, Homo sapiens
ttccctccttccccagatcacagccgcacttctctcctccgccctcatagtcacggccctgccttctccctcctcttgccccgggcgggccccgcccagaatgcggagaggccttcgaggaagcgcggaccaatcggaggccctatgtagggctgaagaggcgggactctggtcgccataacaactcatcacgcctgtgctgcgcgcgcgcgtcgccttagtgccgcagccctattacgtgaggtagggaaggcgcgccagactcgacggccaatcagggacccgagggcgatgttgccatgacgaccacgttgcgctggagattgcgacgggggctgaaaccgcggggaactcggggagcgagtggtgagaacagtgagcaccagcactccgatggcgctggcgagaggaaaggctgcggcgcgcagagcgaggctgcgggaccccaggatgggggacaggaggctgcggggcctcaggtgagcagcaagcgagagaccagtcccttcgagcgccctcacgcgttttgtccccacgccacgccggggacgagtctgtggcacagactcgtccccggccccgcgggcttaagttgtctgggggctgtcgctttgagtacagatcatatagttatgaatacattttaacgcagatccaaacacatagtataacgtgaggatcctatataaagtgagactcctcaaaaaaaaaaaaaaaaaaagatttttttttttttttagccggacgtggtggcgggcgcctgtagtcccaaccactcgggaggctgaggcaggagaatcgcttgaagccgggaggcggaggcttcagtgagccgaaatcgcgccactgcactccagcccgggcgacagagcgag

SEQ ID NO: 68036 - DNA, 2167 bp, Homo sapiens
tgtgtggggtgtccactcagccacttgttagaggaggtggcatgatctgggcctcagtgccacgaccaacagcgacttccaaggggaacatggaaagaacagaggaaaaaaaccagagttgaggctggggagagttatggtgccagtggtctcacccagcactgagtgcaaagttctccagcaccacttcaggtagaagctcctctggaccttgcctaagaactccgttcgtccgggaggacgcaggcccacctgctctaacatgaacgcgtctgaattcagcggaggacacccaggagcccggttattctcctgccagcgtcctcccctgatgtgtccctgaccccgtgctctgacgtactcagccatgtactcactctcctctcccaggcccccatacctgagatcaccatggcctgatatggggtagactacaagcctaccgtgcctcagccatgtgcagggcgacctgtccctggcatccacacctgtggcccatacgtcgcccgcattgtggggcgccgaaaacccaacacaactgaaacacaactgctgaccttccccctaagccgcctctaaacgaggtccctcggcccctggtcccagccgctctttgaagacttgcctgatgacaggcatgtaccatgtttttggctgggacatttttctgagccttgctccgggctccgtaaagcggacacggtgccagggagagaatttcggggcggttgcgggcacaggcgggcttctgcggaggccctggcgaacgcccccgcgcggcgcggtccgatggccccatggggccgcccctccactgtgaggtcaccggggttcagcaacattcactgcggctaggacgcgtacaggtcactgaggcagaacttcccgattctcgcgccttcgttcgtttctgcggaccagcggagactcctccacaccgcccaccgcccaatgatcccactgccgcaaaccgccccaaagccagcgccgaaagccgacgccggaagccccgccccacgcagggcccgcccgaacgttcccgttcctgggccgccattggccaagtctgaacggccccacgtcgaggctccttatgggaaatgtagttcacgtcccgcttcaggagctagcggcgccctcccttatcgccttggcaacgacccagccgcgccgcgaggagagccgggaatggaggtcgtggcgtgaggggcgccgagcgaggggaggcgcgggccacgggagttccgggagttccggcgttgcccggcagtccgcagtcctcggcgggaaggctgtcccggcgcctcaggcagctctgcgtgggccggggtgacttcctcgcgatcccctgcgcgaggtgaagggcagggacctttgccgcgccttccacgcgccgtgccccaccggcgagtggctccatcttcctcagacttatcgctcgcggacaggcgccgtgggtctcccgggcctccgtaccgtcctccttcccagcggctccgggaagcggttccctgtcttcggacgcatttcacccgcgcggggagagcttcccgggaaggttccacggcggccgagggtttccgcgcccgggacgcgtttcggctgaggccgtgggtccagtccacgggttctgcccgcacggtccaatggccggggaggcggaggtgagcagaggatgcctccgaggaatgagggggcccaccaggtggggggcggcgtgtgccagggcagagttggaggagggcaggagatctgcgtatgattccagggggaggtctttgatgcacggctggggcatgcccttggcagtgggagccattggagatgtgccgcaggactgggacaggatggggtcgtagttgctgtgccaggccctctggagacgcatgtgcagaacggcgtgtggaaggccaggcaattgcctatagggtaaactggggacgttgtgctgggggtgtacagttttaggcattctgttgtccagttttgtgcctgttgagcaggaggcaaactggaccctgggaccaggtacttgagacctaagggagaaggatgagcataggtttggttgcgtctgagaggtatgatctctgggactggaattggcaggcaggagatagagtggagcctgtgcccttggccctgcacatagatggcatcagtctgg

SEQ ID NO: 68037 - DNA, 1086 bp, Homo sapiens
caaatgacaagcgggtagtgtcattacaggctgagaattcttggtgtagaggttgaaaaacggaccttaaacctttacgggacactgacacacagagagatcaaaccctcgcccaggatgcacagtcagtgagatgcaaagctgggaagggaacccggagctccaggcatctgctcctccacctacacctgccctacccggtgcgttttctcctccctgctacctgctggtgttgccttctggaacctccgcagtttctgctttcacacctgcagggtttagtctccagggctgcttaggtgggtgccaggaactgggaatccccaacgcgggacaacctgccgggcgactcaaccagtgccacggagcccttggaaacccgcggcagctgcgctactccatttccaggcgcccagcgcggcggcgcttagccgttgccatggagactggtaatggccccgcctccgcgccgaaaaacaggcaggaaccacataacccagaaggctgtgcgcaagcgtctgcgcgcgtattggggcaatgtgagctctgggggctggacttccggcgttgggactgtcacttggctgctcgcgtcaggccacaccggtggtctgggctgtggcgcgcgggtcggggcccgaggcgggcggccaggaaggtacggaccacgagcagccggccgcgcccccaagcctcggtatcttcgagtatgacgtggtcggcccgggggcggtcgggccccggcgggaaccacgcgttctcccgccccgcggaagcccaggaggcagcgcattgggcattctgcgcccatgactgccgggcaggctgaggcgcggggcagccgcgggaggctgctggcggggatggcggtcccgggtggtccatgcctttcttccctcccagttgcgggttccgctggcggcggtggcgctgacaagcccgcgccgggggggcgggggagtccctgctcacacagactgcgcccccacggagtgaggccgcttcctagacctcgcctagtcgtctttcctctccctgccctgggggggttgcgggggtcagtgcaaactcctgcgtccagggcac

SEQ ID NO: 68038 - DNA, 1305 bp, Homo sapiens
gtctcatacttaagacaaatgtaggcttacgggctgagaattcttggtgtaaaggttgaaaacggaccttaaacctttacgggacattgacacagagaggtcaaacccgcgcccaggacgcacagtcagtgagaggcagagctgggaagggaacccggagctccaggcatcggctcctccacctccacctgcgctacccggtgcattttctcctccgtgctcactgctggtgttgcctcttggaacctcggcagtttctgctttcgcacctgcagggtttagtctccgggactgcttgggaggacacctggaatgccgaaggcaggactacacaccgggcgaatccaccagcgccaccaagcccttgaaaacccgaggccgccgcgcgactccatttcccagcgccccgcgcggcaggggcttggacgttgccaaggagaccggtagtggccccgcctccacgcagggaaacaggcgggaaccacgtgacccggaaggctgtacgcaagcgtccgcggcgcgcactgggccaatgagaaccgaagggctggacttccggcggtgggactgtcacttcgccgcccgcgtcaggccacaccggtggtctgggctggggaccgcgggtcgggtccggtttccagggggttcctggtgctcgaggctggcggcgaggaaggtactggctgagggcccgcgtcgggcccgccctgcgcacgcgtcgtgatcaagggcgccggccgccggccgcgcccccaagcctctgtttctcagagtgcgtcgtgggcgtccaggggactgtcgggccgcggcgggagccatgcgctctcccaccgtgcggcagcccaggaggctgcgcgctgggcgttccacgtccatgatggccggggagactgaggcgcggggcggccccgggacgctgctggcggggaaaggctgggtggtccacgcctttcttccctcccagctgcgggttccgctggcggcggtggcgctgacaagcccgcgtcggggaagcaggggagtccctgctcacacagaccgcgccctcacggagggaggccgcttcctagacctcgcctagtcgtctttcctctccctgccctgggggggttgcgggggtcagtgcaaactcctgcgtccagggcactggtgagctcccgagttcgggcagccagggggctgaggtcccgaaggaggctccgaggggagagtcctgcgtgtgcaaaacctgggaggggagccgaagcccaggtgcttctgggactgagctctctcgatgtggagctggagtagaggggatgtgtg

SEQ ID NO: 68039 - DNA, 1695 bp, Homo sapiens
taacagaggtcaaagatggccctcgcaccctcctggcgggagaaagcccaggctcagggtggtcttctacaccaccgcctctcccgggtccacttggaagcgagtcccagcgaactactcgacctaggaaaccactgggccgccacttccagcctcttcggaagtcgaggcaacgctcctgaacgttgccacgggaacagctggaggcgggcggatatgccctagcgttatctaggggctggcccggggaatggcgtgggggcggcggggccaagcaagcgccacctctgattgggcaaaaccccctcccctcacctgccaatagaaaccggcccactgtacagacgcgcaagtttataacccgggaagagctgctctcagagcggagggagaccatataaccctgggactctgccgtacctcctagaggaacagagcgcctctcaggcgtcagaggctgctgcaaatgcgggtcagcgggtcacggtcgcgcctgtcttgctgatgctcatgggaaatgtagttcaaagggcatgggcggtgccttcggtgcaggcgagagattggtcagcgcggcgtcgccggggcaacacccggctgaggcgccccgcgttgtgcggcgccacatccgggaagcggcctccaagcaaccgctccgggttgaggtgagcgcaggctgccagagtgggcgcagcctttccaccccgtgggagggcttggggtcgccctctggggcctgaacggctcctgctgtcggcgccctggagggcccgcccacttcccgacaggccgcgcgcgtcacctcagccttcgctcaggcctttcctaccctcaacgccgttccggggggccgggcctggcaagtcctcttggaacgcctccctcttgccttccccttttggggacagatcccgaagttcgagcatccctcggataggccgggtgtcaggcctggtctctcaggcccgtccaggtgggcgtctttcactgcagaccttcagggccgggatgctgtggccatccctcgactccgcgcaacgtggagctttggccccgtttttcttggcctttgcttttcgttttcacatgcacgggccccggcagtgtgagtcgcccacggctcgctgtggtcagcgagcacgatgtccacgtgccccctccccagagccattcctaaaggaggtcccacccagtcaacctccccgagattgtggagggcgactcgtccccgtacattacagcctggccccaccttctacccgcccaccctggtccactctcctcgcacctcggctagacactgtggctcctcagcctggcgctggaactctgtgatgactgtctttctccacctctttagcgtcatctcccagcagtcccctgctggacccaactgtttgcaatttccaggaagctccctggacaccttgcgtccaagcatttgtccctgaggcttcctcctgctctcatttgccatcattgtttgggtcctgtgaccctcctccttccatgaagctttcttggccttatctcttctggcctcagagtacacttggtcctggtctcagccccctgggctgagcctggtgtctgccttcccctggccagattctcttggctgacattccgacccttccttttctgtaggcccatcttgacgattccaagaccacccccttgagcaagaatgccatc

SEQ ID NO: 68040 - DNA, 1193 bp, Homo sapiens
cccccgggaaggagaggccccgcctcttgcccccgccccgccccttttggggatcaggaggcccagtcagccccgccccctcgaaaatcgagaagccccgccttcgcgtgagaagtcctgactccaagttccgccctcttacgacaggaaagtcccgcctcttcagcctgactccctctaggatctgaaagcgtccgtggccccgcgccagccccgccccgagaaaccctgcctcggaccggaaggtgtccccgaggcggtcgcggaagtagaggaagccttcgcggtccatggccagtacgtccccggtgttgtagtaaacgtcgcccgattgccgcacgttgcgcaccagcttccgttccgacagctctcgggggccgcggtagcccacgaagggttgctggcttaccaccttggtcagcagcagccccggctcccctggggtaggagcaggaacaagaacccctggagcccaccagccaagccccctgctggaggttttcaacaacggtggactcttcatcacccagcaccctgccaaggacagacccaaagacacagacagggagatccagagatgagagagacattcagagaccttgagagactgcgacaagcgacacagaaaatgagagagaagtatagagaaggcggtatggggagcccatgagaaacaggaaaaggataacaagggatggaagacggacagacaaatggcagtgagaatagatatgaccaggaccttgcaaggccctgggagaagacactaacagaaggtacaggacaagggaccaatggctggaatgccgtcttccacagaaagctcaagagaacaaatcagatggacacccagagacccagtaaatcagagcaagagatcaaggcaggggagctggacagagccgagaagctgaggcggaggccccagatggtggtaaggcaggccactggctcagggtccagatgaaggctgcagacccctctagtgagcaccaacgtcaagcttttgagcagctcgttccagccaagcagaagactgagggtcgccacccctgccacccaggaaaggctcctcaacccccatacctagccctacagggatgcagaagccctgattgtccctcacaggctccgccgcctccatgtcgaactgcaccagctcaaagggggacagcatctggggtggagggtgg

SEQ ID NO: 68041 - DNA, 2679 bp, Homo sapiens
ctgggtaacctatggtgtctttttgccttgacagccccacgccgacacttactcccgtggtcctgtagactggagggatcctcagaagtgggcttaccgagatctaagcagccgaggatcccaacgacaagtcccatcacgtggtacagaggcaggaccgtgtaaaccacatcatcagctgtggccccagataaggacagcatcttgctcatctgcagtacccgctcatgcgtgaggatggctggcttcgggaggccttgggatgaaggcatggcaagggcagggtggtgacatgacagcacagagaggggcctgaccagagggatagatctccaacagccaggcctacattggggtttgaggctctcagagaacagtcaagtatagggatttgtggttgggttcacaggctgaatttggactgaaagtaatatgtcaagatcaaaggtttcagtggctgtttactggacacaggaagaattctggcattgacctctcaaattacattgggggtcagagttcaggccaaatatcaaaatcaagtctgggagcagtggctcacgcctgtaatcccagcattttgagaggctgagttgggcaggtcccctgaggtcaggggttagagaccagcctggctaacttggggaaaccctgtctctaccaaaaatacaaaaattagctgggcatagtggtgtgtgcctgtaatcccagctactcaggaggctgaggcaagagaattgcttgaacccaggaggtggaggttgcagtgagccgagattgcaccactgcagtccagcctaggcgacagagcgagactctgcctcgaaaaaaaaaacagccaaacaaaaaacaaatgtcaaaatcagagggtaaagtggtttcagaggtcaacactgagtcacaagtcaagtgtggggtcaggtcagcctgagagttcagaggctggtgctagggctaatgggcaccctcaccagtggtccccgaggtatagatgaagagggcagggcttctccatgtgatcccagcacgcaggtcagcaggcactgggtgggagggcgctgcatccagggcagcccccagagcccccacccctggtgtaggggaggtatggctgaggtagaagcagcggatgttctcagcctgcagcttgggaaggatctcctccaggctctcccggaggtctgcagagatgggtcagaggagaaacagaggcaaggctcacctttgaggttgcgaggcgggatctgagacccacagatgcaggcagaggagcagctagtagagaaaagcatccatgttgtttggtaaagaatcccatcattagtatttttggtcaaattgtgggaaaattaaactctgatgacctgagaactactttctgctcataagtcttgattataattgcctgtgaaagtaggcaggtggggaccaagggcctctgccagtcccagcagaacccctgtcctatagtccctgcccttgcccccttccattctccactggctccaaggccctcacctgggtccaccaccagcacccgggccccagagctcagcacagagtgcgccaggggcatcccccggccatgcgggttgatccaggctgttgggcagcccagcttggccagccccagccacatacacagggctggaacggcctgggaagccagcacaaggagggcagtaggctccccggcacacaggctcgcagggtcacccagctcagccttcagggcccatgccgcctggcaggcccgggcatccagctcaccaaaggtgactgagccggccccaggccccgtccacaccaagagtgccctgccaggctgcgctcgtgctcgccgctcgaaggcatctacaaaggtgtcaggcggctgccggctcaagcatcccctgatcttcaggcccaggtggaggatcttggccaagaagatcacatcagccggcagccagcgtagtcctgggggcagccgtgctggcaggagggttagtgccagggccgcagctgccaggctcagcccatggggcacccaggggccgagccagggccgtgctaacatggccagcccaagtagcacgcaacatgtgggatcccccaggagccagcgcagggtcaaggccacagcgactggccacactggctgccccaggccccagagcaggagcagcagcagcagcagcaaggccaactgttgcctgacacccatggtaccagctcctccctaggagcagcagctgtggagtgttcaggctcacctctggcccctcaagagtagcccaatggctcctccccaggggtggtggccctggcactgctgacagtggctggtcctctccccaggactttgcccccagcccttctcctctacgtttgtttgctctgcctggtcttgtgtgtgggtccagcccctctctgcctggcgctaaccctttccatcactggcctctgggttcccaggtctctgccccttgggcaccactagcctccttcctgctgtcctgcttgccccatccaccctccagggctggcatctaactcccttgcctcccctcccatccctgctgggtaccagacactcagagcacagaaatccctgcccttgggaacactccaatcaggccaaacagaaaagcaacaggacagcaaggtggacctcattgggaggtcctcctgtgacac

SEQ ID NO: 68042 - DNA, 2046 bp, Homo sapiens
ttatataccctcagtgcaacctggccccaaagatccccctgggctccccacaagtaaggtgctcagccatgtccatcaaggtcggggaggggaagtcttaagtccaaaagacccttagagcctgactggaagatctatgggaggggccttaaaggtcgtggacagcagcaaccaggagtatgatggggctttcacgtggcctccctctcggagacccacctcagatgtggcctgcctatcctactccccacaggactgagggatccaagagaaccaagtgctggttatatatgcagcccaccttagcccctacagaatagaggtcctagatggcaaagtggaccatcctgttcctgcccaggacagcctgtgggccgcatggatgccacccaagaacagggacgctgaaccctgacactcacatcttgtctatgagggcaaggcacgcactgatccaggtgctcacagcttcgtggtttaggccccatggcctacagtcctttattagagcgagagtcccgaggcccagcccccatatatgatgggtccacttgagtctccttaggcgccccatgagggagtaacagcttgggtagagagctagggaccttgcccagcctgaccctggggcaggcaagcggccccccagcccccaccaccaccccaggagagggcggggtgagaaccggagtcaaatcttgggccgggtccaagcgcctgagcgcccggtttacgcaggaaatagtccagttctcagaagtggtctaaccagccccagccccagcccggcaccacctggagggttcaagtacatggaggagaggagtaaggcggacttaggccctggtatggagaaagggtgaagggagagagaggacctgcgctcaggagggagcgtggtctagtggcgggaaccacgggtcccgcagcgggcgtggccgactgtgcgggaggccccggatccaccgtgggcgaggccaggccccagcgccatcagggcgcagggtgcgccgccaggtggcgctccagcagcgcgcggtgcgagaagaccttgccgcaggcggggcagggcgcgcgctcgggccggtgagtgcgcatgtgcacgttgagcgagctcttctgcgtgaagcgcttggcgcagacggcgcactggaaggcgcgcacgccggtgtgcgtgaccatgtgtttgagcaggtagtcgcgtagagagaaggatcgccagcacacggcgcactggtgcggcttctcccctgcggaagacagggcgggccgcgaacgcaagtcagactctacagctccccgcccccaccccaccccacccccacctgggctcctggacctagcaggggctcccctcccctcccgaaccaccaccccgggatcccttgcctatcagagaaccctcccctcactatgggatcttcctgcccagcagggacaccccctcctctccaggacctcccttcacgttgggactttcctgcccaacagggatcctcatacactgtgaggtacccctctcccatcccttcctggcagggaccccctttctgttatcctgggatatcactgtgacagggcacccctaaatccagcaagcaccctgtctgcaaggaacccagcctgtctggaacatctgttggccatctggactgcccactgggatctccctctaccctcaggtaccctccccctcaacccctacccacccggcacagggagacactgggtcctggcccccctcgcctatgcccatagagtcccctaaactcagtctgacaaggccagtgccctttcataaggagggacctgggcacatctgccaccttcctgcaggaagccccagttgcccagaacccctgcccgctggccactataatgtccttggtgtgatagagagagctcctcattctgggttaggggaggggaggcagtctgagtccacccctagattcatcagatgttaacaaaatgcctgtctcagccaggcgtggtggctcacacctgtaatcccagcactttgggaggccaaggcaggcagatcgc

SEQ ID NO: 68043 - DNA, 2247 bp, Homo sapiens
acccagactgcacacacctccagtctaagggaggagggtaggagctctggactctgacatccgtataggctccaccagcctgtctctcccttggagtcacaaagccccagggtgggctcggcttgatgctgcccctacaccctcgggctctactggggtctcaagattcaacccctccgactccttatgcccaatccgccgtccctttgctcagccagacgcctcccttttttgcatgccccacatttgaccctcagaccacttcgagcacctccactgccccgttcccgctgtcctggacggatgaagaaacctggctggtgtctctgcgcccctcgcctccccttctgttccccacacggcagccagagggagcttttccagactacggatccggatacaccaccccgctccctggccctgttctgagccttctgtgcaatgcctcaaaaaagccaggcctgtgcccgcgcaaaggctaactcagcaagcagcaccgccccatctgtattcacctagcacctgaaaggattctaatctgtccggccgatggggacggaaacttgcgcatcaacccgagagacttgaaccttcctttcccgccccgccccgcgacgggctccattcctcagtcccgacgccgcaaggccggcctggacacttcagaacaaaggcctgcactcgagacccggcgcccaggccagcttcccgggtccggcgccgcacactcccgccacgccttcgccgcgccgtgtgctttactccgagcgcgttctcccatactctgctccattgcccgcgccccaccctacgcccaaagcacccctctgacccgccgctgccaccccgcactctggcccccgccgtaccccggtcctgcagcgccccctcgcgttctcagcgtgcgcttctagcggagcgcaggtgcccctcccctggcacgccccagcctcctcgcccgccctgcggcagggggatgcccattcgaccccacctccgactcctcttcaggcaccaggctctgccgtggccgcttcctcctgaccgactacaaggccgcacttccgggccgttaccccggcggaacggaggcctgcggtcgcggcggcgcaggggaaaccctaggccgaagcacgtttccggtatttttatggcgatcagctcccgccagtctgcactccggctctcctcttagtcggaaccaaagtcgaagaggctagggctgccgcgtcgcgaggaatgtctggaccagagcactcttccggcgtcgcccaggagatcaggggtgtggcgggcctgcgcgatcaatccgcaagctccctgtgatgcagaatgggaaggcagttcccggcccaagtgcccaacgtgttctggccagtttaaaccccactgcgaaccggggaagtggccttattcctgtgacacgggtgagagctgaagtaggtctcggtccctggccgccaggaggtgcaagcaagctaccactactgcagacgctccaggcccgcccgctgtgggtgggactggggaaaggaccccatctcggccttggcaccttctactacaacgcagacaggaatagacaactgcctcaccctgctctgggcctcccctgagctagaccctgtgagattctgggacattgcaagtcaatctggtatgggggacagaattccgaaaatggccccctccgagatttccgtgcccaaatccccagaacctgtaaatatgattatctcacctatgaatagttacactacatggtgaaagggtttttgcggaaataattaaggttactcattagctgatcttaaaataggatatgattctggattattttggtaggtccaaggtatcataagggtccttaaaggcagaagaggaaggtggagaaacttgaagtaggagaagggttccagaggctttgaaggtagagaggtccatgagaggaaatgcaacaggacaggtgtcatgctgagaatctgagaagagctgcaacaacagccagcaagaaaacagacctcatggcccggcgcagtggctcatgcctgtaatcccagcactttgggaggccaaggcgggtggatcacgtcaggagatcgagaccatcctgactaacacagtgaaaccccatctctactaaaaatacagaaaattagctgggcgtggtggcaggcgcctgtagtcccagctactcgggagactgaggcaggagactggcatgaacccgggaggcggagcttgaag

SEQ ID NO: 68044 - DNA, 2512 bp, Homo sapiens
cccgggaggcggaggttgcagcgagccgagatcgtgccactgcactccagcctgggcaacagagcaaaactccgtctcaaaacaaacacaaaaacctttctctcctcttttgagatggagtttcactcttttctcccaggctgtagtgcaatggcacgatctcggctcactgcaacctccgcctcccgggttcaagcgattctcctgcctcagcctcccgagtagctgggattacaggcgcctgccaccacgcccggctactttttgtacttttagtagagacggggtttcaccacgttggccaggctgctctcgaactcctgacttaagatccaaccgcctcgacctcccaaagtgctggaattacaggcgtgagccgccgcgcccggccacatttttctccatctgtggtctaggctggcgtgcagtggcacaatcccgcctcactgctgcctcggcctcctgggctaaacggagcttcccgactcgcctaagaaagtggtgggattacaggtatgagccacggcgcccggctgtgatctacatttgattcagtcaagtttctgtgtttctcaagtttaactatagcgtggttaaaatccaaaagtcagcacccgagctcacacaggagcttcctccctcttgggatggagactctcctcccctctccctggacacagcccttcactcggtcttggccccgcctacttctccatcggccctgccccctatcccgaactcttagtgacgcagaggctggagacgactctacggcggcgaagagacgcgggttgaggaagagggacggattgcccatgcgcttgggcgcacagcggcccgcttctgtgtggtctggaggtggagctgagaggggaatcacactctataaaggttcgcataccccactggcggattcaattgcggcagtgacgtcacagaggccccgccccgcccccacaagagccccaccgacgtggggttggcggtggtggaaggactaggagttggcgcgtgcgtactggcggcctctcccgcaccgaccggcctgggccccgcccccgggcgtgaggcgcccaatgcgcgtgcgcggcggcgtcggcgccagttatttctgtcccgccccccggcctcggctctttctgcgagcgggcgcgcgggcgagcggttgtgcttgtgcttgtggcgcgtggtgcgggtttcggcggcggctgaggaagaagcgcgggcggcgccttcgggaggcgagcaggcagcagttggccgtgccgtagcagcgtcccgcgcgcggcgggcagcggcccaggaggcgcgtggcggcgctcggcctcgcggcggcggcggcggcagcggcccagcagttggcggcgagcgcgtctgcgcctgcgcggcgggccccgcgcccctcctccccccctgggcgcccccggcggcgtgtgaatggcggcctccgcggcggcagcctcggcagcagcggcctcggccgcctctggcagcccgggcccgggcgagggctccgctggcggcgaaaagcgctccaccgccccttcggccgcagcctcggcctctgcctcagccgcggcgtcgtcgcccgcggggggcggcgccgaggcgctggagctgctggagcactgcggcgtgtgcagagagcgcctgcgacccgagagggagccccgcctgctgccctgtttgcactcggcctgtagtgcctgcttagggcccgcggcccccgccgccgccaacagctcgggggacggcggggcggcgggcgacggcaccggtaagtacgaagtgatcggtgccacccctccccctactctctgcctttgattccgactgggtgcagagatgaggatgccacctgggcgagaggatgggggcccggacagggcacgggaaatactttctgggtcctgcatacgaacgtgggtttgtgctggccgctgagatgggacatctgactaaagttggagaaaagaaggctcggggaggggaggggctggttcgctgcgggataatggtcgggggcccacccagcaggggaatggtgggggccataacctgggtgggaacttgtaacagtctcccacatccctgcttctcgaagtggtggactgtcccgtgtgcaagcaacagtgcttctccaaagacatcgtggagaattatttcatgcgtgatagtggcagcaaggctgccaccgacgcccaggatgcgaaccaggtgcgtcctatctcagcaaccacaaggaggtttctggggagggggcatctgcgcaggaggagcttggcaccagctccaggctgttactccactttcccaaggctctgggtgggctgcctaggttgggtcaagggaccaatcttaaatctccggttgtattttctgggatgtaaacgtggatctatcaagttgtcttgccttctctgaccctgcctttgtctggcagtgctgcactagctgtgaggataatgccccagccaccagctactgtgtggagtgctcggagcctctgtgt
